United States Patent Application Publication US 2015/0315605 A1 - sequence listing, part 29

SEQ ID NO: 44134 - DNA, 618 bp, Zea Mays
aagagctagattttattgaattttaaatgatagtgtcatggatcgatggactagtaacaggactaatagcctatttggttggaggcctagttatgaggacatggcacctaatcgtacatctatagggatcatgacgcctatgtggggtgcaaacagatggttgatatatatgctcttgtatgtcgattgatggtcagtgattatcaagaggtgatcaagccttggttgagtttgaagagtaaccttagcatgagtgtggtgtttttttggaacatgtctcttagcttgtggtacacatgtgtggagcataaagacagtagatggtaatagagaaggtcaaacagggtcatgtcatgctgatggaccaagagcggtgaaggatagaccagagacttggaacgaggaaccaagggtccaaagagtggctaggtggctgaaacttacgtgcatcaacaagcaagtgtacatgtggaggagtagaccacgtggactaagtcaagatagtggtcgactaagtcaagcgagggcacaaaggcttggtgatcaggcagtcgagaacatatgtagactcgcgttgagattgtgaaggacgcgtagcaaatacatatatctagttgg

SEQ ID NO: 44135 - DNA, 1091 bp, Zea Mays
cgtcttccttgcctcaacgtcgccaccaaatccaaccgcctggacgccaccgccccgccccaccttggcgccgccgctccatccaactgcctggacgccaccgccctgccccaccttggcgccactgctccatccaactgcctcgacgggtgtctgctcctcactacctggccgtgttcaagatgccccctggaaggatggatggggcaaggacacgcaaagaccttggtgaggtgccaattactgagtatgaaaaggagagggctttaaatgtgatgaggaacaacaaaatgttgagtagtcttggtataactggattaacatcacttattcgatcaagtagtacaaggaagaactctatcgctcgtgaagactttgatccattgtatgaacctgatcatagtgaggacaatgatcatcatgtggctgttcaggccatgcaggatgaacctttctgcattgaaagaaggaccaccaacatgtctactggttttggaggaacaaaaggatccaagagagtggtagcacctaatgtagaagaccaagttggtagagtaactaggcagaagacaaaggaactatccttagttgagaaagatatacatggttcgactgcaaatacagatgagcacacattgatttctgccaatttttctgcacaccatgatgacgagattcagatgtgtgatgaagggaatagacgtcctgaggttcctatgcaagctgcaatgcttgcatcagaaggaggaattgtaattaggcaacatatgccgatcctaacacactggaaggagtacaagaatgacaaatcctatttggaagacttcgtcggtagaattggtggtcaatttgccatagacaccaaaaacaaagatgtcaaatatgcatgtgctgatttgatgaggtgtaatcagcgacaaatgagatataagctcaagaaggcttactttaatggtgtggcagctgacaaagtgagaacaacatcaccgttgagtactatgacagatgagcaatggatgcaactcgtcaatatgtggtctaccccaaagcacaagggtatagaattactagttgcaatttgtgttttctag

SEQ ID NO: 44136 - DNA, 607 bp, Zea Mays
catataaaacacttcaagtaactatgtgaaaagatattctgtatgactcgtggtcaccagcgatgaccgtgagctctgtctgtatcagtatcctgtctatgttgtctagttcgccagcaaagcaacgcccggcggacaatgaccgctatgttaggaactgccgcaacgggaggtcgccaaaggagactagatggtggttccatgacgacacggtgtaatgatctctgtggcattgcctgtcagccttctgtactgtgatatatctcttcaagggggagatgagatgatttaggcctatttctaagcagccctctattggattgcgaagcttaccttgctgtggtggtatgtaaatgagttgctcacgtgtcagtctgggaatatgtgttatcaccatcaatgatataatatagaataaagcaagattgtaccctgcctaagtcactgaaacgagctcaaaagtaatgtgcaggtttgactatgatttgttgtggtcaatgtgccttcgtatcagtctgcagtctgcttatgcatttgcctatttgttcattgtagtgctgtactgctgctactgtgatagttccaactagtcacaaattatctgtgt

SEQ ID NO: 44137 - DNA, 3727 bp, Zea Mays
atgagctcagatagagtcaatgcatatggtggttcaagacgagacgtatatggtttcattccaatgcagaagctgaggcgcaataacagtacctggagatttggtaacatacttatagtcttagctatgaatatggattccacagctcttcaatatgaaaaccaaaaattggtgcaacaactggaggtacagaagtccgaaatgcatgcattggagcgcaagttcaaggagcttagtgatgatcaatgttcttatgacaagactctgatttctttgaataaactgtggaatcagctgattgatgatttggttctgcttggagtacgggctggtggggatttggataatttgcaagcacttgaccatgaagagttatcagaagaatctttggagtcgtgtccttccgaggagatatttctcttaaggctcttgaagacaaacaacatcagagataatagtgacactagcttgttgaaatttgttgaagaagctcttgcttttcggtcttcagcaactgttactttgatgaagtccctgcaagagactatttcttcgcagcaagctagaagtgagtctttgtctttagctttgaatggacaaaagtcaaatgaagatgttattgttgcccttcgaaatcataatgattgcttgaaagaggtggcagagaatgcgagtcaagccatctctattatcaacgagaagcacaaaaggtatcttgatgagattgaggcttttaaaagcaaccattcaagggagctacaggaaatcaagcgtatttcaggtgagctagaggaaagcattgcagagcttgaggaaagtcaaaggaagttggttgtgctccagttgcagaggcatggttctgtaatggatgcatctggggcaaatgctgtgaatggtggtatttctactcataaatcttcagataaaagtatgagctggcaagacctcaaagatgctgttgacgcagctaagaccctcgcaggaaaccgtctattagaactccatcagactcaagaggataatctgatactatccaaggagctgggagatcttgaggggcaattgaaagatgagaagtatgtcttggtatccaaaccgtacatgattcttaatgataaactacaacatttgaatgctgagatagagcgttatagagggttggttgaagttttacagaatgacaaggaccagctcatgcaaagggagaaagaaatttctgcaaaagcagaatcgctcgacagtgttaaacaaaccattatcacatatgagaaaaaaattgaagaactggaaactcaaattcagatactcttttctgaaaagaatgatctcgaaaccaaggttgaggagactttgcaagattcaggtaagaaagacttcaagaatgagattcatgttatggctgcagcactctccaatgaactgggtatgatggagaatcagttgagtcgatcaaaggatgcagcttctgaagcacttgcattgcgtgagcaagctgaatcattaagatcattggtagctaaaaagattgaggaacacaagaagatttcggataaatacaactcacaagtaattgagatcaagtccctcaaggcattgttccactctgcccaaaaggttccagagttgcagataccttggcgtcgcggcactatccagatcacggcgtcgtgaccgccgtatcctctgctcgtatggcgtcgccacagcagggaaggcgtcgccatggcgttggaggttggcaaggcgggcgctgcgtctctacgcgcgcggaagacgagtgggggagcagcgcgcgggaagcgggaaatatgtcattgactgcgcgggaaatgagttagcgagcgcgcgacgagcagcatcgcgcagcagcaccttggaattcggcgttggccgcgccgctgcctccatccagctgctcctccgcctccatccggtggtccggcctgcatctctgagatccacccgccgacctgcatctccgagctccggcctgcgcttcttcctcccccgtgcgtcttcctctgcccgcccgcctgtaattcttcctccccttgcgtttgcgcttcttcctcccctgcgcttcttcctttgctcgcctgcctgtgcttcttcctccccctgcagttgcgcttccacctccctccacgccagctatgcgcctctgcctttgttgcatgtggtagtcgcaactcgccagtgctctttacaactacaagtcaggttgaggagttggagcaggaaaagcaggagctggagtttattgcagatatgacaattgctgatattgaagaatcagaaacccgagctcgcaatcaggctgaatatttgaggagcaatctagaggagcatagtcttgagcttcgggttaaagcagcaaatgaagctgaagctgcatgccagcaaaggctttcctttgctgaagtggaactagaagagttaaggaccaaagtagatgcatctgaaagagatgttgtggaacttaaggaggcaataagaattaaagaggctgaaggagacgcctatatttctgatatcgagacagttggtcaagcatatgaagacatgcaaacgcaaaatcagcatcttcttcaacagcttactgatagagatgactttaacataaagctagtatcagatagtgtgaagatgaaacaagcttgtagttcccttctctctgacaagcttatgctagagaagcaactccagcaagttaacacttcactggagtcatctaaactgaaaattgcccgtggcgaagagcagatgaagacttgtgtagcgcaagctataaaaacttcagctgaaaacagacatcttactattagcctggaaaggattgcgctggagttatccaacacagataaggaactcaagtggcttcggtcctccgttggatcctctgagaaagaatacgagcaaactcagcaaaagatatctgagctgagagcgttactggagcacgagaggagtgagaggcggcggcttgaagaacaatatgaagaggtgaaaaatgaagttatggagctgacctctgagactgaagagactactgtccggaaacttgaggatgaaataaaagaatgcaagggtattctcaagtgtggtgtatgctttgaccggcctaaagaggttgtgatcaccaaatgtttccacctattctgctcgctatgcatccagagaaacctcgagattcgccaccgaaaatgtcctggctgtggaaccccattcggacaaaacgacgttagggaggtgaagatatgaacctcaccaaagtgacagtgacaaaaccgacttgcgtgtgaacagcagcaacaaactcccttgtgaatatcgtctgttatgttggcgaacatctagatctaacttgctttattactgggattaaaattaggataagaactggaagaagtgaagttcctaatttatttgctatcgtgtgtgctatgtatgattacccttggcagcgagtggtgtatctgctgggtgtcaatatgctcgaattctagctcctccctgctagcgggtgcatgccagttttattaaggctattccatgtacatggtgtcacactctttaatacataccacataggatgaaaatctgatgtgacatgtgattgaaacatagggagacaccactcatgcaccagattatagacattgaaatctgaaccatctaaatgaactgtaactcatactcttatatatatctaacattttgtcttgtg

SEQ ID NO: 44138 - DNA, 1321 bp, Zea Mays
gcatttacgcgtgctgtctctctctctctccctctcgtagtcgtgcggccaccgggtgactgccggcgccgccctaagccaggtgccgtcttcgttgggtccctcggttgcgacgagcacccaccagtaatgctgttggcaagctcaacaagacgctatgagcaatttcctttagcacgaaacaatggacttccaagattttcaagagtaaaaatgtcatgcttgggaacaaaccaaagtaaccatcattctgataccgtcagatcttcatcccctagttgtggagataccagaaagatccaccctgtagtcaaaatgtgtggcatcacatcagctagagatgcagaaatggctgtaaaagcaggagctgagcttataggcatgatactatggcccaactctaaacgctctgtctcgttattggaggcaaaagaaatatcaagagttgcgcaatcttatggcgctgaatcagttggtgtctttgtggatgataatgaagagagaattctacgggtgtctgattcatgtgaccttaactttcttcatggtgatgaatctcgtgcattggttcatactctttcaaagaataatcgtatcatttatgtactaaatgctgatgacgatggaaaactaatcaacattcctgatattgaatacgaacttgattggtacttagtggacagtgcaaagggcggaagtggaaagggattcaactggcagaagttccagatgccatctgtcaaaagcaagaatggatggctattagctggagggcttcatgcagataatgtttgtgaagccttttctgctctgaaaccagatggtgttgatgttagcagcggcatatgtggtcgagatggtatccgaaaagatgcagacaggattaattccttcataagtaatgtgaaatccctaaatttcctatcgtaaggtcatttgcttgtcgagagcttagtttttttttcatttgctcacgtgtggaatccctgaattgctgcaacctgaaggcaagctgtcaaaattgctcttggggctgagggcaaaagagtgattgaatttttgaagtgtgaacatatgtatccggtttattgtggagtgtggcaaactcgttactgcaacctgatggcaagatgttcaaattgcgcttgagaatagggattacatttttgaatgtgagtattgtgtttgtttctagtgcaataagtgtgttttgtatgcatatccagttcaaatgcaaaaataaaaacacattgtaccgttgacaaaattgctgcagtaaaagctggagaatttttattatttgtaacttgatcaaattcgc

SEQ ID NO: 44139 - DNA, 1355 bp, Zea Mays
gaactccgtcataaacgagaacccagccgctgagtagacttgtgttttcgcttccccttccccatcccctctcctcccctcgccggcttgtcggtctcgccgcgccactggccatacatccaagacgctaatccgtgtgggggaaaagcccccctctctctgaaactattcaaatggcgtggggcgtatccccgcggcggcagccgtcgttcccggtgcaggccctctacgagctctgcaagcgctccttcccctccccttccgccgcctcatcgtctcccccgcccgctgatgtcgtccgcagcatctcctcgctcatgatacaatcactcctgcggatgttgggctcagagattataatcttgaggacgacagggggcatggattttttgactccaacctcctcaagggttcaggaaggcttcctcggtgggcgcggcccatcaagtaccttcatatctacagctgtgatgcattctctattggaatattctgcttgccaacttcatcagtcattcctcttcatgatcatccaggaatgactgtactgagcaaaatcctttatggttccatgcatgtgaaatcatatgattggatagagcctactgtcctagcaagtagccagccagcaaggttggccaaattacatacagatgatgttcgtactgctccatgtccaacctccattttgtatccccaaagtggtgggaacctgcactgcttcacttcagtatcttcttgtgctgttcttgatgtccttgccccaccatataacgatgacgctggtcggatttgcacttattttcatgactatccattttcaagtctctcagctggacgcacgaaggtagctggtaacccagataattatgcatggctggaggccataaacactccagtgaatatcaacatgcacactggcatgtataccggtccaactgtacaggaacttcagacatgatgtaaagatgaaccggagcatcaagcagcagctgggtgcctcttcactgatagtagagctctaatatagtgatgtatgttctatactttgaggttagcttttcccctctggccccctttgttggagaaactgttgtacttcagttaagagataagttttcagagtaatttctcctaatcagtttagtagaggtttcaggttcactaacctgagcagtgatcaggcttttagcttatttatttatgttgtgcaacgctggaatggttttgaatgcaaaattgtcactgatgttgccgcattgccgtcttaactcgcgggggctggctgcatgccgatatcggtgtttgaacggaaagaggactcacaacaagaaatgaatgaacgatgttccatt

SEQ ID NO: 44140 - DNA, 2160 bp, Zea Mays
gttatttctaactattaagtgttaattatctaatgtatttaatgaagtaacacagttagacttgcctaaagaggccagtgaagcttcactggctgcatagagaagtacttttttattatcatgtaaatgcatggttctttggaaccatttggcctatctgattaattattactataaccgggaatgggggcccgaggctataacccggactcctcgccctcgtacctcgttgctggcgaagagcgtcatcaatggcgagtggaggttcactacacagccgccggatcttggagcatcattcgcggtcttggcgcgtctacgcaactgtatcctaagggcgtcgaagaggagagacggtacgccggtggcgacaagatgttgtttgtttattgttattatcttatcggaagtgccgtcaaggaagatgacgatggtggtagggatcgacgatagcgagcacaacttctacacgctgaagtgggcgcactgcagcacttcttcccgccgaccaagctgcaacactactgccttgttgtcgtcaccgccaagccctctgtcgcctccattgttcgccctgccaacctagtgcaggcaccgcgaatgtgttgtcgtatgtggggagcagacagtcaacttgcatctaggtctaaataaaatagtagtgattaaatctttgaatctgtagatcaaaccatctcaagtaattttagttttgttatgaaaatttttagctcagatgaaataattgcattttgattattaagatttaacatacatctggttctatgaggaaggaaatcataagtggagattgaagttgatcaacttgacactcgaataaaagaatcaacaaatattgcaagtgctgaaagttgtgactgctcaagtccaattgctttatcacacaagttctggtggagatacttattctagaatcttcaaaagcatcaacgttagtgttcaagggactgattctggactttcaacttaatgcttctctacctgttgtcatactgaagctactgctcctggaagagcatcaccaacatatccctgatggccctctctgcttcatgctccaagcacttggatgttcaccttgaaatataattattaatagggactgtccaaatacttcagctaagcaaaatagcgacctccataaaaaagcaacctgtaactatctctgaaaattttgaaaaaaactgatggtaactgataagctgctgctagcaactaccgtcgcctatttgttttgtttcagaaagttaaggtgcatgaacctctgatatagcatttgacacactgtactttacacatcacccaggaggaactcttgtgtgggtgtgggtgtgggcagggctagaaggaagaaccatgcatgctactacattcatataatctttttcagaggtttaagatatcaacactaatctgactttgattgtctgaaagaatttatcatgctgctgcttactgttttcggtagggggtcaatgcttactttagctgtgcaataattcctcaatattaaaccgagtttgatcaagtaccttgaagctacaagtagcagtgatttgacaggtttactactgcctgaaacatgattgtaagtgttcttagtatatagctcttctccatttcctctccaactgtcacatgtgctcatacgcttttgccttagtttattacatgtccagaacaccaacataaagaaaacctgccctcgattagcattattcagtagagagagttgtggagaaataaagttaatttgtttgttggcgcaactaattagaccacgttttcattaacaataatactaacatgtttttgttgtagggagggcacattgtggcggctacgagagaccgattttcctgtgtggtggtgacaacgacaccgtggagccaagtcaatgtcggcaagctgatttttcagattggaacctatggttctttttaaagatcgaatatgttctagcatctttaaaagatttgtcagaatgtaaacatttgttttgaggtcatttaagcctcaaacaaaatttcttggacttatttcgttggagggaacgagacatctcgagatctaaatgtgtatagaacatatattttttatgggtatcaaatataattgtgtgtaaagcacgtacatagt

SEQ ID NO: 44141 - DNA, 4415 bp, Zea Mays
ggcctctcctactgttgtgactggtgccacctctcctttcccttcttcctccgtgccccaatccctcttctcccctcgaccagccgagagagcgcccctaccgcagcagctgcagtgctgctctgctctgctctgttctgcccccacttcaccctctcgtctcaccccgcctgcagcttggtcgcttttctccccagtctcctcccctccaccctctcgtctcgtcgcacctcacctgcttggtcgcttttctcccccaatctcctcgtctcccgccggcaccaataccatcctctgtccgctcgctgttgctgttgctattcccgtccgtcccgtgcttctactcgctagtcgtttcgtattcgtatcctctctcctcagccgccctgctcccctcccgtcctctggtgtctggtcaaaccagcggctcccaagatttgccgctgcttccttcctggagaaatcaagcctgtgcggcgagaaatcaagaggaagggggaagagagggagaaagagagaggggcgggggtggaggaaagaaagcctgccccttgcggacgtgcctgctccctcgggggcattcaattggagccaacagtgggcgggtgggcggctgctacagcacggcggcctccataaattagctccccgcgttccggccccttccgccccctgtcgtcgcacccgccccgtgtctcccccgatcggtccgtcgatcacgcggacgcccgccggagcatgcgcgccgcgggcctcggccgccggagaagcagcatcagccgccgcgccgccgccggcgtccggaaggagatgtagcgctagctccccgacccgcgaggaaagggaaaggggaatgaccgttacggcgcgcgggaggagcggtggagccgggatgggggagaagggcggcgctcccgggctcggcttcctgagcctcgatcggatgcgcgtcctcctgccgccgctccgcctgccggagaagctgtcggccaggacgctgcggacgcacctcttcactaactaccggatgcgcaaggtgcgggacagctccagctggctcatcccgctctgggtcagctcttgggtcctcgtcgcctccctcatctacctttgcatgagctaccaggccgtcggcaagcgccgggagtctctcgccagcatgtgcgacgagcgcgcgcgcatgctccaggaccaatttaacgtcagcatgaaccacctccaggcgctcgccatcctcgtctccaccttccaccactccaagacaccctccgccatcgaccagaaaacgttcgcgaggtatgcggagaggacggcgttcgagcggccgctgacgagcggggtcgcgtacggggtgcgggtcacgcacgccgagcgggagcagtttgagcgccagcagggatggagcatcaagaagatgtactcctccaagaccaagaatcagtcgcagggacccgggaacgccgaggacgccgaggtgcgggagccggcggaggagtatgctcccgtaatcttcgcgcaggacgcctacaagcacgtcatctccttcgacttgctatccggcgccgatgaccgggacaacgtactccgagctagagaatctgggaagggtgttcttactgctcctttcaagctgctcaataatcgccttggagtgatcttcacctatgctgtgtacaagtatgagcttcctgcaaatgccaggccacaggagcgcattcaggctgctataggttgcttcaccagctcgcgggcaagcaatccatcatggtgaacgtttacgatactactaatgagagaccaatcagtatgtatggttcgaatgatacaggcagtggcatgtgccaggtcagcacactgaacttcggtgacccttcaaggaagcatgtgatgcactgcaggttcattcagagcccaccttggccttggatggcaataacgacatcaattggaactctagtgattgctttactgattggatacatagttcatgctaccgcaaaacggattgccagagttgaagatgactttcaggagatgagtttgctcaagaagcgcgcagaggatgcagatattgccaagtcacagttcttggctactgtttctcatgagatcagaactccaatgaatggtgtcctagggatgctccaaatgctcatggatactgatttggacacaacacaacaagactatgttagaaccgcacaagccagtggcaaaactctggtatccctcatcaatgaggttcttgatcaggcaaagatcgagtctggtaaacttgagcttgaggtggtaccctttgatcttagaacagtttgtgatgacattttgtctctcttctgtgggaaagcacaggagaaaggactggagttggcagtgtttgtttctgatcaagttccacaaacactaattggcgatcctggaagaataaggcaaatcattacaaatcttgttggaaactctataaaattcacagagaagggtcatatctacttgacggttcatgtcgttgaagagattatgcattgtctggaggttgagacgggaactcagtatacaaataccttaagtggctacccagtggcgaacaggaagcgcagttgggaaaactttcgactttttagtagggaactgaactcatccgagatgccttttgcacccattgcatcagactcaataagcttgatgatatcagttgaagatacgggtgctggaatcccgttcgatgctcaatcccgtgtcttcacccctttcatgcaagtaggtccatccatcgctcgcatacacgggggcactggcattggattaagcatcagcaaatgcttggttggcctcatgaagggagagatcggattttcaagtaaaccccaagttggttctactttcaccttcactgcagtgcttacgagggtccattccagcagaaatgagaataaatcatcagaatttaaagagatcaatgcattggtggtagatcatagaccggtccgtgccaaggttactaagtatcatttgcaaagactgggagttcagactgaattgacaactgacctagatcagtatatttctaaaaataattgtggatcacagattgcaaagcttgtgctcattgacaaagaaacctggctgaaagaatcccactccatgcctcttttggttactaaattgaggaacaaagatcagccagactctacaaagttatttcttttggagaaccctaaaagttctgtcaagagcaattcacatatattcagggaatataacttgaatgtaattatgaagccacttcgtgcaagcatgcttcaggtttcgctacaaagagcattgggtgggatagataaactgcattgcaggaatggagtagtcggcaattcaacactgggcagccttcttcacaagaagcgaatcatagtggttgatgataatattgtaaatctcaaggttgctgcaggcgctctaaagaaatatggcgcggaagtaacttgtgctgacagtgggaaggaagcaatcacactgctgaaacctcctcacaattttgatgcttgtttcatggacatacagatgcctgaaatggatggatttgaagccacaaaaaggattagagtgatggaaagagatctaaatgagcaaatagaacgtggagaagccccaccagaatgcgtaggggttcggcagtggcgaactccaatattagccatgacagcagatgttatccaggcgacacatgaacaatgcttgaaatctgaaatggacggttatgtttccaagccattcgagggcgagcaattgtacagagaagtagctcgctttttcctaaatcaagaccaagttcagtaggtaggcttatatggagtgtaaaatagtggaggatatcagggttcacccatcgaggctgaaagaattttgtcagagatcccatgttcttgagagtggaaaacactttaggctggagatggaaccacctatgttcggttccttggtacatctgaccaagctgcaaaactaaatgtgcaatgtcttgaaatcaaggtgcatgtggagctatttactcgacaatctgaggtcaaggcgtgtgaaaaaaaagcccagctgcattcactaaccgcagatgtcctctgccactacaatatagagtagggagagaaattttccttccccagaaggtaccggctgtacatattaggtattggttgtttgtgcaggcatttgttggcattttgttgtgcatcgtcttcggtctgtattgtttgggtcgaagctgtaaaatgtaaatggcgttttcaaagatggaagttttgtttgacaaatacatcggtcgtcatcagcttgtcttcctgagtttctctcctgctactggttctctcccaaccagccaatcactatactgaaggctgcctgttggtgtggctttatctgat

SEQ ID NO: 44142 - DNA, 2886 bp, Zea Mays
gcagctccacaacaattcgtgcctgcctgccctgcctctcggacacctccctcgtcctccccctcctacgccgcccccgtcctcggcccccacgcgctcgcgcggcgcacgaggcgacgaacccgacctcctcctccgcgcccgtccctgccaccggtcgccgatattggaaggagctcggagggctggggcgctgacctgagttttatggagagaggatgccagagctgcgaagcagtactcgccaagcatgcctaaggtcgaagaagcttgaagatctgcagctaggagagccgcctgcgaaaccggtctcacctgctccgccgagggcaggaaagcgtgctcctacacgtgctgctaggggcagaaagggtgccactgggaaaggagtgccccctgcacctacgactagaagaaagcggggtaatattgtcgacttggaagctgatccagcttgtgaagacccccctaaagctgtcaagggactggaagttgctgctgctgctgcacccaagaaccttcctttgaaggaggtagccgaggttggtgttctgaaaatgaatggtgtgagtgcagagaagattattggggctgaagatgaatcaacagcgacacctgtgccagagagggtctatgttggtcgaagggtttctggtggagctgcccgcactggtcctgatgcatatgaggtcgcattgaaattagagcatcgaaacagtaaaggatgcaattatggccctccatatgagtggcaggtttataacactctcaatggttgctatggcataccatcggtccactacaagggtcgtcagggcgactactatatacttgtaatggatatgcttggtcccagcctttgggacgtgtggaattcaatggggcaggcgatgactccaaatatggctgcttgcattgctgtagagagcatatcgattcttgagaagctccattctaaagggtttgtgcatggtgatgtgaaaccagagaattttctgcttggtcagcctggatcgcctgacgataagaaactttaccttatagatctcggtttagcatccaagtggaaagagaataatggtcatcatgttgattatgatcaacggcctgatatctttaggggaacaattagatatgcgagtgtccatgctcatttggggcgcactggtagtaggagggatgatttagagtcactggcatacacccttattttcctgattagaggaagattgccttggcaaggctaccagggagataccaagagtttccttgtttgcaagaagaaaatggctacttctccagagatgctttgttgtttctgtccagctccattcaaacagtttcttgagattgtcacaaatatgaaatttgatgaagagccaaattatgccaagcttatctctatttttgatggtttgattgaagcacctgcgtcgagaccagtcagaattgatggggccctcaaggttggacagaaacgtggaagattgcatgcaaatctagaagatgaacaacctaaaaagaaggttagattagggagcccagcggctcaatggatttcagtttataatgctaggcgacccatgaagcagaggtaccattacaatgtggctgactcaaggctaagtcaacatatagaaaagggtaatgatgacgggctttacgttagttgtgtggcttcctcggcaaacctttgggcactcatcatggacgctggaactggtttctgttctcaagtttacgagctctcaccagtttttctccacaaggactggataatggagcagtgggagaaaagttactacataacagcaattgctggatcaaccaatgggagttcattggttgtcatgtccaaaggtctgaattttacttttcttattattgctcacacgtgcatattgaccctccattttctcaccattttcccagtagcagtacaaaatcctaatgtttctcttgtatgtcctatgcaatttccattttaagccccgtttgcatcgctcattaattatcatggtctgctatgatataatttggggtaatatattttcactactgcaggaactccttacacacagcaatcatacaaggttagcgaatcgttcccttacaagtggatcaataaaaagtggaaagaagggttccatgtaacatctatggccactgctggaaatcgctggggcgtagttatgtcaaggaactcagggttttctactcaggttgtagagttggacttcctgtaccctagcgaaggcattcatcggcgatgggagagtggttacaggataacttccacagcggccaccaatgaccaagctgctttcatcttgagcatgccaaagcggaagccgatggacgagacgcaagaaaccctccggacctctgcctttcccagttcacatgtcaaggagaaatgggcgaagaatctctacatagcctcgatctgctacggacgaacagtgtgctgatagtcgaagagaggggcggccgcgctgactcaatacggtggcttgcgtcaagagattagagatgtgagatgaacattaaatcaaaaccagttctaatgatgataggatcagtagatctgatgatacggtatggtatcctaccgtagctgtaaagaaatgttgtacccagtgccggccgcgagaccgttactgccatgaagtgaagctaatgcattttggagtctcttcccgggaaaatggaacacaatataatgctcatgtgcaaatcatataggtttaatttcttgcgcactagagtttgcacgtcaaaaaaaatcataatctgaaaaataggccttcatatatatatatacatatatatctatctatatatatatattatatagctaaaataacacaccagtttgaagcaaag

SEQ ID NO: 44143 - DNA, 642 bp, Zea Mays
aaaacagccacaccatttgttgtggcacaagataggcaattgatgatgattgcaaccaaactggacaaatgttagctggattgctcaagtggccacaaggaacctttgcctccaagaaaaacaaaaagctactgttgagcgagaagttgatggtggaattgaaaccatctgccttgatctgccagcagtgatcaccacggatttaagacttaaccagccaagatatgcaactttgcccaacataatgaaggcaaaatccaaagttattaagaaagtcgccgctgaagaccttggcgtagatattagatcagacatggaggtgattgaggtcaatgaaccaccaaaacgaaaagcaggggtgattctttcatgtgtcgacgagctccttgacaagttgaaaaatgaagcacgtgtcctttaaccatttgtatattattcctcgctgaatatggtctgacgttcatttatttaagttctctctccaaatgttcagacttcagaccatttacaaataaaataagtgttaacatgaaccaattaagatactacccctgaaacatttacctgctgaattccttccaaatagctgtttacttgattgtgtacaggctaagctatctcttttctgaaatttggaggaat

SEQ ID NO: 44144 - DNA, 1237 bp, Zea Mays
cttttagttgttaaaagaagacatcatgctttattggggtgcactttatggctctataagtaaactattgctcatatgttgtagcaagtagcagcatgtctttcgtattatatgcgggggtggctaaggaggttatcggtaccatcttaaaattggcgaggcaggttcatatccaaacaagaagccacgatggaatctggatttcccctctatctgatggaatctggatttggtgccagtctgttttcctgtgattttgggataccagccccattccccttcatggagggtatgcgttgctgttggtcggcacactggaatggaacagatatagacagaaccttcaggtaagttcctcgacattacttatataattactaagggattcattttaacactataaatggatagtagaccttgatatctgtcaagtgctaaatgattttatgtcaataaagtaccatcagtttattaaatcacttatgaaaaacatgcatatataacaattcattagtaggtaaaattatttcattagtagccgaccatttcatatattgttgaaagcccgtgtgttagctcgtatcgtgtgtttattaggagttcgctattatcatttcttacagctaaagagcttcactgttaggacaggtttggtcgccaacgaaagcactactccacctcttttacactttccaactattctagtcaataccatgctaattaaagttcagcaaaataaaggaaataatattgcataattgctttgcgaccggacctatataatatcttgtgtagtcctatgatcctatcctcttcaatttacacttctgctttgaatggtcttcaggttcataagcaaggagttgcgcttgaccgatctatggatctctctagatgcactgactaaggtgaattgaaagcggaactagacatgatgtttgaattcgagggtgaattagtatctgcaaaccaaaactggcagattgtttataccgacaacgagggtgatatgatgcttgtgggagatgacccgtgggagaatttgatgtggttgtgtatgatgtactttatattttggcatactatgcacaaaaacaaatgccttctatgaccatcgtgatttatacattttcaaacaaaattttatgatacttcttattgtgttttacgctttcactaaaaagcaagtgtcacattcgccgttacaaaacagatcgataatttacgtaaattttgt

SEQ ID NO: 44145 - DNA, 2450 bp, Zea Mays
atttcctgttcctccgcctcgtctccgcctcccatcgccgcatcagatatccgcacaaaccaagccatcagcgccatggcgatctccacctggagcgcgcgccttctcctcacccctgcttcctcccgcgccaccctatcaccccctcgccctcccactacaaacccgctctcatcgttctttcctcgcaatcgtctccatttcgtgcgcccgcgcccgcgcccgccgtgcgcctacatctctgcgccagcgccgggcccggaggccgcatacgcgccgccttctctcgacgccaccgccgcggcagccgatgtcgccgctgcgatatcctcctccgacgcggtcacttgggccggcgtctgggcgctgctctcgcgacacagggcccgcatcgcggtctgcatcgccgcgctcgtcgcctgcaccacctgcacgctctccatgccgctcttctcagggaggtttttcgagaccctgattgggagggggaacgagccattgtggaggctcttatccaagattgcgatactgtacacactggagcccatcttcaccatcatattcgtgatcaatataactatcatctgggagcaggttatggcaaggctgcggagccagatatttcgaaggattctgatccaaaagatgttattttttgatcgtcacaaggttggtgaattgaccggtttgttgacatctgatttgggttccttgaagagtgttgtaagtgataacatatccagagatcgtggactgagggcactctctgagatcattggtacactttgtatacttttcacactatcaactgagctagctccagttcttgggctccttatggtgtccgtctccgtgctagttgctattttcaagaggtcaactgttcccacttttaaatcttatggaatcgtgcaagcacgcatatcagactgtgcatcagagacattttcagctattcgtactgttcgatcatttggtggtgaaaaacgacaaatttctttgtttgacaatttggcacatgcttaccaaaataatggcacaaaacttggagtgctgaaatctgctaatgaatcattaactcgagtagtcgtctatgtctccctaatggcactttacattcttggcggtagaaaggtcaatgcgggcaaattatctgttggaaccatggtatcttttattggttacaccttcacattaacctttgctgttcaaggagctgttaatacccttggtgatctgcgtggcacattggcttccgtagagagaataaattctattctttcagcgaaggacattgatgattcacttgcatatggtttagccaaagaacttgatggcaaagagtttgatgattccaatggagtgtatgaaaatggatctgttaacaaacatttcatgtcagagctgaaatcatccagtagctgtagtaatctagcctggtctggtgacattcgtctgaaagaagtccatttctcttatccattgagatctaatgtggagattttaaatggccttgaccttacaattgagtgtggaaaagtcacagcacttgtcgggcctagtggtgctgggaaaagcacagtggtacaacttctagcacggtattatgaggagaagacatccgtgtatttgacaaaagggaatggtctcgagtagtatctctagtcaatcaggatccggtcctattctccgtgtctgttggagaaaatattgcttatggtctcccagatgatgttgtctctaaggatgagataataaaagctgctaaagctgccaatgctcatgaattcatcatctctcttccacaggggtatgatactcttgttggagagcgaggtagtctcctaagtgggggacaaaggcagaggattgcaattgcacgagccctcttgaaaaatgctcctattctaatacttgatgaggctactagtgcactggacgcgacaagtgagcgactcgtgcaggaagctctcaatcacttgatgaagggaaggacttctctggtcattgctcacaggttgagtaccgtacagaatgcacatcgaattgctgtttgttcagagggcaggataactgaactggggacacaccgagaactggttgctaagggaggcagttatgcatcacttgtcgggacacagagacttgctttcgagtaatcacacgtcaactgcgaggaacggatcgactgcaatgtaggggattctatatattactctattttccttcagggcccatcggaacataggaattctcgtggaaatcagaatgaatttcatgggtaaaatatagaaaacagaagatgaaaaaaaacccaccttctgaatgtggccttggttataggttgtttcttatccacagaagcaacacatgaatcagaaaacacatgtatgtatcgaactttataatatattaacctaaacaaaggacaacaaacttcttatcctcac

SEQ ID NO: 44146 - DNA, 2196 bp, Zea Mays
gcatagcaaattagaaaaactagactgactgataatctggaacagaaggagtaattagtaactaataaaaggaaaaaaatgacataactacccggtgcccataaagctcactcagccgagcgcccggatgatttgcacgtcagcccataaagctcctatttttcttggcccgacccagctgaagcaccacttcgaggccgcttcttagcaaggcccagagttaaatcgtccgtgggcgtggcgctcctctcgcggttagggttttagggtcttcgtctcccgctcccccgggtccattcgcacccaacgcagctacagacggtctccatggcgaagaaaggggcgaagagaaagcagcagttgccgccggctcccacggcgaagaacgggagcaaggctgtgctcccactgaagggccgcgaagagagcgcccaagaagcagaaggttctggagtcctccgacgattctgatacggagcagcagcagcagcttcaggaggaggactccgacctcgacgtttcctctgattccgacgccgaggagctctctgggtcggacgctgaggctgacgagctctcgggctcggacgccgatgctgacggaggctcgacccgcggcgacgacatggatgatgacgacgacgacgaagatggtgaaagcgatgatgactctcttgcggacgacttcctcgctggtagcgacgaaggaagcgagggtggtgactctggtctggagtcagatgggtctgatgaccttgaggcaaagtcacgagcaattgacgagcagaaactcaaggcggaagaagatgcagaggaggaacttcaaaccaacataagatcagaatctgatgaattcagattacccacaacagaggagctggaggaagaggcacacagaccgcctaacctaccaaatctcaaaaggaggatatccgaaattgtacgagtgctctcaaacttcagcaaactgaggcagaaagatgttccgcgaaaagattatatcaatcaactgaaaactgacgtcatgtcatactacggatataatgattttcttgttgaagcgttaattgagatgttcccagctgttgagcttgttgagttactggaagcctttgagaaaagaccgcctgagtgcttgcggacaaatacactgaagagccggaggagggatcttgctgctgctcttataccaagaggatttaatttggacccgataggaaaatggtcaaaggtaggattagttgtctatgactccaccatttcagctggtgctactactgaatatatggctggacattacatgaaacaaggtgcaagttctttcttgccagtgatggcacttgctccacaggagaaggagcgaattgttgatatggcagctgctccaggcggtaagactacatacattggcgctcttatgaagaatactggaatcatctatgcaaatgagttcaatgagaaaaggttgcatgggcttatgggaaacatccatcgaatgggcgtgacaaataccataatttgtaactacgatggtaaagagctacccaaagttcttgggatgaattcggttgacagagtattgctggatgctccctgcacaggaactgggaccatttggaaggatctacagatcaaaacttcaaaggacattgaagacatcaggaactgtgcctttgtccaaaagcaattgctgctagctgctattgatttggttgatgccaactccaaaactggtggttacattgtttactcaacttgttcgataatgatcccggagaatgaggcagtgattgactatgcacttaaaaagagaaatgtaaaacttgtgccttgcgggttggattttgggcgtccaggattcatccggtaccgggaacatcggtttcatacttctttagaaaagacaagaagattttatcctcatgtcaataacatggatggattttttgtagccaaggtactttccgtttgactgttttccagttcaacgcgcagcaattttcgaaagacaaatcatagtgttctctaagtataaagttgcatgttgacccctcgaaggttttgttgtatttgttttggcaaataattaaactgggcacttgcatgttggattggttatagtgcattggatctgaagtctcttatatatggactctaattgtaacatttgttctaaaataattgacatcctagaaa

SEQ ID NO: 44147 - DNA, 2573 bp, Zea Mays
gcggaagggaagaagatattttgcggttttgtgagttgtgatggcttcaggcagtttggtagattgtggcgatagaaggacggccagtttagcctagccacgctcgctctacctcctcaatcctgattagcttcaaaccgccatggccatggggctccccggcctccgctgccaccgcctcctcgctcgcgggtcactccctccactcggtcccgccctctatcgcaggcccctggagcgaacctcggctctccgctactcctccctccaagctcaagctggggacagtattggggaggaggccctgcgcatgttccttgaggacaggcaactgcacggcgatttcgtcaccaaggtctctgacatggtctggaggaggaatggcgccaatgttggtgcggctgaggcgaccacgggccaagggagtgcaatagatgttgctcagcctgaagacgtgcgggaagatgctgtggacgagggaatgttgagactagcggcgattactagtgattgggtgtccggtgacagcagccctcctttaagcaagaggctttctgccgaggaaaggcagaacgagagcaacaaaaggaaggagctgaatcttttgaaatatgaagcagatgaattgctgctcttgaccgcaggaactggagcagcatgtagtttatattgtctcctggttttctctctggagactgctgtcagttatgctttgggggttggtttcagttgcttgtatcttcaacttctgtatcaacatgctgataacctatcaaaggaagatattccagaagtttttctaaagaagaaagtgaagaaaattggcattacaagtgaagatttgaagaatacaatagagaagacattgggtggtgcaggactagctctttcatctccaaggcttataattcctgccgtgatttatggattgtcagctttatcacatcacttccaaaatagctttttcagttttgaggttcttccagggatgatgggtttcctcgcgtacaaggctgcagctttggttcaagtctacagagacaacgaggacctccgcttgatacttcctgatgaagaggccgctgacagtgacagcacttgatttatacgaattagagattatgttaacctagtggttgttgacaaatacaaaacagatctgttcaccaccgagtcaagcttcacttttgaacttttttttgtctttaggagatcctgaaattcgtttgcttatcttcttggaaggggggaaacaggaagagttgaatgaaaaatcattatatgttagagacagctgaaagctcaaaggaacacacattttttttgtccttgggtaactatacaaaactgttgcaagtgcagttggaagcaagaatgcgcaacagtaccattgtagtacaatggtttgcaacagtagccaatccattctacaagttggagatttgcatagaagagtcgttcttacaaattacaggatgcccaaaacagtttacagtttcaatggtcatattatatacgtacaagtacacactaatatatatatgggacatcgaagtatgagacgaaatccagatctcaaagagcagatgtctatgtgagctgatcgttccctgaaaagttaaaaaaaatacagttcttcagcacgtaaaggcgtgcgatttcgatcgagctgcatgtgtataaagaatatcttcagtgtaccgcattgtgagaaagaaatctctcaagttggttctgtgaagaacggtgctcctgaaagacaccggtcaaattggcagcagctgtgaaaaaagcactctgagcaatagcatgcagcccatgaaagtgcatacaaaacggcatcttagcttgaattcgagttgagccatgcagcccattctgccgagatccaatgcatgatatggtcgtcccctgggccataataaaacgtgtcctggtcctcagaaaacacggttcaggtctatctgggagcaaacgttcgaactcaacatcacctgatggagtacacggccgaaatcccgactctttctacgtgtttggttggccgcatcagcatcaggtattgcatgacccagacgacagagccttgctaccaacagtggagccttttaaaggcgtacgtatagtatatgcatgcatggtcgtcgatcagctgaccaccgccgtagccaaaacggcaagttgcatgcctccggtgacgatgacgacgcatcgtgcaaagcttcgctgctaatgcgccccggtgccaactgcgaaacgtggctacatgacatgtatcccggtgccgcgtgccagaaaactataaagcgccggccgggcgggcaggtaggatctggttcatctgcggcgactgttgcgcggcgcctgtgaatcgcgatcgcggtggaaatcggagaaagtaagtagtagctagagacaagctagctagtggctgatgagcgtgtcagtcccgtgacacttgaagccgcaagcgccagtgtttgtggaacccagccgaactgagacacctcagctcttcgtggccctcgccctcgatcggaagctgcctggaagcagcgtgtgctgccctagct

SEQ ID NO: 44148 - DNA, 183 bp, Zea Mays
tacacgtccagctccggcgaaccgtacagcatcaacagatacaaatcctgaagcggaggcccaacttccacgccgtagcacgcggcccatgaagcccaacccaagatatgccggcggactgaagtagagtatatgtaatctgttagctgggagagagatttttatgcattttgtaaaacctga

SEQ ID NO: 44149 - DNA, 2613 bp, Zea Mays
cggcaaacttacgctgcgttccttagaacgactttttgttgcttcggtaaaacttgtaatgtgattttgaaccccgcgttcccttaagaacaacttttgtgcttcaacgactttttgaacttcgtgagtctgtggagaaggtatgttgtactatgacaataacgaagctatttcaagaaattgaaaacaacaaaagaactaggctttcaatgattgttccttattaaaaaagaaaatgataacgaatgcaaaaactgtttcaggggtaggatatctcttagtagatatgcttcgattctggcacagtactgttgactgtgtgagattcggactcctccatgaagtctcgttgctggtgagtatgctggctcccttctggctgctggcctcgggaatatgcaggttgtagtggtggtggaggtggaggttgttgccaagatgcctgtagttggctagccgaagcaacagaagctgcaagatggttacccacatactctggtatgtagggtgagtgatacgaagcagtgtgcatgacctgcttcggctggttttgttgagctgcagcttctgctatttccttctgtttctgaatggtgacatgtcacatccttgtagtatggcccttgtcctcaccacagaataagcaataaattttcctaggctgatccccaaaccttcctccgaagcccctggcgcctctgcctcttggagctggcggccggaaagagctttgttgttgccccgaagcttgtgaggaatattgtggcctctgttgttgactccctctgtcatcattctgggtggagtggattgacctgacatgccttgggtggattcttcctccgaagcccctagtcatctcagagaacctgtaatcctcctcccttctttggtgaaagtcattgtcggcccggatgtattcatccatcttttgaagcaacttctccaaagtctgtggaggcttcctagcaaaatactgggcagtaagtcctggacgaagccccttaatcatggcctcaatgacaatttcattgggcactgtaggcgcttgtgctctcaggcgcaagaaccttcggacatacgcttgaagatactactcatgatcttgtgtgcattgaaagagagcttgagctgtgactggcttcgtctgaaagccctggaaacttgttatcaggttaatatgtacataaaagtctcaggaccaaaagtgatggagcctcataccactgcagggtagacggaggtcttaaaaccgttgtaagtgctaggaagtttgtccccggtgcaaagctgtgcatgcaacctgatgtcataccaaacaagcgcaagtcaaagagctcacgcaaggatagatccaaaactcaatcaccactgctgcttgggcttcctgatgaactggctatttcctgtctcatgcgggctgctcggatcgaacacccaaatatgcggttagtctgtaaacgatggaaccgacttttgtctggaaattattattactccttgcgtaagaagaatggatctatgtcttcaaaagggaccgtgatcagaagctatcttggtatgcctttgatcctgtaaaccagctctggaagtcattgcctccagttccaccagagtattctgaagctgttggttttggtagtgctgttctcaacggatgctatctgtacttatttggcggcaaagacccagtaaatggatctatgaggcgcgttgtattttacaatgctcggataaacaaatggctacgagctccagatatgctgcaaaaacggcacttctttggttcttgtgtcataaacaactgcctttatgttgctggtggagagtgtgtagggatacagagaattctaagatccgctgaggtatatgatccgaacaggaatagatggtctagcattgctgaaatgagcacaggaatggtgccctccattggagtagtacatgatggcaagtggtatctaaaaggtctaaattctcatcgccaggtcatgagtgagcactatcttccagcatccaaaatgtggtcagccaccggtaatgaaatggtaacgggctggcggaatccaagtatttccctcaatgggcatctctattttgctgattgtcgtaatggctgtaagcttcgagtttataatagagagatgggatcatggacaaggttcattgacaccagacaccatatgggaagctcacggtctctcgaagcctcagcctttgtctcccttaatgggatgctctgcatcatccgtaacaatatgagtatcactactgttgatatattggacccaacaacagctgctgaggtcgaccgtgcgcgcatgtgggaggcttttgctcgaaagtggcagcacagatcatcattcatggcaaacatatggtcaatcatcacaggttgtaatctgaagacagacattatgcattgtcaggtgctccaactccaagtttgagtttgtccatgtatgaagtggagtatatacttacacaacctcagagcctgacttggaagatgaaatgggtacatgagccatatgaaagagaccagctttcagctttgaactctgtaaatatccctgatttcgtccttttgaactttctaattttggcacctat

SEQ ID NO: 44150 - DNA, 345 bp, Zea Mays
gtttcctctccacctagagaccacgcgtatgaatgagataattgacaagtacaacacgcattctaaaaacctggggaaaacagaacagccttcgctggacttgaacttagagcatagcaaatatgcaaatttgaatgagcaacttgcggaagcaagccttcgactcaggcagatgagaggtgaagagcttgagggattgaatgttgaagaactccagcaattggagaagaacctggaatctggtctgcatagggtgcttcaaacaaaggatcaacaattcttggaacagatcaatgacctcgaacgtaagtggagatccttttttttttgcaccggaactacaga

SEQ ID NO: 44151 - DNA, 1649 bp, Zea Mays
caaaatcctatttccctctcccacaccacgcgccgcgcctgtctgattctgcccgccagccacgcccgcagatctcgcttcggcgccctgattccgtcgtatgcaagtttacctctgcgcgtccctgctaaccgttccacatagtatcacaaaaaaatggcactaccttggcatcgtcttccccaattcgggtgtatggaattcttggagcaaaggaccagcacacggtcacctccaaagaaagacccaggctgcttctacaaggagctgtacaaagtgcttcacgactgcagattttggatgagatgatggataatggttttccactcacaactgagccaaacatcttgaaagagatgatcaccccacctaatattgtgaacaaaatgttgaatgttgttactggcaagagttctacccttggcagcaaacttccagatgcagctgcttcttttgtaccttggcgaagaacaacagtcaaggatgcaagcaatgaagtctatgttaacatagtcgaggaacttgatgcatatgtgaacagagagggggttcttgtgaaatgcgaagcatacggtgaagtccaagtaaactgcagcctcccaggatgaccacatgtaagcaataggtgctgctaccagcaaaaagggggactggataagcacaagtgaggtagaatttcaaggttctcattatactttattttttcctggtacacaatggtgaaaaagcagggccagtcctagagttccctatgggttaaatatcttgtgtagtcatttgttcaggaagccagaggccttgctgctggaccaagattagtccaaaggttatctggttttggggaccatcgatctgcagacaatgtggcaagagtggtagaggaggagcttgcacatgcctctatggtttgtattgatttctcaaagaatgccaagtgatgggtcgtgaaccaagcaatactttccaagacttgataaaggagtacgaagttgtactgaagggtccattcaactacacggctcgtgatgaagctggtataccccgagaatggttcatgatagattagcttgtattgttgagatggaaaaagagaatgcaagtttgggataagcagttgaagtctcatcctccaaagaacgttgaatcagaaatcttgtgtgagcatatcaagaaagagagggagacagcaaaggctggaaaacgaccatactatctgaagaaacctgaacttcgcgaaaggaagctaatgaacaagtacaacgagctcaaggaggcaggaaagcttgatgcattcatggaaaagcggcggaggaagaatgcctccaaagatcatcggttcatgccgtaccgacgcagtggagatgcataatagtttcctgattctggagacgagcgaaaggatgattttaggacggtgttctcatggtggctgggacactggacagtcagtgtctctgttactttgttgccctagccgtacaatcgtcagctccgtgcacaatctctactacttcttaagaatagagtgcaggcgtccacagtggttttttatgtttctcatttcactctctgcattttcagttacaactacactgcatatgctggcagatttgttcatatattactccagctgacattttcactatcgc

SEQ ID NO: 44152 - DNA, 2277 bp, Zea Mays
tctggattcctcctcccgtcctccggtcctcccgtttccccccttccccttccgcttcgccattccttctcggtcagaacgacgcgcatccccgcccgcacgttcccgtgctctcgcttctccggaggcgaccagggttgggacttgggaggctagcgagaaggtgctacccgggccaactcctccgatcgcccgcaggagaaggggatctctccgcctccccgccctcgtcgggcctttcccatcgccacccgcgaggccacgcgctccagctcttgtgaaccggaagggttctggatttctgagccaagcgaccagcacggtggctcggccgggctgacactcccctcccctgtcgcccggtctcttccttcccgagcagaactcccctgcgtcttgccgcttctagcatcggggagaaaaattatagaggaaggatatgcgggatccatttgatgcaccggttgatctcattaacccggaccataatggtgggaacaaactttctaggactggtgcagtgtctgctggggactatggtttacaaaatggacccaaatcctttgccccaaactccgacaccctagtcaggcatcaagtccaggttgcatccttgcacaaagacttagttttggaagatcccaatactcgtatcatggatcctgagaccaaggaactttactttagatcacaatcacaaggggacgagatcttgttgcttcgcaagaaaattgctgaggcatctctcaaggagctgagattactgggtgaaaaacatattctggagaggaggctcacagacttgaggatggctgttgacgagaagcaggaagaagctatatctggtgctttgcaacaattgaaccagaagaaaacccatcttgaggacaatatgagactggcaaatgaactaaaagttgaggaagaagagctatacttttttacttcttcattgcttagcatgctagcagaatacaatattcgcccacctcaaataaatgcttccatcattacaactgttacaaagcgtttgtaccaacagatgcatttgaagctcagatctttaaatgtgatatgactcaacctggaaatatatataatcccaatcttcagcaagtaaccctatcaagaaatgaaccttccccatcttataatttggattcaaataggaacactcttcaacagtatgctcaaggtccaagtgaccgacatatggatcaaatggatactggcggtactactccctctaattattttgagggagacagaagagtagatggtgactcacagttataccaacctgatggtgacgctttacctggtattgaggggtttcaaattgctggtgaacctagaccaggatttcaattaacagcatgcggttttcctactaatggtactaccctttgcaatttccagtgggttcgccatcttgaaaatggtaccagacagtctatcgaaggtgccacgatgtatgactatgtggtcactgcagatgatgttggtacttttcttgctgtagactgtacacctatggatgataatggccgccagggtgatttggtgacagaatttgctaacaatgggaataagataacctgtgatccagagatgcagagtcatattgatgcatatatttctaatgggagagctgaatttgaagtttttgtcctgcaggcttattctcctgaggagtgggaattggctacattggtgctaacacgacctaactatcagattaagttcaaaaagaccggtgaagctataattgatgagaagtactcacaaagtctacagatgaaaattccaaatgggcgcacaactcaatttgttttagtaactgcgggtgcaactctcccatttaacacacagggaatatcagagccaaacaatgaggattacgatgttaggttacgcgatctaatcgtattagtcatgagaactttccagaaaaaggctttagatgccaaaaggaaagtcaacacttagaatccatgttgatctgttacaaaagattctatgtaaaaccgtagaaaattttcctatttttgattgttttgtgcagtattcgatgatttttgttcttgagatggaatgagctctcgatcaaagttttgctaggtgctagacggaatctaggcgatgacccttagcctagggactagtccaagcctaggcgatgctagacgttttgccaacttatataatatatacatttatagataaaaaagagggaaggaccagtagacataccttttgtccttgcagatctgctaa

SEQ ID NO: 44153 - DNA, 817 bp, Zea Mays
cttgaaacaggggcagtagctcccaggtccagaagattactaacaatattcagtttatcttggaaacagtcatgctatctaacgttgtggaagtgcagggcgacaagctacgaaggcgtggtgcatgggagaattggctgcttccaaaacaaaattattctgctgggagttcttctggttcgttgccccctgtgacatctaacattgattctctgacgtctcagtttcgatttgttggactcgagggggcaacataccatgctaccatgccagtaatgcatggtgaagctctcttgacaagatcagcaacttcagttagtttaggttatcatgcatcaaccatgggtgggctaccgagcaacgggagtgaaccacttttggggccgaagtctgcaagaaatttactcaggagcgataccttttgaggctatatatttcaagatgaagaagtataacggcaggccgagttttcacagtgacggcctgcacactatctcgtgtgaggtgaagatcagttggtcaaaaaaaaaacaaaaaaaaagaggaaaagcataatataccaaaaaaatagagataggtatacacagaactgaaaaaaaacaaaaaaaggcaaaatacaaaaataaaaataaaataaaaaagcaagaggcaacttttgtgctggtactcatgccctttgtgttatgtggtcttagtgggtttgttttcgaatgttagcagtttgatggttctattgtgtaaaccggagttattgaagtgtcttggtatcattcggagactgctgagtggatgaagttatataagtacaagacattat

SEQ ID NO: 44154 - DNA, 817 bp, Zea Mays
atgttatccaccagataaatgatggcccatgcgcccttattgcagtctgcaatgttctattgctcagggggacatctcttttgaaccacatgaaactgtggtgtcaatggagtatctacttggccttgtccttgctcttcttggaggaagtgtgaaaatgcaggactattctgatgaaagaaaaagtcagatattggatgtggtgaagagtctggccggagggtttgatatggatgttatcttcaccagaacggatggttttacaatgactcaagagtggttgcttctggattgcttagatctcaaccttcgacatggttggattgctgctagggatttgttgaccggacccgaagtatcatttgaaagtcttacattggcttctaatgaacctggttttccacatgcggaggagatcaagaattttctaaggggacctcaacttactcccattggcttggtttcgctgcaagaagactttgttgagaatgttccgtgcattctgttctggaacaagcattaccatactatagttatgatcaatggagtattaaattctctagtcactgattctaattatttagaaactcgtatagtttggcagacgcttgacggggtcaacggtgatggagtatatttggacaacaacttcacaccagtttatgtggggctagatgcagctacttctgtatatgtaatgtggcccaaaataaattaattttctgtatctgcaatactttgttattatggtatgatcttttccttttccatttctatttctatatgtgatatatttatgttgtagaagtagtcaaat

SEQ ID NO: 44155 - DNA, 4240 bp, Zea Mays
catctgcgagcgctgccgtctgccagcaggggcactcgccaccagccagatttccgccccaccccctgccaccggacagctgtcgtcgccacctccttgcatccccatggtttcccctgtggaaagagtggatctacctgttaggagctcggatttgtctgatccccaagattttctgttaggggatgaacagagaatggaggtattagaaattgattggggggcaatacaaattgatgatagatgggaggaagaaggagaacaagagactgcctctgagtcattgatgtatgatcggttaggattgttagctgaagatgaacgtgaaactactgaaaggcaagagactgttacagttatcgtggataagcacacatgcacttctagtggtcgtcgaaaaacaacaacacccaccagctcatgggttgcttccctagcaatgccattccttacgaagaaaccacatatgggagctaaagaattgcaaaataccttgcaagagcagcacaattggtcttctggcaaccagcactggccatctcccaccagcaaattgacaccagaaattggcactgcttcatttccagtcgccagatacgtcgttgcttgctgttgccagtgctggtcttctggtgttgtccaaaatgaagctggccatctgcaaggaacccaggaactaccagaaactggccatctgcttgatttcagtcgccatctgcaaggaacccagaaactatagctaccagaagaacagcaaaatggcaccagaaattggcactgcttcatttccagtcgccagatacgtgtccaaatgaacagcaaattggcaccagaagaacagcttctttttacagttaccagcttctgtccaaatggccattacacatgtccaaatgacagaaatttgaatggacagaaaatagtaaactggaaacacaagttcaagttaccgagggccatattcagataaccttaatgaaaacagaatggacaacgttacaaaagctatcgagtgccattcaacactcgacagaatggacaacccaggttcgccggattcatcgccccattccgctctgggctaaggttccaccagcacaaccctatggcagaagcagtgctccttgctgtcactaagattggttccgttcttggagatgaacctgccaagaccattataaacaagctgtctgaaaaaattcaagctctgagggaactcccacggaaagtggatcacataaggatgaaactaataataatgagcaaagttatacagcagattggcacagtctaccttacagatgaacttgtgaagagttggattggggaggtccggaaggtggcttaccgtgttgaggatgtagtagacaaatactcataccatcttcttcaactggaggaagaagggtttctgaagaaatttttcgtcaagggtacccattatgccattgttttcagtgaaattgctgatgaggtagctgagatagaagaggagattcagcaagttattcagatgaaggatcagtggttgcagccatcccagcttgtccctcaccctgagcaactcgctgaaatcgaaagacagcgttcccaagacagtttcccagaatttgtcaaagatgaagatctagtaggaattgaagaaaatagaaaattgctgactggatggatttactcagaagagcaggctagcatggtgataacagtttctggtatgggtggactgggaaaatctacactggttacaaacatttatgaacgtgaaaaggtcaacttcccggtacatgcttggattgttgtgtcacaggtctacacagtcgagtctttgttgagaaagctactatggaagattgggcatatgcaaccaccagtgccaagagagattgacaaaatggatgtacatgacttgaaggaggaaataaagagaaagctccagaatagaaaatgcttgattgtgttggatgatgtttgggagcaagaagtatacttcaaaatacatgatgctttccagacactccatggaagccgcatcatcattacaacacgaaaggaccatgttggtgctattgcttcctttgaccaccatcttgagctccaaccgttgtgtgggcctgatgcatttgaacttttctgtagaagggcttttcacaacaagaaggaccacaaatgccccgaggagcttaaggaaattgctggtgaaatagtgaaaaggtgccaaggcctgccactagcaattgttacagtcggcagcttgctgtcatctagaccacaaataaacatttggaatcaaacatacaaccagcttcggagtgagttgtcaaccaatgatcatgtccgagcaatcttaaatctaagctaccatgatctatctggagatctcagaaactgcttcttgtattgcagcttgtttcctgaagactaccccatgtcacgcgaagcccttgtgcggctctgggtcgcagaaggttttgttctgagtaaagaaaagaatacaccagaggaggtggctgagggaaatctcatggaattgatccaccgtaatatgcttgaagttgtagactatgatgagcttggcagggttagcacttgcaagatgcatgatatcatgagggacctggcactttgtgttgccaaagaagagaagtttggttctgcaaacgattatggtgaactgatacaggtggaccagaaggttcgtcgcttgtcgttatgtgggtggaatgttaaggcagcagctaagtttaaatttccatgtctccgtactcttgtggctcagggaataatttcattctctcctgacatggtatcctcaattatgtctcaatcaaattatttgacagttcttgagctgcaagattctgagatcactgaggtgccagcatttataggaaatctctttaacctacggtatattgggttaaggcgcaccaaagtcaagtcactcccagagtctattgagaagctcctcaacctccacactctggatatcaaacaaactcaaatagagaaactaccacgagggattgttaaggtcaagaagctaaggcaccttttagctgacaggtttgctgatgagaagcagacggagttcagatatttcatcggagtggaagcacctaaaggtctgttgaacctggaagaactacagactcttgaaacagtgcaagcgagcaaagacttgcctgaacagctgaagaaactgatgcaactcagaagcttatggatcgacaatgtaagcggtgcagattgtgataaccttttcgcgactctttcaaccatgccacttctttccagcctcctaatctccgcaagagatgtgaatgagacactttgcctccaagcccttgctccggaatttccaaagctccacaggctaattgtaaggggccgctgggctgccgagacactggaatatccaatattttgcaaccatgggaaacatctaaaatatttagcgcttagctggtgtcagcttggtgaagatccattgggggtccttgctccgcacgtgccgaacctcacctatttgagcatgaacagggtcagtagtgcaagcactttggttctttctgcagggtgctttcctcacctgaaaacactcgtcctgaagaaaatgcctaacgtcgagcagctggagattggacatggtgctcttccatgcatccaaggtctgtacatcatgtccctagcgcagctggataaggtccctcaaggcatcgaatcgcttctctccctcaagaagctttggcttctgtacctgcacgcggagtttagaacgcagtggctaacgaacgggatgcaccagaagatgcagcatgttcctgagattcgtgtctaggacacaggaaagccagatggttatttctgcagtactatgctggtatatatggtgtgtctgtgaaaaaactattttttgtaccttttcttcccttaagtcctgagttgttgtatgtggacttcacttgcagacacaaacgctcgctttgggtagctcgttagacccatatatatacgtgttgtgttggttcagttgctttaagttacttgtttgttcgaggcatttgccttctgtattgaacttcatgcaaatgatgttatgatcaaacttgtatgtccatgtattttaaatttttttacatgcctcatagaaagtatggattcccatatcatcatttgtctgatcggctaaaaacaatattgtatatgagaattggagaaaatcatattggtgatacattag

SEQ ID NO: 44156 - DNA, 437 bp, Zea Mays
atggacgacgatggaggggccttcccgtcgacgtctgcttcggcagcatcaaggtctctgaggcgttggtttccatttgacccttccccattgccgcttgttggcccccttttgctggtcgttgtgcaagagctgcaacgagacacagattctccaacatccaaagcgagaattaaatatgatgaagaaaatctccgttctataactaaatgcgagcatcatttccatctttgctgcattctcgaatggatggagcgaaaagatacttgcccagtttgtgaccagattactttggtggatgagatgtttgaataggcttggtaaccctggtggatcatcactcgaagctgttcgttactgagaaagtgcaggcagcaactaatttacttttgatattggtctattccgggtggctcgcatggtaatgaattgagggg

SEQ ID NO: 44157 - DNA, 1783 bp, Zea Mays
aatctaaaatatttcgttcatgacactggccattggatcgtcttacaaagtctaaggaagcagcgcgggcgtgaagcggaaaggacggttcagatggcactggcaaaagcttccttggtggatgatctgcaaaacaaaaaccaagagttgatgaaacagattgagatatgccaggaagagaacaaaatcttggatagaatgcaccgccagaaagttgctgaggttgaaaagctcacgcagactgtcagagagctagaagaatctgttcttgctggtggtgcagccgcaaatgctgtcagagactaccagcggaaagttcaggagatgaatgaggaaatgaaaactcttgatcgtgagctagctcgtgcaaaggtttcagcaaatagggttgcagtagtggtggcaaatgagtggaaagatggcgatgataaagtaatgcctgttaaacgatggctcgaggagcgaaggattctgcaacaactccgggacaaacttgctattgcagaaagggctgcaagatcagaagctcaactgaaagagaagttccagctacgacttaaggtactcgaggaaggattgagaatgtctacatcgagaaccaatgtcagtggcacacgccgccagtctattggtggtgctgatggtttgtctaaggccaacggcttcctgtcaaaacgcccatcattccagatgagatcaccagtgtctaccacaacgactctagtgaaccatgcaaaaggagcgtccaagtcgtttgacggaggctgtagatcacttgaacgctataagggccatgtaaacgggaatggtatgaacgtatctaccgattccagtgaagataaagattcaaacaactcagatgagaagtgtaacgagtttgcatctgctgagtcggaggactcggtgtcaggtgttctatatgatatgttgcaaaaggaggtcatttctctaaggaaggcgtgccacgaaaaggatcagagcctgaaagacaaggacgacgcagttgagatgttggcaaagaaagtagatactttgacaaaagctatggagtcagatgccaagaaatcgaggcgcgagctagctgctatggagaaggagctggcagctgtgcgcttggagaaagagcaggataacagggcaagacgttttggtagttcaagcggttctgccagcagttcgcagctcccacctggcaggactttacctaggagcggctcggcgcgcaacatgtgaaggcatgtaggaattgaccgaatatggctttgatgatccttacttggattaggactggtgactgggaaggaacctctcattgtcctggagaagatggcatcagcggaagagcctcttctgcctacatctcgtggtcgcagggatgaactactttgtgtctaacatctccggctagtgttttcttttcttttgttttgacgacgtgtcattcggtggtgattgctgttgtttcttttcttttggcagtttgatgatctttgttggtgctgtataggtttggtgaggcgttgctcctttttcttctttggtttgtttgttcgacatatccgtcggtctggttgtttacgatgtaaaatgtacgcactgaagagttgcttatggtttgcctgatattcccccctgtttctgtcagtgttgggcaagttgatgataaccagcatgatgaatgactcagctggctgttgtaaccatgtgccgaatgatgaagaaaccgctttgcatatgtctgatgatcaccagatgaatggagttagggcaagttcgaccgctt

SEQ ID NO: 44158 - DNA, 290 bp, Zea Mays
ggctggaggagctccatggatgggccgcgtgccgcgatgcgcgatgatgctcgagggaggaggaagccgcatggcagacgggcggcttcttctggaggcaatagtgttcaacttttctgctatgcaacgctctgcttgctggagcgtccaattccaacccagctgtgttaagctatcaaaagaacagacacatcccggtcgcatctgcaaacttaaaagaatgatggaaaaaaattgtctcctatacaaagttctatcgaatttcacatgggtcgacaaaatcaataata

SEQ ID NO: 44159 - DNA, 1427 bp, Zea Mays
cattatatcgtctaattaaaagatttaatcaccgaaccgatttcatatccgcgttcctgacatttttgcgaacgaaactagaccactcatactatatatatttcaaataaaaaaattacgtgattaagattaatatataattagtgtatattaacatgtaattagtatctattaagcaatttaccatataattagtgtctattaatagattttttaaatttttttaactcatgcaccatgtactcatgcaagcaaccaaacaacatctcttgtgaaccagactggccacatacacacaaccaaacacgctatactgcatgcactcagccagtccagtctgagccaggctcactagatacgagccaggctcacccatacaagtaaccaaacgccccctaagagaacctggaaccggctgcgtctgggagagtggctgggtgccgtcgtgtacgaactccaactatacctatactccagaaatcttcgtgagaggaagtcgagcgccgggagcggcgctcaactcatccgctcaacggggttctaacactatccatggaagaccccgtggcggcgccctcttcgtcttccgccgccccagctgcttccgcagcggctaggatttcggcggcggcggcggcggcggtaacatctgccgttacctctgcgccgcccgctctcgctccgctgcagccgtctggcaccgccgctgcggtccctgaagccgcgtcgacgtgccggaggcagctgttcacggtggagctgcggccaggggagtccacaatcgtgtcgtggaagaagcttctcaaggaggccgggcacaccgccacggcaccgccagtggcgccggagccaaagttcgctgcacatgcgggcccatctggtgctgcacatcctgcagaaaatgacccaaaggatccaatgcagtcattgaaaaaattgagtgcctttacatgggaaaacatagcagtgacgaagaggatcttaatgatgtaccagatgatgatcagtatgacactgaggattctttcgttgatgatgctgaattggttggcgttaaaaaatctcctcgtttgtctcacgccaaagcacaagtctaaggcctgggctcggtcgtgtccattttcacatgagctacagtgccgctatgtatgggtggggcagcggtttgggggttttcttgacctgtgtgagagctcttcttaatacaatacacgaggatgtcttacccccgtcgagttttgtattatgatatgaaattgtcacttgagctgtaatagaatatatgactgtatatctcacaacctgagctatatgtttgggaaaggttcatgtaaatatttccaccatgttaaactacatgatgccaatgcatagtttagccatcttgtatatgagtatatttataaagaaacatatgactgccatga

SEQ ID NO: 44160 - DNA, 2457 bp, Zea Mays
gacgccgcgcgccacgacgcagcacgcccaagaaaccccgtgtcctcacaaaaaccctgcctgccggagatggccagcggcgaccttctcctccgcgcccacgccggcgccccggtcctagcgagggccttctcctgccgcctcctagtcccggcgaggcgccgcagcggactaatctcacctctggccgcttccaaggtcggcatcgccgacgtcgttgggcgggtcaggtcgggcggcgccgaccagaagaggcgacgcagggatgcgaaggagggatttgggttctccggggtggccacgaggagagaacttatcgacgacgagaaggtggagcaggacgaggaagatgaagctctcaagttgggagtggagaagaatggtggcgagacgggaggtgtggatggctcgtacctcagtgagacacggtttgatcaatgtgctatttcccctttatcgatgaaagccgtcaaagatgctggatatgaaaggatgactgaggtgcaggaggcaactctgcccataattcttcaaggcaaggatgttcttgcaaaggcaaagacaggaactgggaaaacagttgcctttttgcttccagcgattgaggttctctccactctacctcatcagcggggtcagttacggccacctataaatttgctggtgatgtgccctactagggagcttgcaaaccaagtggctgttgaggccaggaagcttctcaggtatcatcgcacgttgggtgtgcaggttgtaattggtggcacaagattaactcaagagcaacgaagcatgcaagctaacccatgtcagattcttgttgctacaccaggaaggcttaaggatcatcttgagaacacacctgggttttctaccaggctcaagggtgtgaaggttcttgttcttgatgaagctgaccgcctgttggatatgggatttagaagagatattgagaaaataattgcttcaattcctagagaacggcaaacactgttattttctgctactgttccagaagaggtccgccaaatttctcatgtggcaatgaagaaagattataggttcattaacactgttaaagagggtgatgaggagacacatgcacaggtgagccagatgtacatggttgcaccactagacttgcatttttctatcctatatgatgtattgaagaaacatgtcgcagaagatgcagactacaaagttattatattctgtactactgcaatggtcaccaaacttgtggctgaagttctctcccagctgaaactgaatataagagagattcattccagaaagtcgcagtctgcaagaactaaggtctcagacgaattcaggaaatcaaaaggtttgatactggtcagttcagacgtatctgcccggggcgttgactatcctgatgtcactcttgtaatacagatagagagcagtacatacatagactaggccggaccggacggaaaggcaaggaagggcaaggactcctactattggcaccttgggaaaaatattttcttggtgctgttaaggatttgtcaatagcagagtctgctgtaccaccagttgattcaagtgttgagacagaaaaatgcggtcagaaaagtagagatgaagagcaaagaatgtgcctatcaagcatggttagggtactacaactcgaacaagaccattggtcgagataagtccagacttgttcaccttgcagaagagttcagccaaagcatgggtcttgcagttcctccagccataccgagaaacattcttcgcaagatgggccttaacaatgtccctgggcttcgttcatcataatctcgatgtcacgatatcaagcagaagacgtgtgctacagcacagtacatgcatttgaccagccataatgctgttaacttcgtaaacaacacttgttgctggacttaagtaccgcagttaacataagcagattggtttgctgatgacctgaagtttctacaagcatcctcatttccaacccgtacacaagtcctcgggtgtagccagaatatgcattcattttgaagccaaattttgttcggtcgagacatcaacacttcacagagaatgctcaaacagacaaggtgattctacgtatacaaggatttgtcaaaagcatagtgatgtgtatgaagtattaaaagttcgggaagaaaaatgcgctttcctgatttatcgtcatataggggaatgcatgtgttcagtttcaaattctgacgttgtttgtacgcgaatgaaaagaaaggtatagggttgtgtaggggcaacaactactatacaaacaaccgttagatataaacatgcaagcaggtcactcggtctgttagatctagatccaatcatatgttatactaggtgagtgcccgtgcgttgcaacgggatcatataataccaataaaaatatatatataacacggaatgataggagcgttaataagtagtagagat

SEQ ID NO: 44161 - DNA, 1232 bp, Zea Mays
cagcgttctccctgtctgtcgtttgtagatagttctaggtctctccccgtaccagcgtctccaagtctcacgctctctcctccatcccaacgtctccagtctcgcgctctctccccccaaaaacctcgtcttcctccgctcgtctgcgttctcggccatcggtactctccaccggcgctccagagttcatcggtactctctagcggcgctccagagttccagtactcgctgtcctcctccctcaccttgcgcgccgcggactcggaggaggaagacaacccctgggtgcttaccaacgcgccagtggcctcctcggcgccggagaaccgcggcggccggtccgtggagtcgtcactcggcgcctagatgtatctgctgctcatctactggtgcgtcctgcccgcatttccgccaccagcatgccatagcgtacgccgagggcgataaataatatggtgcaaaatccagcattaatgtttgggagcccaagattcagcaggctaacaaatttggcttgtcctagctctggatctttgggggttcatttaaggaggatgtcaacagtatagaggctggttgatagaaatagaataatgcgtaccaggccacagggtgctagatgttgtgctctggttttattcagataaacaccaagatggctatcgcgactagcattctcaacatctcaaactacgcaggctcccaatgtgatatcagcatcttgatctagaagggcagcggatttctcgagggactacgacgggatgcctctagatgtacaaccccgactcccacttcttcctcttcctcatgtactggaccgattgcagcctagctggcgcgcttgggctactcaagatcctaatctacaaggtttatgtagatgggagtaccaccgtgacttgggagctaacttggataatgatctcttagttctcaagatcagttccaataacatgtggcactactccagtgatatgaccctccttattataactgccaacatataagttacctttcttacaatatattttagtccgctacagcgcccgatagggtgctattttttctagtttaattaaggctcccttggaacaatggatataaaagtactgtgtccatcctatgatataaggcactgtaaccaatttttagttttgttccatgatataagggcatgtacaagctagatgttataatggtgtttgggatagctccaggttctagctcca

SEQ ID NO: 44162 - DNA, 1347 bp, Zea Mays
ccgccctccagcagatttttttcagctgccgcctggataaaaatcgcaccgcgcgcttcttcttctccgcgagctcatcttctccctccccagctcctctctgctcgctctccccagccgagcggctctcgtccacgctgctctctctctctcctccctctagctcgctgaccgcgcgcccctgaagcctcctcgccgtgcgccctgctcgctagtgctgcaacttaagccgtgtcgtgccggcccggcacgagcacgctgagcttcgggcctaaattagtcgggccaagatagcacgaaaaatagtcggaccatgccttaccgggccagatgggttgaaataaagcctagcacggccctaaagcatgacgggcttccgtcgggccgtgctggcccaggcacggcacgcaaccagtacagtctccattgaagaatacatttgacagactctgctaacttccaactgcagccgaagaatgtaggaagatgtgtcctttggatccaatgcacgaatgcgctttgcaacgctctcagccagcttgtcgttccagttaatctgacaaccccctaacaaagccttccagaacccaatgcctggctcgctacaagtcatcatcaactagaccaatgcctggctctcgctacggagtgcagccgtgcaggaaggaagccaggaagcggacgctgcggctgcgctcccgcagacccgcaaggtctcctcggttgcggacgctgcgaagcatgggcgactgggtgtgctgtgctctccttgaggcctcgactccggctccgagtccgacctccatgctgcgtcctccctgggaggccgagacagacgaggtcgagatccacagcgagatccgaatggatggcgacggccggcggagggaagtgggagaaaatgggtgcggtgcctgcgtgactacgtctgcggtgataagtgagacggcctgcatgagtgtgtgactgcgtctgtggctggaccgtcctgttttcgtgacgggccggcacgaactcggcccacagtgacgtgctgggccttgtagcacgacgggccgacattcagagcacggcccggcccgcaattcgtgtcgtgctaacccgaattaaatcagctgtgtcgggccgtgctttgttacattttttacgggccgtgctcgggccggcccattaggcacgccccagactttcaggactactgctcgctccagctcggctccctggcgagcgccgctgctctctctccctgtccccagctcgccgcgctcgcctgctctcggctcgccggtgttgctgtactccagctccctcctcgacctctcctcctcccacgctctgctccctgcg

SEQ ID NO: 44163 - DNA, 3586 bp, Zea Mays
  misc_feature (1)..(2): n is a, c, g, or t
nnaagcttcctcagttaattgatgatccaaatgctgagtttcagccaagtcctttttttacggaacaactgacggcttttgaagtgtggcttgatcatggctctgaggacaagaaacctcctgaacagttacccatagttcttcaggtactgcttagtcagtcacacagatttagagcgcttgttctgcttggaagatttcttgacatggggccatgggcagttgatttggccctgtctgtcggaatatttccttatgtactcaaactgcttccaacaaatacaatagagttacgtcaaattttagtgtttatatggacaaaaattctctctcttgataagtcttgtcaggttgacttggttaaagatggaggacatacatattttattaggtttcttgacagtttggatgctttcccagaacagcgtgcaatggccgcttttgttatagcagtcatcgtggatgggcataggatgggtcaagaggcttgtatgaatgcagggcttatagatgtttgcctgagacatctgcaacctgagaatcttcatgcacaaacagaacctttgcttttgcagtggctttgtttatgccttgggaaactctgggaagatttccctgaggctcagttacttggtctgcaaacaaatgcaccagaaactgtaatatgcttattgtcggagcctcgacctgaggtgaaagctgaaataaatgtagttcgaagccttctccagatatcttcagatggtagtccccttgttagatctgaggttgctatagcgcttactcactttgcgttgggtcacaacaaaaatctcaaatctgttgctgcggagtattggaaacctcaatccaaatcgttgctgaagtcattaccatcattggcaaatataaataatccaagcaatgtttacagtcccaataatattctccaaggcagcattggtcctgtgctgagggttggcagtgatagcggtgccgctggtcgtgatggacacatttctacaagtagcccaattgcagcaagtagcatcatgcatggctctccccagtcagatgattcttcccaacactctgattcaggcatattactgagggagaatgcaagtaatggtggtctcagctacactaggtcgaggcctgttgataatgtcatttattctcaatttatatcaactatgtgttctgtttctaaagatcctgacccaagaattgcaactattggttggagagcactgacccttataggtgttgaacaagtggccatgaaaagtactcgatttaacagtggaggtctacaccgaggagagacatctgcgtcaacctttggaatggcacactcttcttcttggagagatatgaattctggaagcaactcgatgaaatttatgacccctcctgttagccctcctcagcatgattatcttctactaggattgcgccgagtgtgttctatggagtttggacagcatcctataaattcacctgatggctttgctaatctccttttaagctctgctacaggtcccagtaatgcagaactaaagaaacttcccgaatcaacaatttacaactggagttgtggtcacttctctaggccacttttaactgcctctgatgataatgaagaaaccaatgctagaagagaagagagagaacggattgcactagatttcatcactaagtgccagcgctcctcagcctgcaagattacaagccaaattgctagttgggatacaagatttgagttggggacaaaggcagctttattattgccattttctccgattgtcgtagcagctgatgaaaatgaaaaaataagtgtgtggaactatgacgatgcacaaccagtgaactcttttcacaaccataagttgtccgacagagggctatctaaacttttgcttatcaacgagcttgatgagtgcttgcttttggctgcctcaagtgatggaaatgtacgcatatggaaaaattttgcttgtaagggagggcagaaacttgtaactgctttttcatcagttcagggacatcgagctgctggtcgcagtattgtgattgactggcagcagcaatcttgttatctgtacgcatctggtgacatgtcttccatcttggtatgggatcttgacaaggaacaacttctcaacaccattccgtcatccgctgatagtgccatttctgccctgtctgcatctcaggtccgctctggatactttgctgctggttttgctgatggttctgtcaggatatatgatgtttgctctcctgatagtaggcctgtctatgtggccaggccgcatgccccaagaacagaaaaggttgtgggcatagggtttcagcctgggtttgatccatacgagattgtaagtgcatctcaagctggagacattcagtttcttgatgttagaatggcagcagaaccctacctgactattgaggcacacaggggttcacttacagcattagcggttcatcggcatgccccagttgttgctagttcagccaagcagatgattaaagtgtttagtcttgaaggagaacagttgaggataattcgctacctgccatcttttatgggccaaagaacaggcagtgtaaattgcctttcttttcacccatacaaatcactcctggctgccggtgctggtcataatgctcttgtctctatctatgctgaggaaaattacaagtaagatcgaggcctatatctcatgctcatgataatgcagacacagtgcgatcgacaggccttacatttttggccaagtgatgctccacagcatggtgcagcttcaagatccaagatgatggtaagctttgtcacagagaaggtgttgatggctccatggctttcggtgcatattgcctgttggacggcgtgtgcaatttgtatgatacagtcaagaactcaagattcattaggcctccttgcattgtgaaccctaccctgatcctgccgttgaacttggaggccccatcaacaaattaatcatacctaagttaaccaaaatgtaaatagccagtgcattcgggttgtactttgtcagcattaatccctttttcaagtgtaaaaaggtctgaaggtgcttgatatgataaacatggcttggtagtggctgctgactgggcaagtggggttgtgcatatgggcctggtcgcacatttctgctcacagatgatgttgaatagatagatgtctgctcacagatgaggttgaatagatagatgtctgctcacagatgttgttgaatagatagatgcatttgtccagctaatatagcgctagatgggggtagcgttggcctgcatgaatgaaggaaagttgtcgagtgaggagtgaccttcattgccattctgtgccgcaacaagtctccatgtgttatcagatggccctgtagataatacatatatttgtagatgtgttttgttcggtgaattgtgctgaccgctgagtaaaatgtattgtgaacgttgttgataaatgctattgtaatgaatttgcaacaagaaaaaattatatgctattgtagtgtatatcacaactctggttgctttttatttttatttttttaaaaaaagatctttc

SEQ ID NO: 44164 - DNA, 2779 bp, Zea Mays
atgccactctcggagccgtcggcgccggccgtgctcgcggcgctgccgcgggcgctctccctcgcggccgcggccgtcgcggccgcaaccgcgaccctcctcctcatctccgccgtcttctccaccccccaccacgcggcgtcctcctcgtcccctcagctttccccgtccgccagcgcctccaccgcggcgcctgtggccccggcgcccgcacacgcgcccgactccggcccaggccacccccaccccccgcctcccgttcccccgtgccctcccaacgccacccacgacgtcccctgccacgagcctccctcgcgcgagcgccactgccccccgcgcccgccgccgccgccgcctcttcttcctcacccgccaaaggacccgccgccgcaccctccgccgcactgccgcgtcccgccgccgcccaggtaccgcccgcccccgccgtggcccgcgcgccgcgaccgcgcgaggtacgccaacgtggacctcccgccgctgcccccggttaaggcggcggatggacagcagcaggaccccgttcacggtcgcggggagtggctgctgttcaccgacggggtgcagggttatgtcgagcggctggagcgcgtcgtgccgctccgcgacggcgtggtgcacacggcgctcgacatcggatgcggggtcgcgagctttggggactatctgctcaactatggcgtactgaccatgtccattgctccgagggatagatttgaaccgcaggtgcagctcgccttggagcgtggactgcctgcaatgatcggagcgcttgttgcccacaggctaccgtatccatcgaggtccttcgacatggtgcactgtgcggactgccgtgtcccatggactgctcatgatgggctctacatgctggaaatcgaccgtcttctccaacctggtggctattgggttttctctaagccacccgtcaactggaaatctacatacaacatttcgaatcaagggaccatagacaagcaggacaatcaagtagctatggatgacatgtcgaaaaggcttcgttggacgaaggtgtctgaagagggcacaatttctgtttggagaaagccttcttgtaatctccattgcgaccaagaagcaaatgcaaagcttgctggattgccaccactctgcacaggagaagacccagatagtgcctggtatgcaaatatttcaatgtgtatgacatgtattccaagagctgaaacttttaatggctgtgctggtggtgccatgaaaaaatggcctaaaagacttggtgcagtgccaccaaggatagccagtggggaaatcgagtggctgtccattcagagatatagatacgacactctggtttgggagaaaagggttaacttctatctcacgtatctaaattttttgtctaatggaacctacagaaatgtcatggacatgagtgccggttctggtggctttgccgctgctatgtccaagcatcctgtctgggtcatgaatgtggttcctgcaaatacgacagagaacgcccttggtgtcatctatgagcgtggtttgattggaacatacactgactggtgcgaggccttctctacttatccacgaacatacgatctgatacatggtaatggaatcttcagctcccatattcacaagtaagtgacccgctaacttggcgatgttaaaaagccactgaaagagaacaacaaaaggcatagactgcgatctgcgaagcaagtgaacaattcaagtgtgggattatcgacatcctggttgagatggatcgtattctccggccagggggtgccgtcatagttcgggacagagccgacgtcgttctcagagtcaagaaggacgccgaccgtctacgatggcatagccgagttgtcgacactgaaaatgggcctctggatccagagaagctcctcattgtggacaattccctgccactcccagggagctgaatagaagtgagagcactagcaagaacccgcaggatcagatcaggcttctaggtgacggtctgctcatgtttcgggaaagagccggtggtctggtctgcgaccttactacctgttacagtatgtcttttcggtttaagaagatctcactacatgtgcagcagaggtacagatgaagggtctacaggcgactgggatgtttattacatgtacagacaggtgttggagaaacaaaatgctacgtattacctttacagaggaagggttcaaggctattggctatcgtacagcgagagattcagaattgcatgcaggtgtacctacatatatgaccagtggtccaatatattggagtcagtgacgactccagtggatgccatttcttagctccaatatgatatgcagcctgatttctcatgctcgaacgactagctgtgcagttagaactatccggtctcgattctgtagagtatgtctacgttgagtgtacctttttttttggtaaatccattcatgtacatttgtataggttgttgtattgtagatcttgtgagctgtgttgtttggtcgctaagcaatctacggcgtattatactgcggcatagagtgtacaggggaggccagattacacctgtgtctgtgtgtgtctctgtccttccaactttcccggttcaggctgcggtgccgagagtgggattgtgttatttggggtgttgtacaagccaagtgaatgtgcagatcgagtatggacatgatttctttcttatacagtggccgttgtcataattttcacaatggcaggtcattattgccgcgtggaggtggtg

SEQ ID NO: 44165 - DNA, 1375 bp, Zea Mays
tagtgtccgccaaaactccgatgttgtcgaagcttgtgttcaaagacgaaggaccttcatcttctacgatcatgttgtgcaagatgttcgatttgttattcatcacagccttagcaagtctatggagacatactaccaggagagtggtcgggccggacgggatggattaccttcagaatgtattttgtattatcggcctggtgatgttccacggcagagttcaatggtgttctatgaaaactgtggcctgcaaaatctttatgacatcgtgcggtattgtcagtctaagaggagttgtcgtcatggtgcattctttcgccattttggagaggtccctcaggactgcaacggaatgtgcgacaattgtgcttccactattgagcagaaggatattgatgtcacctaccatacaaaaattatagtttcacttcttcacgatatgcaactttaatgatcaaagagctacactactacagctggtggataagttcaagtcaaagtggaaaggtttaggtagtttcaatgaagctgttgatcttagaaaagaagaagttgagcagttgatagttaaccttatactcgacaatgttttgaaagaagaatttcagcacacagcatattcaaccaacgcttatgttaccttaggagcattgtggaagccagcactacaaggaaacagagtagtcaagcttgagattgctattgcttctaaagatagagatgttagatccaagggcgcaaaacgaggtcgcatgagtgatttggaagccaaactagatgaactgcgtagggatctgtcatccacgggtagcgatgccatatttccccatgcagttcttactgcgcaacaaatttcactactgagcagccagaagccaaccactccagctgagctagaaaaggttatagggaaggtgaagacaaggaagtacggcagcaagatcattgagctgatgaggtcacatgacaattcaggaagtggccgaggcaaggaggctggcgatgaacacagagctaagaagatcaaaacgaaggatgaggatgttgtttgtgttgagagtagcgaggaagaatagaatatgcccttcacatacttggctttttagtctatcatctcatggttaattattttgccaatcatttcctccgacgtcatctttctgtaatttagactttcacggattaatgcacagtcatatttcttacagagaaagcctcgagcatccttttgaccggttcatagtcttttgcttcggtagctttgtatcttgttgatgatcggattaatgtgcgaatacttgggattaatgtgcgaaaactttgtgccaagtgtttgaatgtactatacacatgctgaggaatatggtaatcggta

SEQ ID NO: 44166 - DNA, 2167 bp, Zea Mays
agtaaataatctatatctagtaagggatgtttagatacaccaactaaaattttatcggcgacaccggatgtttgaatgctagttagaagtattaaatatactgtaactataaactagtgctgtgatatagtaaacattttctaattatagactaattatgtttaataaactttcttctatgattaattttataattaaattatatataaacgctggatgtgatatatactaaacctttgtttgggggaattaaacacccttggatcattttctcgtaggcagagactagagagagcattacccatgggcacttggcccaggaagagaagaagctaaaaaatccagaggaactgtctgacagcttctgccatttcctgggaggctggtaccatttctctccggattctcagctttaatcacggtgcggcgtcagctcctcacagataggaccggcgggcggctgccggctttgtggcgttaagcagtggccggactgccggaggagggcagaggtggtcaggtggagttcgccagttcggagtcgccgattgagtcgggagccagagaggccgagaacggatgcttcctgttgcttgctgcgcacctcgtgggctggaagttgggcgtcagctaattttccgctccgcaccgactgcagccccgggcaccgtatccgctctttagcaatcataacaaacatacccgaaggaagccaacagatttcagtatttcacggtcaccatcaccactcaccagtccctcctacccgcttcccataaaatcttctgatctgtaacgcattcgtcgacgcccacctccgcttcgctctcttgctcttttagtcccatctcccatcccacctggaggcgaatttcgtctggggaaaaagtcggcggccatggccgggcgagactccctcccggagggttctctcttcctcgggttggacagctccactcaatcactgaaagctacggtgctcaataatgagctcaccatagtagcttctgaaattgttaattttgactctgaattgccacactacaaaactgaaggtggggtgtacagagacccagcagatgataggcacattttttcaccaaccattatgtgggtggaagctttggatgtgctgcttgagaagctaaaaccaaagatcaacttcggtaaggtagtggctgtttctgggagtgggcagcaacatggcagtgtttattggaaaaagggcagccatgctgtgttatcctccttggatgctagtaaaagcttgttatcgcaactaaaggatgcattttctacaatgaactcaccattatggatggatagtagcacaacaaagcaatgcagagaaatagagaacgcagttggaggtgcactggagttagcaaaactcacaggatctcgtgcgtatgaaagattcactggcccccagataaggaagatctatcagacagagcctgatgtttatgaagataccgagagaatatctttggtgagctcgttcatggcatctatccttgttggaagctatgcaagtattgatgaaactgatggtgcggggatgaacttgatggatatcaagcaaaggatctggtcaaagtctgctttagaggcaactgctcctggacttgaagcaaagcttggaaatctagcaccagcatattcagctgctggtcgaattgctccttattttgtagaaagtttgataagaactgtttggtcattcagtggtctggagataatcctaatagccttgcaggtttaactctgaatacccctggtgatcttgccattagccttggtactagtgatacagtattcgggataacaacagaagctaaaccaagccttgaaggacatgttttccccaatcctgttgagcctaatggttatatggtcatgctatgctacaaaaatggctccttgaccagagaagatgtacgaaatcgctgtgcagacaaatcatgggacgtttttaacagctatctggagaaaacgccccctctaaatggtgggaagataggattctactacaaagaccatgagatcctccctccacttccagtgggtttccatcggtacactgtcgaaaacctcaacgacgtctcatcagacgctctgttggagcgtgaagtggaagaacttgacccaccgtccgaggtttgcg

SEQ ID NO: 44167 - DNA, 290 bp, Zea Mays
tttgtctacttagttttctaatttactacattgactacttttaaatagcatccaaacatccgatatggctagactaaaatttagtagcctggatccaaacacccccttataagtatgccatggcagctaaaccaatttttaaacatgtcttagagggttaatttattgtttttaatagttcaaaggatagaatgactgattttatgggtgagaagatgaagtaaacaaccatcaatagttggggaaaggtttaagtagactttttccttttttacgaaaagtcggtgctt

SEQ ID NO: 44168 - DNA, 1614 bp, Zea Mays
gaccacagccataaaaagtgctcccatgtacttgttggcatcaagtacagaatcgtgactcatttttgttctcaggaaaagtgtggagatcaccaaagccataacagttatctgaatggtcttgaatatatggactggagagtttcttttcagcagcagtacttcccttgaaaagcatgctttgaaaatattccatctggatattcggcgacttgcattcacttttaccacctttttctttccagtattgtttgaactgcactgtttgtcttctactagaagagggagataggacgtcctgaaggattgtgcaaaattttcaattgtatggtactgatacttgttttgatcaccagcccagtattgcttttggtccatcttagaggttacctggtcagtggccaattgagaaaacttgttacattgtttttgcaaaaggacatggaaaacttgttacattattttgcaaaagcacatgtattgcagaatagcgacattttacgctcctgcacataattatattcctctcctcatctcgtctcctactagggtatcagcacactcagacaggccaagtatctgcatacaatcaactgttactattgtatcatcaaggtatacagcaaatcaaacaacacattccaatgaccttcaaaatggaaagctcactatatgcaagacatgatggagatcatactggctaacataagcacgcaggatgctgggatccaagtctgtgcgcatgaggagacatgtaccttgacggccggatgaccccgcttacttcgtttatgattctcataggtcttttcctggtaacacacatatggacagacgtcgctaattcctgaaagcaaaataaactcatcatcagaaatctctctctctctctctctctttttccccgaatatgacctaccaactttgcattgtaaaacaaacacatgcatgccatacacttgtattttagctctcgctaaagcacgcagcagcgtaaccgtaacgaggcgcggtatcctttcgattctggactgaactccatgtgttcaattcgaactggcctaaggttgtctgcagatttacaaacccgcttacagtcgtgattttgtaatttttatttatgtttttcttacagcatagaacctgctgatgcatcaatgtcccactatctatttgggcacaagatgagcctcattaatcatgaggaatctagcagacgtgttgggttctcttggttcactcccagcgcgcagggggacgccaagaagcactactgatgatgcggcaggctgggggatcggacaggcccacattaaaggcggtctcgtcaacgtcatggtctgcgctgcttcctaccacgagtaaatgaggaactcgaagcttggcaagactgaggagagagagaagaaaagcaggctatactgctatagccagtttagtcacaagttgatcataaattaataatagaaagctaactacaaagatccgccagcaatccactatacattactctaattgcttctttcaacgtcctaaatctcaggaaatactataagatccatgcatagtgccataactctgaatgatgcaagtgttgttttaatatggtccaac

SEQ ID NO: 44169 - DNA, 848 bp, Zea Mays
ctttattgtagtagaaaaggctaagaaagtggaagtttgcatacatttcacttggtcgtccagactattttgaagattcagatactgtagctttaaaatttcagagaaacatgtatggagcttgggagcagtatcttggactggaacatccagacacagctcctaggaaggcacacacaattaatcagaaccggcattcatttgagagacctgtaaaaatttataactaggcatgatagaaatttgagcaatgagctgccaagcaagggctaaaattgctgtcctgaaataaagcgtgccggggcatgttgctcaggtttttcgtggagctggtgagctagttcatgagactccaagtatgatcggggcggcttctcatctttccctgcttttccccggatacatataaagttgtgcagagatgaccccaccgaacaattgtctttagtagataagccagtacttcccgttagatgactttatacagtcgaatagccggcattttagtcgatctttccgttctccagttgctgttggtgctaggaggccttgagctgttgagggtacttgccctgctgtatattatgacgtagagtgtacaagtctttgttgttgacaattacacggtgttttgtaatttcagtgatacacttccaggtccttcagtacgtacttgcctggatggtgtcaatttggcattctatgttagatattgatccatctgttctaaattaaaattataaggcagtttgacttttttaagatatactgcctccgattttctattagttgtcgtttagaatagtgacacggtctccatattataacgtgtctccatattataactt

SEQ ID NO: 44170 - DNA, 3018 bp, Zea Mays
tgaagaaagagagctgttcgtccaccggggacacagacacagttgctggcagttgaccttgcaacctccacgcggatgacagcaccgtactacacgaatctccaacaggcccgcgaccgcgaggcatccccgtcctggcgtccggaatctcagctggggtccgaccgtccacgtgggacaagaccccccgctttgaatgcggcatccctcgtctaattaccttctgattcgagctcaaggccccgacgcaatctccgctgcctccctgatctgtggccccgagacggtaggaaccacctgtcagcctgtactggctaccacgacgcgccaccgactgtttggtgacccatttcttgcgcgagcagagtcgctaatcgatttccatcctccaactaatctcacaccaatcgggtaattagcgaatatatatatatccatatttactagacaagccccccgggtccccagatccgtccacccccacgctccgatccagcccgtccagttcgacgcgaagcggatcgtagccgtccgaatccgaggggtggacccgtgaattccgggaaggacgaggggtagttggctaccggttaaaacgcccgtgccagtggcccccgtcttcctcctctcctacgcgggcggggaagccaaggaagaagaagtagtagttcgctggaggagttggggcctcgtcctcggatccagagcgcggaaacccgtgcgcgcgtccggatcgacccgctcgctcgacggccgcgggcgcgaggctagggatcaggatcggcggcggcggcggcgatggggaagtccgtggtggtgggcgcggcggtcgtggcgtgcgcggcggtgggggtggcggcggtgctggtgcaccgccggcgcaagcgcgacgccgcgctcctggggtccgcggaggcggagaggaggcggcgcgcggccgcggtgatcgaggaggtggagcgcagcctcgccacgcccacggcgctgctgcggggcatcgcggacgccatggtcgccgagatggagcgcggcctgcgcggggacatccacgcgcagctcaagatgctcattagctacgtcgacaatctccccaccggagatgaacatgggctgttttatgcactggatcttggagggaccaacttccgtgtgctgcgagtccaactaggaggaagggagaaacgtgttgtcaaacaacagtacgaggaggtttccattccaccgcatttgatggtcgggacttccattgaactatttgatttcattgctgctgcattggctaaatttgttgatactgaaggtgaagatttccacctcccagagggtaggcagagagaacttggtttcacgttttccttcccagtgaaccaaacatcaatatcatcaggaacactcatcaagtggacaaagggcttttccatcaatggcacggttggtgaagatgttgtttctgagttgagcagggccatggagaggcagggactagatatgaaagttacggcattggtcaatgatacagttggcacattggctggtgggagatatatggataacgatgtagttgcagccgtaatattgggcactggtacaaatgcagcatatgtggagcatgcaaatgcaattcctaaatggactgggttactgcctaaatctggaaacatggtaattaatacggaatggggaagctttaaatccggcaagcttcctctctcagaatacgacaaagccatggactttgaaagtttgaaccctggagagcagatatacgaaaaaatgatttctggcatgtatctgggagagattgttcgaagaattttactcaagttggcacatgacgcttctctatttggagatgttgttccaactaagctggagcagccatttatattgaggacgccagatatgtcagccatgcatcatgactcttcgcatgacctcaaaactcttggatctaaactgaaggatatagttgggatacttccctggaagtaagatacattacccgtcacatctgtgaccttgtcgcagagcgtggagcacgcttggctgccgcaggtatatatagcatcctgaagaagataggccgggacaaagtaccaagcagtggcagtaaaatgccaaggactgtaattgccttggatggtgggctctatgagcattacaagaagttcagcagctgcgtcgaagcaactcttacagacttgctcggcgaagaggcctcttcctccgtggttgccaagctggccaacgatggctctggcattggagctgctctccttgcagcctcacactcccagtatggcgagagtgactagtcttgaaaactggtgtggatcgaacttcgagtgtagctctcatttttatctttttttcccttcaaaacatccctaatattctggctctcctcggggaatttttcggcttcctttcttggctattctgtggatgcacttaaggctctgcagcgggatatagctagtatagagccaatcagtttggaggttatctaatggcataaggtttggacggcaggaacatagaaatggaagctgaacaatgccattcatgttctgcccagtttttcttctccttgtatggtgttgtaaaccaatcaaaacttttaacctttttgtgttggcaataaagaggaggcacgataatttgaccatgtgttctcttcactgcttcgtcaaatatatgattggatttagttttatagtttcgctgttacagtacataaaaacctatattacggggtggcactgtccatcagtgttgttgtaatgagctgtgatgactatcctttgctctggcaaagagcgtgcacaagcacatggcgtcctatatgctaggttctggcctcaggtggtcagggttcccatagccattgctcattctgcttttcttcagacattgcagtcgaaaccgcccttcccatcgtcgtcgatcacttcggcatcggagagttgtttccggcggctacctccatgcacctgcagcagcggagcggcgtcgtag

SEQ ID NO: 44171 - DNA, 2405 bp, Zea Mays
ccagatccgaagccacgcttccagcctcttgttgtcacttattagctatctctcagctaacctccctaggaagaataataagctgcaaaaggcacaagggcgacgccgataccgatgcaaataccatagcgttgatgtaaagtggcgccagaggagaaaaaaaggaagcgagccgagaaacatggacgaggaagaggtccatatcgcagttgggaagaactcaagaaaggagaaagccaacatactgtgggccgccgccaatttccccagggccaccatcgttcttgtccatgttcactggccctccaagtggatgcctttcatgggtggcaaagtgctatacaagttcgctgatgagaaggagaaggagatgcatagaggcagagaaatgaaagtaatggtcaatatgttatcacagtacaaaaaaatgtgcgggacgagaaaggttagtgcacattaccttacacatgatgacactgttgccggtgttgtgaacctcataaagaagctcaaaattaaaagaatagtcatcggttcaaggaacatgtcaaggcaagttgtggttcgccagtgctgtcaggtttggctggtactcaacggcaaacacatctccaccagtgaaaatataggatatggaggggggagctcaggtattttggcatctatacatgagctaggtgaggaatctgacggctacgtgacaccacgaagtgatcttgtagacgaaaccatggatgaggagtcggctgaaatgaatgattctgatcaattagtaacggaagatgaaacattgactgaacaaggcacagaggaatcagtcacttctgaagacatggaaaacttttttcaagagaatgctgatcagtctgatgagatacagaatttcagaaacatagctgacaaggctgaaaaaatcatggaggaaatagaccggctgcaaaagaaactgaaacagctgcaaggagaggagcgtaatcacgacgagaggagcttgtcacctagacaaatggctgcgtcactgaagcgaaagagtctatcagagcctagatatccagagctgcagattccagagaacattgaacaattctcgatgtcgcaaatcgaaaaggcgaccgacaacttccactcaagaaatttcatcggaggaggaggttatggcccagtctacaagggaaaagtgggcagcacatcagtggctattaagctgctgaagcctcgtggtagacaaggtttctcagagtatcagcaagaggtggtggtgctgagcaaattggagcacccacacatcgtgaggctgattggcgtgtgcccggagtcgtgcggcctggtgtacgagcacctccccaacggcacgctcaaggacaggctctccaagggcctcctgtggaaggaccgcgtcaggatcctcggcgagctgcgctctgcgctggcgtacctccactccaggcggccccacgccatcatccacgccgacgtgaagctgaccaacatcctcctggacgccggcaacgcgagccggctgggagacttcgggacggcgcgggcggtgcacgtgaaaccgctggaggaggagaccatcggccgccgcacgaacccgatgggcacggcggggtacatggaccccgtgttcttcatgaccggcgagctcacaacggagtcggacgtgtacgcgttcggcatggtgattctgcagatgctcacggggctgctggatctcaacgtcgcggagcaggcgcgcgaggcggtgaagatggacgccgtgcacagcgtgctggacgcgtccgccgggccctggccggaggtgcaggccgagaagctcatgaagctggcgctcaggtgctgcagcctggagaggaggcggcgaccggcgatcacgtccgatgccgagtggagatcgctcgacatcctacgggctatggtaaacccagctagtaaatcctggaaatggaattcccatgccagctgaatttactgtatgtatgcacctcccagtacatgccttgctgtagcctgcagatgccatgaaacacagtaggggtagctagtgattcttcttgtgattagatatagataagcaaaaatctaagaattgatgtgcattactagaatataagtattcaggggtagtacagtagagaaacaagagatggagcagacagaaatcatgctacatatgaagcagcaattggttagccaagatgatgatggtgcacggttattttttgggaaatctgcacctactcatgttcagtgtcccttgcaggatgcagaaatattatgtgtatattggtagacggtaatataaatctgactatgcacgttttgttcaagatttattacacgaaacggtactgctgatgcatgttccttgaattaatggtgtgagaaagaagtgtcaatcatca

SEQ ID NO: 44172 - DNA, 4201 bp, Zea Mays
tgaagattgtgcctatatcgattgttctagttttgaggcaaataacatcccacggtctatccgttacctatccatttccatgcaagatcattgtgctcagaatttcgaggaacaaatgggaaaactgaaagaaaagatatacattaacaatttgcggagtttgatgatatttggaaaatacattatgttacatctgctcaatattttaagggacacatttaaggaaataagacgtcttcgtgttctatctatattcatatactcccatagttccttgccaaacaacttttcagagcttcttcatctccgctacttaaaacttttgtcaccttattactcagaaatgtcattgccaaacacggtctcaaggttttatcacctgaaatttctagatcttgaacaatggggaagtgatcgttctttgcctaaggacattagccgccttgaaaatctatgccattttgttgtttcggaaaagattgattccaatgttcctgaggtggggaaaatgatcttcttacaagaattgaaagaattccatgttaataaagagagtgttggatttgagctacaagaattgggtaaactagatgagcttggagggaagctcaatatatacgggcttgaaaatgtgagaaccaagaaagaagctaaagaggccaagctgatgtcaaagaggaatttagttgagttgggattaatttggaacatgaaacaagagtccaccgaagatgatatcctagatagtatccaaccacactctaatgttaggagtctttttattgtaaatcatggtggtaccctcggtcctagttggttgtgcagcagcgacaccatatacatgaaaaacttggagactctacatctagagagcgtatcgtgggctaaccttccacctattgggcagttctatcacttaagagagctaaggctgagtaaaattgttggcatatcacagattggacctggcttcttcgatagcacgacagaaaaaagtgtctcacacttgaaggcagttgagtttaatgatatgccagagcttgtcgagtgggttgggggagctaactggaatctgttctcaggaattgaaagaatcaagtgtactaattgtcctaggctgacagggttgctggtttcagattggtctatttcttctatataagacagcactgtatggttccctaatcttcatgacctttacatttatgaatgcccgaagttgtgccttccacccttgcctcacacttcaaaggtatcccgtattcatatgggagacttttcttatgaaggtcgtaccatgttgaaaattaataacccctctagatttgccttcgaaaatctgggtgacctagagacattggtagcttgggatgcactacccttgtcctttatggatcttaaaaagctacattccttgagacgtataaatgtcactagatgtgaggaaacatttttgagaggactggatgatggtgttgtgctacccacagtccaatctctctaccttggacgatttacacctaccaaaaattatttgtcaaaattattcaaatgttttccagcactttcttctttgcatgtgatggcatcaccatcagatgaggacaacgaggaagtggtactgcattttccaccctctagctcgctgagagatgtcaacttcacagggtgtaagaatctgatcctacccatggaggaaggagctggattctgtggcctctcgtcgctcgagtcagtgaccatacacaaatgtgacagaaatatcacaatggatggattcaatcctcacatcacatccagcctcaagtatctatgcgtgtacaatgagagaaatgatggaactgatccgtattctgtagcagcagatctacttgtagcggtggtgaggaccaaaacaatgcccgacgtttccttcaaactggtgggactttatgtggacaacatctcgggagtgcttgttgctcccatctgcaagctgctctccgctaccctcgagacgttaaacttcagtaatgattggcggacagagaacttcacgaaagagcaggacgaggcgcttcagctcctcacgtctctccaattccttgagttttataactgcagggctctgcagtccctcccccaaggactgcaccgccttccttctctccacggaataactatctatgggcctcaaaacattagatcactgcctaaggagggcctccccgattcactacgaatactacgtataactaactgttgtgctgagatttatgaggcatgccagcaattgaagggaacaaggccagatataaatgtacttgcctccaaagctcgtgtgcaaaattgaatacctgcttctgcatgtcttcacagtcagctctgcttcaacatgcctttcactctacaggtaaatactgtgaaaacatcttcctatacgtgagatagttgatcttcatcgattctacagccaggatgatgtcttattggatgatgtgttggtcatggttggcacaaaattcagtagcgttcaaggcaataaacgagaacaagcatgggatgtggaaaattttagaaagtaaagacaagtgaattcttgacgacgttggcttggcaccttagtttgagtacataatgaaagaacaaccttttagcaaccctggagcatctagaaaatatcagacaggagatgtagcaccacaagccattcctttgatcatttgaaaaccattgcggctctttctgattatatcaaccagttgagtggatgaaagaccaaaaaatgctttggaagaagggctcacaattgtggataataaggcatccagtattatagaggaaacaaaggaaattcaaattagacggaaacctgctagtccaagttcttatatgccaaattcatcaatttgcatcctactggagacattgctggcagaggaattgagactggcataggagaactcaatatatgcttgtgaataacgcatccagtgaaagatagtagattttcatcaattcactacccaggatgttgtcgcattggatgagaatgacatggaagacggcgaactagaggaagacaacaacctcatctaagctgaaaatgtgttgcctgtggttgaagaaaatctagcagatgaacaacactgccttccctgtcctctctagacctgaatctctctgatggtttggattcgtccatgattgatcctgtacgatgaaggatcagctcgtccaacgtttttcaaggaacgaactcaatctgaggaattaccttttcattggtcacctggggtactacgaggaatgacttcacgatagacgactcggttttgcgacgcaaaccaaacgccatggttaggctcagatgttggatcagatgattcctcgtggcttcgtgacgcaaaccaaacgacatggctaggctcagatgttggatcgtatgatttctcgtggcttcgtgacgcaaaccaaacagcctgtaagtccgcacaccttatctatcatggtcattgttgagctgatcagtaattggagtcgtgtgataagcttaatggacctcctatttgtcgtgatcttcacagatcaacaagtgagcggcctttgcatgctgcatgagatcaagcaagccgccgactggcaatgctccacctgccattcagttcgttggtgaggtattaatcaccagccatgttggcacttggcggcatgcagatggagcagaacatccaggtgaagcggacagatacatgatcgatcatgagttggcgcagacacaggccagacaaccagaggctatattccaattcatacattccatgataagcaaaggaagatccaagacaacacaaatatacaaatagttagttatacaagcaaaaatcctgttgttttgtgcctcccattttctagtccagaattaatatgacaatttttcactgaaactggttggatcagagaccaggaaaaaaagggaaatgacaactacagctgtgttttttttttcaaagaaggcagctgcccgtcgatgatgtgctcacttgaggatttcctctgccttttcagtgacactgcttcatccttttcagagtcaaatgaatctctacctcatttcactgcacatacttccaaactgatttgctgtaacatacttgagtttcggtatgacattaatttttaactcataagagaacaaaatcagaagaaaaaaaaacaacaa

SEQ ID NO: 44173 - DNA, 1635 bp, Zea Mays
cttgctctaaattctaaaataacgcaaacggtaccagcaagcagcaagcctctctccattttcttcgccggcggcaggtgcacacatcggggaatggcgacctacgaccatgccgccaccccgacaccgcagtctccgggcgtcggcggcgtacccttctcgtcctgcatcggcgacctcctccgcttcgtcctctcctcccacgccgccgcctaccccggtgacgacacggtcgctttccccctctcgccctcctactgcgcccgcctcctcaacgacggcgaactgttcgagaagctggaggcctgtattcagcagtgcctcgaggaggggcggctcccggggccgcccgcggtggttgggattccggctgaggaggaggggccggaggagagagggtggaagctgctgctgccggagaaaggcgctgagttgaagcggatgtacgatgctgttgagtttgagctgcatgttcaggaaccctacttcactcaactcagagccggagtcaagaaggttgaagggagattagcgactggtaactacaaccggattacacaaggttctttgctgctattcaataaatgcctcttgcttaacgttgaggcagttaggaagtacaattcattctctgagatgctgaaaggagagaaaatctcaaatgttcttcctggtatttcatcaattgtagaaggtgtgaaagtatataggaaattctatgcagaggaaaaggagaactcttatggagttttagcgatatcagtttcaaagccaacatctcaaccttacataaccatgaataatatccttgctggattggggtatgatggactgggtagactccttggtatggcgaaaacaactggaactgttccagatggactacctcctccaagatctgcactgctgtcatcttgtatgggactggttcaaccaaatgagtaggaaaggatggtggggcagctttaatgggagtgattcaagcaagaaccaagctgcatctgaaaccattgagtctttgctgcgtgtgtgttgttggatgaatgttcatctgactcaaccctatggtcctgtttttgaaatccgcgtgcatgaaggttatggtgccagatggtctcaagatggttcaaagttcattggattcttggagccctacaccccagaaggctatgctaagggatggaaacactagcaccagctgcctagtagatcttgatctgtattagcgactctatcagggttcatctgcatatcttctgaaggcctacatgttctgttgaatcgaaagagacgatcatgtgttacgtcagctgcctgcctaagatcatgtgttgcatgaccactgttttatttctgaatatgttctttttttttgcaaggcgtatatcgacaccaagtactgatatatgcgtctgaatatgttctacttttattcaaacacacccgccaagatcagttcatagttttgcacaaagacatgcaaatgcaattggacacaacccaaatagaaaggtattttttgtttcaatccaaactattcctctactgcgactaagtactgatgtcatttctggcatctgactaacaaaaagcatacaaccatgaatgtcgctgatgctagttattttgtggatt

SEQ ID NO: 44174 - DNA, 142 bp, Zea Mays
ctttgttgcagagatgaggtctaaatccctctattaaaccctagttagatggctcccaccacttgatgagcaggcactgaagcagactcctcttgagaaaccacttcttgaatttcatcttcttcttctcggaattctacat

SEQ ID NO: 44175 - DNA, 184 bp, Zea Mays
ctgaaggacgtagaaccatctgacgcgtcgcccgcgctgcctgcccccatagggtcaacctcctcatcctgctcaccctcctcatcatgctcaccctcgtcaccctgcacatgagcatcctgctgaggagcctcctactcaccctcctcaccctgcacttcgtctagacagtcgagaagttgct

SEQ ID NO: 44176 - DNA, 684 bp, Zea Mays
cttcggcctccaagtggttcacctttcgatggttgtaggcctggccatggcctcctggtgctttctttggttctccttgtcttgctaaggttttggaagctggctgctgctaaactactttcttcgagcagtgattcgcccagtgaccttgttcccaataatgaaaacttccacggccttctccttgctttggcgctacctgattgttctggttggttgctgaggcaggaaggcgaggtgcctggttgctctagcgctgatactaaattcctccttgctggttgttctaacggtactattgttgctgccgctgagggaactacctctgatactgctgcttgtgctaacgctgatgctgatgctgatgtccttgagggtgaccttgcttgaactgctgaggtgggttgcctgagtaacggggacggctactacccccgacctgagatccaccaatcttgtgtttcacgtcctccatctcccggcgctttctttcggtcatgattgctctatcgatcaaatgctggaatgtcacacccggatttaaggggtaaagccgggtgtgtctcatatgtgcaccaaagaagaacaacacatataatgaccaactatatagagataaatgtcataaacattattacattgtggaagtgtcttacaaaaataaatgataacaataaagcgaac

SEQ ID NO: 44177 - DNA, 230 bp, Zea Mays
ataccgaaggcgccttcgactaagcttattgaaacaaggattgacgaaggcgagactgaaaaatcaaaaactgaagaggcagcaaagatgcccgagattctaaatccttcagcagaagcaacaatgctgaaggcagaaaaaagttctgcaatgacccctagaaggaaaaggatggtaaatgttttagacattttggaaacaatagactccaaacgcccctctcccatgaa

SEQ ID NO: 44178 - DNA, 1798 bp, Zea Mays
ccgacccattgctatcctacctgccagcgaacctgtctcgtctccttgttgcccacgtggcctcgccgtcgccgcgagctccaccttcctcagctctgccccgagcgcgatgtggcgagcgacgaggcggtctccgccgttcctgcgatggctatcgtcggacgcagcctcctctaaggcgccgcggcagcgcgtagcggcgctgtgggggaacggtgactacgggcggctggggctgggctcgctggagtcgcggtggagccccacggtttgccccttcttcctcgcccgcgccgccgacccgcccgcctccctcgcctgcggcggcgcacataccctctttctcacccagaatgggcgagtgttcgctacagggctgaacgactttgggcagctggggataggaacctctgttacacatatgctggagcctgttgaaatttctggatttcacgaaagagttgtagaagtttcagctggcaaccatcattcttgtgcagtcaccgcggatggtaagctctttgtttggggcagaaactcaggtggccagcttggccttggtaaaggtaaagtagtttctaccccaacaaaggttgattgtttgactgacctcagagtaaaaacggttgctctgggatcagagcattcaattgctgttacagaggaaggtgaagtcttgagttggggagctgctggttctggtaggctcggacatggccgtcaatctagcatcctgggattttctctgacctcaactgaatatactccaagattgatcaaaaactttgatggtatcaagattaaaaagatagctgcaggaatgttgcactcagcttgcattgatgaaaaaggtactttgttcatatttgggcagaagactgagaagggatttggaagaccgaacgaagaattcagaccaaatattgttgaagagataccattttcagaagaagttgcttgtggaggttaccatacttgtgttgtaacagatagcggtgatctgtattcttggggttcaaatgaaaatggctgccttggtctggggtattttatctgtgactttttcaataatttccctacatcatcttgtatcttgtggttggaagcacacagctgtagtttcaggtgatgacatctacacatggggttggggaggcgccaatgggacttttttcgaagagggccattcttccggtggacagctgggacatggaaacgacgtagactattttgagcctatgatggttccctttggcacgaatgcaagagccgtccatgtatcgtgtggcttcaatcatactggtgcaatttacgagtgctccgaggactttgactgacgtgccacctgcagacagcagatccgcatgtcttggagacttaggttagttatcaaattatactcgctagaagtgcatataaacagcataaataagctctgatgttggacctgcatttatgtgaagagaaatatagaacaagtgataacacccctgagagggggatgtaaattaaacagaataagggatgaactggatgcattttgtgatgcatcagagttacttgccagtgtatagcatttcttcatttattggctggttctgtattattttgccaggtactaagaaatccattgcctgatgtctcagcaggctgtttgtgtacattatgattgcttgactgcttggtgtcgatgcttgctgtgttttttgtgtgtaaataatacatgaatcagttaatcgtgcttgtacaattaaatatgtacatatatcagtgcatcacttattatatgtacatgatt

SEQ ID NO: 44179 - DNA, 1681 bp, Zea Mays
tgcagcctcgtctgtttgttggtagggggatgcatgaaagtgctttctcacttttcatgtacaccatgttctggattgctcttctcttgataaagtttgcatttagctactacgtggagatcaaacctcttgttgaacccaccaaggttatcatgaagacccccatacatacgtttcggtggcatgaatttttcccaagagaaaagagcaatatcggtgttgttattgcaatttgggctccaatcattctggtatatttcatggatacacaaatttggtatacaatcttctccactctacttggtggaatttacggtgctttccaacggctcggagagattcgtactctggggatgctgcgatctcgctttgattcaatacctttagcctttaactcgtgcctaattcctgttgaaacatctgatgcaaaaaggaagaaagatggaacatgctgacaaggagaatatagcagcaaggttcgcacaaatgtggaatgaaattgtcaccagctttcgagatgaagatcttatagacaatagggagaaggagctgctacttgttccttatgtgtctgatcggacccttggtgtcgtgcagtggcctccatttttgcttgccagcaagatcccgatagcagttgacatggctaaagatagcaatggcaaagaccgagatctgagaaagaggcttgacaatgattattattttaagtgtgcaattgaggaatgttatgcatcatttaagaatatcatcaatggccttgtacagggtgaaccagagaaaagggtcataaataagatatttgtagaagttgaaaaatgcatctctgaggacaaagttattgcagatttgaacatgcgggccctgccagatctctacttcaagtttgttgagttggtaaactacttggagaagaatgaccacccaaacctacctagaaattacatgagaccaagatatgctggacaatatcattagcttggtcacaaagagggcaaacagtagggtgtggcaagccacgcttcgcaagatgttcttttgtccagcatctatctattattctctgcaagagcttttccaaatctgcttccatggtgcaaatctagtaccgatgaaaaagcatcatgcgaacgctcttgcagtgcgatggatgtgactcccgatggggagtgcgctcgcccgggtttgattcctatctagatcaatctggatgtcgcatcggggacatttctcccgaggggaccgagtgtgcctgcctgggattgattcctatctggatcaattcggatgttgcaccggggatattttccctgaggggaacgagtgtgtggtgtggggagtgcgctcgcctggatttggttcctgtctagttcaatccagatgccgcaccggggatatttctcccaaggggaccgagtttgctcggtgggtagtgtgtccctgtaggtttgattcctgtctggatcgattcggatgtcgcaccggggatatttcccccgaggggaccgagtgtgtggtgtgttaagtagtataggtgcatgtgttgcttggtaagtgtgttatgtgatttcgtggccaatctcatttgtgtctgagcgtgcagtctacgtgtgtgcccatatacgagtcagcacgggtgcccatatacgagcgttagatgatagggcaacaatgttttcga

SEQ ID NO: 44180 - DNA, 2395 bp, Zea Mays
tttgggaccttgaaacttttgagttgatcggttcttctggacccgaggtacatcagtgtgcagttttttgactcttctgtagactattggcactctaaagtctaaaatagatatattggttttcttttcctaggatataattaaccttttcttgcttaatgcagaacaaccgagaatactttgagctggctagtgcaatccgttctatgaagttcaacagtgatggtaaaacaattttttgtggattgcatgaaagcttaaaggctctttcctgggaacccaccatatgtcatgatgtgattgatgtaggctggtccacattagcagatctaactgttgacgaagggaaacttcttggctgctcatataaccaaaattgtgtcggtgtgtgggttgtggatttgatgagaaatgagccttatgttgatagtagtgctggatcacacttaaatggaagtataaataggccaattcaatcagatgatagcatgtcatcagtgtttgggaggctatcgatttccagaagcccagccaatgaaattggatcggatactctgcttggatgctcaatgtctggttcaaaagaaagtcctgtctcaacttctgcatcaatgaggggattgtcaaagccacctggaaaaggggacctccggctctcaagatctatttctacacctcttctttctcctagagttagattgaacccaaatttcattgacagacagaagaatcaggcagctactgctgtaccattaccagaaccaatagtccgctttaaagcgaatctctcttcagatgctggaatgttgtctcgcaagtcacatgcatcagcagctcccatgtatagatcaaggtccaatagttctcggtatggtattatggaatcatcttccatacctgttctggccttgaggcatagctctagaaaggatgctggtcccgttcacagtgaagctgccacaggtgagttagcagatattgagcctcaaaatatagaaaaggaaggtttagttgccaatcatggcaaagaagatggcaagttggtacctgtaattgcttcaaggagctcaaagatagtcgaagaagttggctatagaagaatcaccaatgatgtaggatgtaagagagtaaccctagaaagtggtttgagagttaattcagatatggactatagaagcagagctccagaaagccacgaggtgcagcagcttatacatctgtcagaacctgctggtttacatgggaaatttataagagaatcttcaggtgctggggacaataactgttctggttcaatatgcactgagagtgctgagtttaatgaagttgatatctggtacagggtatctggttttgataaatggaaccctgctgctgcaaggaatccagaatttgccagcatccacagaaatgaagtgattggaataagacagttgatggagtcaagtggaaagtatgttgttgacgatcgaccttcctcttctaattacgataacatccagtatgtgacaacactatacagctcgaggctgcatccttcactttctggaaaacttagtgcatctgcaagttatgaagatgatatttctggtctagtggaaaaccatcaagaattcattcatgtaatgaaatctcgactaacaaaactagaggtggtttaccgttgctggcaaagaaatgatataaaaggatctattgatgctacatggagaatgttggattttgctgaactgtatcacattagatgtttgcgcttctctcttacgtcttaccaccagtcttcttgaaagcacatatgacaggcatatgagcattgccttgaggatgattctcagtttcgtgaagagctttggtcccacaatttcttcagccttgttggctataccacctgttggggtagaccttgaagcagagcagaggatggagtggtgcaatctatgtttccaagaactgaagaatgtgagcgtcagcctcaagtttctgacaaggcggcaaggcgaggttgggagattagctcaggagctcagcctttttcttcaggatctctttcaattgtcaagcgtgtaaacagtgaccataccacgacgtgcaaaatattcacgcactcaatttcctttggtcataacagatatagcgacatatagtaggatttacctctagaaagaaagaaatatacagaaactatagggtgaagcttacagggtattttctccgagctagtttgggagcatcatttttttcatagaattcctatttttctaaggtctcgtttgtttcctttcattttaaggaattagaatcttactaatataatatgctattttttttagaatatgacatttcactacttttcaaagttatcatataagcttatcttaaattcatggggtgagag

SEQ ID NO: 44181 - protein, 144 aa, Zea Mays
MTTAARPTWAPAKGGNEQGGTRIFGPSQKYSSRDLAAHTSLKLRKDGQQTQEELQKRNLREELEERERKHYSSKDKSYAERDRRKSSSQLLLEGSKREAEDKIVPREIDADDSDVEPKSDDEREDNTASFLTLFRQISYFGRSS

SEQ ID NO: 44182 - protein, 253 aa, Zea Mays
MPLFPRQAPPTTAPPQPRRPSSPSAAPLRSPRAAGWARRTPRRARGGRPRGRWCRSRRRSTRSWSSRRSYTSTWWRACPFRRISWFQSAAASTPSQPASTANPHVQRLRNKISGGRAQPADRRSHRLVDREPVAPPQLVVPALELPTSRGAGRPGRPEQHGELAAEDGEAAAALVLPRERHRGRHGHGLRLREAGGPDAAALLRRVAQGAGLLAGPLRRDRQPRLVPPGDPAVDVHTHGVLRLLRGQLPVAQR

SEQ ID NO: 44183 - protein, 479 aa, Zea Mays
MVNFGKKLMADQVEEWKGYYINYKLMKKMLKQYVQQTQHGGKDREQVLKEFSRILDDQIERIVLFLLQQQGHLASRIEELGEKRSALEEYDISQVYQLHDAYREVGLDLIKLLRFVDVNATGIRKILKKFDKRFGYKFTDYYVTTRANHPYSQLQQVFKQVGIVAVVGALSRNLEYLQHHEGSFVSIYDRPAVTLKDPIIDQVNHAVQKLTHATNFMQFLGQHSLIVQEDAQSGSEDLVDDQSYHFMSLMLNLVNTFLYMVNTYIIVPTADDYAVSLGAAATVCGIIIGSMAVAQVFSSVYFSAWSNKSYFKPLVFSSIVLSLGNLLYALAFDLNSLSVLLIGRLLCGLGSARAVNRRYISDCVPLKMRLQASAGFVSASALGMACGPALAGFLQTKFKIYSITFNQSTLPGWVMCIAWLIYLLWLWFTFKEPEHFTKTLVNEHPSESGRQGNSNLEEGLAQPLLLGVEQRQDENSDDR

SEQ ID NO: 44184 - protein, 289 aa, Zea Mays
MLDFFKAKVVAEDLGVVKKIVEEGKGWETPREPYEITARITVRTADGKEIIPSKEEAYFFTIGKSEVPKGLEMGIGTMARKEKAIVFVSNTYLTKSSLMPELEGLEEVHFYIELVQFIQVRDMLGDGRLIKRRVVDGKGEFPMDCPLHDSLLRVHYKGILLDEPKSVFYDTRADNDGEPLEFCSGEGLVPEGFEMCVRLMLPGEKSVVTCPPDFAYDKFPRPANVPEGAHVQWEIELLGFEMPKDWTGLTFEEIMDEADKIKNTGNRLFKEGKFELAKAKYDKVWLPLD

SEQ ID NO: 44185 - protein, 435 aa, Zea Mays
MAHEVGDNGGELPPPAKKKSPAEEEAEKRRKKLTPGSLMKGIIRSGSGDATPAEGDQVILHCTTRTMDGIIVNSTRREHGGKGIPLRFVLGKSKMILGFAEGFPTMLKGEIAMFKMQPKIHYAEVDCPVAAPDGFPKDDELQFEIEMLDFFKAKVVAEDLGVVKKIVEEGKGWETPREPYEITARITVRTADGKEIIPSKEEAYFFTIGKSEVPKGLEMGIGTMARKEKAIVFVSNTYLTKSSLMPELEGLEEVHFYIELVQFIQVRDMLGDGRLIKRRVVDGKGEFPMDCPLHDSLLRVHYKGILLDEPKSVFYDTRADNDGEPLEFCSGEGLVPEGFEMCVRLMLPGEKSVVTCPPDFAYDKFPRPANVPEGAHVQWEIELLGFEMPKDWTGLTFEEIMDEADKIKNTGNRLFKEGKFELAKAKYDKVWLPLD

SEQ ID NO: 44186 - protein, 1063 aa, Zea Mays
MWNGAPPPPPPQMAAAPPPPGTTVPGAGQPPPPPPPAGAPLGGKPLTPAELEAQLVEKARKWHQLNSKRYGDKRKFGFVEAQKEDMPPEHVRKIIRDHGDMSSKKYRHDKRVYLGALKFVPHAVYKLLENMPMPWEQVRHVKILYHITGAITFINEIPWVVEPIYLAQWGTMWIMMRREKRDRRHFKRMRFPPFDDEEPPLDYADNLLDVEPLEAIQLELDEEEDAAVYEWFYDHKPLMKTKLINGPSYRKWHLSLPIMATLYRLAGQLLSDLIDRNYFYLFDMESFFTAKALNMCIPGGPKFEPLYRDMEKGDEDWNEFNDINKLIIRQPLRTEYRIAFPHLYNNRPRKVKLGIYHTPMIMYIKTEDPDLPAFYYDPLINPITSTNKVDRRERKAAEEEDDEDFCLPEDVEPLLKQTELYTDTTAAGVMIGIDLAYNLHSAFGNWFPGSKPLLQQAMNKIMKSNPALYVLRERIRKGLQLYSSEPTEPYLSSQNYGEIFSNQIIWFVDDTNVYRVTIHKTFEGNLTTKPINGAIFIFNPRTGQLFLKVIHTSVWAGQKRLGQLAKWKTAEEVAALVRSLPVEEQPKQIIVTRKGMLDPLEVHLLDFPNIVIKGSELQLPFQACLKIEKFGDLILKATEPQMVLYNIYDDWLKSISSYTAFSRIVLILRALHVNNEKAKMLLKPDKTIVTEPHHIWPSLNDEQWLKVECALRDLILSDYAKKNNVNTSALTQSEMRDIILGAEIAPPSQQRQQIAEIEKQSRETTQLTAVTTRTTNVHGDELIITTTSPYEQQAFASKTDWRVRAISATNLYLRVNHIYVNSDDIKETGYTYIMPKNILKKFICVADLRTQIAGFLYGLSPQDNPQVKEIRCIAIPPQHGTHQMVTLPSNLPEHEFLNDLEPLGWMHTQPNEAPQLSPQDLTSHAKILENNKQWDGEKCIILTCSFTPGSCSLTAYKLTPSGYEWGRSNKDNGSNPHGYLPTHYEKVQMLLSDRFLGFYMIPDNTPWNFNFMGVKHDPQMKYNMKLGMPRDFYHEDHRPTHFLEFSNIEEGEVAEGDREDTFT

SEQ ID NO: 44187 - protein, 827 aa, Zea Mays
MSRFLSPSSPSNPLPLSEKKVILSGVQAPTRSGPPPPPPNKLGHAQQLMRSLRGVLIPLVLLAGLAFRVDDGGAALLPLPPPALPASPSRLALPGGTPKDDGAAASRSTEVVTAGVRSTEIVAPVGPKKQSLRELLVRPQPARHEPSSLVSGEAKAETRSVLQFYDNGTIQLVDKLSQSPLWEIATGPPLSDHITTTESGPNYLIYPFNGNENMNGNSTELWEVYNGNSVRLPWKLEEFVARSPYIRDSVVTIGSKVSTVFVVDADSGEIIYRHSIPSALKELEGPGVEGAPSKLNVRTSDDSDNIIVLVRTDYSLSASDLGNHLFNWTRTSFTANYYVKYKHPDMLDQSSCLQGDIPCIRTEGLPLALPDLNSANVIVLKDGTPFVSMHGSDALEPVQTPRKLPNTAGKSNILLDDSQNQTHDVARSHAISADPEATLNPTRNTSGWLFPLFPIFLVTGYLLSLISASKSCRQFMIQLIEPFTHNKKTVDIRGRSEGTPKKRKTRKKDGLVNSSETLTASDKECSDTGGSTEAPMKNSALTDALGGRQIGKVYVSNKEIGRGSNGTIVFEGSYDGRQVAVKRLLRSHNDIAEKETRNLIISDHDPNIVRLYGCDHDSDFVYISLERCHCSLADLIQKQSYLSSGESISNNEVSMSINSKISNVKGIDVELWTQDGLPSAQLLKLMRDVVAGLVHLHNLGIIHRDLKPQNVLISAEGPIRAKLSDMGISKHLQDDMTSVSHHGTGIGSSGWQAPEQLRHGRQTRAMDLFSLGCLIFYCITKGKHPFGEYYERDTNIVNNRFDLFVVDYIPEAVHLISQLLQPNPETR

SEQ ID NO: 44188 - protein, 956 aa, Zea Mays
MCSTAVLLVRTCVVLVCLAALARAPAKVHAASGTGDGLLAIPTNASLSHCPSWCGDVQISYPFGIGPGCFRQGFELTCDQTAPSPRLFFVSRNSSIQVTSLYVGSSVVLASAVGFNVTMSAGVDTYTKSWEAPTATGVSFYADHNFLYTVGCGVYVYVFGDNMTDIIGYCTSICTDNREIMESVGACEGLGCCSILMRGGQGFTLKLGRLNSTIPQFGEALSSVKIIFSEYYEFVTDDVYASWVNTSNVHGIVLDIAITDQPSCASARSQENKDTYACTSESICDDVQGGYSCVCPGQIEGNPYIKDGCIAYYNPEAPSIRNCTRLCGNISVPFPFGIEEGCYANDNLRLNCTINDTTLILDRGYAQYCVTNLSLDDGLLMVTNMLNATSFNNMERVVITNYDGYYQNGFYSTDEDVVDGNYDFSQEDTTIKWFIANITCQKAMQNNATYACVSDNSICKDVMRGNIRDGYRCKCSDGFQGNPYLQNNCTDINECFIPNKCNGICHNFDGGFNCTSCPHGKEYDPKNQKCVMSAKQRILIFGIVIGLVCGLGSISFALGAIVLTGKWKKGIQRRIRREYFKKNQGLLLEQLISNENATNKTKIFTLDELEEATNKFDATRVLGHGGHGTVYKGILADQRVVAIKKSKIVEQIEIDQFINEVAILSQIIHRNVVKLFGCCLEDEVPLLVYEFISNGTLYDILHENIATKCLFSWDDRIRIATEASGALAYLHSAAAIPIFHRDVKSSNILLDDNFTVKVSDFGASRSLSLDETHVVTIVQGTFGYLDPEYYYTGSLTEKSDVYSFGVILVELLTRKKPIFINESSAKQNLSHYFIEGLQEGALMEIIDSQVVEEADQEEINDISSLIETCLRSKGGHRPSMKEVDMRLQCLRTKRLRNKTHLLIEKGGEMEPLLCVEAQHPHERINPIYNEEHLTIPMMSGCYSLEQELAAASSMVR

SEQ ID NO: 44189 - protein, 361 aa, Zea Mays
MSGGGSGSGDEFGRAVARAAVAQALEAAGFDCAHRSAVDAVVDVLLRYITHLGRSAAFNANLAGRALANELDVIQVLEEVGADTDGFAGAADTGRCLVGSGVVRDLMAFVDSKDEVPFARPLPRFPVQRVQPQPSASPAAAAAGRETGLKHVPEWLPAFPDPHTYVSTEVWDEPSATKDRVDKVEQVRQRRKAEKSLLSLQRRLAMAGADGFHPAVALAEDSAEKGKEIQAAGTKRNPFLEPALPPGEKDVSEVGMPPEKKKLSVLEAFAPAMQSRTIVRDVDAGAGLDENQRSIVPKERAPVHLKIGFGKKPLAAALNSRTLDLREDPSFLKEEAKDDKKRRAGMILRASMENPQELPQL

SEQ ID NO: 44190 - protein, 300 aa, Zea Mays
MEAVRGDGRWCVVTGGRGFAARHLVTMLLRSGEWRVRVADLGPAITLDRDEEEGFLGAALREGQAVYVSADLRDKAQVARAFEGAEVVFHMAAPDSSINNFHLHYGVNVDGTKNVIDTCIRCKVKRLIYTSSPSVVFDGVHGIFNADESMPYPDKFNDSYSETKADAEKLVMRANGREGLLTCCIRPSSIFGPGDKLMVPSLVAAARAGKSKYIIGDGNNYYDFTYVENVAYGHVCAEKTLSSEDGAKIAAGKTYFITNMEPIKFWEFMSLILEGLGYERIPLRPNAYGDLRWTCPNHLN

SEQ ID NO: 44191 - protein, 84 aa, Zea Mays
MLISVSALSGPKEFTSVFYSLQNWRAIFERFDRDRSGRIDMSELRDALLSLGYSVSPTVLDLLVSKFDKTGGKSKAIEYDNFIE

SEQ ID NO: 44192 - protein, 256 aa, Zea Mays
MAGYPPPGSGYPYGPGGGYGAPPPPYGSSPAPSAPPYGEKPPKEGKTSTSSAPPYYGAPPPSYGAPPPSQPYGGGGGGGGGYGYGASQPPPYGGAPQQQPPYGGGAPAGFGSPFASLVPSAFPPGTDPNVVACFQAADRDGSGMIDDKELQSALSGYNQSFSLRTVHLLMYLFTNTNVRKIGPKEFTSVFYSLQNWRAIFERFDRDRSGRIDMSELRDALLSLGYSVSPTVLDLLVSKFDKTGGKSKAIEYDNFIE

SEQ ID NO: 44193 - protein, 50 aa, Zea Mays
MSRFEFVYAGAGQFRSPCIRLHERGSEMRAFEPMQALVSQEARLPPTNHA

SEQ ID NO: 44194 - protein, 151 aa, Zea Mays
MERGAVVLPLQGAGVGRVLLPVQVRVRSFLRSRRATERRRRLASSAAPARCSKMYVPGFGEGSPERKAAINLQHFFNYIAVSIVLAQLESYNREAYLELKEFISRTSLNDAEIFCEKLMRESPRLKGLGPICICEERVRVGQFEGIILQDG

SEQ ID NO: 44195 - protein, 236 aa, Zea Mays
MALMSLGAAGYTTATAPPRPRRCTLPFRAAASPAALDRRRRPHNVAGDFFVDHRCIDCQTCRWMAPEVFKRVDGKAAVAAQPSSEEERTKALQALLSCPTSSIHTEKPPKDILKVQNMFPLPIDDKLLPGVYLCGYNSEDSYGATSYLVIHPQGNILIDSPRYTPKLANNIEKLGGARYMFLTHIDDVADHRKWAEQLKCERIIHSGDVEEATADVEWKLEGNGPWNLGTDFELIT

SEQ ID NO: 44196 - protein, 156 aa, Zea Mays
MPLSLLSVSVVEHQQSTSSPLAERFPRGAQDPSQTRSAPWSVCHLADASSAPPPVARPYLLLSPWRLPLDPSLREPSPAARQCRPQSPMAQELPILLLLGRRRWARPVSRFLCSSSNRLKVFQFVSSSNRYSSSAPWRSQPSMPCPCNLVSSSCPP

SEQ ID NO: 44197 - protein, 192 aa, Zea Mays
MIILGTATIQKFEAVNLLLALILLFTSYKLFAEEEEESDLSDNFIVKTCQKFIPVTDYYDDNRFFTNQDGVWKATPLLLTLAVIELSDIAFAIDSIPAVFGVTRDPLIILSSNIFAISGLRSLYVLVSESMGELEYLQPAIGIVLGFIGTKMIFDFFGYHIPTEASLAIVTTCLSGGVILSLRKASKEKGDK

SEQ ID NO: 44198 - protein, 735 aa, Zea Mays
MLFTLQKENVANVLNRSTIETTDTSQALEGTHNLAMEALQPNIQAGIHTRNLPVKQLGGMIFGCKPDTIEECFKKQLFGLPAVHYSYVKNVKPGMPLFLFNYIDRRLHGIFEAASLGQMSIDPYAWSNEDLLKTPFPAQVRICIRTRYPPMLESRYKTVLGANYYDRHLFYFELDHTQTEALISLFKLLPLVNNQVPAAPRERSIAVSLPPTKRKAPVLPDPKKVKENSKDINPFSVLSNASDGAQENWVDFDSDVENASINENSHSDTDEKEFEEPVSDWEDLDDNALQYQFSPYSNSDEVSQNSSYKTVCQEVELAECIPPVVNPASEEKLTMLVHNEHKAAVCIGKIESEVNSIMDGVGLQPERHTILKKLKELFSMRQQGVSSQDCVESSPDQCVPEETLSCDPLDVTVEDKTSFQEHLGEFDELRQIIADLSKRAEALEKKQKGSDQDLLFLREVVKDSGRKVQQLEYLVDELQFRFDSSLSLPGSMHNTLAKPSIFLIGGYNGGKSSWYNTVECYSSRNNEWIECPSLNRKKGSLAGISLNSKIYAIGGGDGNETFSEVEMFDPYLGKWLCGPSMLIPRFALAVAELNGTIYATGGYDGSMYLQSAERYDQREGVWVRLRSMNTKRGCHALTVLGESLYAMGGYNGDKMVSSVEIFDPRLNAWRMGDPMSAPRGYAAAVTLDGSAYLIGGLESNVQILATVEVYNASSGWSVLGLSSLGKRSFASAVVM

SEQ ID NO: 44199 - protein, 491 aa, Zea Mays
MRNNQMFQRLGINQLRTMMTATRVKSKYDGPEESGSLFDGEDSEGSEPEEDSHVAQGVRSHNPTHVADKPTQQTRDSKRVVAPDVHGQQIRFTRQRSAAINQQSSLSLTTTTQAGSRATTNQESTQNLAAATQFTSSVATEQDYTAGLTTTAQPTSPTQAEVNDNNRDEELVPRQRSRGKQLESLSRGLGTKIPIQISNGKRRPEPPIQTAKFASEGGIILRQHIPIFPHWKEYKKQENEGKITDYIGKLAGQFTMDVESNAVKDACVDMLKGGQRQMRYRLKKKYFTGVPANQVRTTSPNNCVKNKLNREKVQFPQCTGSQSYVAKAYVVRQEKYKDVEPSAIDLFKEMHCSKKKGFSEVVQKAIGDMEAMVATPAEDGQLTKSATEVVSNVLPGSSKFLHNAGLLPSSKRSNTGTVSARMQELQSQLDNERREKDGLREDMDTLKAKSQASEATIANQSTEIADLKKSLAENSILLRQILSISRDQLNP

SEQ ID NO: 44200 - protein, 218 aa, Zea Mays
MDSSVCIHKTSEAEVVKNAKRCLEIVSLMKSSHEVRETKNGWWPPPHHESLVKIGGPELVLWANEYIPTYKLQINANALENSNLEVEGLYELESNRREVLLTHSQLVELGNVLDMYFEDQFTLPGKTFHPYWNPDLSKIKKNNGYLNNLFTFLAGTCIFLFVTIFAQLCWPQSFRDKRLFKESSNASLSQNYCSDIKSLYNSEVLSYLVMGEFVVCPR

SEQ ID NO: 44201 - protein, 1134 aa, Zea Mays
MHLYNAWLPPPVSTAARGEAAAFAGAVRTAADAWLPGDSDSAYATLKWISVFDLFIKAKSDIASEDLQALVKLGLEVFHASHNKFVVQIKWGGLLIRLLRKHGKRLSLVVQWRPLYETLIRTHFKRNMGPEGWKVRKQHFETVTSLVCASRNFFTEGVAAEIWSEFRPLLENPWHNSAFEGVGFLRLFLPANSRNQDHFTTDWIRNCLDIWDSVTNCNFWDIQWASIIARCIKNSRSVNWDAFLPLLFTRYLNMFEVPISSGNGSYPFPVEVPGNTRFLFSSKTRTLSKAIAKSVVYLLKPKSLAFEYFEKLINFLEQFYHPSNGGRWTYSLERFLRYLVVYFEKRLQHEQFVMAVEDHDQSYLGKEERSVFVKAILKLLDRGQYSKDNSLAETVSVATSILSYIEPTLVLQFVAKNFQRALETTTATHQLKNAVTSVAFSGRALLLCSLCSSQNDDSSVVDSFSDLVVASLSNALLGMDANDPPKTIATMQLIGSIFSNLAAVSDDVPILLQSTTLSNWLDEFFSRLFSVLHNLESSSPINEGYQSSFMSGTFLVDSPYYFCMLEILLGKLSKPLFNQSLKRIAKFVNANILPGATSEVGLLCCACVHSYPEEASVYLVKPILETIMSSFEGTPTTGYVGRVVADKASTKAALSPALETAIDYYLRVLAISISYAGPTLLNYKEELNHIITSAFQSPSWKVNGAGDHLLRSLLGNLVSYYPIDQYKPFTCQPIGNIIEPWGCSKAHQDREDEMLNFPPKWHDPSHDELSFANELLQLHFQSALEDLLTICQTKVHSDTAGDEKEHLKITLLRIHSALHGVMSCLPEIRPSYKDGRSLEVESAFFIAGSAGSTVGSSEMREKAAEFVHIACRYLLKERTDDSILLSLVVRVIDALVNYGSLEYQEWSSHVQAWKLESASIIEPPCNFIVPFHAQGKKRPRWALVDKANLHSTWRCSQSSYHRYRMNADVSPSVPMINLMNDLLDLSLHNYETVRSYAGRSLTKLLKRWPSLISNCVLTLTGNLRDPKAPEHVVLGSCSILISQTVLRHLTTDSVSLSSFIMGILESSHHESLKCQKAITELFVTYNIRFSGISRSFFKTPENQADKPGFLSLISQINALGFETNGLHWRRTAHH

SEQ ID NO: 44202 - protein, 767 aa, Zea Mays
MGVPAFYRWLAEKYPMVVVDVVEEEPVEIEGVKVPVDTSKPNPNSLEFDNLYLDMNGIIHPCFHPEDRPSPTTFGEVFQCMFDYIDRLFVMVRPRRLLYMAIDGVAPRAKMNQQRSRRFRAAKDAADAAAEEERLREEFEREGRKLPPKQQSQTCDSNVITPGTEFMAVLSVALQYYIHRRLNYDPGWKQIKVILSDANVPGEGEHKIMSYIRGQRNLSGFNPNTRHCLYGLDADLIMLALATHEVHFSILREVVYTPGQQDKCFLCGQVGHLAANCEGKVKRKAGEFDEKGGAIVPKKPYQFLNIWTLREYLEYEFRMPNPPFKIDFERIVDDFIFMCFFVGNDFLPHMPTLEIREGAINLLMAVYKKEFPSMGGYLTDSCTPDLSRVEHFIQAVGSYEDKIFQKRARLHQRQAERIKREKAQAKRGDDLDPHVRDDLIVPIQRFQGSRLASGAVPVPYEQNGSHKDNKERNSRARKAARVSTSGSSIASALVEAENDLEAQECENKEELKSMLKDALREKSDIFNSDNPEEDKVKLGEPGWRERYYEEKFGARTPEQIEEIRRDVVLKYTEGLCWVMHYYYEGVCSWQWFYPYHYAPFASDLSGLGQLNIKFELGTPFKPFDQLMGVFPAASAHALPLQYRRLMTDPNSPIIDFYPTDFEVDMNGKRYSWQGIAKLPFIDEDRLLAEIKKVEHTLTPEEARRNSIMCDMLFVNGSHPLSPYIYSLNSKFGHLPDKRRNEIKEKLDPSARLTKLNIVVVRQVILFC

SEQ ID NO: 44203 - protein, 97 aa, Zea Mays
MNRSVWCPFYFRLPIKHYPTKKSNAVILVCNAGVLSTCVVLEGFQTLHDHTHMLPILLIKFLAFLFRIRHLLQYATTRQSNPRHCYTGHLGITILCI

SEQ ID NO: 44204 - protein, 236 aa, Zea Mays
MLLRLKIVVGVHSVVLPVPVPGGYGHGACYAAVEPCWRRSRRPALAAAGGLVARRPRQSATVVMALKEEPEGSSRRGFAGGGPSWDPGLEIQVPFEQRPVNEYSALKDSALYSWAELSPGSFFLRLGGLCLVTFTVLAAPIAAASFNPGKDPLKFVLAAGIGTLLLVSLAVLRIYLGWSYVGDRLLSAVVPYEETGWYDGQMWVKPPEVLARDRLLGSYKVKPVVNLLKQTLPLLV

SEQ ID NO: 44205 - protein, 136 aa, Zea Mays
MALSYRICSWLRISLLAYSPMAMGILSGKYHLSDNCGPPDARMNLFKGRYSEGESRYKLQSPKVKAAVKISAKYGISPVTLAIAFVLRHPLVASAVFGATKLWQLDEVLQATTVHLCEEIVAEINDVHARYPNPCP

SEQ ID NO: 44206 - protein, 76 aa, Zea Mays
MCAFINGDSSTHVAPLLIEIWWHVELLTPPTLYHIFTSTSTGSYELGQQLFLFFVLAFFEMIMRILIFSHCFFLRF

SEQ ID NO: 44207 - protein, 250 aa, Zea Mays
MDHAAEAQRTDLMTITRHVLNEQSRHPESRGDFTILLSHIVLGCKFVAAAVNKAGLAKLIGLAGETNVQGEEQKKLDVLSNEVFVKALVSSGRTCVLVSEENEEAIFVDPALRGKYCVCFDPLDGSSNIDCGVSIGTIFGIYMVKDKDNVTLEDVLQPGTNMLAAGYCMYGSSCTLVLSTGNGVNGFTLDPSLGEFILTHPNIKIPRKGKIYSVNEGNAKNWDGPTAKFVEKCKYPEDGSPPRSLRYIGR

SEQ ID NO: 44208 - protein, 435 aa, Zea Mays
MQFASPKGLLNFLMGGNSSVFARNEGESLSSRVQQIKKYLAEFESGGSATYVPEFPRKLDWLNTAPLQFGRDLKGRVVLLDFWTYCCINCMHVLPDLDFVEKKYKEKPFTVVGVHSAKFDNEKDLEAIRNAVLRYNITHPVVNDGDMYLWRELGVNSWPTFVLIGPNGKVLAQISGEGHRKDLDEVIGAALEFYEEKKLLQNDPLPLALEKDKDSRLLTSPLKFPGKLAVDVQNNRLFISDSNHNRIVVTNLEGQFIYQVGSSEEGLLDGPFDAALFNRPQGIAYNSKRNILYVADTENHALREINFVDETVRTLAGNGTKGSDYRGGGQGTNQVLNSPWDVCYDPAEEAVYIAMAGQHQIWKHNLHDGITKVISGDGYERNLNGSSATSTSFAQPSGISLAFEMHELLVADSESSSIRVVNLKTGGSRLLAGGD

SEQ ID NO: 44209 - protein, 723 aa, Zea Mays
MPMENSVRRVRCPRCHSVLEEPSAPVYQCGGCGTSLRAKNRTGTGTGSTGDAAGASPARSWLPPQSRHLDASDVASTSRSGTPTPPDVGTSWHRDTDATGTRHGSGDLALVSAGTRGSGDVASTSSTPVATARSRRRQGTDATSRGSGDVASTSSTPDTTARIRRQDTDATTRGSGDVASTSSTPDASADTTRRGESGGPVPARNRVPEQAAAALIEKRGREQSAAGQEVRDDSEGRGTRDASGAESGVGGVGFSGGNRDATPELQDDTEKGMKRHDESNDAARKERRGEAAEQPRYDHDRRQELAPKSSAQPAAAQLAREDEAATAGEKAPSPSRHEVQEEHLRPLRKKILKTVDELKGDLSELFSKSPELNAPRARPPRLPRQEAYVSHAVAGAASGLPARARHVASAAEGHRGSVARAAKPRPAAAPPRGLPSRRYRQCRAHPCCHDVDPRPCHHGHGCCGHHGKPECSSCRGYCCRPRALEPSAPRKPPAAKEPKRRLPPRNHCRPVLKGAPFIVCSSCFKLVQVPADFAVSTRMVRRMRCGSCSTVLSYSYRDPARKKAYQDSVNRCSTDGSELHGGTGDQRSDPFAPFIDGFGLSSYSTEDERRLPVSRNTSFDTLDGTKGVGRLHRLMGYGSASELLRHSPDLYESFSERTTPDVRQHDTKGKGVCIDDDDYDYDLDDTDDEDIGALKRSARKGSGWTLPWIPGKRQGDSGAIRIK

SEQ ID NO: 44210 - protein, 107 aa, Zea Mays
MSRKTKNYEEKVKNFFCEHMHADEEIRYCLEGSGYFDVRDKDDKWIRIRIREGDMIILPAGIYHRFTLDSAKYTKLMRLFIGEPVWTALNRPQEDHPARQEYVKNES

SEQ ID NO: 44211 - protein, 477 aa, Zea Mays
MVAETAAIGGETPGQSLNGTVKSTTRAGTFVTLPDGSEGFLPREEEALALFTLIGQSAMEIGKQIRVKVLNVAHVQATLIMKGVEDDEDDLKTLNMELKRDWSRGTNAFELASVGTKRSLHSCIRGKGPKCRLILQFLLRKLKAIRRKLLQKMRKVGIQDSTSVANVVEDQTVGSESSPTISVELSSNGTPDRSIVSPVSETADKPTEPKESSAVEEVLVTASSEAGKEPAADTEAVPALSEKTGAEQLREATGAGMMDCKKALAKTGGDIDKAQEFLRKKGLAAADKRAGRATAEGRVGSYIHDSRIGVLIEVNCETDFVSRVQYISIDDAPKEVVKKETELEMQREDLLTKPEQIRAKIVEGHVKKRLGEFTLFEQTFIKNDKVTISEWLKQTITTTGENMKVRRFARYNQGEGLEKKSQDFAPEVAHRQQRSRHHLLLPRMTSLLKQQNPRRRSRLLQFQPRLRSNSETKPALA

SEQ ID NO: 44212 - protein, 243 aa, Zea Mays
MAIAQHHDAVSGIAKQHTTDDYSKCLALGASKNESINGINIVSCYPLQYTTLKPLADRVIVKINSSEEKTTGGILLPTTAQSRPQGGKKYVKEKCRTTQKINSRTGCFNKSLSMRMACNITCPSIEIGGYGDALLNLIYASPSSQFEELSLECELDATGNHSRVKDAQVHGSPIPESNGRLSTTAQTKMMSTVSEDAILVGSSFRYQSSLGNNNKRVGLFDMGDGSSEPAAEDNNQMHQISRC

SEQ ID NO: 44213 - protein, 110 aa, Zea Mays
MLVAAPATKGSPTKDLTAVEPGDESKREKVLVVECRGHDAARLQNIDHLHGWEDDIVGLVEKEHGNQKVLLSFECETLKADKDAEDHIAKYMPNLCGLDAVESARMNSIR

SEQ ID NO: 44214 - protein, 92 aa, Zea Mays
MRLKPEEVAGMIKDFDEPGTLAPTGLFVGGTKYMVIQGEPGVVIRGKKGTGGITIKKTGMSLIIGIYDEPMTPGQCNMVVERLGDYLIEQGF

SEQ ID NO: 44215 - protein, 376 aa, Zea Mays
MAAASLKFASPKPLASAPSALLCGRRAQARPLPASRLPPPTRVAVLEALIGGTDFSEEDAEATLKLLLDEKDEARISAFLVLLRAKGETFEEIVGLAKAMLSCCIRVDGLDDAVDIVGTGGDGADTVNISTGSTILAAAAGAKVAKQGSRASSSACGSADVLEALGVNIELGPEGIKRCVNEVGVGFMMSANYHPAMKIVRPVRKKLKIKTVFNILGPLLNPARVPHAVIGVYHENIVTKMAKAAQKFGMKRALVVHSKGLDEISPLGPGYILDVTPEKIEKMFFDPLDFGIPRCTLEDLKGGDPAFNAKVLQDVLAGQRGAIADALVLNAAASLLVSGKVKNLHDGVALAQETQRSGKAINTLESWIKKSNSSRD

SEQ ID NO: 44216 - protein, 225 aa, Zea Mays
MHGPQRLGPLLHADEPNDLGFPALHAAHINPETKPSPPFVPRRRRSQSPRGSSASQRSYPMAPTSKLSMGIKRASRSHAYHRRGLWAIKAKNGGVFPKAEKPAAAAEPKFYPADDVKPRVPSTRKPNPTKLRSSITPGTVLILLAGRFMGKRVVFLKQLNSGLLLVSGPFKINGVPIRRVNQTYVIATSTKVDISGVDVAKFDDKYFAREKKQKVKKTEGVQVSA

SEQ ID NO: 44217 - protein, 72 aa, Zea Mays
MPNQRTLVSLRKTSPVMKSLARRKTTPVMKLYLAILIPSLSWKKPVQLINTMFIAEIAIKQKLKNKKTLDGM

SEQ ID NO: 44218 - protein, 726 aa, Zea Mays
MNMELKAEPDTDEVYAQLTLLPDKKQDENTSARVENEEAEEEVVPHVPPATSEGLRIHSFCKTLTASDTSTHGGFSVLRRHADECLPPLDMSQHPPNQELVAKDLHGVEWRFRHIFRGQPRRHLLQSGWSVFVSAKRLVAGDAFIFLRGENGELRVGVRRALRHQTTIPSSVISSHSMHLGVLATAWHAVNTGSMFTVYYKPRTSPAEFVVSRARYCESLKRNYSIGMRFRMRFEGEEAAEQRFTGTIVGICVSDPSGWADSKWRSLKVRWDEASSVPRPERVSPWQIEPAVSPSPVNPLPVRFKRSRSSVNASPSDVSTVNREVASKVMVESQQNNLPRALHNQGRTQLTGRYRDSTDVKTAQDLTMWSSGTEQQRNNIAAQTKRCLEGWTQSRTPEGYNQLFSAFQPLKDAHNPLRPFPNKISGTRSSTWVTADARYPAQQANHNMLHGTLSFMPHSSGFRMIQQNNLVTPEAANFTGKSAFTSLQGHVTDQCSTGWFGSIESNSHTDHASSSLIRSQPLVIGNDVQKTKGTSFKLFGIPLGSPEKSEPLVSPPSVAYDGKLQTSPTDNNEPCSEATQNIQNKVQSSSTRSCKKVHKQGSALGRSIDLTKFACYDELIAELDQMFDFDGELKSPCRNWLVVYTDNEGDMMLVGDDPWNEFCDMVHKIFIYTREEVERMNPGALNARLEDCLSDSLGRGLASKEPRSGPSTSAVDSENRANLSSQ

SEQ ID NO: 44219 - protein, 900 aa, Zea Mays
MAGVSMAAAPEGVLHRRIEFHLARRPHGSVAVGGGGFRMETLNPDAAGKVGPGEAVGSSEGDARRPEKGDSGGIDPELSVARIYLGRIGAGLENLGNTCYLNSVLQCLTYTEPFAAYLQSGKHTSSCRTSGFCALCALQIHVKTALESTGKIVTPFRIVKNLRCISRTFRNSRQEDAHELMVNLLESMHKCCLPSGVSTESQSAYDKSLVHKIFGGRLRSQVKCTRCLHCSNKFDPFLDLSLEIAKATTLVRALENFTEDELLDEGQKEYECERCRQKVVAKKRLTIDKAPNVLTIHLKRFSPFNPREKIDKKVDFQSILDLKPFVSDSKGTDFKYSLYGVLVHTGWSTQSGHYYCYVRTSSGMWHNLDDKEVRQVREADVLKQKAYMLFYVRNSIGKSVVCKDNNAANLLKKKTSEKISSLNGIAQTNVRAQNLNGVSPFGDKTHGTIIGYSTISSKTKTIHCSKNEVKAEDAPASQNNALPSTQAPIARNDVGILPTKPMQFAVKNEEKTSSHQPAPFTNTCGEQTVVGRPLQEMEPKAGAGENTSVVSAVANDAATLSKADKLTSQPQTAPSSKPTANVKDTATEFATLSLSKKDSVVSNGAVLSIGCLTSGEKAMNLSESVDQANEITKALPTSQNNTAPVIAQADCGVEISSGVIMHVAVSASCNGTTEKKVNSKSKKFVRYPVVNMWLGSRHLKPGKKANRKRSKMIRRVVACKDAANLSCLSEQLTSTSSTACSETVECTSSHQKRSHASARSKDDAQSSQNKQKVDGARVGAGTSAPSCSAGVPKSDPNPSTDAKVVATQPASIRATDLMEATVPRWDDVDMPNIKVAEPQSKRKSGGYILDEWDEEYDRGKTKKVRRSKQDFGGPNPFQEEADYVSQRRTKQKSYRGDPTR

SEQ ID NO: 44220 - protein, 567 aa, Zea Mays
MTLIKFVDDESGPIGSFNWFATHGTSMSRTNSLISGDNKGAAARFMEDWAEQNGIPKQAAHVNHDGLESSHMTSRLPRRVSPIIPEPNEITDDLVQLASSYEASGGRRLSSSSITKRIRSTQQNRPKFVSAFCQSNCGDVSPNVLGTFCIDTGLPCDFNHSTCNGKNELCYGRGPGYPDEFESTHIIGNRQFQKAVDLFSSASEEIQGKIDYRHTYLDFSKLEVNVRTSTGSQQVVKTCPAAMGFAFAAGTTDGPGAFDFKQGDVKGNPFWRLVRNLLKTPGKEQVECQAPKPILLDTGEMKEPYDWAPAILPIQIIRIGQLAILCVPGEFTTMAGRRLRDAVKAVLTSDNSGEFNNIHVVLAGLTNTYSQYITTFEEYEIQRYEGASTLYGPHTLSAYIQEFQKLATAMVANKEVPTNFQPPDMLDKQIGLLPGVVFDSTPPGVEFGDVSSDVPASSTFRKGSVVNATFYSACPRNDLLTDGTFALVEKLDGSNSWVPAYDDDDWSLRFKWSRPSKLSPRSFATLEWTVPGDAPSGVYRLRHFGASKPLIGSIKHFTGTSRAFAVR

SEQ ID NO: 44221 - protein, 64 aa, Zea Mays
MLCLFCDHLVMARTESRHRGTSAAGSLTVDRSTGVIPGQSRARTETLEEHLEEVVFEGVNSSGC

SEQ ID NO: 44222 - protein, 101 aa, Zea Mays
MCGGADPLLYPSYNREAYLELKEFISRTSLNDAEIFCEKLMRESPRLKGLALRILEVRSAYVKNEFEWDNLKELSFKMVDEANTKLMRDYVVEVSHIEDEN

SEQ ID NO: 44223 - protein, 179 aa, Zea Mays
MERGAVVLPLQGAGVGRVLLPVQVRVRSFLRSRRATERRRRLASSAAPARCSKMYVPGFGEGSPERKAAINLQHFFNYIAVSIVLAQLESYNREAYLELKEFISRTSLNDAEIFCEKLMRESPRLKGLALRILEVRSAYVKNEFEWDNLKELSFKMVDEANTKLMRDYVVEVSHIEDEN

SEQ ID NO: 44224 - protein, 343 aa, Zea Mays
MPLLFPATPPLPLCRAARVSRRATASVASAARSSSSSSASFDAAAFEAERLRLDAAARAGMESTAAAAEAGPRAWKWAIRKRVWDALEAEGIARDPRPVHHRIPNFDGAPAAADALGRLDIFQKSHCVKVNPDTPQKQVRFLTLSGDKKLLTPQPRLRTGFFSVMDSQMIPVGCIPEACTSVGAAKYGRPIGLDESLKVDLIVIGSVAVDPSSGARLGKGEGFAELEYGMLRYMGAIDDSTMIVTTVHDKQLVDDIPVEKLLVHDVPVDIICTPTQVIFTKTTIPKPQGIYWEKLSPEKLGQIRILRELKQRIEQETGTMLPCGPSEKLPPTAQRKQRWQRRR

SEQ ID NO: 44225 - protein, 127 aa, Zea Mays
MWKLHLSLQEVLANLTPSCQKIRLSTQPTQWCLPWALGRRVYAFSVELPQFCLVCQLVLCLCLVWLLVVASVVSSVARIGILLAPPLFGCPCPWYTSVGHPSHVAPTTLQSSCSHLIFVMLILLSIK

SEQ ID NO: 44226 - protein, 534 aa, Zea Mays
MATASVTFKSREDHRKQLELEEARKAGLAPAEVDEDGNEINPHIPQYMSSAPWYLNAEKPSLKHQRKWKSDPNYTKSWYDRGAKLFQANKYRKGACENCGAMTHDKKSCMERPRNVGAKWTNVNIAPDEKVESFELDYDGKRDRWNGYDASTYTRVIADYEAREEARKKYLKEQQLKKLEEKDTEKDDENAGSEDEEDDLRIDEAKVDESAQMDFAKVEKRVRTTGGGSTGTVRNLRIREDTAKYLLNLDVNSAYYDPKTRSMREDPLPDADPNDKFYVGDNQNRLSGQALEFKQLNIHAWEAFEKGQDIHMQAAPSQAELLYKSFKIKKEMLKSEHKDKIIEKYGNAASEDTIPRELLLGQSEREIEYDRTGRIIKGQDVALPKSKYEEDVFINNHTSVWGSWWKDHQWGYKCCKQTIKNSYCTGLAGIEAAEASADLMKANMARKEAAEDEPVQHEEKRLATWGTDVPQDLVLNEKKLEESLKKETARRKEEKDERKRKYNVKWNDEVTAEDMEAYRMKRIHHDDPMKDFLN

SEQ ID NO: 44227 - protein, 76 aa, Zea Mays
MAKGEGPAIGIDLGTTYSCVGVWQHDRVEIIANDQGNRTTPSYVAFTDTERLIGDAAKNQVAMNPTNTVFDVALPG

SEQ ID NO: 44228 - protein, 573 aa, Zea Mays
MDHAEVSGLLCIGTRETDGGEESYAAEYPKMDQDTNATTKFDVVMETSAMYTDQINTNACLDEYHMSGKQPMEEMGFGSAHPFELPSEGMVADSGEESMPSSPDTSTSNYDAPGYTEQNLQHIYNSYDALVDKDGVVLTPAFMICDKTLYLEPHLTFSLDGIKIEYLDLDSFEDEKLSALQWEISNIISISCKWTRSVGSALITLLVGSTAETGNAGPVRARFSLDDSQWPRRQQRIWELGPRYQEIWKDIPSDDFALENWSIEPCLFFPRQYFSSTEDFEDVIYPQGDPDAVSISKRDVELLLPETFVNDTIIDFYIKYLSTRIESTKKRRCHFFNSFFFRKLADLDKDQGRAPEGRAAFLRVRKWTRKINVFDKDFLFIPVNFNLHWSLIVICYPGEVATFEDGDAKLSAKLPCILHMDSLKGSHTGLKDIIQSYLWEEWKERHPESASDNSDKFLNLRFVSLELPQQDNSYDCGLFLLHYVELFLTDAPSNFNPLKIDVFSGFLSDDWFPPPEASLKRSVVRKLIHELVTGSFQNHPKLACGGEQLDERHQRCSNPGEPETVCTVDDGTP

SEQ ID NO: 44229 - protein, 503 aa, Zea Mays
MEGAGRDANPLGGYRIGKTLGIGSFGKVKIAEHILTGHKVAIKILNRRKIRSMEMEEKVKREIKILRLFMHPHIIRLYEVIDTPADIYVVMEYVKSGELFDYIVEKGRLHEEEARRFFQQIISGVEYCHRNMVAHRDLKPENLLLDSKCNIKIADFGLSNVMRDGHFLKTSCGSPNYAAPEVISGKLYAGPEVDVWSCGVILYALLCGTLPFDDENIPNLFKKIKGGIYTLPSHLSPSARDLIPRMLVVDPMKRITIREIREHMWFKIQLPRYLAVPPPDTAQQVKKLDEETLNDVIKMGFDKNQLIESLHNRLQNEATVAYYLLMDNRLRTTSGYLGSEFQESMDPSFSQVHAETPTSATEHRQHVFTESPGSGLRQHFASERKWALGLQSRAHPREIISEVLKALQELNVYWKKIGHYNMKCRWSPGCLESMMHNCDGFSAESAIIETDDLIAKSTRIVKFEIQLYKTRDEKYLLDLQRVSGPQLLFLDLCSAFLTQLRVL

SEQ ID NO: 44230 - protein, 487 aa, Zea Mays
MSSAPWYLNAEKPSLKHQRKWKSDPNYTKSWYDRGAKLFQANKYRKGACENCGAMTHDKKSCMERPRNVGAKWTNVNIAPDEKVESFELDYDGKRDRWNGYDASTYTRVIADYEAREEARKKYLKEQQLKKLEEKDTEKDDENAGSEDEEDDLRIDEAKVDESAQMDFAKVEKRVRTTGGGSTGTVRNLRIREDTAKYLLNLDVNSAYYDPKTRSMREDPLPDADPNDKFYVGDNQNRLSGQALEFKQLNIHAWEAFEKGQDIHMQAAPSQAELLYKSFKIKKEMLKSEHKDKIIEKYGNAASEDTIPRELLLGQSEREIEYDRTGRIIKGQDVALPKSKYEEDVFINNHTSVWGSWWKDHQWGYKCCKQTIKNSYCTGLAGIEAAEASADLMKANMARKEAAEDEPVQHEEKRLATWGTDVPQDLVLNEKKLEESLKKETARRKEEKDERKRKYNVKWNDEVTAEDMEAYRMKRIHHDDPMKDFLN

SEQ ID NO: 44231 - protein, 56 aa, Zea Mays
MGSCVVPARMRNWTRPLFVSASGSFWPPKAAADCQTLSFSASFYKIRWGKNHPKST

SEQ ID NO: 44232 - protein, 208 aa, Zea Mays
MALMSLGAAGYTTATAPPRPRRCTLPFRAAASPAALDRRRRPHNVAGDFFVDHRCIDCQTCRWMAPEVFKRVDGKAAVAAQPSSEEERTKALQALLSCPTSSIHTEKPPKDILKVQNMFPLPIDDKLLPGVYLCGYNSEDSYGATSYLVIHPQGNILIDSPRYTPKLANNIEKLGGARYMFLTHIDDVADHRKWAEQLKCERIIHSGD

SEQ ID NO: 44233 - protein, 86 aa, Zea Mays
MLALRSTRRRRQPRLRSMVEEVVDISNWEKKEVCGKKRKLQSFRDEEYYISSVPQNHHLEAGLSVRDNEGFVENRGSYICLKYKLY

SEQ ID NO: 44234 - protein, 1806 aa, Zea Mays
MHLYNAWLPPPVSTAARGEAAAFAGAVRTAADAWLPGDSDSAYATLKWISVFDLFIKAKSDIASEDLQALVKLGLEVFHASHNKFVVQIKWGGLLIRLLRKHGKRLSLVVQWRPLYETLIRTHFKRNMGPEGWKVRKQHFETVTSLVCASRNFFTEGVAAEIWSEFRPLLENPWHNSAFEGVGFLRLFLPANSRNQDHFTTDWIRNCLDIWDSVTNCNFWDIQWASIIARCIKNSRSVNWDAFLPLLFTRYLNMFEVPISSGNGSYPFPVEVPGNTRFLFSSKTRTLSKAIAKSVVYLLKPKSLAFEYFEKLINFLEQFYHPSNGGRWTYSLERFLRYLVVYFEKRLQHEQFVMAVEDHDQSYLGKEERSVFVKAILKLLDRGQYSKDNSLAETVSVATSILSYIEPTLVLQFVAKNFQRALETTTATHQLKNAVTSVAFSGRALLLCSLCSSQNDDSSVVDSFSDLVVASLSNALLGMDANDPPKTIATMQLIGSIFSNLAAVSDDVPILLQSTTLSNWLDEFFSRLFSVLHNLESSSPINEGYQSSFMSGTFLVDSPYYFCMLEILLGKLSKPLFNQSLKRIAKFVNANILPGATSEVGLLCCACVHSYPEEASVYLVKPILETIMSSFEGTPTTGYVGRVVADKASTKAALSPALETAIDYYLRVLAISISYAGPTLLNYKEELNHIITSAFQSPSWKVNGAGDHLLRSLLGNLVSYYPIDQYKPFTCQPIGNIIEPWGCSKAHQDREDEMLNFPPKWHDPSHDELSFANELLQLHFQSALEDLLTICQTKVHSDTGDEKEHLKITLLRIHSALHGVMSCLPEIRPSYKDGRSLEVESAFFIAGSAGSTVGSSEMREKAAEFVHIACRYLLKERTDDSILLSLVVRVIDALVNYGSLEYQEWSSHVQAWKLESASIIEPPCNFIVPFHAQGKKRPRWALVDKANLHSTWRCSQSSYHRYRMNADVSPSVPMINLMNDLLDLSLHNYETVRSYAGRSLTKLLKRWPSLISNCVLTLTGNLRDPKAPEHVVLGSCSILISQTVLRHLTTDSVSLSSFIMGILESSHHESLKCQKAITELFVTYNIRFSGISRSFFKTPENQADKPGFLSLISQINALGFETNGLHWRYNLMANRVLLLLILASRSESGIYSQMLAKIAGHFLRNLKSQLPHSRMLAISALNTLLQGSPHKTSAQNSKQPIDHPEDCNISSTEEILNEIIREEGFMNETLNSLSHVHIISDNDGSSKASYGASSFQSGSDKAITYFYFDFSASWPRTPSWISLLRGHTFYSSFARIFKRLIQQCGMPVISSLQSTLEEFLISKERPRQCVAAEAMAGMLHSDIIGNLECENNWLMAQLHKIMLAPSVESAPEWAACIRYAVTGKERAGTRAPVLRQKVLECLCTPLPHSMATSVLAKRYSFLSVALIEISPPKMSPAEKQYHVKILDELLDSMNHSSAQVREAIGIAMCVTTSNMRLSGLFGTGCSPQGLHGDVSMIEQTGNKYWSERLTDGANELAVSIQNSTQSKQLESTSDSAEDSMDDREQADAKRMETIFHFMIASLKSGRSSVLLDTIIRLVYPILSLQETSNKDLSLLAKSAFELLKWRILHRPFLETAITSILPLVSDPNWRTRSALLSYLRTFTYRHTFILSGSEKSQIWQTIEKLLVDNQVEVREHAAGVLASLMKGIDEDLSKDFRERSYAQAQHIFVARRRNLKFSVGTIHGAVLALTASVLSVPYDMPSWLPSNVSLLARFIREPPPIRSTVTKAVAEFKRTHADTWSIQKDAFTEDELEVLRDTSSSSSYFA

SEQ ID NO: 44235 - protein, 642 aa, Zea Mays
MLLQQLSDACLVVDALEPSVREELVKNFCSKELTSYRQIFEGAELAKLDKTERRYAWIKRRLRSNEDTWKIFPPSWHVDYLLCIQFCKITRAQLVDILNNLKEKPDVATLLLAFQRTIEFEEELAEKFSGGTTNARNKETTSDDEDEGGGHNKIVSDIRKKYEKKLAAPSDEDKDKQKDLSVPGAGFNFHGIISSCFEPYMTVYIELEEKSLVDQLEKLVQEERWEIEEGSQTNILSSSMQVFLVIRKSLKRCSALTKNQTLFNLFQVFQRILKAYAAKLYARLPKGGTGIVAAATGTDGQIRTSDRDERMICYIVNTAEYCHQTSGELAENVAKMINPQFADKVDMSEVQDEFSAVITKALMTLVHGLETKFDAEMVAMTRVPWATLESVGDQSEYVNGISSILSSSIPVLGTLLSPTYFQYFLDKLAASLGPRFYLNIYKCKHISETGAQQMLLDTQAVKTILLDIPALGKQSTGAASYSKFVSREMGKAEALLKVILSPVDSVANTYRALLPEGTPLEFQRILDLKGLKKADQQAILEDFNKHAPAPAPAIKHPAVAPTVATPVATASVQIVPSVATPAVSITPSMASLKGALANQEDVLARAAALGRGAATTGFKRFLALTEAAKDRKDGPFRKLFNA

SEQ ID NO: 44236 - protein, 209 aa, Zea Mays
MAFKLITKPAAASPAAAYWGDLARGPQGTSRVAFGPAPRNKGLRAANNSATPIAKVERVDRSDILTLDSIRQVLIRLEDSIIFGLLERAQFCYNADTYDSNAFHMDGFGGSLVEYIVRETEKLHAQVGRYKSPDEHPFFSKDLPEPRLPPMQYPRVLHPIADSININKEIWKMYFDELLPRLVKEGSDGTLQKDPLWEVCGRGQVSRVP

SEQ ID NO: 44237 - protein, 110 aa, Zea Mays
MQVLSSTNLAADFSRALPPGAPIPMLRREVLHSFLRRRGRARPGPHHLRREVLHSFVFKLSPQGCASARCGEPADQGNRPWPPQALHLHWLLLVTSKNNQRMQTCPVTLI

SEQ ID NO: 44238 - protein, 762 aa, Zea Mays
MARHLAPSSGSLHRLLASCHYPPTSQAPPPRPLLLPKTRSAAMQLPRRGRRDVVAAAAASAPSPSSPGTEVAVWGKVSAVLFDMDGVLCNSEEPSRQAGVDVFAEMGVEVAVDDFVPFMGTGEANFLGGVARAKGVKDFNPESAKKRFFEIYLDKYAKPNSGIGFPGALELILECKNSGLKVAVASSADRIKVDANLAAAGLSVFLFDAIVSADAFEKLKPAPDIFLAASKSLGVDTNECIVIEDALAGVQAANAAEMRCIAVTTTLEEIALRQGSPSFIRKNIGDISINDILYGGSNARHNEGAGSTENSSSVGNALSESLNGATAAGHSDTKGFPISKNKGLLGSRREILRYGSLGIALSCLFVAVRNWKAMQFASPKGLLNFLMGGNSSVFARNEGESLSSRVQQIKKYLAEFESGGSATYVPEFPRKLDWLNTAPLQFGRDLKGRVVLLDFWTYCCINCMHVLPDLDFVEKKYKEKPFTVVGVHSAKFDNEKDLEAIRNAVLRYNITHPVVNDGDMYLWRELGVNSWPTFVLIGPNGKVLAQISGEGHRKDLDEVIGAALEFYEEKKLLQNDPLPLALEKDKDSRLLTSPLKFPGKLAVDVQNNRLFISDSNHNRIVVTNLEGQFIYQVGSSEEGLLDGPFDAALFNRPQGIAYNSKRNILYVADTENHALREINFVDETVRTLAGNGTKGSDYRGGGQGTNQVLNSPWDVCYDPAEEAVYIAMAGQHQIWKHNLHDGITKVISGDGYERNLNGSRNA

SEQ ID NO: 44239 - protein, 532 aa, Zea Mays
MQTLRPAPASFLVPPAPQLLRTAPPPAPRANAAALAAASHGWFPSPHRACRRRRRVTRSASSGAASATVASVDDAKKDVLIALSQIIDPDFGTDIVSCGFIKDLEVSEALEEVSFRLELTTPACPIKDEFEQKANEVVAALPWVKKVDVTMSAQPAQPVYGGELPEGLQKISNIIAVSSCKGGVGKSTVAVNLAYTLAGMGARVGIFDADVFGPSLPTMVSPENRLLVMNPESKYILPTEYLGVKMVSFGFAGQGRAIMRGPMVSGVINQLLTTTDWGELDYLVIDMPPGTGDIHLTLCQVAPLTAAVIVTTPQKLAFIDVAKGVRMFSKLKVPCVAVVENMCYFDADGKRYYPFGQGSGTQVVQQFGIPHLFDLPIRPTLSASGDTGIPEVVADPQGDVANTFQNLGACVVQQCAKIRQQVSTAVSYDRSIKAIRVKVPDSDEEFLLHPATVRRNDRSAQSVDEWTGEQKVQYSDIPDDIEPEEIRPMGNYAVSITWPDGFSQIAPYDQLEMLERLVEAPSPAAASAVASS

SEQ ID NO: 44240 - protein, 130 aa, Zea Mays
MRMACNITCPSIEIGGYGDALLNLIYASPSSQFEELSLECELDATGNHSRVKDAQVHGSPIPESNGRLSTTAQTKMMSTVSEDAILVGSSFRYQSSLGNNNKRVGLFDMGDGSSEPAAEDNNQMHQISRC

SEQ ID NO: 44241 - protein, 98 aa, Zea Mays
MPLLEDVQREPVKIWSDDTKTLTRSQVDAELARMATMTAEEASVAAARAVAEAEAIMAEAEAAAKEAEAAEAEAQAAQAFAEAAFLTLKNRNAGKLMA

SEQ ID NO: 44242 - protein, 120 aa, Zea Mays
MSKLGYDGVVALLVADISLSIGLDQIEALYQYAQFQFECGNYSGAADYLYQYGALCTNSERNVSALWGKLAAEILMQNWDLALEELNRLKEIIDSKVLTSMFCSVFFVLCVHYITNHVPS

SEQ ID NO: 44243 - protein, 92 aa, Zea Mays
MHYTNPGPGESYSTFFSASCCILILYNTFSLGSYIVFLMNQASQGKRSSGENVVMVDPLEAKRLAAKQMQEIRAKEKLKVHCSCIGVYHSLD

SEQ ID NO: 44244 - protein, 446 aa, Zea Mays
MSASHNPGGPDNDWGIKFNYSSGQPAPETITDQIYGNTLSISEIKTADIPDTDLSSVGVVSYGDFAIEVIDPVSDYLELMENVFDFQLIKDLLSRPDFRFIFDAMHAITGAYAGPIFVEKLGADPDCILNGVPLEDFGNGHPDPNLTYAKELVFTMFGTHAPDFGAASDGDGDRNMILGKRFFITPSDSVAIIAANAQTAIPYFQFGTKGLARSMPTSGALDRVAEKLNVPFFEVPTGWKFFGNLMDAGKLSICGEESFGTGSDHIREKDGIWAVLAWLSILAHRNKDKKVGERLVSVEDIAMEHWKTYGRNFFSRYDYEACESHSANQMMDHLRDVMANSKPGEKYGNYTLQFADDFSYTDPVDGSTVSKQGLRFVFTDGSRIIFRLSGTGSAGATIRLYIEQFESDISKHSLDAQTALKPLIDLALSVSKLKDFTGREKPTVIT

SEQ ID NO: 44245 - protein, 236 aa, Zea Mays
MVVSIIGLLLFGKLLEPLWGSKELSKFIFIVNLSTSACVFMTAIVLYYITQQEIYLYTPFSGFYGVLSGLLVGIKQLLPDQELNLFVLKIKAKWIPSLVALISILGSIFIYDFMSYLPVLLFGMYMSWIYLRYFQKRLETSLKGDPSEEFSFSSFFPEFVRPFLDPIASVFHRLLCGRSDARGETLDTSPLPGSDSFEANRRRERGQRALEQRLAEKLAAVRSSEGGTSLDAADKV

SEQ ID NO: 44246 - protein, 421 aa, Zea Mays
MSLWKQPSKLAMVVVLLLLLCHAVDKVHCSTHHNNSQDFHSLLEFKKGITSDPHGALSNWNPSIHFCHWHGVNCSSTRPYRVTELNLTGQNLAGQISSSVGNLTFLHTLDLSNNSFIGPLPLLNKLRNLDLLFLGSNHLEDVILDWLTNCSNLVYLDLSKNHLTGHIPPNIAFLKKLEGINLYGNYLSGVIPPTLRNLSTLLLVDLSNNQLNGSIPNEVWQIPNIQMVNLAINNLSGGIPDTFTNLSSLMILGLDHNMLGGTLPSNIGDVLPHLQGLYLGSNLFFGTIPTSLGNASNLEVVDLPNNLFSGTIPSSFGNLSKLQILNLEVNMLEARHMSHNHLHGPIPNSIANLSTSLQQLFMGWNNLSGIVPPTIGKLSGLTKLSLENNNLIGTIKEWVRKMTNLQVLTLQSNNFIGKIPP

SEQ ID NO: 44247 - protein, 686 aa, Zea Mays
MKALASPAASFLPGIPSPSHLARALPRSAAAALSRPPSGRSIAAAAAAATGDHWGADHQHYHGGRAGASEAGPTASARGVKCDVDVVSWRERRVLASVPVAADVDTLWQVITDYERLADFIPNLVQSVTIPCPHEGRIWLEQRGLQRALYWHIEARVVLDLQEIPDSDKWDGRSSSAVLLYEVNVIPRFNFPAIFLERIIRSDLPVNLRALACRAEKIYLENQGCGSRKFFVEDLKPSYTSQLNNFHSTTVETSKFKQAPPRSGVSSVLPSPSSELISKWGVYGNICRIDKPCVVDEIHLRRFDGMLEHEGAHRCVFASITVKAPVREVWNVLTAYENLPEFVPNLAISRIVLRDNNKVRIMQEGCKGLLYMVLHARVVMDLREKHEQEISFEQVEGDFYTFKGKWRLEQLGDQHTLLKYMVETKMHRDTFLSESILEEVIYEDLPSNLCAIRDYIEKAGAKSSNSTDPDPDVDHDESRQSEQTCVSCSSSTMKQRPKVPGLQKDIEVLKSELDNFIAEYGQYGFMPKRKHLRSHGRVDIEKAITRMGGFRKIASIMNLSLSYKNRKPRGYWDNLENLQEEISRFQKIWGLDPSYMPSRKSFERAGRYDIARALEKWGGVQEVSRLLSLELRYPRRQADPDDERQSESPSGMMKKHGVKPDEGNVSPNAQKWLLKLKDLDVNWVEY

SEQ ID NO: 44248 - protein, 123 aa, Zea Mays
MAGRGGLWLLPPHDAATGAPQIGRDLFRTQVAGRFGIPRASWAWPADNRIALPWKQEKAAIEYIHSLSRAQPARSLNGAGLCPASRSLSTQAATTSSTPQLKAHPTSSSQAATTLSKTEDEKN

SEQ ID NO: 44249 - protein, 186 aa, Zea Mays
MYAVTVGVGLMIFQQLGGINALGFYTSYIFSSAGFSGKLGTTLIGVIQIPITFFGALLMDRSGRRALLLVSSSGTFLGCFLTGLSFYFKVYYAAYSVGMGPVPWVIMSEIFSIDMKAIAGGFVTLASWIGSFAISYSFNFLMDWNPAGTFFLFSAASLVTVLFVAKLVPETKGRTLEEIQTLLKAT

SEQ ID NO: 44250 - protein, 60 aa, Zea Mays
MLESADFLLGSKCAAKFQRSYPLTNSIPLSLHCQVLDCLSDLHFPLAAGSFIHSILRLGE

SEQ ID NO: 44251 - protein, 92 aa, Zea Mays
MLGDDHAWSPDDQETIQQDSKSWLANRLLGTELGFDSLHFARIDYQDKKRRKAGKGLRLYGVAQELSVHLHRYLQMYFVSIIALQMALALKF

SEQ ID NO: 44252 - protein, 738 aa, Zea Mays
MLLRVGLARSARLRGGGGGVSLSLAIARHLSFESPPPVPPSRPDPEWTDTVDYLDESGALLSSARGARPAVPGADPTILSGASAHPLPRPAAAARLAALALRHRSGATLSAALSALPSPPDPALLLLAAASLPASDPVPLISLVAWARLQPWFVPSDDLSSLLAARLPPATHSSELLALFDDTLGLSDLATFPKTFNAVVSALATHGLLEPAFYCFKRLRDVSFRGLETPAYNALLSLLLTRGLAFKAFEVLDEMATSGCALDEGTYQLAVPALARAGRIDAARKMFDEMKQREGIGRAPVGVYSVMVDVLAKAGRLDAAMGMYREMVVVGHRVSTAVSTAMVEALVRSGKLDAGMELWEEMRRGGLRPSFGLYTMVVEANARSGRLDMAAKLFGDMEKSGFFPTPATYACLVEMHASAGQVDAAMRLYHSMANSGTRPGLSTFTALLTMLANKSLLDLAAKVLLEMKASGFPIEVTASDLLMIYIKDGSTDLALRWLRFMGSAGIRTNNFIIRQLFESCMKTGLYDSARSLLEAYVAGAAKVDLILYTSILAHLVRCQDESSERTIMDILGTSKHKAHDFMCGLFTGPEQRKQPVLSFVREFFQGIDYDNEESAARSLSVGAALVATVHTLHRFRKRMLYYGVVPRRIKLVTGPTLKMVVAQVLASLESPFEVSKVVLRAPGDSVLEWFKKPIVQQFLLNEIPSKADVLMHRLNVMFPSSAPEVRSLSIPRSLGMPR

SEQ ID NO: 44253 - protein, 252 aa, Zea Mays
MVKAATWLLDRLLYVLKQDKGNDANTARDRRRRRRAPAGGAANAVGNDDGEEQHLNTFLDAANASSASSRVQFRNMASRARWVEEAGAAEVVENRGKLWLTTGVTRAGKLYYNVEETGFLAEMGALILLNDKDETIGIEDIYGKLAGGNYGCSWDTFQAYKHLKSLGYIVGRFGVPWTMKHGGTHHTIAPQINILETDQSLNRVDGASNDITKLLKEIQIDGICPSFEVYLPNSKFKKSSPGCPSFLLCLLR

SEQ ID NO: 44254 - protein, 169 aa, Zea Mays
MRVAYSAVAHFLLQWTDCKLAGALGLLKVMLYKVCADGSSALPDWDMEASIREFYGVIFPLLLQLPSGITELDDRKQRKLCLKKFRSRDEQLWEVDTERELECGICLEEMTPTLLRSLKPQDMSVIKQVQVSRKWEFHGNTDIGSILHIDMILADKERCLRCVVKSRRR

SEQ ID NO: 44255 - protein, 104 aa, Zea Mays
MDKRQLQELRVRPVSPSGSSHRTLMPALSMRLHYAPLIELPGGTLLKGATLVAIRPSEDALREGQGVAGPAGTCWISEAFEEPYRTAAKVLLKRRAYCLEMNSF

SEQ ID NO: 44256 - protein, 219 aa, Zea Mays
MRLDRYWCARATTTSTPCSRPPPSRAGANGMLDPWFKIKGLVGANQVLAYFAVSKVGEPPVDGITDTNPEGLTAAFGSWAPAVAARLQNGGLTCKVLEKEAFQKQMLEKLIWISAFMLVGARHPGATVGVVEKNYRSEVASLIAELASAAAAEEQLTFAEGMEDRLCAYSRAVAHFPTAVKEFKWRNGWFYSLTEKALAAGKPDPCPLHTAWLKEIRVI

SEQ ID NO: 44257 - protein, 330 aa, Zea Mays
MPSTSTNPDDHLALVIVVVVVYACVLATGVAIVVTSVHRLVDDTHTTCGCCGSVGELQPEPAALARGLQELLPGDHHLQQHEPAVLPERPEAHVRLAAAPDGRYRRRERLWLPLLLHRLLGVAAVRRVRALERGGGGLGLGLGVAVLEHVVSVHGALGAEPLGAEQQRRGGALLGAEARAPLHRGHGGRWLGPQQRVQRRVVLALLGLGRDVEPRQRAGRRERRRRGRRRRRQEGASVGLLLLLEVELAEDLREGRRVDGLAAGVVHVAVPRRERLQQRRVLRQRLLEQPPQPAVRRGHRRSHHLLISGQHAPASLQLQKKGAEGCAEQF

SEQ ID NO: 44258 - protein, 165 aa, Zea Mays
MTGIYAANFKLLPFSSMQQEIKVDRKCMNGLERVEPEAGPVAPVVPRHPKSYMEIMEMIQRGERPDDIQDINDDPPNPDQPISEPRMAPKPKPWEKQGQGSLACDLKSLPRESDVLRSEVQHDDGTNQVTESADGANQADSLLQAGVAAGSESPGVPDDAASSLE

SEQ ID NO: 44259 - protein, 154 aa, Zea Mays
MQLSASGDTGIPEVVADPQGDVANTFQNLGACVVQQCAKIRQQVSTAVSYDRSIKAIRVKVPDSDEEFLLHPATVRRNDRSAQSVDEWTGEQKVQYSDIPDDIEPEEIRPMGNYAVSITWPDGFSQIAPYDQLEMLERLVEAPSPAAASAVASS

SEQ ID NO: 44260 - protein, 56 aa, Zea Mays
MCATIQAQWLDDIPIHFRLLHCGVRLLQSSSNHATCLTVVFYHCTCCWTNLWTGGL

SEQ ID NO: 44261 - protein, 388 aa, Zea Mays
MFSFKSRQSQGFMGESDVKEQQPNRLQEELRKEKEKARALDEIQDLQGELEAARDSEKKMLLSLQAQTKQLEQTKVSLEEAKIEIASLRDSRQPFKNFRRRGLMSFSFADPGEAETWSLQRELRLAVESEEKCNKAMDDLAIALTEQTTEAREANVKLSLAQAELNNARTQVETLKASLESTEGKLQLALEEADRLKVESDELAAASKEKERGLVDCIKMFEEDLSKGKEENDKLIESQRVTRDENSRLREMLKHAVGEANVARESLEIARVENSRLNEEMFKKESTLQSINQEYESLKISEAAAQSSIKELKDMIDAMFSSESTKTSAEASPREAKGSKMKETSVAADYVYSDVERSTRLDDIKNPGKQKKKTILRKFGEIMKKRNS

SEQ ID NO: 44262 - protein, 360 aa, Zea Mays
MQDHCAQNFEEQMGKLKEKIYINNLRSLMIFGKYIMLHLLNILRDTFKEIRRLRVLSIFIYSHSSLPNNFSELLHLRYLKLLSPYYSEMSLPNTVSRFYHLKFLDLEQWGSDRSLPKDISRLENLCHFVVSEKIDSNVPEVGKMIFLQELKEFHVNKESVGFELQELGKLDELGGKLNIYGLENVRTKKEAKEAKLMSKRNLVELGLIWNMKQESTEDDILDSIQPHSNVRSLFIVNHGGTLGPSWLCSSDTIYMKNLETLHLESVSWANLPPIGQFYHLRELRLSKIVGISQIGPGFFDSTTEKSVSHLKAVEFNDMPELVEWVGGANWNLFSGIERIKCTNCPRLTGLLVSDWSISSI

SEQ ID NO: 44263 - protein, 503 aa, Zea Mays
MSAPLDRLARPCFEGFVHNDERKESRSDADNSEGDKKTKIGSFKKKAINAGNKFRHSLRRRSKKKTERGDSIKDIRDIKELQDVETFRQCLIDEDLLPPQHDDYHMMLRFLKARKFDVEKAKNMWSDMLKWRKEFGVDKIEEFEYAELDEVKKYYPQFYHGVDKEGRPVYIELIGKVDANKLVQVTTLDRYVKYHVKEFERCFQMRFPACSIAAKKHIDSSTSIFDVQGVGFKNFSKSARELITRLQKIDNDNYPETLCQMYIINAGQGFKMLWSTIKSFLDPKTASKIHVLGNKYQHKLLEIIDECELPEFLGGKCKCIEGCERSDKGPWKDPNIIKRVLNGEANYGRQIVTISSTDGRIVSYAWPVHPNRKGSDASAESGSEVEDVTSPTASRNLITHPILTPVHEESKLSAHGSSSVVHASIGENIPVVDKIVDDGWGSPRSSPQAASSGSLSLRNLHGTFEGLRAQTITWLTFLMMTLFAMLCSVPSKMARRISNQSGA

SEQ ID NO: 44264 - protein, 69 aa, Zea Mays
MYICFDIIFFHMTNLWASLFSYYQYTNDVRQIPPARVLGDYIVFSIVFLDFETTQTNRVAMLDEILDYV

SEQ ID NO: 44265 - protein, 339 aa, Zea Mays
MQEEAAGRLLCGSCVVGHPQPALLLRPSLHHELRPRARAAATPPTEPPVVHVPHDVDHLSVGQHGGAVAPEAPAHPPHLRHLLAVDGDPQLPLPAPARVHGHLVLVPALAEPAARDVRRRRRCRAAQLLPPADEERGRGASARCEAEAAGELARRAARAEEERELGVGHDGEAVVAFGLRGRRRRVLGLRGVPVHADGRAGAGDQRPAPSSLVQQEDRRPRPGRRRLRRVGGAAAAVVIEVEGDRDAGLSGRAPGPRHPDEHLLARGQRGPVHAGGGRLQRPVERAAAGDGGVGRGHADGAVAEAGQLPHRRSHLIRTPSKATERCESAADALEGGEVF

SEQ ID NO: 44266 - protein, 143 aa, Zea Mays
MACSTNLCFSASIPPLPASSSSSVSSPFLTVERVSYVPSLSRWTIRYKQLGHAYQRSHVLAFASADGKRSSGENVVMVDPLEAKRLAAKQMQEIRAKEKLKRRSQAEAINGPLAMIGLTAGLIVEAQTGKGILGQELMTPAME

SEQ ID NO: 44267 - protein, 296 aa, Zea Mays
MAPPAALHHRTPLLLPRRTVALGATATARAARAASLAVRAQPDTTAAAVSTTAPEPTPEFKPPPGFKAPEPKRFEVKSGQLGSVLGASLAIPLRLGTGVFVLGYSPSLVSASEIPSDQYALEFGAWKVKEESKIGQCKRPEKPIEIYEFEGCPFCRKVREMVTVLDLDVLFYPCPKKGPTFRPKVLEMGGKKQFPYMVDPNTGVAMYESDDIIKYLADTYGDGTVPIMLSLGLLTAITAGLATLGRIGKGNSYIASKVPPQPIEIWAYEGSPFCKLVRETLVELELPHLLHRVLVT

SEQ ID NO: 44268 - protein, 489 aa, Zea Mays
MPLQFCSCLQVCVCLIGGLTSMDCFLKRFFPKVYRQKQDSKVSHYCEFNSELLTVFTSSLYIAGLVATLAAATITRRYGRRTSMLIGGSVFIAGSVFGGAATNIPMLLMNRILLGIGLGFTNQSIPLYLSEMAPPRYRGAINNGFELCISLGILFANVLNYFVIKITAGWGWRISLSMAALPAAFLTIGAIFLPETPSFIIQRDGNNTDKARVLLQKLRGTASVQKELDDLVRASDLSRATRYPFRSILERKYRPQLVVALLVPFFNQVSGINVVNFYAPVMFRTIGLKESASLLSSVVTRLCATSANVVAMVVVDRVGRRKLFLAGGVQMILSQFTVGAILAAKFRDYEEMGDGYAYLVLTTLCVFVAGFAWSWGPLTFLVPAEVCPLEIRSAGQSIVVAVVFLMTFVISQTFLEVLCRVKSATFFVFGGWICLMTLFVYLFLPETKKLPMEQMEQVWKTHWFWKKVVGEEADRKEAGAGNIALSGLS

SEQ ID NO: 44269 - protein, 551 aa, Zea Mays
MFLTTTTGKVYEYQFPKYTGGAQSNKIRGQWINHMSPEHAKVARNVPGVHVQVGRMVFPLDDGRLGELHFPGMGGTDFGPSAQSTIRRKLSNKYEWSILDAPETEGWNAEYCTEEHGPTNCISGAKNIAADTESNDLSNNPPSRRRKVEEKQHYLNVNRYQQSDETESYNFLSRTIDLNFHMRVMHADRSLFLIADNGLTFEYLNSNGVWLWLRHEHVTAMKGTLGSYNGSLYLVDVHGNLHIRERNGDELLWINCTAMKKGRQVASGSPWDGIPGLLRRVTTDDALFFVNKRGRLLQFTVALRKFKWKDCHSPPDTKIAFIVDQEVFRRNIIFVVGRNGRLYQYNRITELWHRHYQSPHLFLSCSPGTAMRPSPLSLAGSLFMVSEHGGLVEYHFSPQDGWEWVEHGTPHRGVTLVGAPGPCFDGSQLFVVGSDGHVYRRHMEGRTWRWTSHGHPPSEPAAVDEQSCATPDTGAGAHYADGFRGSCDGKVAAVRPVPFSEDAVVFELRDGRLAELRRPPSADGCGGWEWARIIGTPASACMTSYWTAVAT

SEQ ID NO: 44270 - protein, 342 aa, Zea Mays
MDQGEQHHICGLAGGDWVLVRQVRGRARDRRHQASEAASHFPQEDHPRFVMNPLYIAGDSYSGLIIPTLALEIDRSIELGEKIFSGLKGYIAGNPLTGGQFDTDSQIPYFHAMGLVSDELYKNARENCGGKYSAPLNAVCAEAVQAINNCTRDINKQYILDPACPDDDLLSPKTVAETDGTSRLMLESADFLLGSKCAEALYILSYAWGNDDTVQESLGIRKGTIGAWKRYSHALPYNYDIQSVVDYHSRLATKGYRALIYSGDHDAVVPHVGTQAWIRYLNLTIVDDWRPWYVGGQVAGFTRSYASGLTFATVKGAGHVAPLYKTLECQKMFITWISGNPL

SEQ ID NO: 44271 - protein, 374 aa, Zea Mays
MQVTFDLQSIPLYLSEMAPPRYRGAINNGFELCISLGILFANVLNYFVIKITAGWGWRISLSMAALPAAFLTIGAIFLPETPSFIIQRDGNNTDKARVLLQKLRGTASVQKELDDLVRASDLSRATRYPFRSILERKYRPQLVVALLVPFFNQVSGINVVNFYAPVMFRTIGLKESASLLSSVVTRLCATSANVVAMVVVDRVGRRKLFLAGGVQMILSQFTVGAILAAKFRDYEEMGDGYAYLVLTTLCVFVAGFAWSWGPLTFLVPAEVCPLEIRSAGQSIVVAVVFLMTFVISQTFLEVLCRVKSATFFVFGGWICLMTLFVYLFLPETKKLPMEQMEQVWKTHWFWKKVVGEEADRKEAGAGNIALSGLS

SEQ ID NO: 44272 - protein, 140 aa, Zea Mays
MSLFSHIFLLNVPFMVLLIAQGRVNVAAEYYKQQVEMLEGFSEMGAFTDHAFLPVMSKEEHEKVIRSEPLAIWLSNIANMVLFAAKVYALVRSGSLAIIASTLDSLLDFLSRYILWFTAFSMQTPNPYRNPIGKSVCSRW

SEQ ID NO: 44273 - protein, 236 aa, Zea Mays
MALLQPTLLTPPPLCCCSHGLLYPGFLKLPPKFSNGACCSTARASDRSELAGKSGGLAWRAAGRKGRLLGVTGAGRGPFFGGGGRRMDKGTSRVVGNLAFAAVVTYLAVTGQLRWVIDAIVSLWLLTILLPVLALGAFFFFAGQDILQGDCPNCGKSFQILKSALKDGPQLCPYCTQPFSVQGNKFVRESARFSSGRAATATNGPVFNEFFNRNMRGNAAPSETIVDVEAEVKDVE

SEQ ID NO: 44274 - protein, 324 aa, Zea Mays
MARTSKARHIMAVASEQAAPPARYPKVAAPTTGPIPAAELLGVIEAAAKAGADVIMEAVNKPRNIHYKGVADLVTDTDKLSESVILEVVTKNFKDHLILGEEGGLVGDSLSEYLWCIDPLDGTTNFAHGYPSFSVSISVLFRGKPAASTVVEFCGGPMCWSTRTISASAGGGAYCNGQKIHVSQTDKVEQSLLVTGFGYEHDDAWTTNMNLFKEFTDISRGVRRLGSAAADMSHIGLGITEAYWEYRLKPWDMAAGVLIVEEAGGVVTRMDGGEFTVFDRSVLVSNGLVHGQLLDRIGPPTEDLKKKGIDFSLWFKPDKYPTDF

SEQ ID NO: 44275 - protein, 112 aa, Zea Mays
MRSLAGSKRTRSTDWLNFKQIQRAMHTSGGGLVVNCLSRSLEQLNLLLLSSGIDLAGSRSLSSPGPSNATRSSARNSAPKSSPFNRKMQVTPSHLPLMVDTFHCISLHDRSI

SEQ ID NO: 44276 - protein, 91 aa, Zea Mays
MRKLAPEEMGNKGKRETMPLFKLGEKWDIAMAALYLASDAGKYVNGAIIIVDGGLWLSRPRHIPKEEVKALSKVVEKKVRASGVGVPSSKL

SEQ ID NO: 44277 - protein, 126 aa, Zea Mays
MIILGTATIQKFEAVNLLLALILLFTSYKLFAEEEEESDLSDNFIVKTCQKFIPVTDYYDDNRFFTNQDGVWKATPLLLTLAVIELSDIAFAIDSIPAVFGVTRDPLIILSSNIFAISGYSCCTSR

SEQ ID NO: 44278 - protein, 246 aa, Zea Mays
MSVLAMAHRVYAIDLIGYGYSDKPNPREIEENFYTFETWGEQLNSFCAEVVQSEVFFICNSIGGVVGLQAAVMEPKTCKGIVLLDISLRMLHIKKQPWFGKPFIKSFQSLLRNTIVGKLFFNAVATPESVKNILCQCYHDTSAVTDELVQIILQPGLDPGAVDVFLEFICYSGGPLPEELLPLVKCPVLVAWGEKDPWEPVELGRAYASFDTVEDFVVLPDVGHCPQDEAPELVNPLVESFVQRHT

SEQ ID NO: 44279 - protein, 91 aa, Zea Mays
MVADVHRTLLYGGIFLYPADQKSPNGKLRVLYEVFPMSFLMEQAGGQAFTGKQRALELAPAKLHDRSPVFLGSYDDVEEIKALYASMSNSG

SEQ ID NO: 44280 - protein, 336 aa, Zea Mays
MKALASPAASFLPGIPSPSHLARALPRSAAAALSRPPSGRSIAAAAAAATGDHWGADHQHYHGGRAGASEAGPTASARGVKCDVDVVSWRERRVLASVPVAADVDTLWQVITDYERLADFIPNLVQSVTIPCPHEGRIWLEQRGLQRALYWHIEARVVLDLQEIPDSDKWDGRSSSAVLLYEVNVIPRFNFPAIFLERIIRSDLPVNLRALACRAEKIYLENQGCGSRKFFVEDLKPSYTSQLNNFHSTTVETSKFKQAPPRSGVSSVLPSPSSELISKWGVYGNICRIDKPCVVDEIHLRRFDGMLEHEGAHRCVFASITVKAPVREIRTKPGYQ

SEQ ID NO: 44281 - protein, 212 aa, Zea Mays
MVQMGVLVPTGDMTVVRRTAQFFLNSFQECLTAQRKEREMATAELGFKKQLTKEEKFEKRKQRLAAIGEDLLAIAADQPFRFPATFTFVVRAFSVLDGTGKGLDPRFHITEIAKPNAKELLRFNDAGVEIVVKASFNIWCVERHVYSSYDEFLRLHEVYQFVLVFLFVGMPDSNELMFNTEQPTYNFGAYKISKLKKVIKRNDIIVTSSEQQ

SEQ ID NO: 44282 - protein, 582 aa, Zea Mays
MPTMHALRLCPLLSTIRSTPPRATAAARQGALFVARCSSAGTPSAAQALKISSIPTKPVEGQKTGTSGLRKKVKVFQQENYLANWIQALFNSLPPEDYVGATLVLGGDGRYFNKEAAQIIIKIAAGNGVQKIIVGRNGLLSTPAVSAVIRKRKFNYSSGQPAPETITDQIYGNTLSISEIKTADIPDTDLSSVGVVSYGDFAIEVIDPVSDYLELMENVFDFQLIKDLLSRPDFRFIFDAMHAITGAYAGPIFVEKLGADPDCILNGVPLEDFGNGHPDPNLTYAKELVFTMFGTHAPDFGAASDGDGDRNMILGKRFFITPSDSVAIIAANAQTAIPYFQFGTKGLARSMPTSGALDRVAEKLNVPFFEVPTGWKFFGNLMDAGKLSICGEESFGTGSDHIREKDGIWAVLAWLSILAHRNKDKKVGERLVSVEDIAMEHWKTYGRNFFSRYDYEACESHSANQMMDHLRDVMANSKPGEKYGNYTLQFADDFSYTDPVDGSTVSKQGLRFVFTDGSRIIFRLSGTGSAGATIRLYIEQFESDISKHSLDAQTALKPLIDLALSVSKLKDFTGREKPTVIT

SEQ ID NO: 44283 - protein, 335 aa, Zea Mays
MASSQANLDKMQLRQSYRNVWHTDMTNAIQADFPYCCLALWCGPCVSYMLRKRALYNDMSRYVCCAGYMPCSGKCGESRCPEFCLATEVFLCFGNSVASTRFLLQDEFNIQTTQCDNCIIGFMLCLQQVACIFSIVAAIVGSEELSEASQILNCLSDLVYWTVCACMQTQHKVEMDKRDGKFSPQPMAVPPVQQMSRIDQPMPPPAGYAPQPAYGQPYGGYPSPPGQGYPPPPGQGYPPAGYSQGGAYPPPAQGYPHGGGYPPPGQGYPQGQGGAYPPPGSYPPQGSYPPAEGSYPAQGSYHPAQGSYPAQGSYPPAQGSYPAQGSYPPQAYPGK

SEQ ID NO: 44284 - protein, 178 aa, Zea Mays
MEVDELEKTISVASRDPAYYGLDEVELSRRRNWTGSSHKQVGTVKRAIEKGKSNAATSKYQDTSRTNHYSAQDNDDFLSSESDRQLLLMRQQDEELDELSESVQRIGGVGLTIHEELSGQERILNDLSLEMETTSNRLDFVQKRVAMVIKKAGIKGQIMLIVFLIVLFIILFVLVFLT

SEQ ID NO: 44285 - protein, 358 aa, Zea Mays
MDDDDDDEDGESDDDSLADDFLAGSDEGSEGGDSGLESDGSDDLEAKSRAIDEQKLKAEEDAEEELQTNIRSESDEFRLPTTEELEEEAHRPPNLPNLKRRISEIVRVLSNFSKLRQKDVPRKDYINQLKTDVMSYYGYNDFLVEALIEMFPAVELVELLEAFEKRPPECLRTNTLKSRRRDLAAALIPRGFNLDPIGKWSKVGLVVYDSTISAGATTEYMAGHYMKQGASSFLPVMALAPQEKERIVDMAAAPGGKTTYIGALMKNTGIIYANEFNEKRLHGLMGNIHRMGVTNTIICNYDGKELPKVLGMNSVDRVLLDAPCTGTGTIWKDLQIKTSKDIEDIRNCAFVQKAWFSK

SEQ ID NO: 44286 - protein, 101 aa, Zea Mays
MALTLKDQSILVNGDINEGLLRLCHKLHRLRKEYAYTFESTSLSYQCSEVSRILQGRGTIVSMRPTERICITTFALNRRLNQMSYNIRFYLIEGSNENIGP

SEQ ID NO: 44287 - protein, 68 aa, Zea Mays
MVEKAIEIWNIISNGGYLYICGDAKGMARDVHKMLHTIVQEQRSLDSSKTESYVKSMQMEGRYLRDVW

SEQ ID NO: 44288 - protein, 1006 aa, Zea Mays
MARHLAPSSGSLHRLLASCHYPPTSQAPPPRPLLLPKTRSAAMQLPRRGRRDVVAAAAASAPSPSSPGTEVAVWGKVSAVLFDMDGVLCNSEEPSRQAGVDVFAEMGVEVAVDDFVPFMGTGEANFLGGVARAKGVKDFNPESAKKRFFEIYLDKYAKPNSGIGFPGALELILECKNSGLKVAVASSADRIKVDANLAAAGLSVFLFDAIVSADAFEKLKPAPDIFLAASKSLGVDTNECIVIEDALAGVQAANAAEMRCIAVTTTLEEIALRQGSPSFIRKNIGDISINDILYGGSNARHNEGAGSTENSSSVGNALSESLNGATAAGHSDTKGFPISKNKGLLGSRREILRYGSLGIALSCLFVAVRNWKAMQFASPKGLLNFLMGGNSSVFARNEGESLSSRVQQIKKYLAEFESGGSATYVPEFPRKLDWLNTAPLQFGRDLKGRVVLLDFWTYCCINCMHVLPDLDFVEKKYKEKPFTVVGVHSAKFDNEKDLEAIRNAVLRYNITHPVVNDGDMYLWRELGVNSWPTFVLIGPNGKVLAQISGEGHRKDLDEVIGAALEFYEEKKLLQNDPLPLALEKDKDSRLLTSPLKFPGKLAVDVQNNRLFISDSNHNRIVVTNLEGQFIYQVGSSEEGLLDGPFDAALFNRPQGIAYNSKRNILYVADTENHALREINFVDETVRTLAGNGTKGSDYRGGGQGTNQVLNSPWDVCYDPAEEAVYIAMAGQHQIWKHNLHDGITKVISGDGYERNLNGSSATSTSFAQPSGISLAFEMHELLVADSESSSIRVVNLKTGGSRLLAGGDPVFPENLFRILLSLQFGDYDGTGSDVLLQHPLGVVYANDNQVYIADSYNHKIKKLDPVTRKVTTIAGTGSAGYRDGPGLTAQLSEPAGLVEVGDGRLLVADTNNNTIRYITLSDKGAEVKTLELIGVQPPSPKPKVLKRLRRRLSADTDVINVDGGSSKEGFLSLAVTVPDGYHFSKVINNHKTLFFLILLASLHYSW

SEQ ID NO: 44289 - protein, 505 aa, Zea Mays
MSYLCAGSSSFDDPDVVEVSSATAAAAGWASGHHKRKRSQVVPQEVIEIDDDDPDGVIIIGDKAPLDKNKQTVVCPMDWPKHAKSGWVQDIAGPSTYASKYIDSCVDLKVFQDEAVYNYSDDCPYAGFEDYMYDEDEFEVDGYDALLIESEFKFGLSAKFDNLHAPPVLEVSLPWMQKTAIDIANKTKPTKVVDDKIEEKYKAFKRFDTVDDHSDHYYSKPTSRKVQVVKKPSKDWVKRIQHEWKVLERDLPDTIFVRAYEDRMDLLRGVIMGPAGTPYHDGLFFFDIYFPPRYPNVPPMVNYRAGGLRLNPNLYDCGKVCLSLLNTWDGSGCEKWNPANSTMLQVLVSIQALVLNAKPFFNEPGYAMHANTAHGEKKSLAYNEDTFLLSCRTMLYSLRNPPKNFEDFVAGHFRQHGRNILVACRAYLDGAQVGCLSGDGVQDVDEGDTSCSVRFKQSLKKLVEELLTEFTVKGADCGKFLTEEKAKRSSGACSTWTADTTLRLT

SEQ ID NO: 44290 - protein, 194 aa, Zea Mays
MIFGRSLLVANAGDCRAVLSRRGTAIEMSKDHRPCCMNERKRVESLGGYVDDGYLNGQLAVTRALGDWHLDGMKEVGEPGGPLSAEPELKMVTLTKDDEFLIIGSDGIWDFFSSQNAVDFARRRLQDHNDLRLCCREMVDEAVRRGASDNLTAVMVSFHPDAPPPSRANKRTGRVTRSISAEGLHSLRVLLEGQ

SEQ ID NO: 44291 - protein, 68 aa, Zea Mays
MPFPCLDRSQIYEVASDGSVGIGGKDGGVGGGGEDEGDYDEAEPGRHDGGEPVPVTRIPRPWTSSGHS

SEQ ID NO: 44292 - protein, 435 aa, Zea Mays
MQSVAEMASNAYRKPSVSPSATMLKALPMRFLASPEPGGWSRRLPRRSLRSVSAALMTNPAYFEVGRFLGGYGFMNITSYSSSQFGEPSNVAGIQDLGLGYSPEEIERLRVQDIGEGEVTIRLYEGRVVQGPFRGTRAVFKVYPGARADASEADLMALNELRTHAFLQSDASDICENIQFLLGAFETATGEQWLAFRDDGRYSAADYANVTSARQLKEKSGGTPFWNPFDRAYKLELRRYFVLKLLNGAMSGLVHMHNHDRLHQSLGPSSVILNTALDKEGRYLVPRLRDLAFSVDIGYSSIGAGVLSDGLWRRASAAGASTPLEKRAFGIADDIYGAGLLLAYMSFIPFCKAGVMDGISLQRLLESTFRLDIYAAREYCLADDQLSEAVSFLDLGDGAGWELLQAMLNPDYRKRPIAEAVLNHRFITGAVLRNY

SEQ ID NO: 44293 - protein, 326 aa, Zea Mays
MGGFSGMDQSTFRTSRQNTVLQGEDIRYDVVLGFTEAIFGTEKYIILSHLETCDTCGGSGSKAGSKMRICSTCGGRGQVMRTEQTPFGLFSQVSICPTCAGEGEVISEYCRKCSGEGRIRVRKEIKVKIPPGVSKGSTLRVRGEGDAGSKGGPPGDLFVCLDIEEPSDIKRDGINLYSTVSISYLEAILGTIKKVRTVDGTNDLRIPPGTQPGDVIALAKQGVPSLNKPTIRGDHLFTVKVAIPKRISGRERELLEELASLSNGGFVRTDAKPKPAQPKRVHLEKEVGASQEDTDKSKAAGDWLKKLTHFAGSIANGAAKWLKENL

SEQ ID NO: 44294 - protein, 242 aa, Zea Mays
MITRGIQQLIVAPLHYVQDKLSTMESTEIIKEDASERESDEIEVSSATHDKKAEAITDDSRQNYRTAIASHFLFRVHTDPVHEEAFSILKKLQIIEKDVSSSDFCTRREFARWFVKLSSKFERKRMCRIVPNKLTSDTVQCAFDDVNIDDPDFLYIQSLGESGIVSSKLSNSLEMLTSGSPCSKGNTLFLPDSYLSRFDLVNWKVLVEHPRALRIDEKSRYRVKMFAFWICELAQMCLHPCS

SEQ ID NO: 44295 - protein, 155 aa, Zea Mays
MHQGYPKETLVRFLKAREWNVAKAHKMIVECLNWRIQNEIDSVLEILLYNFDGGTICSVVILKEWLGIHRVAAAEISKGLPIFGIGVGHSTYDKASAIATAKIIKVPGLKLSALSQIKDSGSHQVTPPHVDFADVSILVVELRTTIRCPDRERWS

SEQ ID NO: 44296 - protein, 334 aa, Zea Mays
MPNGGGKRWLLLLPLSRYVEVDEQQGVQLFYYFVRSERDPYEDPLLLWLSGGPGCSGISGLAYEIGPLKFDARGQGEFPTLLYRPETWTKVSNIIFVDSPVGTGFSYAKSEEGLETGDTKQVKQLVIFLRKWLQDHPRFVMNPLYIAGDSYSGLIIPTLALEIDRSIELGEKIFSGLKGYIAGNPLTGGQFDTDSQIPYFHAMGLVSDELYKNARENCGGKYSAPLNAVCAEAVQAINNCTRDINKQYILDPACPDDDLLSPKTVAETDGTSRLMLESADFLLGSKCAAKFQRSYPLTNSIPLSLHCQVLDCLSDLHFPLAAGSFIHSILRLGE

SEQ ID NO: 44297 - protein, 137 aa, Zea Mays
MPTPSACASPPPSQPRPWRRRRPPPTFPPWAPSWGSPQCSWVVAEKIGAAGFMLKEVVRCPAPRNARRWCMHDEAAVHYIDMIDQTTLGHRMIKKQFNKTPRAGWQIDCLEQSLASILCILQESITKIRKGVKLAKA

SEQ ID NO: 44298 - protein, 127 aa, Zea Mays
MSEEEINSLPVFKYKVQAQQGNAPARKSDEASQLSVSSTGSGNEKKQDGLKADGTGKTPQDELTCSVCLEQVMVGDLLRSLPCLHQFHVNCIDPWLRQQGTCPICKHQVSDGWHATGNGEEDASYMV

SEQ ID NO: 44299 - protein, 512 aa, Zea Mays
MTTRLTATLLLSRTLVRRVTSRTPTPLGPFGLEPSAGIPISWSRRASSTASGDRGQEPPPAMDSPIKVVSHLGGGRGGGGGEGEGEGEGGAAAIDAGKSARRPLSLWPGMYHSPVTNALWEARSSIFERMMDAGNGASSAEQRPQTELLVKTPAQSRTSIVYKFATDDILREQYRDPWNEVRIGKLLEDLDALAGTIAVKHCSDEDSTTRPLLVVTASVDKMELKKPIRVDTDLKIAGAVTYVGRSSIDIQIEVTQVDKDGDNQSDPIALTANFTFVARDSKTGKSAPVNRLSPETEREKQLFGESEARDKMRKRKREEQKGGLENGIHRLRAEAERLDVLLAEGRVFSDLPALADRDSILLKDTRLENSLVCQPQQRNLHGRIFGGFLMHRAFELAFSTAYAFVGQRPCFLEVDHVDFLKPVDVGDFLRFKSCVLYTQLDNPEQPLVNVEVVAHVTRPELRKSEVSNTFHFTFTVCSDTLKNGLKIRNVVPSTEEEARRILERMEAEGLCN

SEQ ID NO: 44300 - protein, 247 aa, Zea Mays
MGADSEDAVKQLSLLMEQVEAPLKRSFQNMHQGYPKETLVRFLKAREWNVAKAHKMIVECLNWRIQNEIDSVLERPIVPVDLYRSIRDSQLIGLSGYTKEGLPIFGIGVGHSTYDKASVHYYVQSHIQINEYRDRIILPRLTQQFGRPVTSCIKVLDMTGLKLSALSQIKMLTSISTVDDLNYPEKTETYYVVNVPYIFSACWKVVKPLLQERTKKKVKVLTGCGRDELLKVNIFFLACCLFTCHFW

SEQ ID NO: 44301 - protein, 359 aa, Zea Mays
MNFNKLVYAHYVERCPKPEPFFDPLAVEQPTSTRKRAPKTVEAVLSLEQKVVCTAALSDAERFSEIPYFMDGSSSAKDGHHAVAGNKRKHETLEVDEDDSIIAESEVLWRINFERFIFCLKKKFCAERKKAKMRLGTLAIWEAFFEANVTNNDNKTVTSPIDGILERVGQKEGGMSMTLDHITSVLNDLECTSTANNPEEFTFDLNKLVETCRNDEIESLVKKKHGQEAYTIFRLLLKQGSPVETDEITDRTILDKQVVHETLYKLWKDEYIDSERVPSTSATGTGSAQFFVWRVKNIYREHFMDNLYHAALNLRQMVNYMAELLLEGSKDEIKLRNRKNILILALTRHDESLMLFHDF

SEQ ID NO: 44302 - protein, 531 aa, Zea Mays
MQTLRPAPASFLVPPAPQLLRTAPPPAPRANAAALAAASHGWFPSPHRACRRRRRVTRSASSGASATVASVDDAKKDVLIALSQIIDPDFGTDIVSCGFIKDLEVSEALEEVSFRLELTTPACPIKDEFEQKANEVVAALPWVKKVDVTMSAQPAQPVYGGELPEGLQKISNIIAVSSCKGGVGKSTVAVNLAYTLAGMGARVGIFDADVFGPSLPTMVSPENRLLVMNPESKYILPTEYLGVKMVSFGFAGQGRAIMRGPMVSGVINQLLTTTDWGELDYLVIDMPPGTGDIHLTLCQVAPLTAAVIVTTPQKLAFIDVAKGVRMFSKLKVPCVAVVENMCYFDADGKRYYPFGQGSGTQVVQQFGIPHLFDLPIRPTLSASGDTGIPEVVADPQGDVANTFQNLGACVVQQCAKIRQQVSTAVSYDRSIKAIRVKVPDSDEEFLLHPATVRRNDRSAQSVDEWTGEQKVQYSDIPDDIEPEEIRPMGNYAVSITWPDGFSQIAPYDQLEMLERLVEAPSPAAASAVASS

SEQ ID NO: 44303 - protein, 424 aa, Zea Mays
MTTRLTATLLLSRTLVRRVTSRTPTPLGPFGLEPSAGIPISWSRRASSTASGDRGQEPPPAMDSPIKVVSHLGGGRGGGGGEGEGEGEGGAAAIDAGKSARRPLSLWPGMYHSPVTNALWEARSSIFERMMDAGNGASSAEQRPQTELLVKTPAQSRTSIVYKFATDDILREQYRDPWNEVRIGKLLEDLDALAGTIAVKHCSDEDSTTRPLLVVTASVDKMELKKPIRVDTDLKIAGAVTYVGRSSIDIQIEVTQVDKADGDNQSDPIALTANFTFVARDSKTGKSAPVNRLSPETEREKQLFGESEARDKMRKRKREEQKGGLENGIHRLRAEAERLDVLLAEGRVFSDLPALADRDSILLKDTRLENSLVCQPQQRNLHGRIFGGFLMHRAFELAFSTAYAFVGQRPCFLEVDHVDFLKPV

SEQ ID NO: 44304 - protein, 213 aa, Zea Mays
MFISCALLFFLPGARSLLSGLHAHRVQLPPPAVSAARPSLELRSASNSGARPSSLNMHQGYPKETLVRFLKAREWNVAKAHKMIVECLNWRIQNEIDSVLERPIAPVDLYKSIRDSQLIGLSRYTKEILLYNFDGGTICSVVILKEWLGIHRVAAAEISKGLPIFGIGVGHSTYDKASVITLMLAICLVGYSYSQNHKSAWFEAISTKPNKGG

SEQ ID NO: 44305 - protein, 348 aa, Zea Mays
MAMAAVLANGDSQGRPQRNYQVVVAGTRDMGIGKDGVLPWKLPGDLKFFKELTLITSDPVKKNAVIMGRKTWESIPVKSRPLPGRLNVILTRSGSFDFATVENVVICGSMESALELLASTPYCLSIEKVFVIGGGQVLREYLKGPACEAIHLTDIQSSIECDTFIPPVDFSVFQPWYSSFPVIESNIRHSFVSFVRVRKSVAETHESNGKESTEVDTKNDKFETENFSFLPKMVYDRHEEYQYLNLVEDIIRSGAQKNDRTGTGTLSKFGCQMRFNLRKNFPLLTTKRVFWRGVVEELLWFISGSTNAKVLQEKGIHIWDGNASREYLNRYLSIGYKLQTSYVSVLDI

SEQ ID NO: 44306 - protein, 282 aa, Zea Mays
MGHYVPQLSWLVYQNNKGIKNPTLNFKGFMVGNAVIDDYHDYMGTFEYWWTHGLISDETYAKLWEDCKNDVSENPSEECQKIYEVAEAEQGNIDLYSIYTPTCKKTSLQKRRLIRGRMPWLPRGYDPCTELYITKYCNLPEVQDAFHANVTGIPYAWVGCSDPIYEYWKDSPRSMLPIYRELISAGLRIWVFSGDTDSVVPLTATRYSIDALSLPTITKWYPWYYDEEVGGWCQVYEGLTLVTVRGAGHEVPLHRPPQGLKLFEHFLRGEPMPKPVESVQSF

SEQ ID NO: 44307 - protein, 126 aa, Zea Mays
MAPSLLGGFTKSLAMTVLSEIGDKTFFAAAILAMRHPRKLVLAGCLTALIVMTALSASLGWVAPNLISRKWTHHLTTLLFFLFGIWSLWEGFKEDGYRDSEELAEVEAELDAAFKSNKGIFYYILW

SEQ ID NO: 44308 - protein, 642 aa, Zea Mays
MPSPSLLLRAPPLCPSPSHPPRRFAPPSLITSSPPARLLPLRLPSAASRHTPRAGDTRVPDDLIPIARCYEGRLARLELAGAARREQAVAAAAAAGGGASAEDHLAAGSDAMVVEAFLPGPHGGGTTASSTRVILQAKEVKDKASKIEKQFGSDFFFANQPDSESMLAMAFKQVVIQRLSNFRLEVFPPGSERDFQDFGKPRKGSLDCSISSSDGKLLSSLAEAIFSCVIEDVRKNHFGSIGSFFQKRQLNCSMDSSVCIHKTSEAEVVKNAKRCLEIVSLMKSSHEVRETKNGWWPPPHHESLVKIGGPELVLWANEYIPTYKLQINANALENSNLEVEGLYELESNRREVLLTHSQLVELGNVLDMYFEDQFTLPGKTFHPYWNPDLSKIKKNNGYLNNLFTFLAGTCIFLFVTIFAQLCWPQSFRDKRLFKESSNASLSQNYCSDIKSLYNSEVQAYCMSLVKKMKDSYGCPGDVMVDSHIGAWVGELPNCFKAISSEDAAASGSFQYPDTLSQENQSQPVPVNTKMSHLEQNDRTQEFPLQNIASFQVVMSEEGKVVGFQPTNLPAVNHWATNPLATLLYQGRSLSPGIIEPRLKISRPAKAAPIELLMSVNQDSFFALARPVEDPSELPQIDSTARL

SEQ ID NO: 44309 - protein, 146 aa, Zea Mays
MDSSVEKQGSVALDPDERAPASGETKACTECHTTKTPLWRGGPCGPMSLCNACGIRYRKKRREAMGLESSSKAATAGGSEHQQQQRKKKATAAAAADEVTVELRAVGFGKEVVLKQRRRMRRRRRLGEEERAAILLMALSSGVVYA

SEQ ID NO: 44310 - protein, 155 aa, Zea Mays
MQSPNFLICEIASIHLKEHNLLENLQYTYHTKSYIQYKTTREPSQALPWTQSSTCHSPKIHRAIYSLICPSCVLCLVFIMPCIGSNGLYTVSSLCKFPCVCTALLPFAYGHVYFVVLEHLKVGSTFAYGHGRGDDAKTLAELGFQIGDYLSVAIM

SEQ ID NO: 44311 - protein, 75 aa, Zea Mays
MDPPRAVAFLLILLPVLAPVASGVPFVVLHGIGDECGNDGLSSFTKMLGEWSGSKGYCMCIRRRVLRIRRATVSA

SEQ ID NO: 44312 - protein, 218 aa, Zea Mays
MMLRFLKARKFDVEKAKNMWSDMLKWRKEFGVDKIEEFEYAELDEVKKYYPQFYHGVDKEGRPVYIELIGKVDANKLVQVTTLDRYVKYHVKEFERCFQMRFPACSIAAKKHIDSSTSIFDVQGVGFKNFSKSARELITRLQKIDNDNYPETLCQMYIINAGQGFKMLWSTIKSFLDPKTASKIHVLGNKYQHKLLEIIDEWLVFCFLVVHLCCLLPF

SEQ ID NO: 44313 - protein, 431 aa, Zea Mays
MTNTLQDSNKIISSARSMSPALRFHADGEPPYMLQMVKKQCLTKEGTDRDVRHFELEDPSSAMAINYKIGDALEILPSQNPSAVDAFIERCNLDPDCYITIRVRSGDKVFKGSVEQMDRIKLRTFVALTMDVVSASPRRYFFEVMSFFATSEREKERLQYFASPEGRDDLYQYNQKESRTVLEVLEDFPSVQMPFEWLVQLTPPLKKRAFSISSSPLAHPNQIHLTVSVVAWVTPFKRTRRGLCSTWLAGLNPNKGNLIPCWIHQGSLPPPRPLVPLVLIGPGTGCAPFRAFVEERAAQAAAEPTAPVLFFFGCRNQENDFLYKDFWLTHAQDEGVLSSKRGGGFFVAFSRDQPQKVYVQHKIMEQSSRVWNLLLSDAVIYIAGSSTKMPADVTAALEEVICKEGGVKQADASKWLRDLERAGRLNIETWS

SEQ ID NO: 44314 - protein, 381 aa, Zea Mays
MLEHEGAHRCVFASITVKAPVREVWNVLTAYENLPEFVPNLAISRIVLRDNNKVRIMQEGCKGLLYMVLHARVVMDLREKHEQEISFEQVEGDFYTFKGKWRLEQLGDQHTLLKYMVETKMHRDTFLSESILEEVIYEDLPSNLCAIRDYIEKAGAKSSNSTDPDPDVDHDESRQSEQTCVSCSSSTMKQRPKVPGLQKDIEVLKSELDNFIAEYGQYGFMPKRKHLRSHGRVDIEKAITRMGGFRKIASIMNLSLSYKNRKPRGYWDNLENLQEEISRFQKIWGLDPSYMPSRKSFERAGRYDIARALEKWGGVQEVSRLLSLELRYPRRQADPDDERQSESPSGMMKKHGVKPDEGNVSPNAQKWLLKLKDLDVNWVEY

SEQ ID NO: 44315 - protein, 488 aa, Zea Mays
MTHRNMLWTHQSVNPEWEQRHAQVQPGSSYYAGTASDSSNLGVQVAVGVPGNTANVGICDLRNHECPHVHNSYPHAGVTSRFVFPTTMYNPSMSAAAVNIYIPQTQSFGLGSVLPPSLHNQVPTGTIDESSSSVNFGDSAIGFMKRKNAVVAGSHHFLHGFAGSSSSVHVPQNPVHGPWNPSSQSNCLPSSAASNLPEYHNSNGWPYLEESSADASNSFSSVAACQELAPHGNYLYPACHISQSNTWVPQPAGYGVPQWGYSNAVVNPPDMSNGPLPHFCQNSMQAPQIQVSHQQFIGNNAVHGLNPSATGLPLHPRMLALPFNAEHTFGHPMHPPLINQVNNGALRILPYQNATVMDHSRIYEAGHVIDEHSDMRLDVDNMTYEELVALQEQIGDVNTGLTESYIQENLRSSFHVPGAASMSDQFSELSLENDACIICQEEYKAKELIGTLECGHKYHVNCIKQWLMMKNLCPICKTTALSSDRRNG

SEQ ID NO: 44316 - protein, 723 aa, Zea Mays
MDAMAPEEYASQSKLLQEFTNVPSIDSASILKTNDEDRSRAMFSISQPDLLANTNRKYVLYSHITTRAGTGTTSPDFQWSPFPTETTGVSATVPSPSGSKLLVVRNGERGCPTKLEIVCQSHVEKEIHVAGSVHGPLYTDEWFHGVSWNQEETLVAYVAEAPATPRPAFNRSGYTREEGCSEGDCSAWKGQGVWEEDWGETYSKKGRPSLFVLDIPRGEVVAAKGVPTSLSVGQVVWAPESPGGRHKYLVFVGWSERNGFFQNTARKLGIKYCSNRPCALYAAPCPIQGPEPPGNPPATTSDGKSGSGGAVARNLTPGFSSALFPRFSRDGRLLVFLSSKQAVDSGAHNATDSLHVINWPSDWKMDEQLDVTQVVPVVMCPEDDDGGCFPGLYCSSVLPDPWLSDGRTVILTSSWRSAEVILSVDVLSGKVARITPEDSCYSWRALALDGTNVLAVSSSPIDPPSISYGRRLAVTPAEGEARRWTWDEVTSPFMASNSKVKSLLLHHSVSILKIPVPSPSADLSDGGKLPLEAIFVSCSCKGSSRSPTVVVLHGGPHSVSVSSYSKSSAFLASLGFNLLVVNYRGTPGYGEEALQSLPGKVGSQDVEDCLAALDFAVEEELAPDRFAVAAARNPVCNLSLMAGTTDIPDWCYVVACGTQAKRYASEAPSPGHLRLFYQRSPIAHVSKVKAPLLMLLGGADLRVPASNGLQEMMSKPYPKRSLT

SEQ ID NO: 44317 - protein, 289 aa, Zea Mays
MEAVRASAAWVASRSSHVTVDLQEIEKVVDQIQGDVPKVEWDYEGIHYFDNGPLTVQYLFVLDALNFCFWPDKDLSYDHLASGLKSALEKDKNALDSDRLQNYTGPQLRQLLNWPRPLPIEEERVRLLHEELKRSFGGQAANLVKSAGNSAATLIELITRHFPGFRDHSLYKGHQVFLYKRAQIFVADLWGAFKGQNYGEFHDINSITIFADYIVPAVLRELGVLKYGSNLSCSIDSNSEIVPGSEEEVEIRACSIYAVEKMRDLISKKFGKQKLNATCHSIELIRHGV

SEQ ID NO: 44318 - protein, 89 aa, Zea Mays
MNRRGLLGGSGQGISGLPHSSSWWRPLTSPFSSPSIGGRRPPRLPSRRHEGTRPLLRHRQEGRIYSPTTRSCPSPPPAPLEWRPDPAIR

SEQ ID NO: 44319 - protein, 376 aa, Zea Mays
MGESDVKEQQPNRLQEELRKEKEKARALDEIQDLQGELEAARDSEKKMLLSLQAQTKQLEQTKVSLEEAKIEIASLRDSRQPFKNFRRRGLMSFSFADPGEAETWSLQRELRLAVESEEKCNKAMDDLAIALTEQTTEAREANVKLSLAQAELNNARTQVETLKASLESTEGKLQLALEEADRLKVESDELAAASKEKERGLVDCIKMFEEDLSKGKEENDKLIESQRVTRDENSRLREMLKHAVGEANVARESLEIARVENSRLNEEMFKKESTLQSINQEYESLKISEAAAQSSIKELKDMIDAMFSSESTKTSAEASPREAKGSKMKETSVAADYVYSDVERSTRLDDIKNPGKQKKKTILRKFGEIMKKRNS

SEQ ID NO: 44320 - protein, 78 aa, Zea Mays
MVQFFPKPTASRKSDTITRKRQGGNLLIDLFRHCDNHLGEKQVNNPFFHKTPSGSARQPLQLTTDVTKMMQKHQLETP

SEQ ID NO: 44321 - protein, 457 aa, Zea Mays
MPLYLFSSPAAAKLATGPHASLHRRRQFLFRVPHRPSRRAPLLTSAAERPAGRTMATADTGASTVTDSRLRATGVKQALISLSDKTDLANLGNGLQRLGFSIISTGGTASSLEASGVNVTKVEEITQFPEMLDGRVKTLHPSIHGGILARRDQEHHLKALKEHGIGLCNFTYVVLQEMSYNNYLDADAAWNCVSEFESPTCVVVKHTNPCGVASRHDILEAYRLAVRADPVSAFGGIVAFNTTVDEDLAREIREFRRPTDGETRMFYEIVVAPGYTAEGLEVLKGKSKTLRILEAKRRRSGKGTLLSLRQVGGGWLAQEPDDVTPEDVAFTNVSERAPDARELSDAKFACLCVKHVKSNAIVIAKNSCMLGMGSGQPNRLESLRIAFRKAGEEAKGAALASDAFFPFAWNDAVEEACQRGVAVIAEPGGSIRDQDAVECCNKYGVALVFTGVRHFRH

SEQ ID NO: 44322 - protein, 1483 aa, Zea Mays
MASTAAAPRTTKELMDALTAHLSLYHAAANPSPATAAASTSSSSPRAAILRWLASLSPAARAAAATSLLSPAAAAALLSMVRRLRLRGHSSFFVLHSSSPSTSARGAEEPTVLSRLSRGLLARAAASSRAQALLFANTLLFPSSPASSRRPDVITVAEAFVADLDGFVAAMDEISGGRFLCCGEGEVDLAALACQDFPELPWLNAKGYYVIEEFLANRLDIALRMSWAAAGGGSAGGRKAVRIGKSAKEKAGLAANAFWREKGILSCSKKSVFYKELKRLKLVEEIVCLKSNITCCSGDAIFFTSLVSAATAAGDVLMKLQGLLMVVSTESINLELIGDEAPKKKDVEKTSGGSRKGKKKSNTLKKLTTSAKPSKDNGCSSSDNRNCSPLPNHCAPSVEGTAAGPPSEKTPYKEIVPTTKVEQTVSLDGCKNQCNKKKNKRKGKTKLSNPMRPESPRSTKLKTVVPHSAAEALHEAAKEADVSPHHPSYVHPSKNEISEAVSCSDPSILSNGTKVISTSKGTKLEDTLYSPRVHSSLATERFQSAHDDAFKVAVQASSYLSQSESLVQSSSCLPSRSNEVSSTNLYGSSVDSLVRSAQEKTECDGKHVDHKSEVTKDRILPSAIPTDMLQSAISKNGGVMKNGGGECYVYNRNLLGGTSYEWPSVTPSHFVSPQMQQRPAAADRLHLDVGYRWPTQFNQPFLPANHQVRNPPIDAGHNQMLPSLAVPLSFDWPPVFRGYGKNASVSYDPLYTPQMQSSAWSGFPAQLVQRGGICSDSDVADDTESYWFSEEESDSRAHSGRDINQYFGGGVMYWSPAEHAGTGFSRPPSLSSDDSAWAWHEADVIRVVDDVANGIPSTYTNGVSSPPSTPSCSQNESLDPAAHLITGNEINNEALTSPSSVQDSPEDKIMQVAKAVSCGSEVVKADTLPYAMLRPIVVPSISRRSSRSEIKGAHDHRRSPCVPSTRRDIPILRRPPSPVVLSVPRVPRPPPPSPAGESRKRGFPIVRSGSSSPRHWGMRGLFSEDKIFHRAQFCLDGPEVVWPSWGNKGTSGTLVQTIEDTVLQDHLVKISQLSCDQHPDVALPVQPLDMLNGSSHKASLSLMHNALHEEIDQFCKQVAAGNLVRRPYINWAVKRVTRCLQVLWPRSRTNLFGSNATGLALPTSDVDLVVSLPPVRNLEPIKEAGILEGRNGIKETCLQHAARCLTNQDWVRSDSLKTVENTAIPVIMLVADVPCDTNMSNEYSSVLDGSQDYSVNMLGEQGSPPRSDTSSSEGSNMLMCSKLNKDDCDIVQSIRLDISFKSPSHTGLQTTELVRELSQQFPAVIPLALILKKFLADRSLDHPYSGGLSSYCLVLLIVRFLQHEHHLGRPINKNLGSLLMDFLYFFGNIFDPRHMRISIQGSGIYLNRERGQSIDPIHIDDPHCPANNVGRNCFRIHQCIKAFADAFAVLENELLQFSSECSMPVSSFNILKKIIPSIDSDEL

SEQ ID NO: 44323 - protein, 396 aa, Zea Mays
MALNHKDVLVVVDHKDYPALLEYLEGKQDDPDFRRTLAWKAFQHVASYDSAISEWLWKQSNKADSFPPSFTVPLTMKSTLRYGENPHQKAAFYGDRSLSLVNAGGIATAIQHHGKEMSYNNYLDADAAWNCVSEFESPTCVVVKHTNPCGVASRHDILEAYRLAVRADPVSAFGGIVAFNTTVDEDLAREIREFRRPTDGETRMFYEIVVAPGYTAEGLEVLKGKSKTLRILEAKRRRSGKGTLLSLRQVGGGWLAQEPDDVTPEDVAFTNVSERAPDARELSDAKFACLCVKHVKSNAIVIAKNSCMLGMGSGQPNRLESLRIAFRKAGEEAKGAALASDAFFPFAWNDAVEEACQRGVAVIAEPGGSIRDQDAVECCNKYGVALVFTGVRHFRH

SEQ ID NO: 44324 - protein, 468 aa, Zea Mays
MDCFLKRFFPKVYRQKQDSKVSHYCEFNSELLTVFTSSLYIAGLVATLAAATITRRYGRRTSMLIGGSVFIAGSVFGGAATNIPMLLMNRILLGIGLGFTNQSIPLYLSEMAPPRYRGAINNGFELCISLGILFANVLNYFVIKITAGWGWRISLSMAALPAAFLTIGAIFLPETPSFIIQRDGNNTDKARVLLQKLRGTASVQKELDDLVRASDLSRATRYPFRSILERKYRPQLVVALLVPFFNQVSGINVVNFYAPVMFRTIGLKESASLLSSVVTRLCATSANVVAMVVVDRVGRRKLFLAGGVQMILSQFTVGAILAAKFRDYEEMGDGYAYLVLTTLCVFVAGFAWSWGPLTFLVPAEVCPLEIRSAGQSIVVAVVFLMTFVISQTFLEVLCRVKSATFFVFGGWICLMTLFVYLFLPETKKLPMEQMEQVWKTHWFWKKVVGEEADRKEAGAGNIALSGLS

SEQ ID NO: 44325 - protein, 203 aa, Zea Mays
MDSAQQPTGELNNSFDTLMVSGGDQSRQPQDAGNETSFTNWKDLPMELLLRIISLVGDDRIVIVASGVCTGWRDTLGWGVANLSLSWCQDRMNDLVISLAHKFTKLQVLSLRQIRPQLEDSGVEAVANHCHDLRELDLSRSFRLSDRSLYALAHGCPQLTRLNISGCSSFSDVALVFLSSQCGNLRCLNLCGPSPVTVASCSR

SEQ ID NO: 44326 - protein, 252 aa, Zea Mays
MRGGGRALRLATRCGLLLVTARLRLAGPRGDAASGWWRGCARREQAAWLRASGHGLRERRRAAAEKPSSVYHVDFLVDELEKTISVASRDPAYYGLDEVELSRRRNWTGSSHKQVGTVKRAIEKGKSNAATSKYQDTSRTNHYSAQDNDDFLSSESDRQLLLMRQQDEELDELSESVQRIGGVGLTIHEELSGQERILNDLSLEMETTSNRLDFVQKRVAMVIKKAGIKGQIMLIVFLIVLFIILFVLVFLT

SEQ ID NO: 44327 - protein, 140 aa, Zea Mays
MISPAHLAFAAAFLLVVRSSAPGAAAARPIFDGKPSPSEATATARWLAAQNTWGVLSTISSDLSGAPFGNVVSYSDGVPGEGRGIPYFYLTTLDPSARDALEDERTSFTLSEFPLGTCGEIDPENPTCAKLTLKWKVEDG

SEQ ID NO: 44328 - protein, 78 aa, Zea Mays
MFISCALLFFLPGARSLLSGLHAHRVQLPPPAVSAARPSLELRSASNSGARPSSLLPLFITLYGWSLEVVFGLKTLAA

SEQ ID NO: 44329 - protein, 172 aa, Zea Mays
MDPVPLAGWVFVVEDFRFGRRPSPTRVLSTFQALAPASLAIPKTHSAAFLPTWPDWSLIEMATPLIAGLAIAATALAGRYGVQAWQAYKARPIVPRMRKFYEGGFQPTMNRREAALILGVRETANAEKVKEAHKRVMVANHPDAGGSHYLASKINEAKDVLSGKTKGGGSAF

SEQ ID NO: 44330 - protein, 157 aa, Zea Mays
MEEQFILRVPPSVAERIERLMNESAASSSNPDEASLDLSFSEDGRNGTFMIGNESFPASLLDLPAVVESYKTYDDSVLIKTADVGQMIMVREENDPAPEGVEYKHGLTPPMRDARRRRFRREPDLNAELVNQVEKHLISIMHGVSVSILLFSSPATC

SEQ ID NO: 44331 - protein, 536 aa, Zea Mays
MCSTAVLLVRTCVVLVCLAAMARAPAKVHAAAGTGDGLLVIPTTASLSHCPSRCGDVQISYPFGIGPGCFRQGFELTCDQTAPSPRLFFMSGNSSIQVTSLDVGNNMGWASAVGFNVTMSAGVDTYTKSWEAPTATGASFYADNNNNLYTVGCGVYVYVLGDNMTDIIGYCTSICTDNREIMESANTGYGVCEGLGCCSIPIRGRQGFTLKLGRLNSTIPQFGEALSSVKIIVSQNYKFVTDDVYASWVNTSNVNEMIFYITIMDQPNCASAQSQENKDTYACTSESICYDVLPPAVSQGGYICKCSHGLQGNPYLQNNCTDIDECTIPNKCNGICHNFNGGFNCTSCPHGKEYDPKKQKCVMSAKQCILIFGIVIGLVCGLGSISFALGAIVLTGKWKKGIQRRIRREYFKKNQGLLLEQLISNENATTKTKIFTLDELEEATNKFDATRVLGHGGHGTVYKGILSDQRVVAIKKSKIVEQIEIDQFINEVAILSQIIHRNVVKLFGCCLEDEDCNGSIRSTCLSTLSCCNTNFP

SEQ ID NO: 44332 - protein, 103 aa, Zea Mays
MSPHSRQRTRLLRLGIDRWLDQTASSTCWGSGRQPSSKGMAARLRFQSPRAARLLGICATSACHLPDHIRTTSGRAQQSECHSRVSGTSRLLCEFQRTYSGPS

SEQ ID NO: 44333 - protein, 90 aa, Zea Mays
MEAVRASAAWVASRSSHVTVDLQDKDLSYDHLASGLKSALEKDKNALDSDRLQNYTGIFLLIGILLGLRVPSLAFSELLLLVQGNASQLL

SEQ ID NO: 44334 - protein, 127 aa, Zea Mays
MASTACFVIIVSKNDIPIYEAEVGSAPKKEDLSYHHQFILHAALDVVQDLAWTTNAMSLKSVDRFNDLVVSVYVTAGHTRFMLLHDSRSEDGIKSFFQEVHELYIKIFLNPLYLPGSRITSSHFDTK

SEQ ID NO: 44335 - protein, 400 aa, Zea Mays
MMLRFLKARKFDVEKAKNMWSDMLKWRKEFGVDKIEEFEYAELDEVKKYYPQFYHGVDKEGRPVYIELIGKVDANKLVQVTTLDRYVKYHVKEFERCFQMRFPACSIAAKKHIDSSTSIFDVQGVGFKNFSKSARELITRLQKIDNDNYPETLCQMYIINAGQGFKMLWSTIKSFLDPKTASKIHVLGNKYQHKLLEIIDECELPEFLGGKCKCIEGCERSDKGPWKDPNIIKRVLNGEANYGRQIVTISSTDGRIVSYAWPVHPNRKGSDASAESGSEVEDVTSPTASRNLITHPILTPVHEESKLSAHGSSSVVHASIGENIPVVDKIVDDGWGSPRSSPQAASSGSLSLRNLHGTFEGLRAQTITWLTFLMMTLFAMLCSVPSKMARRISNQSGAGA

SEQ ID NO: 44336 - protein, 302 aa, Zea Mays
MAAVQPSVEMTTQQGPPAASYSPARDGGGGRSAEDEEKEKAAAIDNWLPISATRNAKWWYSAFHNVTAMVGAGVLGLPYAMSQLGWGAGITIMLLSWVITLYTLWQMVEMHEMVPGKRFDRYHELGQHAFGDRLGLWIVVPQQLVVEVGVNIVYMVTGGTSLQKFHDVLVCGDAACEGGRKIRLTYFIMIFASCHFVLAQLPNFDSISGVSLAAAVMSLSYSTIAWGASVSKGRVPDVDYGLRATTPPGKVFGFLGALGTVAFAYAGHNVVLEIQATIPSTPEKPSKKPMWKGVVVAYLVKL

SEQ ID NO: 44337 - protein, 187 aa, Zea Mays
MERRGQQPGDAQQPGKDGAGDSPPPPPPFLEVSCRSSGKVRRFAAGTTARYALHAINRKLGPGAPPALHVEAVRDGEEPVSFGPSAALADYGRGWRLQTVTAHDAPGIHHAPHADTGDRQPSKEDADGTETVRGTCIYVAKIVLAFAFLFLLGGSLTYLLEVIPDMLQTASALELTDFFYDPLTENV

SEQ ID NO: 44338 - protein, 186 aa, Zea Mays
MVEEVVDISNWEKKVCGKKRKLQSFRDEEYYISSVPQNHHLEAGLSVRDNEGFVENRLDAAVLDLVDDEASGMQAQKTRYHWMKVISQAMFGSEGRRPESKNKVTQYGLDMTEQQYLEHSIPWIAANDAAWRALCHYWASPPPIPTSPSTEHQTPPATLPTHEQEDGLDFVETLFNSGGIDHHSSL

SEQ ID NO: 44339 - protein, 226 aa, Zea Mays
MIMGGGIIGIGTGPRLAGRVVQAVSQRHGGVDEADGIVEAHEPFDAGVAVAFVAVGLGPVGCEGRHHGWRRQMGDEVLRCLRWELKRRQLVDLVLRGVEQPVHHLARLAEAQPVLEVVELYRRRHGQPHAPVAQPLDRPHLAVPVLAAEDPRHAHDPGLRRRRPVPGARQHGTLRDGPGRGRRPLGLGAPGPQVFIGEVAAYHLLLSTHDHTHKASSNCRPSSAQR

SEQ ID NO: 44340 - protein, 115 aa, Zea Mays
MAVSTVSIHIFGDVPSSPLVGLLQDKINNWRETSLILTSILFAAVVFWFIGVSEAAQDALDHLFNQGHNLVTENEISDTFTRLVERLPQVVLGSEETTTLSHARMLLALTFYAGP

SEQ ID NO: 44341 - protein, 198 aa, Zea Mays
MALKAAVSVTPLLPSPPLRRLLLSPSPSSAAARRIARVSAAMATTEVHPAVVVGGGRVGQALVSMGPPGGDVLVGRGEKVPDDAPGPILVCTRNDDLDAVLEATPKSRWRDMSQLVDLSQIKVYPVQIVERRMVRKGNKPVVQIRVAWSNLPADATTWEDYEVLKRRFPNALDWAQSTFEGGGGDVRNMRSAEEQLEG

SEQ ID NO: 44342 - protein, 327 aa, Zea Mays
MERVCENTVAVDFKQTKLNNFVPFIRSGEWSDIGGRDYMEDAHVCISDLAKNFGYDSVEDEVISFYGVFDGHNGKDAAHYVRDNLPRVIVEDADFPLELEKVVKRSFVQTDSKFAEKFSHHRGLSSGTTALTAMIFGRSLLVANAGDCRAVLSRRGTAIEMSKDHRPCCMNERKRVESLGGYVDDGYLNGQLAVTRALGDWHLDGMKEVGEPGGPLSAEPELKMVTLTKDDEFLIIGSDGIWDFFSSQNAVDFARRRLQDHNDLRLCCREMVDEAVRRGASDNLTAVMVSFHPDAPPPSRANKRTGRVTRSISAEGLHSLRVLLEGQ

SEQ ID NO: 44343 - protein, 116 aa, Zea Mays
MQLSYHPLGTFCLMAWLKFISTNKTQPIRSSIFSQLSFLAQLRIQYSCPILPPYSCNLSFKNLSLLVSNSILLCNLLIHLGQPLRLIHCLRHPSHDLILNFRFQPFNIVCHKQGLT

SEQ ID NO: 44344 - protein, 217 aa, Zea Mays
MVLNSAKDVPALFHSTGISRTEPSADIALEYSPLNPVCDIMDPSLNCRSIPTNKCESRALVEKSEHCPNDYNLEMKGKRNDGTKCTVVLNSGSKVEGLLCLLEQAIHSGRALVLSEDELADSDLVYEKSVAFRKSILRRLVFENTRRKSSARRNVPDNHARTKTHIIANKMLSSPVENKFIVNGGSAMQTIDHGQECLSGVVHQGTLRVDELAKLLA

SEQ ID NO: 44345 - protein, 350 aa, Zea Mays
MKIDIMTMSFLSKMVSWVFPDYKFDRILIEFEKSMTMELDFTREAKNSERTASCFRKNSVVKVPYVFWQLTTREVLTMEFCYGHKVNDLDFLRKTDISPTKVAKALIELFGEMIFVHGFVHGDPHPGNILVSPEGHGKFSLVLLDHGIYRELDQKFRLDYCRLWKALILLDSNKILELGEQFGVGKYAKYFPVIFTGRTIESKSALGTQMSGEEQRRLKEDLNSLGMDDISSFMESLPPDFYVILRTDGLLRSILGNLGAPRHVRLLTYARCAIHGLEKQHKMESGLGDVQLCSGAIRRMFLNVKTNVSYLRLRVIIAVLLAKANGAKQKVVNKLRQMLQETSQGFHRRM

SEQ ID NO: 44346 - protein, 73 aa, Zea Mays
MFISCALLFFLPGARSLLSGLHAHRVQLPPPAVSAARPSLELRSASNSGARPSSLELDGRLKQESSPMAWNSF

SEQ ID NO: 44347 - protein, 333 aa, Zea Mays
MAYFPDEVVGYILGYVTSHQDRNAVSLVCRAWYDIERHGRHSVLVRNCYAVCPERVHMRFPNMRALSLKGKPHFAEFNLVPAGWGATANPWVDACARACPGLEELRLKFMVVTDECLKLLSLSFTNFKSLVLVCCEGFSTTGLANIATNCRFLKELDLQKSCVKHQDHQWINCFPKSSTSLECLNFSCLTGEVNAVALEELVARSPNLKSLRLNLAVPFDVLSRILSRTPKLEDLGTGSFLQGNDPAAYASLCRALENCTSLKSISGFWDAPGFYVQGILSNCKIRNLTCLNLSYATLIQSTQLIGIIRHCKKLHVLWVTSSSLDEYSTTLLN

SEQ ID NO: 44348 - protein, 327 aa, Zea Mays
MFITNNELGQHDLRENIIMKADDLASKLALMWEVDSGVIRRVLSKDYSSLKQLVTLMMDDDISKHLQIIESGLEESEDKVWMKENIIKAWLFCHEQRIRFIYGRTMEIPLVLPSGLCELSLSSCSITDEALAICLGGLTSLRTLQLEYNMALTTLPSEKVFEHLTKLDRLVVIGCLCLKSLGGLRAAPSLSCFNCWGCPSLELARGAELMPLNLDMELSILGCILAADSFINGLPHLNHLSIYVCRSSPSLSIGHLTSLESLCLNGLPDLCFVEGLSSLHLKHLSLVDVANLTAKCISQFRVQESLTIARSRQFHLKNLQISHPSST

SEQ ID NO: 44349 - protein, 50 aa, Zea Mays
MNSGFLFEMDTSMLGRVAALLIRDLGRSRVIFLALARGQDIDCTHFHIIL

SEQ ID NO: 44350 - protein, 784 aa, Zea Mays
MDESGEASVGSFRIGPSTLLGRGVAFRVLLFSSLWRLRARAYAAISRVRSAALPVAASWLHLRNSHGVLLMAVLLALFLRKLSAARSRAALARRRRQHEKAMLHAGTYEVWARAAKVLDKMSEQVHEADFYDEELIRNRLEELRRRREDGSLRDVVFCMRGDLVRNLGNMCNPELHKGRLEVPKLIKEYIEEVSTQLRMVCESDTDELLLEEKLAFVQETRHAFGRTALLLSGGASLGSFHVGVVKTLVEHKLLPRIIAGSSVGSIICSIVATRTWPEIESFFTDSLQTLQFFDRMGGIFAVMRRVTTYGALHDISQMQRLLRDLTSNLTFQEAYDMTGRVLGITVCSPRKNEPPRCLNYLTAPHVVIWSAVTASCAFPGLFEAQELMAKDRFGNIVPFHAPFATDPEQGPGASKRRWRDGSLEMDLPMMRLKELFNVNHFIVSQTNPHISPLLRMKELVRAYGGRFAGKLARLAEMEVKYRCNQILEIGLPMGGLAKLFAQDWEGDVTMVMPATLAQYLKIIQNPTYAELQMAANQGRRCTWEKLSAIRANCAIELALDESIAVLNHKRRLKRSMERTAAASQGHSNYVRPKTPRRIPSWSRISRENSLESLSEEISAVAASSMQQGAALVVGAPPTTLSQHVRRSSHDGSESESETIDLNSWTRSGGPLMRTASADRFISFIHNIEIDTELSRPCAVEGDAAGRCTENSGTESCNTVNTRASTPTSMAVREGDLLPPESTTDNVLLNIVKRDALQDGVTELAESSCAEGYAANCDTVSGLDC

SEQ ID NO: 44351 - protein, 350 aa, Zea Mays
MASSQANLDKMQLRQSYRNVWHTDMTNAIQADFPYCCLALWCGPCVSYMLRKRALYNDMSRYVCCAGYMPCSGKCGESRCPEFCLATEVFLCFGNSVASTRFLLQDEFNIQTTQCDNCIIGFMLCLQQVACIFSIVAAIVGSEELSEASQILNCLSDLVYWTINANADAAQSRNGQEGWKVQPTAYGSAPGATNVTHRSAYAASCWICTATSIWAALWWLSASSWPRLSASWILAGRCIPSTRSRLPTWWWISSTWSRLPPGSGWCISSAWFLPSTRFLPPSRGLLPSTRFLPPSTGLLPSTRFLFPSTGLLPSTRFISPSTGLVPSTRFLPPTGLPWQVKMTRQVNQIS

SEQ ID NO: 44352 - protein, 346 aa, Zea Mays
MGIMRVADDVEARLVVGAGGGGGTATTTTEPLLRHCHGGRKEEDDQGSKIRDSPEAEGASDCGRTDGGSLRMVLVSTAVAVCGSFEFGTCVGYSAPTQSGIVEEVGLSISEFAIFGSVLTVGAMVGAVTSGRLADFLGRKMTMRISATICIFGWLSIHLAKSAIMLYFGRTLLGFSTGVLSYVVPVFIAEIAPKNLRGGLATSNQLLICSGSSATYIIGALVAWRNLVLVGLVPCVLLLAGLFFIPESPRWLANVGREKEFHASLQKLRGEDADVSEEAIEIKEYIESLYSLPKARLRDLFLSKNIYAVIVGVGLMVFQQLGGINGVGFYASYIFSSDFLENLEPS

SEQ ID NO: 44353 - protein, 420 aa, Zea Mays
MRMGQTVPSEVRMHGKAAIWVDQAYQVFEDMKQNYCDPDAYTYTILIRMSGKAGKTTKFVSLLEEMVSEGCVLNLIAYNTVIEALGKNKMVDEAIFMLSKMIESDCRPNQFTYSIMLDVLSTGGQLHRLNEILDICSGCLNRPVYSYLIKALCKSGHASEAHSVFCRMWNSHEKGDRYAFVSMLEALCNAEKTTEAIDLLHMMPEKGITTDVGMYNMIFSALGKLKQVSFMSSLYDTMRANGVVPDVFTYNIMISSFGRVGLVDKASELFEEMEDGSCKPDVVTYNSMINCLGKNGDLDEAHMLFKDMQEKGYDPDVFTYSILIECFGKSNKVDMACSLFDEMVAQGCIPNIVTYNILLDCLERRGKTTEAHKFYETLKQQGLTPDSITYSILERLESRSQRTVRIRKPSRNTGWVISPV

SEQ ID NO: 44354 - protein, 634 aa, Zea Mays
MPSPSLLLRAPPLCPSPSHPPRRFAPPSLITSSPPARLLPLRLPSAASRHTPRAGDTRVPDDLIPIARCYEGRLARLELAGAARREQAVAAAAAAGGGASAEDHLAAGSDAMVVEAFLPGPHGGGTTASSTRVILQAKEVKDKASKIEKQFGSDFFFANQPDSESMLAMAFKQVVIQRLSNFRLEVFPPGSERDFQDFGKPRKGSLDCSISSSDGKLLSSLAEAIFSCVIEDVRKNHFGSIGSFFQKRQLNCSMDSSVCIHKTSEAEVVKNAKRCLEIVSLMKSSHEVRETKNGWWPPPHHESLVKIGGPELVLWANEYIPTYKLQINANALENSNLEVEGLYELESNRREVLLTHSQLVELGNVLDMYFEDQFTLPGKTFHPYWNPDLSKIKKNNGYLNNLFTFLAGTCIFLFVTIFAQLCWPQSFRDKRLFKESSNASLSQNYCSDIKSLYNSEVQAYCMSLVKKMKDSYGCPGDVMVDSHIGAWVGELPNCFKAISSEDAAASGSFQYPDTLSQENQSQPVPVNTKMSHLEQNDRTQEFPLQNIASFQVVMSEEGKVVGFQPTNLPAVNHWATNPLATLLYQGRSLSPASFLRLILLQDCEQFQRCETKQIVAAEPEQDLTRCLSYEKEID

SEQ ID NO: 44355 - protein, 171 aa, Zea Mays
MNRSTIYLRGAGGFSDSSRPYSYATYPANQVSRISIPNSAPSAVCDDQTKQSQALLYRPSGDYNPLHLDPDIAQLAGFTRPILHGLCTLGFAARAIIKSFCNDEPTAVKSIFGHFLLHVYPRETLSTEMWLDGQKVHYQTKLVVGESCATNQTCSYRGRFGHMLGHLEIKE

SEQ ID NO: 44356 - protein, 498 aa, Zea Mays
MAAQPALKASFRGELNAVSFLDSSRGPFGQHKVDFTFQRKGKRAISLRRTCCSMQQAPPPAWPGRAVAEPGRRSLDGPKPISIVGSTGSIGTQIIRSSSMLLYSAALIFNLLHNAKTLDIVAENPDKFRVVALSAGSNVTLLADQVKTFKPKLVAVRNETLVDELKEALADCEEKPEIIPGEQGVIEVARHPDAITVVTGIVGCAGLKPTVAAIEAGKDIALANKETLIAGGPFVLPLAHKHKVKILPADSEHSAIFQCIQGLSEGALRRIILTASGGAFRDWPVDRLKDVKVADALKHPNWNMGKKITVDSATLFNKGLEVIEAHYLFGAEYDDIEIVIHPQSIIHSMVETQDSSVLAQLGWPDMRIPILYTLSWPDRIYCSEVTWPRLNLCKLGSLTFKAPDNVKYPSMDLAYAAGRAGGTMTGVLSAANEKAVELFIDEKISYLDIFKVVELTCDAHRNELVASPSLEEIIHYDLWARRHAASLQPASGLSPVPA

SEQ ID NO: 44357 - protein, 358 aa, Zea Mays
MSCEEIYVTGTAASVPMASKETHTFIITVQILMSALFQINAMEYATILMEASIVQVALMGKRIVIGLVCGLGSISFALGAIVLTGKWKKGIQRRIRREYFKKNQGLLLEQLISNENATNKTKIFTLDELEEATNKFDATRVLGHGGHGTVYKGILSDQRVVAIKKSKIVEQIEIDQFIDEVAILSQIIHRNVVKLFGCCLEDEVPLLVYEFISNGTLYDILHENIATKCLLSWDDRIRIATEASGALAYLHSAAAIPIFHRDVKSSNILLDDNFTVKVSDFGASRSLSLDETHVVTIVQGTFGYLDPEYYYTGSLTEKSDVYSFGVILVELLTRKKPIFINESGAKQNLSHYFIEGLQ

SEQ ID NO: 44358 - protein, 316 aa, Zea Mays
MFGFLKQRRQTPSGFSSSSAAEEVTAGIDGSGLVAIVTGASSGIGAETCRVLALRGVRVVMGVRTPSAGERVKEEIVKNVPAAGIDVLQLDVSSMSSVKRFADNFNGLNLPLNILINNAGIAFSPFTLSDDGIELQFATNYLGHFLLTNLLLEKMKITAMESGIEGRVVIVASDSYKHTYREGIRFDKLNDASGYKGILAYGQSKLANILRSNELSCRLKEEDAKVVVNSLHPGVVATNITRHLGIIKDILSPIAKLVLRGVEQGAATVCYLALHPQVAGVTGKYFVDFNAVELKPPATDKELSKKLWDFSVSLLQ

SEQ ID NO: 44359 - protein, 338 aa, Zea Mays
MASAVAASTATRFLPRLPDPWWTRRARAALPPPPLTWRPLPFTVSAASSRPGEAEGGRRGRMRRRRARRAEQEEGVSLSSEKETVNSTPRAQPKKGAEPVAVSSTSGKGSAIRRVTLVILAAVLFGVSIALKDGAEKASEYFAGYLLEQSLSVDNLFVFVLVFKYFKVPNEYQNRVLSYGIAGAVVFRAVMIILGTATIQKFEAVNLLLALILLFTSYKATPLLLTLAVIELSDIAFAIDSIPAVFGVTRDPLIILSSNIFAISGLRSLYVLVSESMGELEYLQPAIGIVLGFIGTKMIFDFFGYHIPTEASLAIVTTCLSGGVILSLRKASKEKGDK

SEQ ID NO: 44360 - protein, 403 aa, Zea Mays
MATSSAGSMTPRSPITTPRSNHIDMLLAGKNAINESDDLPQIVELADIARCIANTPLDEESALSQMVTCIEDLQEIVNCRKHESLTVQTFGTRIEKLHREKYLQLCDSVDMDKVDSASTIMDEEDNVVRSLRASPVHPIKDRTSIDDFEIIKPISRGAFGRVFLAKKRTTGDLFAIKVLRKADMIRKNAVESILAERDILITVRNPFVVRFFYSFTSRDNLYLVMEYLNGGDLYSLLRNLGCLDEDVVRVYLAEVVLALEYLHSMHIVHRDLKPDNLLIAHDGHIKLTDFGLSKVGLINNTYDLSRPVVSGASLYGDDEPQMNEFEQMDHRARRQNRSAVGTPDYLAPEILLGTGHGCSADWWSVGVILFELIVGIPPFNAEHPQIIDRRSSSTTRSKWRLRG

SEQ ID NO: 44361 - protein, 439 aa, Zea Mays
MRNNQMFQRLGINQLRTMMTATRVKSKYDGPEESGSLFDGEDSEGSEPEEDSHVAQGVRSHNPTHVADKPTQQTRDSKRVVAPDVHGQQIRFTRQRSAAINQQSSLSLTTTTQAGSRATTNQESTQNLAAATQFTSSVATEQDYTAGLTTTAQPTSPTQAEVNDNNRDEELVPRQRSRGKQLESLSRGLGTKIPIQISNGKRRPEPPIQTAKFASEGGIILRQHIPIFPHWKEYKKQENEGKITDYIGKLAGQFTMDVESNAVKDACVDMLKGGQRQMRYRLKKKYFTGVPANQVRTTSPVSCITDDQWRELVQMWSSPNHKNNCVKNKLNREKVQFPQCTGSQSYVAKAYVVRQEKYKDVEPSAIDLFKEMHCSKKKGFSEVVQKAIVNMDTLKAKSQASEATIANQSTEIADLKKSLAENSILLRQILSISRDQLNP

SEQ ID NO: 44362 - protein, 157 aa, Zea Mays
MSFLRSLANSFSSLLFSSGGETAPMDAAGSAPSPAAVVRERVAVKLRGYFDLAKEEMDKAVRAEEWGLPDDATAHYRNAMRVMLEAQAARVPDAVSSSERGQVRVYQEKIAKWQAQVEERLRVLGQRSAEGATAAVVPKKELLINLKSWMMLFFEDW

SEQ ID NO: 44363 - protein, 632 aa, Zea Mays
MPSPSLLLRAPPLCPSPSHPPRRFAPPSLITSSPPARLLPLRLPSAASRHTPRAGDTRVPDDLIPIARCYEGRLARLELAGAARREQAVAAAAAAGGGASAEDHLAAGSDAMVVEAFLPGPHGGGTTASSTRVILQAKEVKDKASKIEKQFGSDFFFANQPDSESMLAMAFKQVVIQRLSNFRLEVFPPGSERDFQDFGKPRKGSLDCSISSSDGKLLSSLAEAIFSCVIEDVRKNHFGSIGSFFQKRQLNCSMDSSVCIHKTSEAEVVKNAKRCLEIVSLMKSSHEVRETKNGWWPPPHHESLVKIGGPELVLWANEYIPTYKLQINANALENSNLEVEGLYELESNRREVLLTHSQLVELGNVLDMYFEDQFTLPGKTFHPYWNPDLSKIKKNNGYLNNLFTFLAGTCIFLFVTIFAQLCWPQSFRDKRLFKESSNASLSQNYCSDIKSLYNSEVQAYCMSLVKKMKDSYGCPGDVMVDSHIGAWVGELPNCFKAISSEDAAASGSFQYPDTLSQENQSQPVPVNTKMSHLEQNDRTQEFPLQNIASFQVVMSEEGKVVGFQPTNLPAVNHWATNPLATLLYQGRSLSPASFLRLILLQDCEQFQRCETKQIVAAEPEQDLTRAPGDYDP

SEQ ID NO: 44364 - protein, 394 aa, Zea Mays
MEKKAATTEEPLLAPRSEHTVAAEAKRLLSLAGPLVASCILQNVVQLVSVMFVGHLGELPLAGASLASSLANVTGFSLLVGMASALDTLCGQAFGARQYGLLGLYKQRAMLVLALACVPIAAVWANAGRILILLGQDRDIAAEAGAYSRWLILSLVPYVPLACHVRFLQTQSIVVPVMASSGATALGHVLVCWALVFKAGMGSKGAALSGAISYSVNLAMLAVYVRLSSACKRTWTGFSTEAFRDLLRFTELAVPSAMMVCLEWWSFELLVLLSGLLPNPKLETSVLSICLNTGALLFMVPYGLCTAISTRVSNELGAGEPQAARLAARVVMCIALSAGLLLGSTMILLRSFWGYMYSNEPEVVTYIARMMPVLAISAAAAAGAGPVARRHWSS

SEQ ID NO: 44365 - protein, 110 aa, Zea Mays
MVELTGVPSTASCCRQHGTRGADGEHPIWWSSRAEICLLVRAEPAEDHEVWVPSAMDRSWERGTQGGRHGWELLAAAGAVPSTAMGAGRTRVASREKESGGRREERGREP

SEQ ID NO: 44366 - protein, 50 aa, Zea Mays
MDLDYEDEEELNIPIIKENGKCDGKEDQRSEERKLLQLQNQVLGLKKVRM

SEQ ID NO: 44367 - protein, 56 aa, Zea Mays
MHPCMHVVVRRKAVWSSTVLVPIKFSAFDLIYIYISHGGTESATIHRTNQLMLQQK

SEQ ID NO: 44368 - protein, 51 aa, Zea Mays
MATPLHGFLLPLDLPPRSKDREEEEHVELKRERGSRRCSSPSLLEDLLGET

SEQ ID NO: 44369 - protein, 57 aa, Zea Mays
MHASRSSDDATVRCCMPAFAAEHELPARLSPPSLLSFVRLFPVTGPMETPTQTHPPT

SEQ ID NO: 44370 - protein, 50 aa, Zea Mays
MKVRFSATAIFGFHEKISLNEVSVIKKIVVDNSILIIIKKKRQSGGRKIS

SEQ ID NO: 44371 - protein, 57 aa, Zea Mays
MPQRAAVMRSPLCCLHRPDLRSPDPRRRVGVWTAPHYVVDLRGSTVYVSHFAGSAQP

SEQ ID NO: 44372 - protein, 55 aa, Zea Mays
MGKSISLILSSPSIQRAPPLLDPCCAGGDLERGGSHGERLPWEERTTSPRGKEGG

SEQ ID NO: 44373 - protein, 57 aa, Zea Mays
MAHRVRPSARASFLKLTSGRPVQYLEPLPEHHFPSRLVRCCIPGMKRTWIDQHKYEQ

SEQ ID NO: 44374 - protein, 68 aa, Zea Mays
MNVDEGFRRAGNDEVWTGFGDVSGEQGNGCDRRWTARYNSDASPRTPATTVTIGLVDGGTPAMRLHER

SEQ ID NO: 44375 - protein, 64 aa, Zea Mays
MPSAPPARMLSSTNSKVPTGRLLGTGERAVHDVDSRLPGEGQPPQLKVTPITAHWKFSSHLCYQ

SEQ ID NO: 44376 - protein, 71 aa, Zea Mays
MILVCCIWAGFCTWISSLVRIENSYAWGLAGYTALIIVITIQPEPLLTPQFAVERCSEIVIGIVCAIMADL

SEQ ID NO: 44377 - protein, 54 aa, Zea Mays
MEGRLRRRVDRGNRRKIDEVVGDSICKRLAVREKKRFGDLVNKNTRSGIGSMRG

SEQ ID NO: 44378 - protein, 61 aa, Zea Mays
MRNLNLLVACFIMGDALASRMALVSKGETMSNLMPLLRTCLTLLRAKLPCLRITRVTFYTL

SEQ ID NO: 44379 - protein, 66 aa, Zea Mays
METGGTPNLLTPTTQHPTSSLATLWTRPRAVQGRATFWHRVNIAEEFDFTRDQTLSLGFSLLMAAI

SEQ ID NO: 44380 - protein, 60 aa, Zea Mays
MACSKLLNNDNVTCALLEASRAVSDVYSTARFQRIRPYKGSKSKVQHRPYWLLQHHDLNE

SEQ ID NO: 44381 - protein, 66 aa, Zea Mays
MATGNFPSGTSPSPWGEKFPILAPPNVHGVIFTPILIPIEEFIPAGNLSLLVDTIFRSKLKLIILN

SEQ ID NO: 44382 - protein, 63 aa, Zea Mays
MGKTHPTSGSHTHVAMRKRKGWHGGAWGSDQVNARATCMAGIVITSKRQAGNDRLVFFACLML

SEQ ID NO: 44383 - protein, 50 aa, Zea Mays
MSIHGANNLTSISHLDQLVLLIVRLLLNHLFFSCGGLYIASVSSQKIIAQ

SEQ ID NO: 44384 - protein, 62 aa, Zea Mays
MGLLVLVACCVNRRTEEDQRRCCGEGLLPVRSAQQKKAYADGRYPASSVAAIVVTNLSPWTA

SEQ ID NO: 44385 - protein, 74 aa, Zea Mays
MRRKKKKERVQLQRWKWKCSLFTNGDIYSKCWQQVNRRARVPQKQGTIHVASPSCRDQLRRERANANGTIRRGR

SEQ ID NO: 44386 - protein, 53 aa, Zea Mays
MKTICNSFCSLYRSITCLIEKASMVDLMGMKPNWFILHRDSRYSSRTMLDYLP

SEQ ID NO: 44387 - protein, 61 aa, Zea Mays
MCLQLQAPANRTRVAAQQHKFPFPTPLLHGTVSSVPATPLNHARPSSSMALGYLSARSAFD

SEQ ID NO: 44388 - protein, 53 aa, Zea Mays
MDSMGTMTRLIRHHGFRQYLSLSQPLYLVVVRQVKGWKGRGAAQFMCRGFGQH

SEQ ID NO: 44389 - protein, 72 aa, Zea Mays
MCCCDMHVGSIHMLRPRSKKKPPLLYKFMYCTHNTCPMQICIYKKHRLFGASNIFNSGICGEHLFRVRTNIM

SEQ ID NO: 44390 - protein, 77 aa, Zea Mays
MFGNCHTFLPNLLHPRLPLASRNSDETLCPIIPTTINSTYFSSVPEHSTNILSVKDSLPSVFFQRKALDKLRIAKNQ

SEQ ID NO: 44391 - protein, 60 aa, Zea Mays
MVVSAFSDADWAGCVDDRRSTGGFAVFLGSNLISWSSRKQATVSRSSTEAEYKSLANATA

SEQ ID NO: 44392 - protein, 53 aa, Zea Mays
MELPGSTHDTARHGGGFPDTDDELGRIRLVSSSYDSVPRFTTASSTTIAPLWP

SEQ ID NO: 44393 - protein, 72 aa, Zea Mays
MGDGEAHRPYAERLLLVRRSARGVDRCRPRRRPKPGGPRRPRQPSSARTVSARLWRAPRGAALQRPASSPSD

SEQ ID NO: 44394 - protein, 82 aa, Zea Mays
MVLRRMLLTEIRRGDLGFPRHTAETEVRRQIPDTTVVAISPYGHKIFTRHPKSSRTRPMCPVFRRRRQWRWRMISGRSPSLS

SEQ ID NO: 44395 - protein, 55 aa, Zea Mays
MFCCFFIFSIINLPSAFRHSAKTLPSVRKKYSAKNPLAIKYLPSVLDTRQRTRFR

SEQ ID NO: 44396 - protein, 65 aa, Zea Mays
MANRCLNHLRMLDVMKILKKTFITSVCVCQYDYYSKLNSYGLGVRNLDIYTTWSCTHTDLFSCCL

SEQ ID NO: 44397 - protein, 57 aa, Zea Mays
MCCMWQILRMRNINQEEVDDDLFSLACGSDFRVRKYSSCIVNGVRFKTSATTSIERQ

SEQ ID NO: 44398 - protein, 53 aa, Zea Mays
MDWLRGCGGVICARGVRSLQAAGLGSYRLVAIPRQSRASPQIRLASSYDRLIV

SEQ ID NO: 44399 - protein, 56 aa, Zea Mays
MGNASSATFTRRGRNFPVYILVGEETSPSPSPNRGIRHGKSGIGFPLPSLARMQPS

SEQ ID NO: 44400 - protein, 75 aa, Zea Mays
MAVEVLVCCRDGARPCRKEPRGRREASHGRKSSSSCALGRRAPWLGRVEQGSLVAAAALSKEEEGAWERKEKRVA

SEQ ID NO: 44401 - protein, 79 aa, Zea Mays
MQRKERHIKVANGVQANVEAVGDLPLELANGFILVLRDVLYVPSLQRNLISVSCLDNNGFDCHFGDGKCEIFHNKESVG

SEQ ID NO: 44402 - protein, 52 aa, Zea Mays
MRVVRRRRLTLHREEIVCVRTYEYISCSTKILILTGVVNSAGSVAGNNRGGA

SEQ ID NO: 44403 - protein, 58 aa, Zea Mays
MPIKRSRSATPAGKRICKNLQEHAANREEDLHERCQPGDRHHRRQPSIVVTQIYGQEQ

SEQ ID NO: 44404 - protein, 62 aa, Zea Mays
MLVDRVQASMWAQCSSEYSELLTEARPPPWCRCSTEAGSDHYHINPRYVTFICFATVTATYI

SEQ ID NO: 44405 - protein, 56 aa, Zea Mays
MGMMIGRSLVCQAWCKRTSQHAERGKSQGACKGDGRRSLQPDGHYVKHKAHIAAKQ

SEQ ID NO: 44406 - protein, 70 aa, Zea Mays
MLKTAAETYTRRMYSEFEEEFKKQFTLSCELLEGNGTNSTFFVKYMQSERGATVVLNTEDSTITCSCRMF

SEQ ID NO: 44407 - protein, 72 aa, Zea Mays
MVVWPRLQWAARPARGHCPSFWHQCGQPRARLRPTPLADRVSTTEQPMATPPPFPSPCCYFFHGERWSKKEE

SEQ ID NO: 44408 - protein, 54 aa, Zea Mays
MKCGVQRENRSNQTNKHKKMSNNLSLPVYIIKLHSTNNTVYSEKTVYSRFLDTV

SEQ ID NO: 44409 - protein, 54 aa, Zea Mays
MCSSSSRSLLRGGRSRERRKPWRGAAMGGEDSQPKGKGERGGQVWEGGKGVAAK

SEQ ID NO: 44410 - protein, 51 aa, Zea Mays
MYLSIGACEACRDRPPLCPRSCRRWGYASSSCPDYFLVCRRLHQGPPYDGV

SEQ ID NO: 44411 - protein, 54 aa, Zea Mays
MANHWRSHRPGCRTWSVWGQLWRRRAGPCSPPWLRPVWEDGRAPLVWPGAARIR

SEQ ID NO: 44412 - protein, 82 aa, Zea Mays
MAGRSLGHAMGKQLKVEEGDGEELGWRGASTRELSAAGRREEQGGRREQGAPGREMEGARMTAVREKNTRAQGAPCLWSEQE

SEQ ID NO: 44413 - protein, 54 aa, Zea Mays
MASEAPILPPLGSTHPAKSARAPARGRTVEEIPPGVHPATSPSLPMASAEWSIQ

SEQ ID NO: 44414 - protein, 91 aa, Zea Mays
MDALHLTVFTSAAAVGWWSRRARSPAWQLPSHGSPSPHGVRARVCRLWPLASIRTYDQERTTPSSFPAVRPSSLMWDLVESAAPTLLCQVR

SEQ ID NO: 44415 - protein, 54 aa, Zea Mays
MLNSLPIRLVWNRGFSSQVHPYQTTAFFPPLDDYYVSCKCSYFFSRVPRLAPSL

SEQ ID NO: 44416 - protein, 61 aa, Zea Mays
MASSSNAMPRTTRESPTLATTMRSPCLTMDSAKQPLCTASKRRLRWSLSYIVHMRPRRTVF

SEQ ID NO: 44417 - protein, 54 aa, Zea Mays
MDGGASLTNSSRVPPWSLLSTILSAWTVRPWAERFVVRTVRAYGPDGPCRRRTD

SEQ ID NO: 44418 - protein, 82 aa, Zea Mays
MILKSPWVPPFLLPFFLLPPSKLQWKTRTHTTGYQAGRMHHGEEEGGAARVEGWCCNHLGEKEREREGGWRPQRGIGKGGRL

SEQ ID NO: 44419 - protein, 68 aa, Zea Mays
MVRIKFVHNRIGMQHGALDSDPTAHNRSEGWSTTSDPTRLSRDRRLRTHQPNRYLMNPSRPSISRSIV

SEQ ID NO: 44420 - protein, 53 aa, Zea Mays
MHFTPDDEVTGSKHPVESRRGRRSPAVGDRSCGGGRSPSTLLLSLHGTTFSMV

SEQ ID NO: 44421 - protein, 57 aa, Zea Mays
MKLSSALHGEGAARLLLPWHCRRPLHSTAPRGRRRRERKTREESEARMMGHLSGEPP

SEQ ID NO: 44422 - protein, 92 aa, Zea Mays
MQIDRRGPPRREEPSRWPSILVLHRKGMSWARQSGYLVVVRRIMSCDRLMKGDSGHGCGARQMCHRGGNGGRGGGGDFSGGDGHEEPLSLVP

SEQ ID NO: 44423 - protein, 70 aa, Zea Mays
MTVCYHHFGGPPVREDMRRGGITASTHGHHSIGSTTTLAGRPCMILHPSPHTSASFNSHMHACMVDWWPG

SEQ ID NO: 44424 - protein, 50 aa, Zea Mays
MSGGEMPRSSRLPTFSLHLVSQPIPCSLFLTLSHLPVDIVLCCWVRGLRA

SEQ ID NO: 44425 - protein, 51 aa, Zea Mays
MSGSEPLITVSTASIPVLHSAKVAHLYPQVMLPICQGVMNHIHLYQGSEAG

SEQ ID NO: 44426 - protein, 79 aa, Zea Mays
MMNLPTERGGFTAGGKGRRAIPLTPRVHAPDSPRHTIHTPVGLSGSAPRVLKRGRRRQTAMAASGGVPKSKGELMGRNY

SEQ ID NO: 44427 - protein, 56 aa, Zea Mays
MGSLSSVLVKGNLLRLGELLVPSIQVELHRHSSNCSPDFPYAAEPHCAEDRLRLAS

SEQ ID NO: 44428 - protein, 71 aa, Zea Mays
MQIRQEATITSPHQALRMRIGLLHVTMLSTAPDIASSPSRSNFILLAVCLNACVRFDLLDKFCMVVCFYHT

SEQ ID NO: 44429 - protein, 61 aa, Zea Mays
MSHYMILVVSKSITGVVYQRSKFIKTSTPPRFGTRSKTGLVQPATFQFREKKCCSRPTTNQ

SEQ ID NO: 44430 - protein, 60 aa, Zea Mays
MGNENHTPSNRSSEIIQQSASTAMFTPKNICNVVVSKNATLAHQNRKRALEQKRLLTRGN

SEQ ID NO: 44431 - protein, 61 aa, Zea Mays
MWKLGGASSSEGSVDFGRNCSSTFLTHRRPLPIVAGILGYSKRLVRPSNGFTSSSSPNSTV

SEQ ID NO: 44432 - protein, 89 aa, Zea Mays
MAGVHPVFHVSMLRKFLRDPDHQIEMEPIAVQQDLTLECRPVRILKFSERALRKRSIKYVKVLWSNQSEREATWELEELMRQKYPELFV

SEQ ID NO: 44433 - protein, 55 aa, Zea Mays
MACGLPAGRDKNNFGFFGFSKIIFDFFRPKPTVPVFFGTDIGYHHFVSKSVSKTI

SEQ ID NO: 44434 - protein, 61 aa, Zea Mays
MGANLLPGRRLVPSLTNSTQHRGPMWLLGTMARSLLEALGSHGKQVPGHWRKASPASSWEG

SEQ ID NO: 44435 - protein, 52 aa, Zea Mays
MHGGGLANADARPIRRSALYVVVWPSGFSARTHAHSTQSRGRRATGRLYHAR

SEQ ID NO: 44436 - protein, 54 aa, Zea Mays
MGRVHRRLQRTRREFCWRGRDGSDGLVPQGSEQSRAGHRISAAGEWVPPNRSRR

SEQ ID NO: 44437 - protein, 65 aa, Zea Mays
MCCAVAHAAILVWFQMKRNSTLRYYSHMAVQCIDIFNSNAFGSHSRHAWWDGWGGRSRSRRACYG

SEQ ID NO: 44438 - protein, 90 aa, Zea Mays
MNDQLPHSLQQTNPTTVSGGTVGLVELRRGIQSTTEAFPALIHHGHATRKQECCPGTLSRLKRRRRASLQLRRRNPILLTPAASGEGLGR

SEQ ID NO: 44439 - protein, 52 aa, Zea Mays
MTGPVQSLDPPASRSCVQCACACVRRAALAGRRGTGVVHLSFHRRAATRHLR

SEQ ID NO: 44440 - protein, 87 aa, Zea Mays
MLCVFFLVLDLKDPAPREEKNFAIKCSSSKCEAMKHLFRSSLSQSKAWNLHMGVWRMLEDSISSKISTYARLEMPEGECVCQRYDVP

SEQ ID NO: 44441 - protein, 67 aa, Zea Mays
MWTTPEQSKLYLTLLSRPDLRGKAGCVSYVRQIRTTHIMTKCIEINITNIITLQKCFTKINDNNKAN

SEQ ID NO: 44442 - protein, 72 aa, Zea Mays
MRLAAHFYEQPAGSTGNNEEGARCLQRRAQGKISGRPWERGRCVGLLLGQGMALTPWLELQLPWEKPERWTA

SEQ ID NO: 44443 - protein, 59 aa, Zea Mays
MTFAAQPRPCGELFGSKRVDDVGTLWTSTSAVPTDSACGRGASPSIREGASTICGWSSD

SEQ ID NO: 44444 - protein, 93 aa, Zea Mays
MRTTGGGTTMGAVAGGAGSGRTRARRRGCAPAQPRHWGRAAGQFCPTTPWPEPMRPGWATLRGRCPRRPPCVRECEPKRPMPAQVAKRVPAQV

SEQ ID NO: 44445 - protein, 53 aa, Zea Mays
MRFFLLFALPAYWPDLLHRYISILTDTVTDPTSVYHHILTNKSNLLVGVGSDP

SEQ ID NO: 44446 - protein, 77 aa, Zea Mays
MEVVPSLGERRGWRTRMFHAKVYVVTVDPPSPWTGHSVTGFAVRAFLCRFAFAHASRSIGGHGLRCIGASEIARRSS

SEQ ID NO: 44447 - protein, 76 aa, Zea Mays
MGGVEDDAGLKTAAQRLRREYENLSFKDDESVENFALRLTSIVAQLDTLRDPEPAEKVVAIFLLLVHGTSSLLSPS

SEQ ID NO: 44448 - protein, 67 aa, Zea Mays
MSLTRNQYLQMIPYWCAIYPLCWEQMVDRCCSPEWDEAHNASRKRRLMMQCPSHHQGSRNLGQYAEA

SEQ ID NO: 44449 - protein, 82 aa, Zea Mays
MQYWLFGILLHAFFCNSVISGKPEPVPEFGYFGETRTRTRIFGYQSFGYPLISGILRVTVLKTRILENPNYPTRIYRVTRMP

SEQ ID NO: 44450 - protein, 70 aa, Zea Mays
MVANISAAAGICTLRPTSLVTFGFGLVWLGTIRVCLNWQYIKIPSIYLFFSSKGRQEDCRIYLKKGNQYN

SEQ ID NO: 44451 - protein, 54 aa, Zea Mays
MVSARELLGDKNCSSSPENHRRARNRVGRATTVPTCGDNPSVCLVLLFYVRSTS

SEQ ID NO: 44452 - protein, 68 aa, Zea Mays
MTLASHQSIDRLLCCPHRVTIAERGDGLPPLNAHHTIAWGRAHGQGGSPESVGGVWVGRGAQEASMAP

SEQ ID NO: 44453 - protein, 94 aa, Zea Mays
MVGSRALDRAHRIRNHRENYAWLKARWAGREKKSPPPSRPSFPRTRSRWWRAAATMAVCGVVSLHVGRLESAQFHAGDSPESRIRRSPWLGFLR

SEQ ID NO: 44454 - protein, 69 aa, Zea Mays
MPNVLSLANKVCTTWQIRSVPWRVLVRREWHSIKFDKLYSAKRRAFGKELNSGNSADRAPDHGVSVYPP

SEQ ID NO: 44455 - protein, 55 aa, Zea Mays
MVASACRCRGGDPSSTRDGRACLSLAAVVRDRGSTLMPARAQEQRRQAPRGGTHV

SEQ ID NO: 44456 - protein, 54 aa, Zea Mays
MPCRCRLYLPCPSFTVAATNGQWRSFYYNPRRSDASSPLYIINQVTDPPYGTVQ

SEQ ID NO: 44457 - protein, 56 aa, Zea Mays
MNSPWVLLFLLPSSSLQTPIEIAATRRRTTREGCTLEGGREMGGGLGFWVVRAAKV

SEQ ID NO: 44458 - protein, 80 aa, Zea Mays
MLRVDPPRNDKAPVPSSSPTRRCRPRISRWRGQCNTHALSVLSWFKALGFRCGVLKGEAVPRLGFYGWARQQSSFKLGLR

SEQ ID NO: 44459 - protein, 60 aa, Zea Mays
MMRERQQRKNIGIHHARSSYNNERTDKQNGGRLHAWRSRGSKSPFFSSGIRVLKSPPLFS

SEQ ID NO: 44460 - protein, 70 aa, Zea Mays
MSLIFTLNHNVINQGLSKCFPFRSVSSLIFIIILSRSSSSHSFSVHPYHLQVVSSYRACLCHEGKPSSRS

SEQ ID NO: 44461 - protein, 75 aa, Zea Mays
MLARWSAPARSLVCGKKPEATVRPQPAAGPLQPADSRSSSRAQSPVPSPLHTAGLPQTAVPHCRSSLSDRSAARD

SEQ ID NO: 44462 - protein, 50 aa, Zea Mays
MQVILKVNVLLGEGDWDVRPFRPDEGSLNSIMMYPLLSFFFLFLVSWFET

SEQ ID NO: 44463 - protein, 74 aa, Zea Mays
MFTSRRSSCLLANQTFFRPGLPSARAPHSPFPPATPIDRNHVLHHNSAFELVSEQEGVPAVVGTYMSPCLAPGA

SEQ ID NO: 44464 - protein, 78 aa, Zea Mays
MPMSCTSRGRTPAPGPTCLSTLSPIVSLPHPTARRDEHFLFSPIWLVLVFLSHIFFYRWFVLAGVAGPDLPVPSRPRF

SEQ ID NO: 44465 - protein, 58 aa, Zea Mays
MCPGSFVGSPPASSQKKHYRGERGRQRGSDLGRHRWFSAVSGLHPRGVAKESRQCLGK

SEQ ID NO: 44466 - protein, 52 aa, Zea Mays
MRTTYRWLGCNIPFPQGHAIHGGSQLLMRNCDSARGRSNPTTQCQASKRASD

SEQ ID NO: 44467 - protein, 78 aa, Zea Mays
MCRRHYGWENCRHRGTSPGLPFGSCGLAWGLHNIAWELIMVVLDGMVLRGSIDCSPALKHHRGAASCCGPASPQRLRR

SEQ ID NO: 44468 - protein, 50 aa, Zea Mays
MNLSNTYVALAKSNLPLYIRFKPDHSGAVYELVLHTTKRHICSSRDTAYI

SEQ ID NO: 44469 - protein, 59 aa, Zea Mays
MEFGRQQGFAGVGLTSLQLGERLISGASAGLGSNSSPLIDLRREQLHPRDRVPLRRQGR

SEQ ID NO: 44470 - protein, 62 aa, Zea Mays
MSPRSLTRDTSPDDGRTIAGDLDTLVGHERLHRALGLPSSTFRLKHAAGEVTAAVAGYLSLS

SEQ ID NO: 44471 - protein, 69 aa, Zea Mays
MFVWNDVAPTIYQLTHHGSLQLQNIRMFQFGLGLFSVQPTELCLLSELSTCRFSYKLPAGFPPYPRPRE

SEQ ID NO: 44472 - protein, 82 aa, Zea Mays
MTKEDLIKNLGTIAKSGTSGTAFSSFQLITALIIFVYECRNRSCSSLLSKLIRKELRRWKKRKCICNYTKQWRRWSRSIWRP

SEQ ID NO: 44473 - protein, 109 aa, Zea Mays
MLSRSGSTCHKRLHPTIPSIPTHTNTPMTPKSKLPAPHLLLAMAAPCAATAHCTSEPSTPSNLICIRGRYALRRQDCNLVDGEYILVLEQGVAQEVAPDLAPEPAIEDL

SEQ ID NO: 44474 - protein, 72 aa, Zea Mays
MPLAVVVVVGREKSTVHVMHGCKKEKGMQVETPASPMLHVVFLSCVHALKRNSPPRIRGGCKIHDHPWELAR

SEQ ID NO: 44475 - protein, 79 aa, Zea Mays
MILKSPWVPPFLLPFFLLPPSKLQWKTRTHTTGYQAGRLHHGEEEGGGAARVEGWCCNHLGRKERERERGWRLQRGIGE

SEQ ID NO: 44476 - protein, 73 aa, Zea Mays
MDGCGSTSKRHPSMDDRDGRRPDILRCGARISSHHQHNLRSAARVTSVVVAFNIFFQITGRSLVLACCPFPFS

SEQ ID NO: 44477 - protein, 114 aa, Zea Mays
MHLSFPRWTHWLHCIIALIQHKAQWQWQQGVGWLLIVGRWRCRRRRPCARTRSHVRSIPCMPVPVVPGPGSSFQVNDRAGPAPVAPLTETDRRPRGRRSKSKPRGPRRCAGESG

SEQ ID NO: 44478 - protein, 105 aa, Zea Mays
MVPRRRAWWLGGEGGPLEKNFDGSNQAQDVHALTQRAPAMHPGHLGTLNSSHRSDRRWRLLLASPLVSAHARDCGRDLGFQVYSIAFISWAEAITVEEILVWGLL

SEQ ID NO: 44479 - protein, 71 aa, Zea Mays
MDQLPLENFENNRIRAFCLTKYSHCRLLSKVGLLWVECLIMGKGGVFEFLINFSWNTSLYASTSVFDLEIG

SEQ ID NO: 44480 - protein, 64 aa, Zea Mays
MSFTSTGQGPWRQYNEGNERSNQSSVTLLTRHECVHDGGPGPELPRRSELKNCRRSSCSVIVFA

SEQ ID NO: 44481 - protein, 71 aa, Zea Mays
MHECGVVSAHLFISSVTRRPRLLVLALIGRGWRWKTLPAAAASRTPDARARTGCAAERPKCTHRQFQSKKK

SEQ ID NO: 44482 - protein, 54 aa, Zea Mays
MMTPDRAWKSHTLTPGNVVKLLHYLLDPKRGRTSRTMTAASLGSISPASLPLLL

SEQ ID NO: 44483 - protein, 60 aa, Zea Mays
MEGLFFLLWKYICFQITILYRFSWIQFKQHYEACFCSSTIERNRTECSGFVSLFMRLNYL

SEQ ID NO: 44484 - protein, 105 aa, Zea Mays
MEDGTDTTISPTTQGNPMSVPTLPLPNTCAPSPLPSISPATSTRRLQNQCAVRSQSSFVGPTPSLLVHQDQRPLVAPHLVCPHRRSYPPALSSLRWCHRDLPSSS

SEQ ID NO: 44485 - protein, 61 aa, Zea Mays
MVESACNSSCSHSRHRRPASRSGTSKSAVHAPSSQYESTSCLRVRSTSTRVEASALSTRAC

SEQ ID NO: 44486 - protein, 74 aa, Zea Mays
MAELKDFAINCGYQPGSMLFGGVDEEVIGCIHDRAGAKIIGTLSKSIRFPKLERDISCYRCQHIIGSLFYSSFK

SEQ ID NO: 44487 - protein, 70 aa, Zea Mays
MAESPSTMKSVDAGGQPRAIRTRPPFPDLEELVDVAPRVRSTASRDLLRRIFFLSTMMAAPVSYVGTDDM

SEQ ID NO: 44488 - protein, 82 aa, Zea Mays
MGRACGGAMRARGTDNQKKVGVESSRGGGGVAVPGGGQVGGLRSPSRWNCAWGRPTKRATGGPVRVESGWASRFGLWVWGWR

SEQ ID NO: 44489 - protein, 56 aa, Zea Mays
MLLVYVGTRRWGQWYKSLSICSSFSFIWASTFPRFARGTHSCSLPPKGWSVSCSVQ

SEQ ID NO: 44490 - protein, 66 aa, Zea Mays
MGPAYASNSGPRLGARVLRHAARDSTVALLGRCRALDYRNCSPGPLRRRGPALLSWTGPITTPSPV

SEQ ID NO: 44491 - protein, 62 aa, Zea Mays
MGAGDVPRPYAERLLLVRLSARGVDRCRPRQRPKPGGPGAPGSHRRRGRYPRASCAPLGALR

SEQ ID NO: 44492 - protein, 79 aa, Zea Mays
MVASANGRLRNPRATRGLQQWSVGHNGLSGVHQTVFGAPTDPKDQQSDAPDMEGDHAPDSYSDCPVVHRTIRCTTRQKA

SEQ ID NO: 44493 - protein, 70 aa, Zea Mays
MQARRAPSRAPAVLSRPVAAVLSRKLGELRRACPPFSHASSASSDARARRPSTPPSFPAVSLPVSLLPRL

SEQ ID NO: 44494 - protein, 64 aa, Zea Mays
MFTKMSDTRSSDYPLMNITEDGVHGVISLNRLMDSWVRWPLTLFFLIIIISPFTIVLLLRWLIS

SEQ ID NO: 44495 - protein, 78 aa, Zea Mays
MHTPTSDFGCLSPLVRPQARAELPRETHMTRSRFPCCRSHKSLTATTSAQFLQPRRPSASTHSLSLRSLPHSSVRPPM

SEQ ID NO: 44496 - protein, 82 aa, Zea Mays
MWRQGGLHVCSRRDGGGATCAFACVGATVAGWPALVRSSALACSRLWRQCVLRRGHGGNAVCRAARFASAHSGLACSRLSGA

SEQ ID NO: 44497 - protein, 60 aa, Zea Mays
MKSCFLLFFRTYPNCPLRNYPVKYAEFSWDWSKGAHPDYGFIIHICPTQRFLLFCARLEA

SEQ ID NO: 44498 - protein, 71 aa, Zea Mays
MDRASAWWCPAAAAADSTPLSARAAATQLAMAVAAAASSSADTRDAAEVPPYRSPHGCRNPCWCPGPPPPP

SEQ ID NO: 44499 - protein, 50 aa, Zea Mays
MWLTSPASHPYSLCHVPGRIRNISTHQILIPNNLVSETSPILVLLTLGWD

SEQ ID NO: 44500 - protein, 59 aa, Zea Mays
MRTLRVLQLSCGDGNDVSICNCSFFCCVCCSSLRMYLRMHVYLLWNCVCIFFGIVYVSS

SEQ ID NO: 44501 - protein, 50 aa, Zea Mays
MSGSSAAEEDIVQHLSSNFNPSSSMLAKLEARMTGKAVSAPSSPPQAGFV

SEQ ID NO: 44502 - protein, 75 aa, Zea Mays
MSLSPQRRGRSPPRRPRNREVVVERIVEQVATAGPTTYPMLTRTNYSDWVLLMKVKMQACELWEAINPGEVDEPL

SEQ ID NO: 44503 - protein, 54 aa, Zea Mays
MEAGVRRRGCTQPWPRLDAGILTSELDEDGEGVTRQGADDGVGEQPCANNKVHR

SEQ ID NO: 44504 - protein, 69 aa, Zea Mays
MHYFTQNIKRQTQLYDGQSSLINILPLIMSHVNDRLQRILNNQLGKNNLHLTLPNSKTNFAIKLWNIKF

SEQ ID NO: 44505 - protein, 67 aa, Zea Mays
MLYYRRGPTRYAHTAACGRSPIIWAELYTDLFLHGWRSRRRVFEVLIIRAPKPLMVFAPAHRGEGSA

SEQ ID NO: 44506 - protein, 85 aa, Zea Mays
MRLEPARPPVPLLRQHPGGERSLLRLRAGGGDRVPLGGERASRSGSDLHADRGYAARSGGGSGWPGGSAGAQVRGRGWMAASGGC

SEQ ID NO: 44507 - protein, 91 aa, Zea Mays
MASLWHQRLGHPGQPVTSHILKSLSFQCNKADAHSCSSCRLGKHTRLPFRVSESRSFFPFQLVHSDVWTSPCYSYSGYKYYVIFLDDYTHY

SEQ ID NO: 44508 - protein, 61 aa, Zea Mays
MSKPTRYQVTLYLIKVGGDQATGRDTETVETSTRSPNDRRITTGANSHNARQPYCNSQGTN

SEQ ID NO: 44509 - protein, 60 aa, Zea Mays
MLCMITRDFIMYANASMSHKRAGPRTMAKRACRTPKARSTSFLTASCAFAKYLFLFPCGC

SEQ ID NO: 44510 - protein, 50 aa, Zea Mays
MLESLFPLTVKTCESTFYTQGFRTHVVVGDETTEFCCFCSKVVPKQEEEH

SEQ ID NO: 44511 - protein, 90 aa, Zea Mays
MVEREIMWLHCRRTGRTNREREWKRSRCRGFRPQLRLVLGGLRASPCGVLGLRAVWACRISHRHATVAAVPPYRVDDLFLITTDGENTSV

SEQ ID NO: 44512 - protein, 77 aa, Zea Mays
MAHYALIAAQETNVAFEPSYSKAISCDDSSKWLVAMNDEFESLQKNGTWKLVELPEGKKPLKCKWIYEKKEGISGVE

SEQ ID NO: 44513 - protein, 66 aa, Zea Mays
MGRRSRSLRPELARGRVMMAPPVDVAGLRPRLGDVEAPPRPRSSLSFVVEVESEPLGRARRSSSSS

SEQ ID NO: 44514 - protein, 119 aa, Zea Mays
MHGHGESRMRRIGHGEWHSGEGIAGATVRGSGDTAGHALAQVDRDAAGKPRWLATPASHGPPRRVSHCRGRATPREGEGEEMGMERGMIGDHHGHTETNGMGSTRPPADDGFGREEDDV

SEQ ID NO: 44515 - protein, 72 aa, Zea Mays
MVLEEPSCAEDRLRALDAEHFGQSTTIDLVCGHLRVPRSGELSAQISRMTLIVGCICELEVRPLDEDSIERD

SEQ ID NO: 44516 - protein, 114 aa, Zea Mays
MAVMRPPDLPLPLPAFSLPFSSPCSIKRSSVPDCPWCRFPAIPSSPSRSRPPCSRRPPPVPCSLPPEPRSRHPETSAPSSSTPPPSDVDQRCRGPRHRPCRPLCSVDHRRPSRA

SEQ ID NO: 44517 - protein, 68 aa, Zea Mays
MVVIAICLQASRDQRSSVGDQVIQFFEFCEIEDPEHLFGEGKCPLTYLCPMQVYNSLPAFISLYLRID

SEQ ID NO: 44518 - protein, 59 aa, Zea Mays
MVHSKKAGKIIHARPQYHLVSGTLDLTAHAQCTCPNEKRLAFSSSLNSRISTLMIRTFP

SEQ ID NO: 44519 - protein, 58 aa, Zea Mays
MNLAPFILSRHVRREQERELWALSTSKSRFAITPIPVAGACRRDVLGVESSWITWTHG

SEQ ID NO: 44520 - protein, 72 aa, Zea Mays
MGAGDTPRPYAERLLLVRRSARGVDRCRPRRRPKPGGPRRPRQPSSARTVSARLWRAPRGAAPQRSASSPSD

SEQ ID NO: 44521 - protein, 77 aa, Zea Mays
MPIKRSRSATPAGKRICKNLQEHAANREEDLHERCQPGDRHHRRQPSIVVTQIYVRIRVIRRASWYLESQVPGKLCP

SEQ ID NO: 44522 - protein, 50 aa, Zea Mays
MCTEGHDKVYGGFPPLGEMKARPVNDVQQVRGGENFDEVVPMPRTCHLRQ

SEQ ID NO: 44523 - protein, 51 aa, Zea Mays
MGLCMVESAPYPVSQNLGWLPGCNIQHHVWLFECVLQPNIHYICCLAACLL

SEQ ID NO: 44524 - protein, 63 aa, Zea Mays
MLEAVATMSTHSLSVLWVPTGSSACPGMCTEFVSPSISLLRVDSTALGMPVRRVGRSPVYVCR

SEQ ID NO: 44525 - protein, 50 aa, Zea Mays
MVLCGADGRDQGDTSLHIGPSMGGWASWSRGFLAHRLWPPAMRAKQGRVQ

SEQ ID NO: 44526 - protein, 111 aa, Zea Mays
MHTKLTEDKVAHRQHTTRRGRGRNSSSGEKFKAKARVLSPNSAKGTFASPRRSLPTDAIGRSAYGFEFHGGGESHPRGARQRSGGGFWLLRMIMALWVRSMHQAPNYTLSY

SEQ ID NO: 44527 - protein, 95 aa, Zea Mays
MAAHPRRVWRWWPPDTPTTADLGSAHAAVDPRGARGVVSPKTRVTATTCSSHCLCMALLVGHILGRFSSIMMRRVDIYATFYESLCFCTIPDIHF

SEQ ID NO: 44528 - protein, 112 aa, Zea Mays
MNTCAESLPESKRNDVFPHIEADPRRRTASMSNSTSAAMPMAELVVAEASRRHDATLVCPTGALVPPCCLARRRRPVFPPRRHEVPVVEARWMVNGETEGRDSFLGSFICRW

SEQ ID NO: 44529 - protein, 73 aa, Zea Mays
MLDLSVQTLSETFRARGVTPRRDEEVGDPIQPHGRIPRTVRGGCTRSQPRRGRLVRPVALHDAARHLARAMPC

SEQ ID NO: 44530 - protein, 56 aa, Zea Mays
MAAAVMRCGRRLVDPDRVVWLTCHTPHVVVACAALRPLLPAAETQSSLRLLSACIA

SEQ ID NO: 44531 - protein, 55 aa, Zea Mays
MPRSSSSPLRRQSDSRCTPTQSPHSFLCLALCGVSSRRRLSSSSDKQLGEWEVGK

SEQ ID NO: 44532 - protein, 67 aa, Zea Mays
MVHGQVRRAATREAGQQIAIASTMVGLVECKVYAYKVGLDVIKLLERMQIRQELCLQLETLVSPMYR

SEQ ID NO: 44533 - protein, 55 aa, Zea Mays
MLVLGAGDSPRGCARSCVNQGDRGSPEQQQFLVVAHSWPQIRVVREQPQPTPNLQ

SEQ ID NO: 44534 - protein, 87 aa, Zea Mays
MAPSSLALTPYRRAADTPFLPPWSPRQAARSLISSPWRSDLYPMSGFPSPWPWPDLCPLLASALPCSSLLGQQPWPWRPKLCSVPLC

SEQ ID NO: 44535 - protein, 73 aa, Zea Mays
MGAASGAAPARAWLPAQHDLWHDVVHLDEGATDGAGVAADVSAAFDMVFLLAWCKPPSRDTECVRDWQYGSNH

SEQ ID NO: 44536 - protein, 107 aa, Zea Mays
MGSTLSHSHCAMGLTRQPHTELLAPSLGPVAACRRRKHLHRSREAVAIRRVVVRFRTSALFPFSRHINPLSHPLSPPSEPLCSSSGQCMKGTCRRHRLMPLPLVHHR

SEQ ID NO: 44537 - protein, 118 aa, Zea Mays
MGWLRDYLWLNSSQLINGYNPFGMNSLSVWAWMFLFGHLVWATGFMFLISWRGYWQELIETLAWAHERTPLANLIRWRDKPVALSIVQARLVGLAHFSVGYIFTYAAFLIASTSGKFG

SEQ ID NO: 44538 - protein, 105 aa, Zea Mays
MASQPLERRAMREAGFTEQRIPSASNGGRITGHCTPGPPRLKHSFWQTTIFVFWLVLHTYSFATAAHLSNLQRLATTIINRLCSRFEPLGTGPLDVRYIPHVTCS

SEQ ID NO: 44539 - protein, 91 aa, Zea Mays
MAVGAEVPRRDALRGLGHDIRVQRMLIWFGTWKEHHGHGVYGSLRRRDAVVGSQSVGYDLSDLHAQSHSHASGWRTRTRCSMICFTDCLET

SEQ ID NO: 44540 - protein, 65 aa, Zea Mays
MCARRDCGCRDSDTRAKPTRLATGPRSLRTTCTAFASSFYGRPHTPCTTGLRLQGILVAPASAPL

SEQ ID NO: 44541 - protein, 58 aa, Zea Mays
MSNRHEPRQERLKRGELHARIFTFSTFLTAPAFHGSVDDCDSPPLPPLLTPFHQRSPH

SEQ ID NO: 44542 - protein, 58 aa, Zea Mays
MSGNFSPRLISAVKQQCTVGSPALSTTTGKTTSCAFAIDLLHEDRVVFMGFAPGRCVA

SEQ ID NO: 44543 - protein, 58 aa, Zea Mays
MIMFAPKSTDNNIRASEQRQDDMDASRRSPTRSSSSTTRRDITKVLVKAGFGTVLFVV

SEQ ID NO: 44544 - protein, 51 aa, Zea Mays
MRRERDYDSEKRDPSQMQMLQLPPPPDRLPISSVAYIRVLSSHPCFFSYNN

SEQ ID NO: 44545 - protein, 51 aa, Zea Mays
MTHRVLRDKAGCISYMPKKTTYIITECIEINVTIKSEYLLYSGSLTKVKGK

SEQ ID NO: 44546 - protein, 77 aa, Zea Mays
MILTLLEKQVFKCILFFCKRCFCRATNCIVSNSGTHQNRRLQKRLLEANALRQFTGTWKTSKSRHWYHISVTSYDVK

SEQ ID NO: 44547 - protein, 68 aa, Zea Mays
MMASGRVPSSRKDGHGGNPQLWRTIHILPAIHRDLHHHTHARFDPAKLQSHLPVLERQRSMISPVADQ

SEQ ID NO: 44548 - protein, 82 aa, Zea Mays
MVIRIISHQLRKWYILGLKTVSEFFGFSDTVFDFFRPDSTTTVFFGIEIGCRNFIPESVSKSVQPFTDRFLRLPNLIGIYRF

SEQ ID NO: 44549 - protein, 60 aa, Zea Mays
MEVRIIAERATADQRMVEMFQYMQSLGTAQGFAPPPPFFPAVDPALFHTSVSIKIIITCW

SEQ ID NO: 44550 - protein, 53 aa, Zea Mays
MSLGAIKGTPRRMEHYTKHPVFGSSSCSSVLLGISSSGVCRVSERKGALMSGG

SEQ ID NO: 44551 - protein, 68 aa, Zea Mays
MLALTRKFASHRALGESTEAATSMAMFRNKSKEELNQSTHLDTGFGEMQLFKWIKMVLKSLTQRVPSF

SEQ ID NO: 44552 - protein, 88 aa, Zea Mays
MPRKGAWSSSSCSGHRVAVDAHRAVIFYHRPRARVPAVVVAVLMATPTADVRIQRRGRRLLPFQDQDQGRVGRIGSVHHLPVAFTMGK

SEQ ID NO: 44553 - protein, 57 aa, Zea Mays
MGVGTSLEVSWCSADGPASGVGRSASCVDDLAFIARLSTILAESCTVVVLFSVFVTI

SEQ ID NO: 44554 - protein, 91 aa, Zea Mays
MNSVTISRDRSFYKFTPPSHNLLSFPDPNRAGQATRLSGYQPQVSLSSLPSTFSPMRALSVFLDRRCGMARPGVPTQVRVGSARATAGATA

SEQ ID NO: 44555 - protein, 63 aa, Zea Mays
MATPARFPRQILCYSRFGCSPLSSLYGGLIPWLLLHEEREFSALFFQFAPLLSSVRRSLVYPW

SEQ ID NO: 44556 - protein, 94 aa, Zea Mays
MQKPLYDNKDFRPCAYHVLLGETVQTVEMGFQTCKQVVPGFLLFFTRKNVPSCLTKKIENEKSLKQEQPSTQTEDLYHLLPPRTYYLTVSTSLV

SEQ ID NO: 44557 - protein, 71 aa, Zea Mays
MPYTIDYKQNRSKYGSRNAHKSTTHQQHSQVKRESARNTTIELQLTNAFKSLSNKTIVWLQRFGVVVCSKS

SEQ ID NO: 44558 - protein, 102 aa, Zea Mays
MRLRVPFIASRGLGAVEVPFGRPSLPSICGCTRLSGDLSQTLPAEVTGANRIADRWHGPRSIARLVHQTCPVHTGCDGTSQGIRPTYSCPCPKDLRQSCRCT

SEQ ID NO: 44559 - protein, 108 aa, Zea Mays
MDRVPSEDARIMAHGFGLRTDWLLPSGFFNSRSLVGGAEDVPSIDGLRDETRPCNPQSVPPSITELIPFHRRRAVEISGRIAECSATRRKGTTCGLLKRCVATCREHA

SEQ ID NO: 44560 - protein, 67 aa, Zea Mays
MCSSRSSNHGVGAALSHLLISPGHMLLGHLCAIPLETIVVTGIRHDPGQYLDKEPCTIVVRCPPFAQ

SEQ ID NO: 44561 - protein, 57 aa, Zea Mays
MMSPASDCHPSTIRVSPTDDLHTVWAPARPCLSSPAGYRPADARFCHNELVSPSHDD

SEQ ID NO: 44562 - protein, 77 aa, Zea Mays
MYPQMDSLARRSSVPFVLGGTSASFSDYRQCLLFRGMPLYLCPFGLWFEAELCRTSTFHCFMALASVIVVLQRLLLF

SEQ ID NO: 44563 - protein, 122 aa, Zea Mays
MVTRRTAGVLRPVNRLILAAATTCTPPDASPVPSSVRIALADPHWRCAMQEEYVALLANHTWDLLPCPPGTNVVTGKWLFRHKLTSDGSLDRYKARWVLRGFTQCPGVDYDETFSPAVKFAT

SEQ ID NO: 44564 - protein, 72 aa, Zea Mays
MHPLSMIQHPGKSQRKRSSEEIERAVARREKGGVSDRWEETVASWPGVVPCARGVIRLAPRIPSGLPAEVNH

SEQ ID NO: 44565 - protein, 72 aa, Zea Mays
MGRRKNGETEFPHRRRRSSPEARRNSSIDDEPEVRTTNRRHPDEVLDDTNASVLSDFANDAWIESNCSLKFW

SEQ ID NO: 44566 - protein, 88 aa, Zea Mays
MFGVSIGCWEILKALYYQSNMFQVLLKESEAILGSKRRARKGRSFAWLTETKEREKKLPLRGTYTRSGSRLSSRTRERKKTMICSSCV

SEQ ID NO: 44567 - protein, 50 aa, Zea Mays
MRPCCTATAHSRPRARDRCARVRACVRGMPHPACLRAERPGRRRGRGTSD

SEQ ID NO: 44568 - protein, 62 aa, Zea Mays
MRQTLKPQIEQVPLLCDNESVICMAENPVEHSCTKHKDIRYHFLRDHSQRGDVVIDHVSTHK

SEQ ID NO: 44569 - protein, 55 aa, Zea Mays
MCPQAPRLSPEYSHKAGLQSVIIGRPLQIRPVMRSGHAGPVTMGQIARGPPFWTR

SEQ ID NO: 44570 - protein, 65 aa, Zea Mays
MRLLPRFLAGVTTRPSCPPNFAPARFCNPPLPCAYNTRAVVPLLLSVRPINYAAASVHRLGECRE

SEQ ID NO: 44571 - protein, 79 aa, Zea Mays
MLLFRIHAFNSACFIESMYIPQFHFLMHISSGSPLVEQHSEPRTRCEHTTKVISSILHILLSITHPISNSTRQTVYSTV

SEQ ID NO: 44572 - protein, 50 aa, Zea Mays
MRLSRSHEGECLPEYGNADVDPRDVTAPWQMEKSGEQFTSPEASCTQISL

SEQ ID NO: 44573 - protein, 64 aa, Zea Mays
MPANDHHPNGLLQESAPGLQHDDMENQQQQVCWERFLLKDTLNVLLVESDASTRQVVSALLRCC

SEQ ID NO: 44574 - protein, 110 aa, Zea Mays
MPHRPVREPGVAERGGSELKVTGSAHDQAADAKSSAVSPAAFPSPSPSPAVGSPRHERRTPTLGVAAHPGERRLLQHVRAGTSAPSRRAAEKKCTHERRGKPVRWSPLIK

SEQ ID NO: 44575 - protein, 68 aa, Zea Mays
MLRWIFGRGTRILPFSETVAGFLKLVELCKGLVVLPCLVSSVEMNGKSRSLGKWVTRLVDKGHNLYRV

SEQ ID NO: 44576 - protein, 121 aa, Zea Mays
MATYHRRLFGSLEPGGHTSRSRQGSKQAVGRRWRMAVEQTKWHGAAGYRSVRGRTKASTGKHARRMHAHAWPDQTGQRDRSMRTALDMMAPASSTRRRSTPCPECWPVQRDGSLAKSYGRS

SEQ ID NO: 44577 - protein, 106 aa, Zea Mays
MRTRTAGMDELALSNRPNALVPPRRRLAPSPCLAHADAPREQGRPRRATARPGDGARRAMARRVQNARLGGGAAVRRRGWAAVAENGERKNEEERERSLCMTRGSR

SEQ ID NO: 44578 - protein, 64 aa, Zea Mays
MIYYVSLGSISCASVSTGSSKGGAGPLMAKQTFSLAPCSLHLRGHANSPGFSPGFLAVLRLRER

SEQ ID NO: 44579 - protein, 120 aa, Zea Mays
MGRMACSGINAMGREARGLSVAARVRGSFEKWKSVSVLIFECAGARIKSRWIHQRPLYIWERRLPLVLTLLSHSSLSPRCFFRSRPKTERSKNLAYLAAAAAPLLRHGRESDRPSTAQSV

SEQ ID NO: 44580 - protein, 60 aa, Zea Mays
MNWMPMRQRGTSDPAVLEHPSPTASSDPCVMHSMIFLYRPLQFLYIPFEDFMMMNMLSLV

SEQ ID NO: 44581 - protein, 65 aa, Zea Mays
MIFDVKIILETLVLLGVCFVAEDPKGREHLRQILSEATPKLSPIKLRHSDRSQDEGVNRLKDEMT

SEQ ID NO: 44582 - protein, 64 aa, Zea Mays
MILAREAGHPLRRCATTPTLGSRWGLQNLCRAAWLVPGSSPGRACSCCAPNLLTGSGVRRGVAR

SEQ ID NO: 44583 - protein, 103 aa, Zea Mays
MMARLPPDLVTVGGGEFSWKAPHCATLACACGWERMKRHSTQDLCLLQHLLHRSCSALVGGPTSVLVINPSSGVSGGRRGAWVVWEGERDRGKHVAARQWDRG

SEQ ID NO: 44584 - protein, 72 aa, Zea Mays
MYSLPETVWRRSKSMMPRSCSFRTNSTTFRSDRRTLDLALCAASSCRCSSRSSASMGAALHPPSSLSLSLSL

SEQ ID NO: 44585 - protein, 77 aa, Zea Mays
MDIFFFGQLCMQEKLSPYLFLMDHVYEILLGLLLSPLRRHGNLLGKAKEVRTEDSSWERERERGKYLSQGTERRIRG

SEQ ID NO: 44586 - protein, 84 aa, Zea Mays
MPMGPGVNCSPVKMLRRGTAPIRGWGIATLCTATEFVIDDLSTVARGWFAERHRRVQTRRRLHLRLPRQRVRRLRPLDPPSKGE

SEQ ID NO: 44587 - protein, 68 aa, Zea Mays
MVHAPSRSADQQEPFRIRPMRVASPHPLPSRQFQALFDSLSFSSFPRGTCSLSVSRLYLALDGVYRPI

SEQ ID NO: 44588 - protein, 86 aa, Zea Mays
MKETRELVEQLVTLWPLIHISATVGGLIFTHERLASVCAGLLRCGGSPRTVRPLPTTSCLPVASSFIPQATPTHSHHLSAPPWNLL

SEQ ID NO: 44589 - protein, 90 aa, Zea Mays
MAQGRGRDAPWPRWLVTPCRGVEKGQAAAVARHAAYRRVRQRAERVGKASAWCPGEENRRSAWAVAGGAARSSHDRALGTREARAGLGTT

SEQ ID NO: 44590 - protein, 53 aa, Zea Mays
MDLYSIFRERNVHRSLQQGTVNESVKYSVRSTNAKCGGSSSRTLNAGSVHFLM

SEQ ID NO: 44591 - protein, 111 aa, Zea Mays
MTSKSYLARSLIRPTPEASSTAQNAAAGCSLAPCVCVCVAPGAGPANSRWTRRFLSSGAAWKRNARGLSALPRACIASPSSCPACHVPPMCATPAWPPPACLHFHSSRLFR

SEQ ID NO: 44592 - protein, 53 aa, Zea Mays
MKPPLILLGSISLFCSLDQISHEVMGFSMLISLVHMRCLMECPSAMSCIAAIF

SEQ ID NO: 44593 - protein, 95 aa, Zea Mays
MGLGTLEQPCILHTASHIHISLWPNVLPRQRMIKSLTHQLRSFATSVRNEASLIGKRRAVYSRELRTRRGLQGTSKRSITTSQVTDHITCVVLQP

SEQ ID NO: 44594 - protein, 133 aa, Zea Mays
MKWYVPTYLWILDQRCRFKARRDTYHQISTVIERSDGPDQTATRIDLHRSSEIDDHWVISHLLSKHDGVARSMAAAGRGPRRRGRGWPSIAAAVLPGSPSKSPSKHSLRVGRGSDIEALSLSVRQGAIGGQIP

SEQ ID NO: 44595 - protein, 72 aa, Zea Mays
MVSGEIARMMGSPGFYDVGEVQICSDLLNHACRDHDGDHGGDRGIRLRLLQSPRGEEGPDVGVPPVIDAVSD

SEQ ID NO: 44596 - protein, 54 aa, Zea Mays
MTPYCPVHYISFIFFLFSFYIYGIYTLTGFTGYAGAYLAYPVGPPLPTTLAPFV

SEQ ID NO: 44597 - protein, 72 aa, Zea Mays
MSRLTRFALHESNLLTRTNRSSAHALASWPLLPACRRARHGLPLDRLSTPSSACMQFVHASYMASYILDLTH

SEQ ID NO: 44598 - protein, 69 aa, Zea Mays
MRVPLIRSDFNLHSSSSPHLEAARSLAAGCTRTAWKPLLDSNHMDANESAAADHGNEPLTPNKPRRSGT

SEQ ID NO: 44599 - protein, 64 aa, Zea Mays
MLLVAIARGTDAWAAGAWLEMAMSTQNPYFRQILPDIYKGKNGMTSLPAGTIMDTIVYPSGRWV

SEQ ID NO: 44600 - protein, 50 aa, Zea Mays
MQVIMLIPMRRRETASAGVSTLSCVSVSTLSGLIASMSWSTLPSPRRIVL

SEQ ID NO: 44601 - protein, 70 aa, Zea Mays
MYGPHVHFDIRFIFKGIKYDCVSSQTRALYYLYYFKARVSCVMDGASCVKHVDQFLVPSSRLPMGRNITP

SEQ ID NO: 44602 - protein, 55 aa, Zea Mays
MIATHIQNYKVGSNSASHKPATNPHGKIFPGHSQLQTLMKNLSLDTHNDSIHWNT

SEQ ID NO: 44603 - protein, 84 aa, Zea Mays
MERKRNPIVFLDVSVGDEPDERMIFELFADVAPLVTENFRALCTGELGIGHKTKKPLCYKGSSFHRVIEGFMAQDARQMISTVF

SEQ ID NO: 44604 - protein, 58 aa, Zea Mays
MQSHAQDGPRTGRCGGWPGRPARAYARTGRRRRPVDEGRSRGSRRTLRHMAASLLPRL

SEQ ID NO: 44605 - protein, 131 aa, Zea Mays
MTAAILKWRARPRLPKGRVEAVARGVHGKRHPPDVRVKARSSYLQLFFELRQVGRQCDSVDRPTTTSSDPVALGHPLTTTSSDQCVMHYVMFLCRSLQFLCIPFEGFMFLNMLSLTWLWYFYGNNISATSA

SEQ ID NO: 44606 - protein, 71 aa, Zea Mays
MSLCLMLFSKPEEFRPEWFIGEEKSVDATVGGKARRRAWTPRDVIQSHYCLVGTLKTPLFLIYCLQNHMLN

SEQ ID NO: 44607 - protein, 52 aa, Zea Mays
MMVTSSPWNFQSVWWQVIRHMVTYSHGGDGGEGEIGPERGHERHMVIIFCWL

SEQ ID NO: 44608 - protein, 64 aa, Zea Mays
MLKPEGLLGADRLRLPPNLANLAPESSNSSSWCSSTAAAAVPRGQSSSSLQPLDEQGTKDPGVQ

SEQ ID NO: 44609 - protein, 52 aa, Zea Mays
MPPKKTTVPGAAVTPGFKGQSRVHLIHAPKKTTYIITECIDINVTIIRIFII

SEQ ID NO: 44610 - protein, 89 aa, Zea Mays
MCLYAWNMFLVLHTLQMAGWRGINRPQSKTSRLDREQTFLSAVALDSPVPCHVSRPLRAAAADRWPDCPVHTGQSGASAPESPISELSA

SEQ ID NO: 44611 - protein, 63 aa, Zea Mays
MDLARTYEVIDMNSIFSKRTPAIISFCSVETSYVNTHRIISLLLLRVASESFGPLYACSLETK

SEQ ID NO: 44612 - protein, 86 aa, Zea Mays
MAMHQRDVAVLATQSMCGGSALARCGGPVLAASRLRLRMGDGEGCSRVGGGGPPPDLRVGVVCPSGCDICGGPREQDVAALSSCNR

SEQ ID NO: 44613 - protein, 79 aa, Zea Mays
MRGAKHRSTGASPNHGTRMASNPWNIRMGHQSMVHRRTTAWARAGRMHGGRDNRCMAGRGRMVTSVLGEDGEGAVRRSI

SEQ ID NO: 44614 - protein, 86 aa, Zea Mays
MRCEVHTTTIARDILRSGTVRVARVTTSMCSCVVDDVLQRLPPPIRVVFRLLCFMPITCTIYAENCTILCLNTEFLYQFIACIFFA

SEQ ID NO: 44615 - protein, 61 aa, Zea Mays
MEVLRLIMLRWLFGRGIPISPFSETVAGFLKLVELCKSLVVIPCLVSSVEMYGIHAPMANG

SEQ ID NO: 44616 - protein, 50 aa, Zea Mays
MACPGSRMGSLACTDSRRWAQGIWRWARKLAGLGGGAGARKPVGGGHTQG

SEQ ID NO: 44617 - protein, 107 aa, Zea Mays
MHAKDCRDDVGVCLHQHRPQERPGDDRAARCRRLCPPRLHQLGEGRPAPPTTVELRAHRVPQRQRLTGYGPPSHEACLSVSEQRLCPTLSPDAPSQDARTAAPTWTI

SEQ ID NO: 44618 - protein, 51 aa, Zea Mays
MLPEPDHPRPRPRHPTGINMHMSCHFCRQARRRRRSTIDACNFMVRSVGLI

SEQ ID NO: 44619 - protein, 60 aa, Zea Mays
MNLLESAAATSITNEDGSPAAASYHGSTKKTSTRRWESTQETTVMRVREWEPCYTQICRG

SEQ ID NO: 44620 - protein, 98 aa, Zea Mays
MAAADLSMASTVPGRMAARNLTSGPKFPPLPTMRTINATRPSRQTHSQQTRGGRRVCLSSLHCFMVAASTSVLRRALHSVLDFPGDGFGKERREAAGR

SEQ ID NO: 44621 - protein, 66 aa, Zea Mays
MNFVLWLLHLSEGLSEYDVSCTACINQNIVDQKSLKDTRYDHSIIMRIILELKVLLGEGNWDVGPF

SEQ ID NO: 44622 - protein, 55 aa, Zea Mays
MTENHTGGLHLGGGGEMGGAARVLGGEGCKGLRRKKMGEGGRPRERGGEGAAATT

SEQ ID NO: 44623 - protein, 52 aa, Zea Mays
MEKLVETPKALPLPPTHFLLSPGGRRKKKTCAESIVENSEFTRAKKKNLRTP

SEQ ID NO: 44624 - protein, 68 aa, Zea Mays
MKGKLQIIARVWEMSCYAVLAHLWNHRPPAMQPCLARLLAGLATTRHAVSRAAGLKAHDKWIVVYYII

SEQ ID NO: 44625 - protein, 63 aa, Zea Mays
MEEEDSSLCLLPDSLERVLPKLAAFFAGHDLPLGVIFRHHFELVRLLMKHWLRYQLKSRLEGG

SEQ ID NO: 44626 - protein, 66 aa, Zea Mays
MWIEINTIVPKQNLKARLVTRNHEGIHCNESTWYPDLSHACFFRPMPVAQVFSFRAVLLEDATVSG

SEQ ID NO: 44627 - protein, 107 aa, Zea Mays
MRRVPPQLGAQPGWTVVRGARPTPGSTDRHRYWLVPASDVHAFASRHAAYVPSMHMHICNAMVPVGRLVRVRRTKEQSAAAAAGPRLGVGMHACATVQFCWLPAPRA

SEQ ID NO: 44628 - protein, 73 aa, Zea Mays
MVPIWQKLTKLGIRLKMRMTKLEESSDGEHELERPNNITPDRRSLAMEIVLERKKGFEGVHAHHTWPMSMRLS

SEQ ID NO: 44629 - protein, 58 aa, Zea Mays
MNVYCTLQSYADKSKSSVNERHHFAMNRACMGKTCHEMVLQQCNKQKQSRPPWGQYSG

SEQ ID NO: 44630 - protein, 58 aa, Zea Mays
MFNSECRNFVHELSWEQIKYTSGSGVVETFYLNAGPKCHSIINIHGHVLNLAIQQQRK

SEQ ID NO: 44631 - protein, 50 aa, Zea Mays
MGLGVAHGSRGTRRGMGLDMNHDDLWFLPAPRWCTPGCWSWNCATSHWAL

SEQ ID NO: 44632 - protein, 57 aa, Zea Mays
MIKVEKLFSPPFELNKIPTEKMLLENTKFLKLVVVRSFCFGAQPFSPFGMNRQKRNH

SEQ ID NO: 44633 - protein, 71 aa, Zea Mays
MRHIQRYGRLLLMCSCCQVLGTRSVVKSGVGHICWPPCSTSFYHLCPTAPDTGKVLFVLCFSFASLYNTVL

SEQ ID NO: 44634 - protein, 130 aa, Zea Mays
MIEVLIRPVEDFEMPTSLSGQGIHSPLAGNKGCIGHKVCCDGRERLQLHLQPPKKAKPHLLPQFVEGSGLHAELTVRIHEMCVRPLDPSASGGLRLLAMAADVPRLQLHVGGTLASGFSLRAGGLSFDAS

SEQ ID NO: 44635 - protein, 101 aa, Zea Mays
MERLRRRPSSCSEEGKGVGRAGHLASAGAVSDEGLERRVASSPSPQHLPSEGPVRLSHLVPKTSLDGGEAALARSGSAGVFDVTVDGHVLLDYGLPEASRP

SEQ ID NO: 44636 - protein, 50 aa, Zea Mays
MEPAGKSPHASRRRTHRETQSPPGGRWGVVVCAAVRGAPVRSAQRPRRLE

SEQ ID NO: 44637 - protein, 113 aa, Zea Mays
MAAILHCLLPQDLPLRSKDREEEDHVELKRKRGSRRCSSPSLLAYFLGETLGMMGSLFLPVIMCFWRWWIMGIKGLEVVLDVRLGFDLEFSFLQHGRFDSFCSYQFSVILVAS

SEQ ID NO: 44638 - protein, 57 aa, Zea Mays
MFPTVDCAAGTRKVTAPRRWSRTLPHQRLLIDMADASNTATSTGQEGDARRTYIVQV

SEQ ID NO: 44639 - protein, 73 aa, Zea Mays
MTPLGHLYDPPKPSIEDRATLDTSRRRRSSAFLSSCRSRAPTASLPSRSLSHARSRVACVDGRKRRQPKRPVL

SEQ ID NO: 44640 - protein, 59 aa, Zea Mays
MLPYVYHHADVIEARTFQRNIKKEYILFFVLSLCFPGTSVYYLILFNKRIKGSLMSLNW

SEQ ID NO: 44641 - protein, 113 aa, Zea Mays
MSACRCPQDHNRGGGGAGAGLASGPALAEVGAPGLLADGVELQLPQLGRVFGGETGRGGGDEAGGRPGQGLRARVRDAARCRQPCMAAAAAAVGEASGVREDGAGASVCLCGG

SEQ ID NO: 44642 - protein, 53 aa, Zea Mays
MLGSCMVRGNIHCSSSGSGARVAVAIPYLRATVRGSPQPRFTWPPFFFCFASD

SEQ ID NO: 44643 - protein, 123 aa, Zea Mays
MENVLIYAQPTTPCINNDWSRSSPKCAPPESRRHARASGIRRARLLDPSSFARASGGRRCGKASRSRRRRARLWDLSSPLAPRRGRCRPSILRWPHRRVPQEAATAALPQETVVVLATQGAIA

SEQ ID NO: 44644 - protein, 73 aa, Zea Mays
MARLSYKYTEGAESWPRGTSVRWLQLLGLLRSLELLLMSVSQHEMNHDVSNRSPTRTPQCAGLNLHDDVLASA

SEQ ID NO: 44645 - protein, 81 aa, Zea Mays
MKEDEPSNKTPKLHDPLSHSFSVWIVETEDEANTKRWIVKRLMGWVRSWWTWLRVCRGPPGPTCGSAPANGVGSTHVLINF

SEQ ID NO: 44646 - protein, 87 aa, Zea Mays
MCSRPPHFSSPLAAPLPISSSLNSCSHQTLAAPLSIPSSQGANPCRSDHHRRGASLQSFWWREEGRKERGRIQGDFCVHPLFICAAI

SEQ ID NO: 44647 - protein, 72 aa, Zea Mays
MPLLISYSLYRFESNVRSATVVGMVGAGGIGVTLWEAIRGFQFQQTCALMVLIIVTVSLLDFLSQRLRKHFI

SEQ ID NO: 44648 - protein, 74 aa, Zea Mays
MSLPSLCSMVVGRPVHAPPSRWPGAGPQSDSVGAEASTVTTNDPPIRAWWLHHLRCDSVPCSHRGTTVLAITIT

SEQ ID NO: 44649 - protein, 83 aa, Zea Mays
MSRPIRWHAASRSSSRRRACWVCWRTVRPYQVVHCVIPSTRSLSYTPKIHRSRTTGHKRIAPAANIYSPKCYILYVPRPTCRA

SEQ ID NO: 44650 - protein, 91 aa, Zea Mays
MHLRQPPCMFWMKPDLDSGTAVPPAALLPEVVCVQAVLDQRHKECVRGQRHGGHGIPPSNLPGEFSWRRCCPILSLSRLISMARLSAWHRG

SEQ ID NO: 44651 - protein, 88 aa, Zea Mays
MLGCAHGLVAAVCHPILLPLVVALPRHVCNAMESPRKPLKVWEPILVVPPRVVLSTLSNGAIVDEINLLSAISHRSASSFSQLLNLVF

SEQ ID NO: 44652 - protein, 50 aa, Zea Mays
MAKKMAFGTGMGCVFTKDGPRSKACTHQGRILGGMETSTVLLYEAKLELL

SEQ ID NO: 44653 - protein, 91 aa, Zea Mays
MHRSRCMCMCMLIRVLILRSDPLAHHRQSAPAEDNLDFKTAVSQEDHRQAHQVFILHKEETVTHLFLRRNFTRRSWQTIRLAPPRTSDIHN

SEQ ID NO: 44654 - protein, 85 aa, Zea Mays
MEGSKSVLLLMVILGSLMVPAHSRNVVRFCKCQKQTCNMGALFDAVCYCCPGGSCYSTMQDCAPACRCDKLSHAPLNVRDHESVL

SEQ ID NO: 44655 - protein, 53 aa, Zea Mays
MARVRARRPSTEGSGGGGPESGHELRLHWVCTPIRDLKMKRKKTATTDSIAFF

SEQ ID NO: 44656 - protein, 64 aa, Zea Mays
MNDDDMESSCPCLELCVSTSPRRPVCMHHGNMERHLEGFRSARAPTYPLESSTDGRHRVAVVDK

SEQ ID NO: 44657 - protein, 118 aa, Zea Mays
MSQKQKAVATSSCEAEYMASAAAAAQAVWLQKLLEEVVGIPAKPTIILMDNTAAIALAKNPVHHDRSKHIDVKYHFTRECVERGDIELVQVGTDEQLADTFTKALSRLRFQEIRRKIG

SEQ ID NO: 44658 - protein, 69 aa, Zea Mays
MEFPCNAISERGTLNIFEAILHSASLCTKIPSNQGVISVYESLEATTRAEGTLQEPKIVYNIDEAEVQA

SEQ ID NO: 44659 - protein, 98 aa, Zea Mays
MVCVDVAARSDGLAACFQTVLGIGTRASRTAGNCPVASSRGPIRCREQLASSVMCTHALQADYEHRAGSDLQVAACTVMLHDVSLFLLPIRSLHDSSV

SEQ ID NO: 44660 - protein, 54 aa, Zea Mays
MDGSIGHSDNRCVGILSSVWWYHGGVVRHRGQLFRTSSQVNLRFQYVYSMLYAI

SEQ ID NO: 44661 - protein, 102 aa, Zea Mays
MLALLAEMFRTVCGRTPPPSPLSCTGSRGEKQCGFAAIGKLRNHSRGVLEHRPGSLVKMRGGSPWASWTGLEARGFEISRRRPSCRRSVARAVGRPRTRLLP

SEQ ID NO: 44662 - protein, 53 aa, Zea Mays
MTYDTLILIIELGKQAGTGTFAYSHREPCTLTLLRPPSTAYDYELAKQKLLNL

SEQ ID NO: 44663 - protein, 56 aa, Zea Mays
MTSFYLTNTEENGFILVISRPNYKNPNRTRTFRELLVSQIREAVVNHIHMTDAGVA

SEQ ID NO: 44664 - protein, 80 aa, Zea Mays
MAHRTLSGAPATSLGRWVPTVGASDNGGTGQSGGAPDRHCSLSGASSGVCSDFCARSCTVHRSVADDRWRGRPLLRLAHW

SEQ ID NO: 44665 - protein, 103 aa, Zea Mays
MNNSRREIVVYLGPPTVRGSNALLPPLPTLPLWSGSQGQIGGRMEFLSRRRSALLSSFFGAHNREQRSYAGAWVTVLKDGSSSHQLVERLVETAIEIPGIGSG

SEQ ID NO: 44666 - protein, 53 aa, Zea Mays
MLAPAGIVVVSCFSCLNGSGWWLRPKQQRFGGGCYRCEPLVEADVILISKMCS

SEQ ID NO: 44667 - protein, 62 aa, Zea Mays
MFKDVPISNYWVIFFRSSWRCSKDRPWRKSTRRRHLDRIELLDTWLHLNHMYFSCGGVRQQG

SEQ ID NO: 44668 - protein, 57 aa, Zea Mays
MFIHCCPLIYAILQGGCCRNFIYRCQKCCLVAFRGVGGPRGVTTWHSFLYIYLYGYI

SEQ ID NO: 44669 - protein, 53 aa, Zea Mays
MSTEAMEPNPSSPSLIQRAGHFSGSELEQDRERMIVQVMWCQPQDAVGGRPKE

SEQ ID NO: 44670 - protein, 101 aa, Zea Mays
MLNIAQCSDQEKVLYASGHLTGLSADWWDSYTAAHDAANTITWAKFASQFRNYHIPASLMKIKKKEFLSLKQGNLSVSEYRDKFIQLSRYAPDEVADDERK

SEQ ID NO: 44671 - protein, 65 aa, Zea Mays
MVLGGSWIAKPPTTATSPIALLPPGLVSWAIDRSIGRSAGSGTRPGFNCAWPCDGSVTTVPRLPI

SEQ ID NO: 44672 - protein, 87 aa, Zea Mays
MLDPVSDVRAKDETFRQFETQGAVADTSLDDDEGLGIPPPPPVPRRSHDHEAGSSSVAPATPPAMDPALAVILQSLTQQQAHLAAEQ

SEQ ID NO: 44673 - protein, 133 aa, Zea Mays
MWTRDPAGTAQNRANSRAESAAQNTCRPPSPGGRGQMRAAHAPAPRGNTRNGGASRWGPRRRRPRTRIGTTIRRGYGLGMATGNSPPGNSSPSPSPRRKNFPVGIPTNACGEHFFPIPVPRGDKSPTGIPIPV

SEQ ID NO: 44674 - protein, 91 aa, Zea Mays
MLQVVPERLSQAAVSLEMFLSLNKESIEEVVGRLRMFEERSKPKEVTDAMGHLMLCEEDWEARRTVYHEQESFGSGSRSGSRDKSHGREHG

SEQ ID NO: 44675 - protein, 105 aa, Zea Mays
MSSTPPSKPRVPPSGAKNNACQLQGKPIMLVFSNGDATAWHVGRAVAVYSTASSLNYLSRLASCSRFAAPLGPWCCCRLVMACLHACMHRDAHTCEARDALGCRQ

SEQ ID NO: 44676 - protein, 59 aa, Zea Mays
MPYDSSGGYDSSRGVGGCDVWDHRVHTQATQLHVEPQVATTVREMTIKAVRRRLPEEPR

SEQ ID NO: 44677 - protein, 116 aa, Zea Mays
MWPTSSDPPLATKSPDLAAERDCRASWCDYGSVHAYICGHDPDSIPSTSWYSSRPPEGHWVCGWPECANFPSIDPPLPPGVLDVASVHLSAFPAGNFVSLTKTPPFVSRCSYHIQI

SEQ ID NO: 44678 - protein, 96 aa, Zea Mays
MTPNRGGEPQTHGWSSPAPEQWQPIPRHGEVPRTVLRNWTTHAASMAASSVTLLSPSLGSSGWRRSPRRRLVQHGSRGCRNGRREGFSLYGQAPAE

SEQ ID NO: 44679 - protein, 69 aa, Zea Mays
MKPNGATKSTSIPHDKKKISKPYCSRTMTEPPDAPATKSWSHLAAPRAMETPAPPLRYRGSAAQLGVQT

SEQ ID NO: 44680 - protein, 162 aa, Zea Mays
MCVCCSGGERRRALGRALRLFSDQQVHILQSHHPASLINLQCSPIVSEYFVFVQSGEFPASCMCQGVCVCSCPGFPPSCVLLHAALAACLFHSTHRPLHALCHHHHHPRRPFFFHARYNAMPLNHCIIKQKCLHKRVLWASTVVVGEKNVFTFLYLLNVVVV

SEQ ID NO: 44681 - protein, 105 aa, Zea Mays
MDDEDHKSGHRRPRDLARHRQPHVCLLPSHSMRVASVEIGPHMVKAITARATMLFMARAWSRPSPHSGRRATHLAAACTACLEKADADVVTWLKRTPPQGFETGE

SEQ ID NO: 44682 - protein, 71 aa, Zea Mays
MGGRCCFATWRRRAGRWLNCDRRRWGRRWGSRRRILMAKRVIALIVEFRGIQEDKRSTIGGESPRWFNRWC

SEQ ID NO: 44683 - protein, 65 aa, Zea Mays
MVELATSWRRTRRRTANQRAKVPTTSVTVLRCSQRNDPIGWLFTWDDEVMTPTRGTARCAAASLL

SEQ ID NO: 44684 - protein, 61 aa, Zea Mays
MRCLAPARHFVEQKGEGRRVKVGDACIYIIFLHILTFVHPTQIFISRTILPKFSLYTPLHP

SEQ ID NO: 44685 - protein, 87 aa, Zea Mays
MKDGATDDGVGEIHEQASGSGSASISVELGTASRRAAMGTEAKARVLRCRRVRTRRSPMTMAWCAGVEENRDATMRSLAGGETRPRR

SEQ ID NO: 44686 - protein, 56 aa, Zea Mays
MIRFRASRNRRSSFGDQVTWFFEFCKVEDPEHLFGEGKCPLTHYVLFTYNSLSRIT

SEQ ID NO: 44687 - protein, 70 aa, Zea Mays
MSEGRSTTQGGEQQACWQRYARWRSRHAWHRWYGLETSEGRSTTQGGERQACWQRCARWRDDRLGGDRLS

SEQ ID NO: 44688 - protein, 125 aa, Zea Mays
MSPSRSLTLEHRPLPKNRLLLRVSRPRPPRLRLSRHPGAIISSKSTHRQHSHPHHATIAGVSTRRLLPSASTTVSSCVVPPLRLLKDVRLYVEGRAPLLGYRPIRIRAMQYNKSIASQSNIILLT

SEQ ID NO: 44689 - protein, 118 aa, Zea Mays
MKYHEEYLDSIRILEEKWKVHQQSPKKQNKEAESTSNDTGEVHNLLQNEKMLRQSAEDEASDLKNQISHWKKLEATATAEIIKLQKMLDAEASQKEKLEEEIGVLRSQLLQMSMEADQ

SEQ ID NO: 44690 - protein, 172 aa, Zea Mays
MRLGVPFIAPRQLGAVESNSRRLILPSVIGRTGQSGAHRTLSGARSLSQNGTADRCRSGSRWCTGHVRCTPDSPVPPSDRWLGHVSRADSAVDRWPDRPLAHRTVRCTPDSPVNFSRTPSANSRERPLHPRQPGAPDTVRCTTGQSGAPDRNSLLAVHNQLFSFLLLSVSNT

SEQ ID NO: 44691 - protein, 102 aa, Zea Mays
MGRLSLSKTFRPSSTWFIPRIFPRGEVTNSHYGKLYYRHGPKIAHSHAGSSSVGQTAHGPLLVVRVGGLVDFDWSSVLFRVSEGGRTGLHPVSALGLSWRVP

SEQ ID NO: 44692 - protein, 53 aa, Zea Mays
MFHLTLALLNAGACCSSREVGSSSISTFSLIITLLRHSHDLIRNFLSKDVVSN

SEQ ID NO: 44693 - protein, 145 aa, Zea Mays
MGSVGSLPVTRRAGRWVRETRRLMVSSTTSLAPREADGGARSSHAGVNRSTATLTVRLRRPLGLGKWRLRFITRRGRQCEAWFGWRRAKGAQPWSLARAVHGECAATRVEESVRASRGEQGECGRGRRRECARRNRAGAAEGAST

SEQ ID NO: 44694 - protein, 108 aa, Zea Mays
MREFLLLRKFVASEKKFSFSSEFSSLLALFHLHLRLQFPFSFFGLRHLCSDFRSLGIRNPRRPALDLAFVSDECRRLRSSIDLLFWNNCQVFHYTLLQSYLATLGKVL

SEQ ID NO: 44695 - protein, 147 aa, Zea Mays
MQLTNDTDQHMAFKLSSTDSVDWLEQFLPWYGIVAARSTYTLILNVFLERDTAEKRFCDMILESCTCEYNDNNMYSATTYWEKFVDQETKKVVNEVKLTALLSSSQHRQSIVAPDKVSWVEKPWIRLLSVDAHPTEPWIITGHECGH

SEQ ID NO: 44696 - protein, 60 aa, Zea Mays
MEQERRGAASRRRGHRSSPLRRHTGAAEARTPERRSRIACRGHELERRGDGEAETERRGC

SEQ ID NO: 44697 - protein, 81 aa, Zea Mays
MYVYIWSLDPPASYSYICGYDQPLYVYERERSSSAVVMYIYMLATQESPKWHQAAGEERPERTKCMRELALQPKQSTGRSN

SEQ ID NO: 44698 - protein, 59 aa, Zea Mays
MNSVFQVHRLTFGLRKCVFRYNTKNQRSRFKTRNEKVWNFGYAQALQRRVPASSPKALM

SEQ ID NO: 44699 - protein, 66 aa, Zea Mays
MHSKVPIRDRLHPRTSLSSLMRLASRLRSTRLRWLSALSFSFSVHRKGQGDGGMRGGARGMVAAFA

SEQ ID NO: 44700 - protein, 53 aa, Zea Mays
MTCINGGESREGVTDAVNIHYTRNERTGLLGRSLRWVSRLRVERSAVDLGFTS

SEQ ID NO: 44701 - protein, 112 aa, Zea Mays
MFVGRLRSAVGNLVGWGYKSNPIHPSRLANVDRRAPSRQERERNQSCTTIGQTAERKRGKMKPPPHRHLTFTVVRASSCRLAELPSSLPYRDYGWGFGEFFVGHSQGRLHRG

SEQ ID NO: 44702 - protein, 92 aa, Zea Mays
MHLRQPPRMFWMKPDLDSGTAVPPAALLPEVVCAQAVLDQRHKECMRGQRHGGHGIPPSNLPGEFSWRRCCPHSLSLVSSPWRGSRRGTGAS

SEQ ID NO: 44703 - protein, 89 aa, Zea Mays
MHAPPLHARGLDGICGTGGRDTRSKNQQYILLAATNLGGRLAPPLPPAAAEEWSGLVGASAGALDRSLPCSTVSTTTYGDGTGQRRITY

SEQ ID NO: 44704 - protein, 78 aa, Zea Mays
MMVPCLRPLFSTLYEGKETSAGPRTAPSATLLQGSSTSPPATLAHSYTPICTAGSSPCIYKRGCPGPSRGKRGGREGG

SEQ ID NO: 44705 - protein, 130 aa, Zea Mays
MLSRSHLWRRFFSPAKKTLVVVFSPFCPYLAATPSPPSHTWPPLSSFPLGWLSSPPMAAPLHGFLLPLDLPPRSKDREEEEHIELKGKRRSRRCSSPSLLAEFLGETLGMDEILVPPCNYVLLEVVDHGN

SEQ ID NO: 44706 - protein, 107 aa, Zea Mays
MYYIDTFGLLEGADMRMITIQREQYGTTVHLFIGMGHGPDKITFMSLTFTHYHDMKHYGLNSLFSLSASIIFSLHHHYKTKLMLFGNSFNVRFYHLQITSSSRMPSL

SEQ ID NO: 44707 - protein, 94 aa, Zea Mays
MPRVATAAGDDHASRDRRKGPSLSCARGEPSREPLAARSFEATIATARASGTIATARASGTIAVTRASGNCHRRVRGRVWLARASRVAVDARSR

SEQ ID NO: 44708 - protein, 184 aa, Zea Mays
MVEPSPFLPPPSSLASRALLSCRPPPAEPTIVSVIAGAAVLAAGAHCRHHRAGARPRRTPSTTPMSPLCSRAPAVEPLLTPCPARRREARRRIVRVHPPIAGAPLVPVRRTQFTIHSRPAVQTHRRSYTVRRRHDRAAHQLDHPRPTPSLVRAVFARPWSCLASPRPNPSIHHKVEDNPNIFIS

SEQ ID NO: 44709 - protein, 86 aa, Zea Mays
MSDLFLEVRLRRTYIPTEESTYAIFVYVVPSQEPGANPMDPSHLERSPLHEKTCVRLNLTWAISRSNLIVLARELLLVRGGGKYPR

SEQ ID NO: 44710 - protein, 56 aa, Zea Mays
MYDRCFLKKHVKEITYRKGRQKKDASSLTIVNIPSALSNCYLLVMKFPHLVLGHHQ

SEQ ID NO: 44711 - protein, 53 aa, Zea Mays
MDCMAEVISLITTCYYVSSLGIIQAFGLDFLPNAKWQGSEKELNAPTEKEHQN

SEQ ID NO: 44712 - protein, 54 aa, Zea Mays
MHEHARGPLPTLNAALHGAARRPTPTSPGPAGSRSERSQVPADESIVFSSTSPS

SEQ ID NO: 44713 - protein, 69 aa, Zea Mays
MENFRHHNALLSRVSCRLRCAAAHCGCRSLAACASYAARRSPSRSCSWTFYSWPELLAIDVGYICRCGR

SEQ ID NO: 44714 - protein, 52 aa, Zea Mays
MSICRYFVSLLGLLLRCRILRASVQSTSHPMNYKTQTHAKHQSTGYVDHQTT

SEQ ID NO: 44715 - protein, 67 aa, Zea Mays
MAATTPAAVSPSSLGMKTILVFSVFRKPFSIFFDRNQWYRYFSEPASVIEILFRNRYRKQYEIFRPF

SEQ ID NO: 44716 - protein, 61 aa, Zea Mays
MQLEAPGRRDHRRGPRISPPMSAKRESTTRSKTMGRARPARQRRLRRGTQTLSRLRARAGR

SEQ ID NO: 44717 - protein, 62 aa, Zea Mays
MRSRVFRGLTPICRSELWPSTTAYNHVYRKGEDVRVTYCSEVLLELGDILRVVGFLLRLLGS

SEQ ID NO: 44718 - protein, 159 aa, Zea Mays
MCSHPSSPGRRRRHARAHLRAGQRESPHAQRFCSARAATCQADGRPGTGWYHGRGRTRVRTRAARRPRGSALPLARRPRGCGVRVPPLSSAWRLAETKRACTAVCTRAVTVWRGHAARDDGTGPRVAWGRRSRRAPAGGGLPPHLFSWRGARPCAGRRG

SEQ ID NO: 44719 - protein, 62 aa, Zea Mays
MFLCKYIFVCACLYSLRVVNRLRSISELRGIDNQASTTKGSNSSSSTRLKTLSICLVKASVL

SEQ ID NO: 44720 - protein, 59 aa, Zea Mays
MEALVTETRIEGKESKTSIEAIAQVLASSRYLQNVLVAAIKRSGNGGDATCVEVEMLVL

SEQ ID NO: 44721 - protein, 135 aa, Zea Mays
MHTHLPFSFEFEEKAADAAMELDEQAFLEEILSLRRDAWDCNVSMGDLFAPAAAAAIDCSFHNQQAPTVSVLPTFTASCAEPPAFDCLSEVYGAAAAFGGPNAGDEMAFLHVAEPMDALQLDNNAGLGVVQGGAR

SEQ ID NO: 44722 - protein, 123 aa, Zea Mays
MGMHSEKAPGPDGFIGIFYKSCFELIKDDLSSAIHDFYHHRCKNLNLVNEANIALLQKREGADRIDMFRPISLINSFMKILTKILANRLAPRMNEIVSTAQNAFIQKRSIHDNFLYVQKVIQK

SEQ ID NO: 44723 - protein, 110 aa, Zea Mays
MPGDKLPAVWSVIPPGTATTMTSEAPCPNLEVPMAMSSRFNGGGELFSLSVVSPYRVEARTPTKAEGVLLGAYMGEERARGALSRQLAPLQQIPEEATADTGSACGLLTP

SEQ ID NO: 44724 - protein, 61 aa, Zea Mays
MTLVFNIITYLYCYSKHCAMMSHLCNRRVREFLILARTWFAFGLPSKTGCDKDRLRWFTIS

SEQ ID NO: 44725 - protein, 61 aa, Zea Mays
MAVSDDETVEIDGNEDSGCACACIDNLQIVPLLSRNRRITDVTRCEISHACACMREMRSCR

SEQ ID NO: 44726 - protein, 61 aa, Zea Mays
MEEIPGQMIDYGWLGLDVCITFRWIGSGPSIQIRRMKIDRVILKLGLSISRIVGDLFSNAM

SEQ ID NO: 44727 - protein, 91 aa, Zea Mays
MELNKVLYMYAATVALLLCSSANFIQSPSDVLGSVALQDPTPSAAHDFGAVVSDAPVAVMQPGSPADIARLLSALSSAGPDRRPEGGRGGA

SEQ ID NO: 44728 - protein, 73 aa, Zea Mays
MHDELPLSLWMLVYGISIRSKSPPARTHWPADRLTRMLLGGTGPTAPLGMAGECCFTCLDSGCMLQARPSPHD

SEQ ID NO: 44729 - protein, 106 aa, Zea Mays
MFHPILSAETFEHPTLALMRGWLVSSAGVPFTPGRPTRLPVQLQPHSQPSLSVRCSRFRGSAERRPSDRHMPASSSCRAPWNRWPRERLYSKSETVAPILGSWTRT

SEQ ID NO: 44730 - protein, 66 aa, Zea Mays
MLVVQLRLRPGASSSPSSPRHSTLPTPSWNTAMASTTASSTPRARRHTSSSRTPVVARFHPYSALP

SEQ ID NO: 44731 - protein, 55 aa, Zea Mays
MHFVLMFGVMLILPILCLFVLLRLARGYVSSEEQVGTWNLKSQASCALDHFFLPS

SEQ ID NO: 44732 - protein, 182 aa, Zea Mays
MFGQRAMKVENMVKLKEEFDYKSLCRKLDIELDKLIAENERQRKHFDDEVERIRAEAQCRIAEAERECKITLENKEAESTSNDTGEVHNLLQNEKMLRQSAEDEASDLKNQISHWKKLEATATAEIIKLQKMLDAEASQKEKLEEEIGVLRSQLLQMSMEADETRSLDKGDGPGKIFPGFRF

SEQ ID NO: 44733 - protein, 70 aa, Zea Mays
MYKKLPSCQGQRTFGLSKSETYTYHSLQLQVFRLQQTADGQAAPCSAVLCGEPERNIQSPNAINALRSTH

SEQ ID NO: 44734 - protein, 177 aa, Zea Mays
MAISCQKQKQTCPYSLSAIVNIDVLAPLQIKYYNQRGKKMHSSLLRRTAGCASCRSKSTISVSSLLCRTAGCVLPCSVRSRWGLLGKWPVKGGGAAPRQGRSPGLPANALRPDAGASGPGPRRRAGGTEGAGNGGGWRGRAVEGAWRGGGAPDHRRELRLLEVGAGREDRPGASGGR

SEQ ID NO: 44735 - protein, 88 aa, Zea Mays
MRLVPALHHFSCSAMLSVVFITQPCSQLLLFLVVAAFGTGLAGGSWLRKIKNTTSHPLLPLPHHRPLRCGWMDMDSAPHPLPDPTCCF

SEQ ID NO: 44736 - protein, 57 aa, Zea Mays
MRPLQSSASFRQPVTVYGNITCKNPSSDRHRSQINPRTSLHATPLLPLPLLGKVVFH

SEQ ID NO: 44737 - protein, 50 aa, Zea Mays
MSRHTKYISYRSYTRRRPIYLASAPVRARPLIRPSLGSPQGHISFPIYRI

SEQ ID NO: 44738 - protein, 154 aa, Zea Mays
MYFFIRYATVCSTLSTQPKEPSFVVRVTPLAARNARRLGVGRSVSQRRRQNWHDKDRVASRRAGGLVDTGPPTPRCAALPCPSVSCHPAHSIRFPDVFFRVSRGQGSPRVVVLLAGLLARPSVRRLRHRAGRNISIPQRSAHACVPTPPGREGS

SEQ ID NO: 44739 - protein, 141 aa, Zea Mays
MLSAPTSQQNAPNPARRKNHGRSLPSLVGHRVHPVKPIRKGKGVLGHVHTPHKTIGRFGSEHRTMKREREGRRRLPPSDSRYAGVQKLWIPREAHRGLSDEYAVLPGSRIERPNDDFSSHFNVHRHTTLDRGRSLWFRNPW

SEQ ID NO: 44740 - protein, 70 aa, Zea Mays
MILYINGHNLWQCMGKFFCPSTSSISVQIACMFVEGKHSLLLMLLKFMDPESKSVWTGRDYSSSRPTNHD

SEQ ID NO: 44741 - protein, 72 aa, Zea Mays
MTTDRNTQIRSSMNSACQYQPGQQIYIGHKNQQTYGILMALRVSWEQATFPGPLQCPLATAHHQEPSSASFP

SEQ ID NO: 44742 - protein, 150 aa, Zea Mays
MATLMALKTAVSLPVSPSPLPLSIKPRPKPFLYIPLLAIPPLAYCVCCACCAPPSLCVHGCQCLTDDCAHIDVQRRNSPRAGASTALLAAVRSVLLAILAVVCLIEASLWCMGDSLLHDRNTTSSPCCPHIGSPTRLFGDRSPSFSSSCH

SEQ ID NO: 44743 - protein, 66 aa, Zea Mays
MRLKNCYSKTAITFWSDVRLRCSSRPRKDLQIIYDSYIDFLFFLRPLRPRKTGMNRNCRICHSAEN

SEQ ID NO: 44744 - protein, 81 aa, Zea Mays
MGRDTLNAERARHPSAQWQAARPLLNKCRGYTTLCQARPDGLCHGPQAADLRLRGERRARPAHVSAPDPCIPRGPSRSRTL

SEQ ID NO: 44745 - protein, 70 aa, Zea Mays
MEEKTCNGRLLFFRFHCCTFIARLSCSDHVFLFVFLIYIYIQKTVYELLERIAGLHESIAQMRLNWELSK

SEQ ID NO: 44746 - protein, 58 aa, Zea Mays
MEGTSPCVSFKEKQRYPIFQTNSIALINENHLIYIPYETHLLLDIYPIFQTNSIARIN

SEQ ID NO: 44747 - protein, 170 aa, Zea Mays
MENPAAYVHSNVAGLVSLLEACKDADPQSAVVWASSSSVYGLNDRVPFSGLRGRGHRGRSRAGARSRDPGPPHPPPSRIHHQRRSRRWKVSGAATLMAGSRDRGALMAGSVDCGSRISDRGCIGRAAGAPVRRIDVDGGSASRGWRAAERRWVGRGNRQNKHLCTPTLHN

SEQ ID NO: 44748 - protein, 59 aa, Zea Mays
MMYDCQRIVSWVESWTDRGVRFYMCNHIDQLVVCRCRAHIRWSTTKMNVMRVRTDGPRT

SEQ ID NO: 44749 - protein, 64 aa, Zea Mays
MTSLFMLRSSLWLQFKPHHIAAGAAFLAAKFLHYDITFHPNFWHEFKTSPYIVQDVVQQLKELL

SEQ ID NO: 44750 - protein, 56 aa, Zea Mays
MENGHVLHNHLPIFSQAEKMITGEADVLGSCGMKREDRKADGLMVQKLDLVVGLLS

SEQ ID NO: 44751 - protein, 58 aa, Zea Mays
MAYGFDSSFIFFSFLFFSFSIFFSDFCFLISKLNCKYILYFQTHIRCTIKNSACDAVF

SEQ ID NO: 44752 - protein, 51 aa, Zea Mays
MQMHVCAITYTHHHELTQHASSGPHLLSKPQIMLPSRPQRRRVEQRSHATW

SEQ ID NO: 44753 - protein, 59 aa, Zea Mays
MHPVARSFFAALHARLHAICGLRYDARLHAICGLCYGSLGGDLLVVAMEASAAIFRPCA

SEQ ID NO: 44754 - protein, 165 aa, Zea Mays
MSLALGHRPSSLHACCCATPRRAASPRLCLASCADAATSLAIDLVPRQSYTLAGAQSAVLALLFSRGFLVAPSSSYLVAGADAMEQHVLRQDSLIAIARLSRNVAASSSSRVAARASSPWDFTHRCYLEPGVPCAARVAHRRSLTTTTLLRQCLLLDVVPNQGRR

SEQ ID NO: 44755 - protein, 52 aa, Zea Mays
MRMGSSEEGMRVYRAHGSYGSHQFDEHGFRAGVIARRRRGAISCRGQCGHRL

SEQ ID NO: 44756 - protein, 115 aa, Zea Mays
MGRLAGMAMLHGTGARDVRLARLGVLTWTKPVPALALAHRWADLSGGQHTTAWATRRGSDDPLAWWSWPTRGLWRGRPLGGVYGGALAVRSQRCCCLLVLHSGPTVMAGYPAVAC

SEQ ID NO: 44757 - protein, 62 aa, Zea Mays
MAARTGDGKSDNIAGDTLTDDEALTTLIPTTNRKHRHAPAPQPIILLISSSLSLLPATCLAR

SEQ ID NO: 44758 - protein, 74 aa, Zea Mays
MAAPLDDFLLPLDLPTRSKDREEEEHIELKGKRGSRRCSSPSLLAEFLGETLGMDEILVPPCNYVLLEVVDHGN

SEQ ID NO: 44759 - protein, 188 aa, Zea Mays
MECGRLRMLRVCLGDSSMRLGVPFIAPRQLGAVGDQQGRLRLPSVKWRTGQSGAPLDSHYRQSGADLLPILAQSTIADSWQLAHQTLSDAHRTVLYLLPTVGVGHASPADCAADCCLVDRWLTGQSGAYFAKDDSPDSPVNCSRTPPSSPESGQITLDLSSAPDNVRCTTGQSGAPRPSSSWLYTANS

SEQ ID NO: 44760 - protein, 90 aa, Zea Mays
MAGGPGGGGDAGGEHAAAAYWYDACEDSASLLCGIDFAASADFDPGLIPAMDCGADDGFVAEIDRILESINAEATPAPPPPPPAPAPAPA

SEQ ID NO: 44761 - protein, 120 aa, Zea Mays
MPRHREPRGSVRKKSCRREGNWGTSSLELKHGVRELRILLRSVSMVIVELWWPRIGGNCLLGLVRTALPPSIVDGCLCGPIAGQEQVPRDEVHEGCCDEFVSGLGHRLPVNFGCWIIVFV

SEQ ID NO: 44762 - protein, 73 aa, Zea Mays
MKILKNWGVFTCFLGDAFSCADLRTQLNRARCALVLGGTCQCQAKVAVQKLDIFLGAKTTGKDQRDRLHQIGS

SEQ ID NO: 44763 - protein, 77 aa, Zea Mays
MIRRNSVLCSKGFYSKICTGLEREEKGPEMAYQIGQSWSDPHFAWQPMCVHLEFLEPPAAGARSVAYGQRNGEAVLF

SEQ ID NO: 44764 - protein, 61 aa, Zea Mays
MSPCAKVSCAGEAAVAVPAQVRRCPISTEMLNGHHITPWKKGVFSRHQPPTKPHGVASHCC

SEQ ID NO: 44765 - protein, 87 aa, Zea Mays
MRVVWDALGQVIREVLCLVLVFGHWETETSVMAPISSLRDLGTGIVPRLFPEGRGIGFGTSDGLYAMVISNIRIVRTLGKSHVVRPC

SEQ ID NO: 44766 - protein, 60 aa, Zea Mays
MPVTTLLAVEGMEIGWHHTRLRSQELTLRSWLRKFSDLLGMWWLTMLSTDMHRGLAGEVP

SEQ ID NO: 44767 - protein, 100 aa, Zea Mays
MPRPHLLVVNQTIWRLAGSAVPSQENREGREKEVPPSLGSGEGHRGRLSDFMWYGRIVCRRLGAPGGLEFVVGASSSLQNYHAPARLGDGSWKMNGGPRS

SEQ ID NO: 44768 - protein, 92 aa, Zea Mays
MHRATDMDEKHAPSPPLARPEEPLRRHLLVGQPAGAHPPSLPRIATLPLLPPSILRSSWRTATRRGSWARAPRTMTVPVPLFHPPWRFPFLR

SEQ ID NO: 44769 - protein, 146 aa, Zea Mays
MCSHIFSLHPSIWEIVENGMHFDSTENPMFINEQIHKNAQATTVLLASLCMDEYNKVRGLDNTKQIWDILKISHKGNDATMITKMELVECELGRFAMIRGEEPTQTYNRLKALVNKIRSYGSTRWTDHDVVRLMLRSFIVITTGNT

SEQ ID NO: 44770 - protein, 98 aa, Zea Mays
MCASLHISSSPLFSFISSEAKNLFPRKLWMCASCQSLSFGLVLRRMAYLSAPLSAGGGGRRCRGSASDTGHRALRRRARESERRKQQWGSRRGCARMG

SEQ ID NO: 44771 - protein, 53 aa, Zea Mays
MWFWVLRYTLFMIIFLLSICYLLIHDKIIMLIGTWRTTRENSAPTRVIWDALG

SEQ ID NO: 44772 - protein, 91 aa, Zea Mays
MDGRTSAEKGEDGPERKRSRAPAASSVVRPPQATPKATLLARIAFLAALGGGVACVFRAGAVPWLVAPFPHRQRPAASTSFGFWMQHCTIP

SEQ ID NO: 44773 - protein, 95 aa, Zea Mays
MECQLATAKRMRRDISAACGADRIALAPSFLVGAIIQVAWSLTYAAAGHAGVLVQAGHRYGIETPRGRWRHMEQGRRNVRLTDRTSPDQSVGCSL

SEQ ID NO: 44774 - protein, 75 aa, Zea Mays
MDNSYVAPSPESSRSSSPAATVTSKFCRGGTHAVISLTVSPTDVVDMRSRCNPWPSGDRWTAAAINSPMIPCEAR

SEQ ID NO: 44775 - protein, 99 aa, Zea Mays
MSRSERAIEHAAEATLRWRQASSKREHDVGPPTWRGRWPEQCDSRSFDEVLRSTAASNSGGNSRRRGRAGKIVQQSSNSGDVVALARGSGELTELGAWS

SEQ ID NO: 44776 - protein, 114 aa, Zea Mays
MLRGDLDGDLCFITWDDKLIPKKVDPMDYCNEVTHNGPCCYTRDAVSCLLFLGFRRRENSFRLPEDRREMFELLLHRLRTKSIMEAMDALPSIFGACRLKNRPHCKSTSMSLVF

SEQ ID NO: 44777 - protein, 106 aa, Zea Mays
MPGLGTDPSTTSMIIRLLRLLAMAISALSLPLDSTRVVDEEIDDEEERVLSFSSACIIVVLACTRDSPDANRSKDRTTITTAARDEVAIYLYGLGHRLKCDYWYSG

SEQ ID NO: 44778 - protein, 64 aa, Zea Mays
MSKASNRLQHLARDSVLPGSTKSVLMLLLMELISLLVRFTLIQSLQPYYLILQLGIRLFLLAMS

SEQ ID NO: 44779 - protein, 96 aa, Zea Mays
MWPKSRSPIHYSALSPTSLSTIAVSRGSRNPPLHQIRVPPSSVELGAKLEPCGRPGGFARVSGSRWWRLLGRRVTGARLICLRRRAFALRRDRPKR

SEQ ID NO: 44780 - protein, 50 aa, Zea Mays
MPCCHALQIRLFIYKEAVVVRYVFFWLIYTVSTQCFEVIALHWAPDVLVL

SEQ ID NO: 44781 - protein, 71 aa, Zea Mays
MTSSFGERGSATAFGVGSTLGAETAKEHNSTGTTTTSSEHDNRQSTDEQQEGTSFSVEKLGEEAVCFGCVR

SEQ ID NO: 44782 - protein, 85 aa, Zea Mays
MPTSTRASALSYRTHAGSYRTVATALGRISDEVSSVGSIHKIHVHNNVVRNLKVSNILPPFIFSYRWIVQFCTIQRQLKRNGWSI

SEQ ID NO: 44783 - protein, 78 aa, Zea Mays
MQHTLPLDSLYSSCAYLHHTLNCSSSLHNHHLYKGGTQTAHEHAPGIDAQTGRSSQSGTSLLRHSMISEFGQARPDLV

SEQ ID NO: 44784 - protein, 76 aa, Zea Mays
MPPSSGVFFFPTRGLCSESNVEYVFSDAAVIVLGGQEGAGDWDARVELETGLVSWGCALQPVTYVSAALPMHRKGS

SEQ ID NO: 44785 - protein, 155 aa, Zea Mays
MILLKRANSDLRERRRARTACERRMTTRATSRELRVNQMCYARRESCDSDGVLHMVWTRGLTTGGRRRTSWARRTMARCDNNDEARHDMTGTCRAALSEVGDERDEALSHGAGCRGGARYWTGCWVGDSVAHMGWRGGCTGRLGQGLARVEGRGS

SEQ ID NO: 44786 - protein, 57 aa, Zea Mays
MEGGASLRGGGGGGGGGLGGGRNQADVDEPHVHRRPGHAVWHRVFALMHRVRPWHHL

SEQ ID NO: 44787 - protein, 61 aa, Zea Mays
MRSIPGTSNPMLAVRWKKKLPLTHAHAHCRACTMLPLHEACGQPIQLCSQQGVYAPTILWS

SEQ ID NO: 44788 - protein, 132 aa, Zea Mays
MIRCLLFQASLPASYWAEALHTATHLINRLPSKAVSHPTPYFALYGTAPTYDHLRVFGCACYPNTSTTVPHKLSPRSTRCLFLGYSSDHKGYRCLDLASHRIIISRHVVFDEDVFPLVGTSPPTDLDSLLEF

SEQ ID NO: 44789 - protein, 53 aa, Zea Mays
MTAIHFRASRNRQSSFGDQEIELFEFYENEDPEQQQLGEGKCPLTHYVLFTYN

SEQ ID NO: 44790 - protein, 79 aa, Zea Mays
MVVSPILSSCCCWRGATPWELASFHHHSASRIFITHLWLVVIHKEAASPSTAKSTEVSAWCSMICTIMLGQEIRQKPNA

SEQ ID NO: 44791 - protein, 119 aa, Zea Mays
MPRRKKRKGVGGLQRRLPPVHPRPAPLCPWSMGRLPRAPPHSTVLWEVAFGRGPGCHARRVGAWWRVVFCCFWLDSWAIQQRKREQKMVVQGSKLIRKIASEAFGRAFGWCPRDRRISG

SEQ ID NO: 44792 - protein, 213 aa, Zea Mays
MDPMVLVLLHATVARPPVLTAVQFDTGAVCHGCLSAGSLVCSIDSHPVSGREAEAGSPAQECTFASSGIRGIREWEGTLVGRVTSCLAYCTLYFIYSPELPQGIIVFPVMVCDSFFFRNSGGAPTRSGGGDRRQGGLKLRQCPTAKARESTCCISHCSSLSSPALPQHQEATASDNQQWPCLSKRTEYACSLIFLLLLAKVPSFYSCVDNICL

SEQ ID NO: 44793 - protein, 129 aa, Zea Mays
MVITMFFYVDDKSYTDINSFPIIFKLGITGFSDVVKQIWSTEMDGNTPMDRWQAKIRKLRQYLTRWAKHTNGINKKEKKSLLNNLDELDRIAESTILTQQELDLKCCVHNRLANLLREEEIKWYQRAKV

SEQ ID NO: 44794 - protein, 89 aa, Zea Mays
MSMAVGQKLGPCSCVKLLVVLALVMSASDGAGASRPLTTAAPAGEQQQSTGGGGGGGLASVKLAVVVRQLWAGPSGCTFDPNTTGPRCP

SEQ ID NO: 44795 - protein, 80 aa, Zea Mays
MRASRVCQGAPRAPLVIWSRVRMQFGWAAASWMISSTSLKEGPERAARMCAAPFDETSRLAASSVSASRRERASSTVLRR

SEQ ID NO: 44796 - protein, 74 aa, Zea Mays
MDRCTNNPALIAAYKWDPVSLAGYMWALITIRSRLPRMVFAFHTLAFEILDGLRSDPSRRREHPSLRPLCALPP

SEQ ID NO: 44797 - protein, 79 aa, Zea Mays
MMEVSHTLNCVAPSPIDHGRWLNGNGNLPNHTADTTQQRRQSVGVTAWMSTTACPVRSADSWELGFYGSRSPHGCVAGG

SEQ ID NO: 44798 - protein, 100 aa, Zea Mays
MGILTHSLLLNVCVYWFCAHLVSTRCCSAAASGSRAAASAVRPERQMPCRKEVVEPEHDLVEPPGVVDHVERAPRRSCIVAASRRTASCRAHLVVRPKAS

SEQ ID NO: 44799 - protein, 60 aa, Zea Mays
MVPRSLDCHQFRRWTVEAWAIARRTWELSLCRAASGTELISIKSPVGGQPVCDGWSIICA

SEQ ID NO: 44800 - protein, 62 aa, Zea Mays
MDSALSISFPLSIPLLQLILSFCNVVVEWPADASLRLAIASTSILLMLLAHMVCRFCMRWSI

SEQ ID NO: 44801 - protein, 51 aa, Zea Mays
MVQLKACARGTQLSQSACMRIGSVNTESVGTHRAKEPFIRDQAYLKYGCGV

SEQ ID NO: 44802 - protein, 64 aa, Zea Mays
MVILKEHANPIPIAPKTEIWFHPNLHPWQRRSPIPNYWRSNPRRRRSALLMWPPSTCPILKTSL

SEQ ID NO: 44803 - protein, 53 aa, Zea Mays
MLKLFVPSPLRSLPGFSWSLQQTPSRALNNLCEIFGADVANSPAPLGYKSEPP

SEQ ID NO: 44804 - protein, 73 aa, Zea Mays
MAFEVAIVGHQLSSTLDLYGDGLGRCPNEETDVNREVERAPPHHLPIRWHESELFLCNRITFILDPARCGRPS

SEQ ID NO: 44805 - protein, 129 aa, Zea Mays
MQEEQVSCSPNHLKAAYSAPSPQMPTGLGWLLCEAASEKANTARGAANPMKTRNMWCSIPKCRRLTRPTRPNAMPRHYLMRKISEAATHVHPLPAFLGRAGGGGEESLRPPLLLSVCSCISIDLSGGPS

SEQ ID NO: 44806 - protein, 130 aa, Zea Mays
MHCLPFLATTAWIGQNFVHPCCGQGLGAAGAAAGDLRLHRRSGHDGRLGASPGRGVDISGLSWPNRWARGREFLISTPPSPLFCRTASTTSSSSPSTVRTPLYGSPSSLLRLPSLGFEDLCSDRQAAVHR

SEQ ID NO: 44807 - protein, 54 aa, Zea Mays
MEPLSTQGTPSVEVVANSSLASEELGSSDIQGDHQESVCLGPCCMTVVNESDEE

SEQ ID NO: 44808 - protein, 78 aa, Zea Mays
MLCAHCSALCSADQRRRQQAHSPSWLAGQLPAAEPARAVPRMPRGARRHAALLAQSPAAHRRCLRMPPLAEPSHSTRG

SEQ ID NO: 44809 - protein, 178 aa, Zea Mays
MIDDKQGQSSSERPARRPKEICRRSRTDLLRILHQGRPRRTGGAGGAGPGPLRRRARWPPKTVPYADRRQLGGVVLSFAWPVRCGLGCAHVRTYGYGSGVDIPAGLSGSCSSSSRRPSAYGWHGTRHVRPIRRRLPISDIKAGASLMHPRQHFAFQPILKSGANLLSQCVHVNVAFQP

SEQ ID NO: 44810 - protein, 59 aa, Zea Mays
MPTQLAGVAVFDAVRHSPSRQLPVRSTSLESFPWTAATPRVACASSVFDLPPYRCVASA

SEQ ID NO: 44811 - protein, 84 aa, Zea Mays
MENSLGMFYCYGAYLCVGWRLENTPKYDIGLCRPRSIWFDPRTAQLRAEIDSQAHIYRAESISTLSATYVRAWRAKQKVFEMRF

SEQ ID NO: 44812 - protein, 187 aa, Zea Mays
MYISTTTYVSSVGVHNHPFYRAQMPASRSRSATARIRASTVAAPSILRHPSIHRADPSAPSRAPAAAPHHAAAPHHGYQRCLHHTSLLAMPHPQRPHHRPPPDPDPAPIIGASSPARPRPFRSPWTSWSHPEAHAQNPTGAAYSDDSDEGRCPAPGERSRSPLVKKPKVTVARPSSDRRQEPRIALS

SEQ ID NO: 44813 - protein, 91 aa, Zea Mays
MRRAPYRNGRPSESGNSKSRRVVAVMRCTQVPVVTTASVGRNSLRLPWQTRSDMSDGHCTHSPMLRPTAHQDPIRDVVAARVREGRRSGGE

SEQ ID NO: 44814 - protein, 67 aa, Zea Mays
MDMDHTHDTIRAKRNTKMVRTSHVMHSIVAAGRFTDRQQRFVWPLLSSLATDIVLAVHQLEKDCTDA

SEQ ID NO: 44815 - protein, 64 aa, Zea Mays
MVRPYRYIFSIVCCPRRGTMRLHILRGMKAEVILAFADICTHEEYMKCDITMLLLWFLPARCGN

SEQ ID NO: 44816 - protein, 52 aa, Zea Mays
MWLCFLGSSKPRGCSTYTSSLILAFRKNVIYIHLVEFNVVSTSISKKNPYCL

SEQ ID NO: 44817 - protein, 77 aa, Zea Mays
MLLLCETNHSNSSYVFRSEVVVHRKDLQFQAVREMVHTNPQILQLLYSLFGITFYGLLCSTCLNILLVARYSLCWLN

SEQ ID NO: 44818 - protein, 128 aa, Zea Mays
MRPVRSRSRSTKRIGDPTSVLTHVVPLSSTTELFDSLAALAAPPQQHSGRAPGNGAPRKPMPWRRPGRGRLGLLLRPAAQPTRRGRGRPAGERNGMDRSACHRDSCSDDGPRSRPDSGAAHCIVSAAA

SEQ ID NO: 44819 - protein, 74 aa, Zea Mays
MADLLMHVYVRKQKHQMSLNHWVLMHDHVRTNSNQHKRKNIRNVEKSDYMHKIVLKTLIMKTSQMKCKFCDSCL

SEQ ID NO: 44820 - protein, 130 aa, Zea Mays
MSQQCRTHPRSLAIFHLCKGPTRQAIIPTEQPFVCTGLLHDACAHVVRAVGQLPLFSLGRQPYPTLSSPRLASCSPHCLIARRVRPWTPLRALSCWPARRRALLDLGHTTLPSTTPAVAPISSRRCWPKP

SEQ ID NO: 44821 - protein, 84 aa, Zea Mays
MAGSSSRRRHPLMYSPDEKQQHPFRKHHIARHRLLKRRLLLSGSPLPLATSTTTTAQEKEHGEYVRMGEKCSRENLWEMRSPIR

SEQ ID NO: 44822 - protein, 103 aa, Zea Mays
MSFVFGRRRLLIITNSLSIHPINIFIGAHQLMVTSLYFAPLVYILQSTSSKKELGGRRQTTAQSFQRRENMQYARGVLLVDTFHTSIITFVLIITPCHQLTIN

SEQ ID NO: 44823 - protein, 119 aa, Zea Mays
MASNMQASGLPQPPRPPMMGSSAQPQNLGPPMPMQYQPTSIPPVVQPWSTGPGQSVTHVPPLVQSGHQQVSAPTTLPPVNLSEPSSSDWQEHTAAEGKKYYYNKKTRQSSWEKPVELMT

SEQ ID NO: 44824 - protein, 104 aa, Zea Mays
MQPTKRGHMAKMEETQMQISSSIACRQKRIVQHHIWRGGASPTREVGRWCENSPERRDETARAACRGGQRSLTGNGAARRRAGESRAQPMPSHDMPRTTKMKRG

SEQ ID NO: 44825 - protein, 203 aa, Zea Mays
MLASNFNTVTLQPPPTQEWYMDTGAKTHMTSNSDNLCSSQTPSFSTPSNIVVDNGSLLPVTHTGSVTSPATCGPLHLHNVLVSPHLIKNLVVRQFTIENSCSVEFDPSGFCVKDLQTRNVIVRCNSSGPLYPLLLSVVRPLALTATVPSSTLWHRRLGHLGREALSSLVSSCAITCNKSDVEHLCHACQLGRHVRLPFPTSSS

SEQ ID NO: 44826 - protein, 85 aa, Zea Mays
MKSKPMSVHTACGMGRGSSSPAGWRCSDLLCWQVAQPRTKSCTTRRMAGKWKSRRSRCRVRCTPSWPSPCIAATNSGSSSESEGT

SEQ ID NO: 44827 - protein, 64 aa, Zea Mays
MLMGRRCARCSMDGPGAHRSIDRFALAQPDPRRTGEFRRCSRGEHSAVGGLIDMLSKLFVSLLV

SEQ ID NO: 44828 - protein, 59 aa, Zea Mays
MHTSHYTVQQLQIVDCCFPLLGGTGLSNAPVDRWLWLTCQVSIGRLSHRTVRHSAQTIR

SEQ ID NO: 44829 - protein, 52 aa, Zea Mays
MPVGALADFSCTPCMRQPPMISPWTFSAQSPSTTYEHALMVRHKGPACGIFK

SEQ ID NO: 44830 - protein, 69 aa, Zea Mays
MRVSSIVHNHGFGDFDRHRFRSPSPMSSPNPRANLPGNGFSPWSGLQEVFLKEPAWTGKEHPQVLAPML

SEQ ID NO: 44831 - protein, 59 aa, Zea Mays
MGRDLVWICRSSQTGRWSSSTVVYNSPLKPRLLLNHPRRHRRNHGVERKRARHREKRVR

SEQ ID NO: 44832 - protein, 97 aa, Zea Mays
MSPAAYASPLWMVSERQLCTIFQLLEVEIISREKTMVQTRFFVMEACEVIMGLHSEGLVLGCLGPSVWTVSASFALEFGHCLLDFNQAMALYWNVFS

SEQ ID NO: 44833 - protein, 134 aa, Zea Mays
MLVVDPLRLETALSTPRIQGNATCLGSPPYLHCEVVFNLQIGAPGNPDTGRQWTLRCVGRATLSWLGRRRAPSRRSIDRWPRLVGVFSQLELICVVRGRSGGSRLVPGCHNQFWKANRMRTMYVPGSETHVHND

SEQ ID NO: 44834 - protein, 73 aa, Zea Mays
MQFARVCRSHVCRAASLHGHNLHNLHLDCNRCSAVAILLRRCLIGRNLREQSVIGNDNPSWMMSNYKLLMNLS

SEQ ID NO: 44835 - protein, 83 aa, Zea Mays
MACFEHSNFFKVTAAGGTTRPVKARSASPAEGSSRSVLAVRRTGRPGPRSNYELFNCNNLNIRYWSWNYRGCWHQTCPPMDPR

SEQ ID NO: 44836 - protein, 177 aa, Zea Mays
MELVLKSLKSGSPPSSFADPQGLGGTIFLPCSQRIERWNGGSSRQLSGDTTYQPGLWTKSSMSFWHSLRATGQCCSMPRLLMTCANMLDITQTRVRRRETGSGGGSALSSVIVSTPSGPTTTMSWSIWLSPRRTALQLGRQKRRGRPLWQDLQLSHSVSGLCPTLRTGDPNSSRGDG

SEQ ID NO: 44837 - protein, 145 aa, Zea Mays
MSVSDHIKMQPLSFIVTINVLVRTQRRIYSVGNVGHGPTSNFVIFIIPYRIRLEGAGVSASQVHFVPASSRTAGHGPCPIGPFVVHPGGQKISALSSRLLSAACRRRPPASHRARGIADRDIAPHHRTQPHRANEKVFPATFKRL

SEQ ID NO: 44838 - protein, 52 aa, Zea Mays
MGVADGVDALRPWISDPAARNPYQCIKYGDLIAAVDHVSEGSAFPIPLRRDF

SEQ ID NO: 44839 - protein, 54 aa, Zea Mays
MFDRYKQRCDVFLIEELSMSFLALVTVSLGKKSSIFRPPLVSTLVLLSYTDPRL

SEQ ID NO: 44840 - protein, 85 aa, Zea Mays
MCEPTLCFSTSVHGYDSSMFKPRQLGVFMPKIFRALTHQTNAYGVLLYTTITCFLHHPWIIYVVTYYYTEHPFIDYLYTAFLEPL

SEQ ID NO: 44841 - protein, 73 aa, Zea Mays
MSPSLLPMASTVVDLRNRCLVVVPPPSTSCMHEQQQPRDLHVACADPIRAAPTRRCRWLHDFWAARLRCRETR

SEQ ID NO: 44842 - protein, 53 aa, Zea Mays
MNLDGAGMGKWVGVQGVHDGIPSDDAVFSELCGGSIQSAGTMSNHILKACQNK

SEQ ID NO: 44843 - protein, 85 aa, Zea Mays
MSLPIHRRWPLVSRERGRRRSGGRACRRALFGAVRGAGFCDRGDAGRRAEGARQAGGHHRSDPRRGRRCNRPPQRRYMLFWFSPP

SEQ ID NO: 44844 - protein, 66 aa, Zea Mays
MILIVCRLDPPFLFHCNIRLNGMIGRHLQKYAHLMADERKIIQQEICASSSPIELTQHKEWIGLEQ

SEQ ID NO: 44845 - protein, 70 aa, Zea Mays
MSVEGNDVRSERATAAAAPPRASDQASFPVTHGDGSDPPSFPCCRAGVRRPCSHQQGRQVRFALQSRVLI

SEQ ID NO: 44846 - protein, 53 aa, Zea Mays
MVSSSTSRVELTVGRYRGVRAVHLWAMVSPRRGGEVYRGCDTYEEVVTVITRL

SEQ ID NO: 44847 - protein, 230 aa, Zea Mays
MSSTSSTMARLGRTAKVLRRLIASLLLMTTTLHGGAWSACRWRGCATPPRNDRARAGTRWRGIRTGSPRWAGRGLPRWLHTRTPGPRARVGMRQGYTCCAGGWSWARTSGRSALGEIVVAVSVSCARTNEQEPDRVESVFLKRKHMTGGPSMQSKERCLGQRRGQVRRRLGIALARPPGAERAGHSRLGRGRGTWARVRGRVALGLRWAARCVGGARPRRGPTRGGGRLR

SEQ ID NO: 44848 - protein, 216 aa, Zea Mays
MIIVHEYAFRMVEHKWFNILMKWMNNNYESIGRKTIKNECMKIYESEKELIKKSLREAESISLTTDLWTSNQNIQYMCLVAHYVDVDWILQCRVLNFIELDPPHTGIVIAQAVFECLVEWKIEDKILTITLDNASSNDSAITNLKSKFLARKNSSFDPMYFVEVCNQYSVKVGQGLCLDVKTRWGSTYKMLDSCLDYKEAFGYYSEIDNNYEWKPL

SEQ ID NO: 44849 - protein, 67 aa, Zea Mays
MLVKCVCHVLKELGLVSLGVLYKHFTRLRTESFCEVFGGTLGVTNHLADLGQVCDRRNYLRTWIHIP

SEQ ID NO: 44850 - protein, 55 aa, Zea Mays
MNLVTSMELVIGPKSPTFVYIIRMKPHMMSLTILCSTRATLALSAPQQAHPLQIM

SEQ ID NO: 44851 - protein, 187 aa, Zea Mays
MSENFEVEKAKQEISEMVTSRVQKNVEELWDSKERCYETTLECAKKLENSFARVGAYSLEQKFIRGDPEGVIQWIGEEAEAFDEILSDRGDFCAFAGARGVAAILEKAGCEHVKATAQPESIFSADDTKDPSAEASLLGGRFYSDVWMKGGHEMANEAIKKNERESHNAREEAKRAEEVAEHARIIG

SEQ ID NO: 44852 - protein, 73 aa, Zea Mays
MARGTSNAGSPCNTPSRPTSLPSPATTLTLQTKSAYLLVAGAAESKLTRCGIRGMAAVAARHRIWTSPLHNRR

SEQ ID NO: 44853 - protein, 119 aa, Zea Mays
MLHSYRKDLTAQVSSENDPVAFLPKVVALLFLQAYNKAIQAPGRAVGAVITLLKDKLPAATYKVLTDYHSTTVKLLALQAAATDDEEDCTSDRMRERKEDLEERLMPELKSLVLGTNKE

SEQ ID NO: 44854 - protein, 239 aa, Zea Mays
MRPVTMGGSDSSSSCSNPKKRVPTSSLICRRGSLRAEVTVRIHEKCVRPIHPSTGDRFCPLTVATHILQFQLQVGNTLAGSLGLHASVLRILFFIIKWAGEVPFFLFKHCHLLEKVSALIFGRRFVPDCFGMLHSKALNPTLKSFPLRNQLRGQRPRSNLVDEGRHLTSQFSKLSKTEKKILTYRSCRTTDATTPAAAAAEASSPSPSEATQNFDHRSSEVSMSPFAATTRPAGTIDGT

SEQ ID NO: 44855 - protein, 91 aa, Zea Mays
MTNRKSFHPLCLLFLCVLGCWEGSGLLQLLATLLLLGGFGVRIGDLRRLRYLTRHQHCSNSTRGSDRHRLSMTPAGPPAKPNCPTRQASSS

SEQ ID NO: 44856 - protein, 54 aa, Zea Mays
MMLEGKSYLVSCSLLSSCETETQWVYLAHEVLGGKRLAVTMYLGVIMVRDESIH

SEQ ID NO: 44857 - protein, 61 aa, Zea Mays
MAARTLAAMEGGGLHRPWVLVTVERPGRGSVGSPAACSSPALRMVALRQSYHGPRCRASTG

SEQ ID NO: 44858 - protein, 63 aa, Zea Mays
MPGRRRPDHSGENDAGASAGKTRAGPAAAASGAHAATSPSAQVWDLDLLRHSPPQPPPLPLSR

SEQ ID NO: 44859 - protein, 78 aa, Zea Mays
MPWLVPNAVGTCEVDTDERTTASRCQQMHAVMHHGMPLLNVNGAGSGNWEKLTLTGVRCLIEAHHGHGNVTLEVEGGG

SEQ ID NO: 44860 - protein, 75 aa, Zea Mays
MRGDIKGLKTLIMQESCNTPLVTHNGYYQKPHPPNLLNTRGVIKTGNIAKSGSTSFETNITRRGKHEVHTGYKDL

SEQ ID NO: 44861 - protein, 89 aa, Zea Mays
MATHGVASSRTAGFRQGPAVTLRAAAANHAGGEARCIEPSRLGRLAMERNQWPARGGGFDSVTGWRPRESRLEHAHRHRQGVDPVHGRG

SEQ ID NO: 44862 - protein, 159 aa, Zea Mays
MSIGDVCPKESEEPPQAQDQPSSSMQSSPPTQDEDEAQNDEGEDQEVEPPQEESNDQGGDAHDQDEEDEQVPRPPHPRVHQAIQRDHPVNTILGDIQKGVTTRSRVAHFCEHYSFVSSIEPHRIEEAHQDSDWVVAMQEELNNFTRNDVWHLVPRPNQN

SEQ ID NO: 44863 - protein, 53 aa, Zea Mays
MDSFLSYIHDLLSEGKRRWCPNTDFDTDHQSPSLSLQSPSPILRVISLPHSRF

SEQ ID NO: 44864 - protein, 52 aa, Zea Mays
MSCSGYYRLRCTPRGCRSATRRGASVGLHSLGHPRTSLVFVRRGTRGNPRGL

SEQ ID NO: 44865 - protein, 83 aa, Zea Mays
MAAAPSPPWSMPSRRHGTLARLRPGCFTEVPAARAQVDGQAWAWLPPNRIDTFPSSSSFVARSKHPAHGCNVFPLDVVPVALT

SEQ ID NO: 44866 - protein, 140 aa, Zea Mays
MLRRPISSSNRCYTLLSARRMERVTTYQKLDHVRRGPGRRAAPRRRLNHSEKSRAPKTRTTQCDAASTIRAPQWSITGGLPRVGNRRRRTPAYAHRFPPQSSTVGAPGSRMRRGQARAAATGLGCAAGEHQSRGRRHQRP

SEQ ID NO: 44867 - protein, 51 aa, Zea Mays
MLMCTHPCFTHQTPQVVRVATTAQVKMKSWRRTSRSSKSTMSSRRGLAANP

SEQ ID NO: 44868 - protein, 83 aa, Zea Mays
MLLLYIHNTDYSYDNETCDFGGCGEQETRDKRKNKITVSSQSPLQASLWHPFVAPWPGDEQHLCVLRLQRGQLICTGRLFPLL

SEQ ID NO: 44869 - protein, 86 aa, Zea Mays
MAASRRRCPSHPRTPNRYHPTPTLNIKYDEQQGPYRILCYARNSPRRWTALRWRTTHRRRWPRRALTTSAILDSIGTMRIREKLTF

SEQ ID NO: 44870 - protein, 155 aa, Zea Mays
MSHIPYSNAVGNLMYVVICTRPDLAHVVSVVSRFMHNPGKEHWNAVKWILRYLKGTSHFGLLFDKNSVNEIGVMGFVEGIIDFDFAGDLDKRRSISGYVFSLCGSVMSWRALLQSITALSTTEAKYVSTTKRVKEAIWMQGLISELGVTQDVINV

SEQ ID NO: 44871 - protein, 144 aa, Zea Mays
MQPRAWPLARSSTWLPTPAHAHVVLTSAATARLAAAQKPSIPFVYTSLHCILPRPRRNHHALASSEQPQEHRRVRASSSPSSSRHFGAPPDSTRSPCRVADVHGAEFSVAVHVPSSTASLCVSVSRSRFVPALRGIDDQASAIK

SEQ ID NO: 44872 - protein, 99 aa, Zea Mays
MALLLLCSRPRRFVSPSRLTHPPTKPIHPSIIERYNLNVRSGLGDKVKDEDRSKYPASSGQWSLFQSNGVPYCPRFASRDFLKTQLATGSLDRNAMQCT

SEQ ID NO: 44873 - protein, 61 aa, Zea Mays
MFLEYNTSAGTFGHGPFELESKSLYEETQGERRMEQSRSCAQGSFGMMTGKGNRLKEEKAI

SEQ ID NO: 44874 - protein, 50 aa, Zea Mays
MLRCVRERSRPSSPSQLGVAGSLSSYDVIIYLFYTELLLYSKDVTFFSVP

SEQ ID NO: 44875 - protein, 118 aa, Zea Mays
MLLAPLPASHLAAPSHAAPARCRAAPRALVRRAGSPSPSPAAGDLQRTLRSCWPASRSEDEGLAWPRRATAEAPVAPLPPTHQCSPRYRLEPRHASSTRLAARRCRKVSFVFPLRATP

SEQ ID NO: 44876 - protein, 85 aa, Zea Mays
MCRDHLWSLLPSKPLSRRVMPRCARHQSSSCHCSLIRATPWSVSRSPLASCRTQVLWPRSSCNDLSYGASRRRLAISLDVHYTLQ

SEQ ID NO: 44877 - protein, 143 aa, Zea Mays
MPVPLSPLTPLLPAPLPPPPPLPPPGLQGLSRKAQKPASRKSHSPWTNSQKSNAGGNRPGSWIPEEHGWAVKADDPRKGQPRCLDSGSISRGWIAAQKAGNKLNEKKSARRMLEERSNHIRKMASEFFSRAWGWSPVDRRLTQ

SEQ ID NO: 44878 - protein, 51 aa, Zea Mays
MIGPCVAGTLGVSLPHAVVELGDTCSLFNDIKLDSVRMLPVLKSGPCLSPE

SEQ ID NO: 44879 - protein, 75 aa, Zea Mays
MSKNRPNTAALTSGPHVEEEELPCKDKSFLMSTLVSSISLLFFSVIFLYSSNSLCVVACCSSASSHFFLSWSSSP

SEQ ID NO: 44880 - protein, 90 aa, Zea Mays
MTFEVEKDNAHPRGRSNATVTNEQGDYHHKGKCVIGASSSGVAGMSTMHVNTVEVITQNGRYILVYLYVMVNKNIRALLKYCGFTLKGGV

SEQ ID NO: 44881 - protein, 84 aa, Zea Mays
MHTSKIICGCGPPKPLINRGGTYCRCFGNTVDGVQGRHKHFILVRVRNVLTSSRVHYVPYTNVCIGEYKLGRWRARCLSLWCRK

SEQ ID NO: 44882 - protein, 55 aa, Zea Mays
MSQLYYIKGVLYKINKYIVRRQRSSNPKLTGRRRPRPLTNTSQPPPCPSSCGTCS

SEQ ID NO: 44883 - protein, 188 aa, Zea Mays
MSLPETMPPLSGSTPLVERPAPPNAVTTQPLANDHSMLTRGKRGFRQPKVLLDLHVAPLSPVPKSYRGALADQNWRAAMSEEFSALQKNNTWDLVPRPSGANIVTGKWVYRHKFRSDGSLERYKARWVLRGFTQHPGIDFDETVSPVVKPATIRTVLTVALFHRWPVHQLDVKNAFLHGTLDETVYCI

SEQ ID NO: 44884 - protein, 50 aa, Zea Mays
MTSCRQGTCYASLSLLSLFFGVVGHEGLMRVSPVRLPPRLSLHELQRCYR

SEQ ID NO: 44885 - protein, 212 aa, Zea Mays
MAWTESTGVIFGFRAPDLKFQPWRTQVSPCARVLLFLPPLCSVSLAAPSLPPFWPRAPGRSGLQRRRLVPVPRSCSRPCSSRPCGPPVRALLSLSSLSSLPASFPWRAPVRWPSARRACSVFPARAEQLPRPALCPVSKLAVEAPLPRPWLGLRAVRAAPRAHPNQTVPPSARSLPCSSPARRCFTSARTLLLSSVLSISPCSVSSSPLHDG

SEQ ID NO: 44886 - protein, 187 aa, Zea Mays
MVFALAIGLATRDDLWMNAGLVRGALGNPGAWRCLGHHELLTGAICTAAYHTSPWPPVGREERRGFRRRRAPVQALLHSHLRTASLGAPWTMASAAPPRVEQRENEGERERRALRGHSGSSSSIRIRGSRPRPRGGTYVVAARGISRRTTGEAPRLWSSRTASPTSIFWVKSRYRRMRRLEDAAMCS

SEQ ID NO: 44887 - protein, 76 aa, Zea Mays
MTFAEYVDVYSPLLYTPNPPLPQVVHVATTAQEKMKPWRKTSRSSKIMTSFRRGLAATPSRLPVKAVCIFSHFDYC

SEQ ID NO: 44888 - protein, 74 aa, Zea Mays
MCALQFSDLAKQTVASTGHMLPEIPSDRPLQMYEKQLSTSDADELKVLPKCASYNGATHLARKNVERRTNPQRA

SEQ ID NO: 44889 - protein, 85 aa, Zea Mays
MDVCFHHRQGQGDSPYPGGCFRGVVGRIGPPAPTELLTGVSNPPQIDLRAWTTSSVPIPSMRGDDELEVQPLGQHLNYKVISSIR

SEQ ID NO: 44890 - protein, 118 aa, Zea Mays
MAVAFSLLAFCARPLALALGAQSLAELALMPHPQAPSRGIACTRPPCPVGLQSPSRAAFSSSSCASRSSDRVPSSLLAPGSRVLAMFPARVLLPARSCKLRSIARSLLQFASSFSVRA

SEQ ID NO: 44891 - protein, 288 aa, Zea Mays
MALSNLRSEVIELRNEGLEKDKILHSLIDKIKEDEATSKVQVEAQRHEIEDLRKQLARAKEERTLEETKREISEQWANHLGKSVEELRASKKRCYEKSMECVKKVKTSFASVGAFSSEENFTKGDPEGPIEWISHEAEAFEEILNSHGNICAFSGARGIATILERKGCEHVKFLAQSEAALSSKDTKDPSAEASLVGGKFFTDIWDNGGRKMAQKIIRKSEKGIHDARKVAEAAEKSAEPEGQIEPVEPSAGPHVKGDDEIRRMAEAIMDKVVDQLLNEAAEVVLRED

SEQ ID NO: 44892 - protein, 202 aa, Zea Mays
MFGTALLQKIWNLMGLVSVSNIFTRAVIQNEPYNYLPVHEQCAADSLAPTDAAISSSPGSGRAGSHRPPVRAQRRSRRAGCSSSEDEASRAGRRALDRSGGSRGPREGSTPHRRAAHTAASNSIPSLSLLTLMIAMISSFPRSLFSPLPALLLSPCPKGQYAMHCTPRALLLRSMAAGGSASKCPSIFSHALPIQTNTNSHY

SEQ ID NO: 44893 - protein, 83 aa, Zea Mays
MVEHGRRADGEAAQLLHATIGRARGSVGEASALASRAGPPRRRATLAALHGPRRAGHAGCSPRATPAGRQDTGTWGWGRMRQG

SEQ ID NO: 44894 - protein, 59 aa, Zea Mays
MQLVDDPRKDGLNQWMLAKRVPPSKHYLSVKLKASPGFMHNRYICYFTTLNICRLVPCT

SEQ ID NO: 44895 - protein, 84 aa, Zea Mays
MPIFMIRNLLVMLIMIGAMIILVLILMHLIFMLWLHLTLHMLMIEKGLGVIMLCLMCLGKHALVLLLFTIHVMLLLYSHAKMQK

SEQ ID NO: 44896 - protein, 124 aa, Zea Mays
MAGSKLMARGRGGRERDVHYAPAAAPLKEEARAPSRVRLCEARGERDGSSRKRAEKYSYSPTCNAPPPAKPSVSTKRPNPSSLSSAARTAVCGQCCVVYLYCGLRPLFWASASTALFVCVGLLA

SEQ ID NO: 44897 - protein, 138 aa, Zea Mays
MGSSTRQSGITRQSSRKLLRCGPSWTGRQPCRNQVWPPLPCSRRPRSHIHRFWFGLGVWVAVYCSPEMGGSAWLFIIVAGCQGSIIEVMCGLVQIREMSVSGWVNRCIVWVPECLIWVSPAWSPPQRARRHYLCSTDK

SEQ ID NO: 44898 - protein, 143 aa, Zea Mays
MTARNRTRRRRSARTGGARSASMASRGGTRPTTRRRPWEKQRPGSQPREGRRGAETRAAACAQGGRRSGRAQRGATGTVEQATRGAGSWAWARRWRANRARPMNGTGGSSASWRPTRVGEARRAMGGREALGERERRREEARG

SEQ ID NO: 44899 - protein, 70 aa, Zea Mays
MWGEEDQVVWSMRLPHPLLQHGPCILPKVEDRSIMKKPKGRESENLPNVQYKDRRYITKGPQGTSSTSEE

SEQ ID NO: 44900 - protein, 203 aa, Zea Mays
MQEGHVVAYASRQLKRHEENYPTHDLELAIVVHALKIWRHYLLGNTCHIYTDHKNLKYIFTQYELIMRQRRWLELIKDYDLEVHYHPGKANVVADALSRKSQCNCLSAKPSTVTLCQEMERLNLEVVQQGAIASLTLELTIQSQIVDAQKVNKGIAHIKERVVAGKVTCFIIDGNGVLWFQNQLVVPNVPELHQQILDEAHLS

SEQ ID NO: 44901 - protein, 112 aa, Zea Mays
MARGTPQPPAEIPSSRRVGGLRSLPIACGQCPASTAFRRLIPMTPHPIPGDHASPASVESSPTPFLLPLPPLPHSTPPQGVGATARYVPNPAEALWRPHVSHRGVSTARPSL

SEQ ID NO: 44902 - protein, 139 aa, Zea Mays
MHPPTKPLGDQLLTATTLSAAHTYAGRPLHQPNTHSGLVHPTTRRSWNGSDDDSTSRRRPVRDRATQRHRRVNSTPPNPSMLIRAVLSLRPSRGGLVGSPVAAAADTWPTARRSALSLEAHRAPRVGSIGARGVSRFRF

SEQ ID NO: 44903 - protein, 151 aa, Zea Mays
MMVRKNATEYLCRKPENHMYGVIATETRRVESRGSRPGVAVAVAVASTCLLHPVRFTRPHAPIPLFSTIPVFHCTQSKKTRFRSAIYAHICKGLSVNHYTIKISERTGCNAVSSSRPEGSAVDETATAATAIRGNICNRLVDRATWVTCAP

SEQ ID NO: 44904 - protein, 110 aa, Zea Mays
MDQAVSLAARSRRFESSFYPCKVNLNTRHVGALRPHTHQPSPSIPWQQKGAHRLGVQCLTDPDCRRAVTALVPTITGMGDHVSGRVRRAICGQVHSGTRLTDLPYFSVCV

SEQ ID NO: 44905 - protein, 174 aa, Zea Mays
MHVRPWSAGMHACSSMDGEHARGHELIQTLNDNHRPPPPRARPVASPGPARNIPAGADAPTTTRRAPIGRGELTSRGTPRTTCPSRPPRARHLTATRTSTAHSSTSGRDATKPAGPGRRRRRRICSCRRRVAARAPHSPAATWGSDRPYGSDTSTRLALSLAVPCYIYTRPWLR

SEQ ID NO: 44906 - protein, 102 aa, Zea Mays
MRGPRRPVRVRQPAGEQPRDDRPWKFPAPVPSLYAIAEIAIRFRALRDRRSRVGDQVIWFFEFYEAEDPEHLFGEDKCSLTHYVPFTLQFTVPHTMNNLRID

SEQ ID NO: 44907 - protein, 183 aa, Zea Mays
MGWTTGPISVTVKHTLGFRSPSPLLFRRLFALLSCSGGCACAAAHLSLSNTALHLPPRCQHLTVLDGGGPAAVCSGGGPAAISTKMSTSTDALNRCWTADRLARQGLEHPEHCLFCDQEEERIEHILLSCVFSREVWYMPLSMVGLQQGFTERYSKIGRNWQRYKCHPYKGKDLTPWFHLWLG

SEQ ID NO: 44908 - protein, 73 aa, Zea Mays
MHAAGNSASFFSYRSEVACAIPLSWPYHTFRKIAHMQQQSMATMSSEAAVIYPIEDGLANPLPDAYYAFPADS

SEQ ID NO: 44909 - protein, 88 aa, Zea Mays
MVSTSYFRDHNNGKMHGPCLGLELDEPTKISPDQLWLAKAISCAVPTPSLEKEVSHMAGFYGNTKYQLRSNTCAGYLTWKKIRTMVFE

SEQ ID NO: 44910 - protein, 108 aa, Zea Mays
MEGAPQATLRRHREHCSVAYHRCRPWQSLLRSLPSTSTMVVVAPPPTIDAGHGSRCSATSCCILPLMGTLDLPVLPLPSLVSVEGASPVATTTVGQGKWRWRHWRGSQ

SEQ ID NO: 44911 - protein, 126 aa, Zea Mays
MSLVCHLHFSTCRSVRHFWPPVSTRICGRIVIFMSPFCHPWFHPQWPMMLFLASCDLWHTLLRPNNFLHSSGLPPTFWTLRLVRLFLPPVTYNTCFLSSNNDFMSPIPHPCFGPKQGKATFCNTLE

SEQ ID NO: 44912 - protein, 78 aa, Zea Mays
METEYWLWCRLCKLSVSKTEFGSVLFQIPEFEFLCFHLKLVFNLRCVWGQLVAIETKIKSDYRGTTPSRGVCRALMWN

SEQ ID NO: 44913 - protein, 61 aa, Zea Mays
MDTSMLGRVAALLIRDLGRSRVIFLALARGQELIVSTFYHNDDGLLTTVHGDASSLRRKLE

SEQ ID NO: 44914 - protein, 88 aa, Zea Mays
METGRLAVFSAEARMVRDTEPDGPRPGVGALLLCVRPDGPRLGLGRSTMAQRVFFFTADLDLTFREGPRRGGEILGCVLASTDHPRCL

SEQ ID NO: 44915 - protein, 90 aa, Zea Mays
MTRDVVFNESGKWDWSGEDQAKSNMVNHSDAPLTVEYREVFVPKMGDEERVLDSDVLDGSPVVSDAGGHNHNPLFDSREDEVSRSFGTQM

SEQ ID NO: 44916 - protein, 121 aa, Zea Mays
MSYAGLDLLNFQLYTLEFSKGSYHLSCLHTMQFTDYTCLSDIYIYTILKAPVLTVVPRHLFTNNLSQLFQINLLHAYRWPNGGPAWARRQRAITLAQACHAGLLTVSGQPVRPSAHLIKST

SEQ ID NO: 44917 - protein, 68 aa, Zea Mays
MCPMWRATGQGSYNPKKITGCSAEKALHQNNKCETRKNPSDKRNEQDISAKISYQSNAHKLRTLHANT

SEQ ID NO: 44918 - protein, 99 aa, Zea Mays
MEEYAALLANHTWDLVPRPPNVVTYKWFFRHKLTSDGSLDRYKARWVLRASPSVPESTTTRPSTPSSSSPPFGLFSPLPSPGTGRFIGSMSKMPSSTTL

SEQ ID NO: 44919 - protein, 96 aa, Zea Mays
MQHASLALWPCCSSWPRLHCLFPSPPPRSTTATLLLDVSPHLGPASINSLPFASCLLLDTWEGEQPPWSHTLALPSSRTPPPSPLASSMPRKTNGL

SEQ ID NO: 44920 - protein, 158 aa, Zea Mays
MSPVFSPWTRALRLPCRACFNRAAPGRSSFLSLLWRAPCSSWLVVRPLQHRAPLCSLVPSSSPWPPLVAAPWCSDLAQPSSSSVTYGAQLPLLPLLRSSPSPMAPSSDYALLLDLIVLAMATLPPCSALWSSPTQQHCISFSAAVVIFGGQEAAAKNK

SEQ ID NO: 44921 - protein, 91 aa, Zea Mays
MSPSSRPLLLLSSPQNSSRSELAVVHGAPCNLPPWLFDGMPVGNLCCAQQPRHLRALSARCFVKPSGQHAADAHRGLLFLRSPFVVVVHPR

SEQ ID NO: 44922 - protein, 68 aa, Zea Mays
MAGQPLIARRSHKTTTDPPGTAANLNRAPILDCAQISGKCRGQNRRFPKTQTTGAWSAGLFLRNPGTP

SEQ ID NO: 44923 - protein, 81 aa, Zea Mays
MSVGFESERNLWNWNQISDKYSKLNHFTRMYCVETCSVSNYTLYIYEITFLALCVRGVLFRSISLTFQHFVLYHVQVYMVC

SEQ ID NO: 44924 - protein, 265 aa, Zea Mays
MSSSTTHGRPMKSMLLSKALKMQQDLEDKKHEVIIENLESKIKEQSAAIEKKNFELQATEGLLAEAEAKITELNTKLLCQSGQFEQEKQELNAKLEAEVQQNSDLKKLLAGLQEKCLEFSNKCIQRLRKIFHSVGVGSEKFTPSAEDLPKTFEHIEGEIDELDEVIAGHGDFCAWVASRGTAAAFLKAGCDHGKIVNRPNFTLSPSILDDIPDLARSISNRFVKMKWTKGGREKAGDEARSHLEPVRNHTLCLPLPSSSILTNNN

SEQ ID NO: 44925 - protein, 105 aa, Zea Mays
MAQSCSATAPSVINGRRSPHLVLAWPCPDRAADCRPRRCFKALGHRRRHSATCLLVTTLSSATWLCWTLCTRRHPVVDLRHVVPPLFGLVVTLFFCVAGVHGLAS

SEQ ID NO: 44926 - protein, 169 aa, Zea Mays
MPSDCGDQTQHTGVFAAMQEYTCSTGNNGVIYPQSGISHSSGQNGAQGTYLQHQHFEGCMYMSGNGQMCGPYLPEQLYEGLSSGFLPQSLAIYAVFGGKTVDPVQLIFLKQFLSQWNVGAVASTPNVSTETERVTSHAKMVFPDSLSSEESCWMFEDAEGCRQGPHSLA

SEQ ID NO: 44927 - protein, 86 aa, Zea Mays
MSFLTYITPQIRIWGSVAWSSRISAIPPPRRQATPSRSCSGLRVTMTNPSPFDVTCVAEVRSHVPLCFDRLLAMDPRSSGCGGIWP

SEQ ID NO: 44928 - protein, 125 aa, Zea Mays
MGWTSTPVAWSSRKLHFMNFVSPSQLPTTPLLRFVMVIGVAVILDQLVLVVVLRAEDPEFHGRLVRVLEVVVEHEASSLVDVVCLDLLVLPSLVAVVPPVVVVPIFQRQMPLTVKRTMTTIALHR

SEQ ID NO: 44929 - protein, 64 aa, Zea Mays
MIGCSLSFFIMLNCIMYVLLFDWCMFIYWCIISFVRTICESIIEADFVVEDQNTFEDDPQDTFE

SEQ ID NO: 44930 - protein, 110 aa, Zea Mays
MAIWRTCRRPYDGAVIHQGAPGFLRCIRVAAASAPPPRTPALGPDAAYSSTQHALDVGAVRRESTGTSDWPSGPRAPRLRPHDSMSCSRRGAHRTPPVELISPRPFPVPG

SEQ ID NO: 44931 - protein, 126 aa, Zea Mays
MVFSPMQMVGKRPDTQAGRLAGWVWSRACHTDCCMRSRGARPPRRVCRGGARRRAPPWLCRRAADRTHGMGARASYLDDSCNHVLSLSDEHGDTNGSWNLVFAWKGYGSYWTGGASVPICSLETVG

SEQ ID NO: 44932 - protein, 52 aa, Zea Mays
MHGDQGRGFFFPDFPLTQNYLFNVFSYRICVPSLGFQVVRIIGSAFLGFVTR

SEQ ID NO: 44933 - protein, 175 aa, Zea Mays
MQMRTRASNHGGRTTIALVFFFLQSSAPHAASLSPYRLPPYVSCPLMTCSTSTPRCAAASHIRPAGRQGRDAASGRGPPTWLDNGAADKHAWRPRPSLGPTGSQSQVRSVEARPHAHTTGSTGPRGAHRAARCRHASRRDWSARVRWSRCPGSSAAASPRRTEAWVGLVTDEMSS

SEQ ID NO: 44934 - protein, 66 aa, Zea Mays
MSVKNQASHNRDAGPDLRLSQKIKRTACQCQGRSARSSTPESGADEADPTGDYIIACVYGRRWALF

SEQ ID NO: 44935 - protein, 91 aa, Zea Mays
MFILCCSLFYAILQRGCCRNFIYGRRKCSTVAYRVVCGTWSVTVPQAMSSFLLVSNAHMNTHNPGAWTCLVKSYYSFVNIICNSSVRFILK

SEQ ID NO: 44936 - protein, 82 aa, Zea Mays
MPTTRPWPIPEHLPCVPSPSSRSCSGHTVSSSATSPRHVRQNVAASPVDMCSVAASSSLETPSSSRAPTRSAQPWSRCRKTR

SEQ ID NO: 44937 - protein, 61 aa, Zea Mays
MEFAFIRSSHNCRRFVCPCTWATSAFTPAKGYRGERPALPSCGLEVEDGVPAVGSAMDVCD

SEQ ID NO: 44938 - protein, 52 aa, Zea Mays
MFHLTLALLNAGACCSSRGVGSSSTYTFTLIITLPRRSYDLIRNFLSKDVCF

SEQ ID NO: 44939 - protein, 72 aa, Zea Mays
MSTYALDLQLYFKRYRCLNLGMSLSKRQRKTDYRVHLVDCFGLIRYWNLIINCIQNLWGILCRCLWSFCLLP

SEQ ID NO: 44940 - protein, 55 aa, Zea Mays
MRRARSTCNASKVQHNRRRGRASLPPWYARTAARRIWNHRALSLEARAGRPAAPV

SEQ ID NO: 44941 - protein, 122 aa, Zea Mays
MLNDTLMLAVAALNPEALYTSKMARKPKFQHAVTMAIKKLSSSSSKASAAIDQYSFFRKQARLFGGEEAKDSALNGRASAGKSLLSRFILVLSLRVASLFVVIVLFFHIFLADWWDQYGGDY

SEQ ID NO: 44942 - protein, 71 aa, Zea Mays
MCTHPCFTTKHQVVRIVTTSQEKAKPWKETSRSSKITMNSRCGLAATPSQLPVKALSLLCFASTLIYLLRQ

SEQ ID NO: 44943 - protein, 65 aa, Zea Mays
MVQVHLFPFNSPLRLNQANSSIWLVSKGQVVTQLPQSMCITYTRTCEVQGMFVQLEHHNKQQNAE

SEQ ID NO: 44944 - protein, 59 aa, Zea Mays
MCVVSVTHTPHICVIISELYKFSISDMHVCVAECNMISRRSFMVPISMLVPVKGLGIST

SEQ ID NO: 44945 - protein, 74 aa, Zea Mays
MHAPCTRNWPVGCRTVLLGRHASCATIRWRAHLVVLAVVVQMQNVLRHVILISHRIGTNILFFVTGVHQYFLTL

SEQ ID NO: 44946 - protein, 54 aa, Zea Mays
MHEWYMVASCNTPGSTNNPVCYCTTLPTSIYKISAASPLQDCIKEGATEYKHIS

SEQ ID NO: 44947 - protein, 54 aa, Zea Mays
MSHFIYFLMSANVCKCKDDFCLHTSKDMKPHRTPPRATYDAKNVPVRSDHKITT

SEQ ID NO: 44948 - protein, 188 aa, Zea Mays
MDTSLGRRARPRLSSLFVVVLRRRPTLARRPRRSSPLEHLCPRPRHRLELGAPLSTSLDRLIHRRPELHSLSAPERKKQRGEDGAHSPNDPREHQRYPSTQAGSFLPVVVEEVPVEHHLHVGNGVILEDSSEEILATHTPLSESHAFAAGASSSVPPVPAPQAPTPIGDDPDDSGDGGDDDDETNEST

SEQ ID NO: 44949 - protein, 58 aa, Zea Mays
MNGIKEDIKTLLTLELGSPLFHEVLVNLLVRLKALQVQFLCYPITALVVLYLPNVHCL

SEQ ID NO: 44950 - protein, 58 aa, Zea Mays
MLHGVRSCSIALRLVGWLMVSPPMPTLKLSLGKNFRDNFYRYHVPEGLMIVKEFLALK

SEQ ID NO: 44951 - protein, 365 aa, Zea Mays
MPIADTLINNASGNRIISFLDGNAGYNQIFMAEEDASKTAFICPDFIGLFEWVVMTFGLKNAGATYQRAMNLIFHELLGNTVEVYIDDILVKSAEFSSHIADLRKAFDKMRRYGLKMNPRKCAFGVSAGKFLGFVIHEHGIEIDPDRIKSIRNVGPPTCKVEVQRFLGKVNYLRRFISNLAGKIDAFTPILRLKNDTEFTWGAEQQEAFDLIKKYLSSAPVLKAPQVGAPFRLYIAAEDKVIGAVLTQETEGKEHVVTYLSRRLVDAETRYTFIEKLCLCLFYACTKCRCYLLSSHCTVSGQADVIKYMLHNPIMSGRIGKWAYALIEYDLAYEPLKSMKGQVVADFIVEHRVNDIHELDMSYLT

SEQ ID NO: 44952 - protein, 134 aa, Zea Mays
MGGGSAARARQDRVRAAPAAGGDGAGARSADRSWPTATLKRGRRRGVASGRGAARGPGAAASWRSGWRGGFLAGRLARRLPGAGARPWRLEARGWQGTAAPRGARRPGERGARRRGREKRGAARSRLGEMGRRR

SEQ ID NO: 44953 - protein, 147 aa, Zea Mays
MIGTTHPQAVQKDGTRKKRRPPKARRRPPSVSPRGAAPCRHGARTQQRRAFARGWGKPGRRGEAGATTARGGRADCGLVAWCRMAPSGTHARYLTCRPRCGKGGRRGGVLWTGVEVEPWRWKRRPGRLGFERWTEQRGGGSTQTVDH

SEQ ID NO: 44954 - protein, 61 aa, Zea Mays
MFNGCLVYCSMRLGVPFIAPRQLGAIRAPFGRQFLPSVRWHTRHVTPQVPQTTQNATELHF

SEQ ID NO: 44955 - protein, 120 aa, Zea Mays
MKNDKVSLFMKLISYVLAFYFISTNVKQVYKHTLGSLIRDGMKVLRRLSSMKLWLLKKVLYAEHCSPIYREDELPLYKITIMLLKVLYTLFTNDIRVVLYFLLSLLRRSWPSSYESFSAA

SEQ ID NO: 44956 - protein, 309 aa, Zea Mays
MALNMKTLTQALAKASAVIEKTVSTTVQEVTGPRPLQDYELLDQAGSGGPGLAWRIYTARPRDGAPSAPYPVVSVWVLDKRALAEARARAGMSKAAEDAFLDLVRADAARLVRLRHPGVLHVVQALDETKAAMAMATEPVFASVANALGCLDNVGKVPKEVKGMEMGLLEIKHGLLQVAETLDFLHNNAHLAHRAISPETVFITSNGSWKLGGFGFALSVDQAAVGLSLTSSQLFHYSDYDVEDTALPLQPSLNYTAPELVQSRDSKVGSACDMFSFGCLAYNLVARRPLLDCHNNVKMDAIDGCTITS

SEQ ID NO: 44957 - protein, 120 aa, Zea Mays
MHRSAFSPGLSRNPHIQKISYCPPSLSPSSAAARPVRWRWSHHSELCVGHCRYSYTATLYHLSHTQLASIYTTNTIRSHTTRLLSPPVYAAAERGGSRSRCRWIQAISDSSLGRQWRQLA

SEQ ID NO: 44958 - protein, 154 aa, Zea Mays
MAAPVLSPMRTAQALGTTPTMKSQGSGRTGRHGWLQLLPRSEAPGGGWNSQWNPPDPGSERRDVQSPIEIKHQSAFFLHLVPNLKHRLARQPNSYGSWRLATRILLSRWRGQPPAGRSIPSRLPFGKAAAWRRNLWLRVEGWQADFCGLHEMAG

SEQ ID NO: 44959 - protein, 248 aa, Zea Mays
MATSSSTITNPFFGFQVTEKLSKNNHASWRAQVLAAIRGAGYEGHLNGKTKAPDAEIVEKKTDDTIVTNPNPAFQVWYSRDQQILWLILASAGKEIQPQIISAETAEQAWSTVEKMFSAQTRAKTMNVRLALTTTKKGNMSITDYVAKMKGLADEMAAVGKALDDEELAAHICNGLDVDYNSVVTSVTARTDPISIPELYAQLLSFETRLELQDGGSYAHVANRGRGIGDNNNRGLGTARGRGQRGRG

SEQ ID NO: 44960 - protein, 66 aa, Zea Mays
MVLMLKQLNQSWVGYSICSPHNLEMCHLKSLTAKSLSPLALQFYLINRHLDSINIMYFSMSSCTHR

SEQ ID NO: 44961 - protein, 96 aa, Zea Mays
MRPVPSAGRRRQGHPAGSAPAGSAGKQCARTKWRAILILSSTRSFPCTPKIRRSRALGHKKMVSATDISRFQALYSLCPWTHMSGSSPFVHAPLQL

SEQ ID NO: 44962 - protein, 54 aa, Zea Mays
MDPTRFPKTCCSPITNVDHRGCTEELFVYFVAWRLQIDPCLISVLPTHPEPSDS

SEQ ID NO: 44963 - protein, 131 aa, Zea Mays
MIEMKRLSDTNTSGRCLIHREVKQENRRTKNQYILRKTKSLGDLRDEELNGDTRALAHGGGRRHLTISGRRVFARRTRRGRRARSPCLSDHRWRVRRRVVLRRQGSHGAGTQWKQRRGLRRHMVARWSEGG

SEQ ID NO: 44964 - protein, 68 aa, Zea Mays
MHSCLSRVQLPFIRVISGYLALLVCTTSLLEVSAHDSVIWSLPPWVECSTSLPEALAQDSVVWSLPHR

SEQ ID NO: 44965 - protein, 58 aa, Zea Mays
MFGGKKRLLHLRALRCLIPRFGAVFLCFCLISCRLDGSFVLGGVNLPCNSTVLCAEEL

SEQ ID NO: 44966 - protein, 134 aa, Zea Mays
MPRSSCDHRALLPSGPLDGVRQWWCHRSCLLPAAIGGVQPHGGWHPFATIQLQGFLSCSSAAVPRRRPPRRMTTNLVVERSKPGCGFPPALSFKDVHHLRWGGRRVEPGLCLPRGPAARFFLQHSGEERGSPAM

SEQ ID NO: 44967 - protein, 197 aa, Zea Mays
MVPLPSRRAHRSGSFFLATTLSTRMPPIVLSPHDAHKEPPSPVHVEFLYGSSSPLMASLLRHWNCSLGAADFLPPVSRPAPNPTFCARPSPVRPGPRCPNRGKEACARLSPPVRASPIAWLTGAPLLRARPTEPWPWRPARNRPCPCVPPVKCPLADSHASPPLAMATCYSASYRSVQQGSRRVDPPPAAVGRALSV

SEQ ID NO: 44968 - protein, 66 aa, Zea Mays
MTCTSHHPSCILKLCRDLMVRPYRYIFSIVRCPRRGTMRLHILRGMKAEVILAFADICTHEEIYEV

SEQ ID NO: 44969 - protein, 86 aa, Zea Mays
MQAIGCDQQTLPEFGSLPSAIFFAECFISGTRQRALCRVPRKKPSVKENTRRRSSLPSVLFLTLCKEFLCRVSFFDTRQRALCRVS

SEQ ID NO: 44970 - protein, 78 aa, Zea Mays
MLSFATQCSSRLKGIFNSVGATSEEVSHSTEDICNTPGSTNNPVCYCTTLPTSIYKISAASPLQDCIKEGATRYKHIS

SEQ ID NO: 44971 - protein, 68 aa, Zea Mays
MQQVLQLRARAVVRRSDLSYIIQWASNQFRIIQFITSPLNKKMISTMTRCCINAIHTRCQNSKFLVLF

SEQ ID NO: 44972 - protein, 81 aa, Zea Mays
MLTLPLLNMNNEVSALEGQKPSCCSLSLNFEYQALGGLFQTIYCFIQLAYMMWEFTIFITSWLSHVDIFLKNTMKKHVFYI

SEQ ID NO: 44973 - protein, 98 aa, Zea Mays
MATAQLPAHPSSSRAHPDSPPRTPTSMLANSLSLRRRAPPPPLCSLAPGRSSLAHRCFSLCAAASLSPSSLSHGAPLSLSSFPSRALWSTPARRGGPH

SEQ ID NO: 44974 - protein, 94 aa, Zea Mays
MYGRLDVVLLHSDFSGDTVSIVFPQTSPAASTPRHLCSISPPWTLPLSSHRLRPCCAGRCAVSAGLLVVAWSWNLLSVVRVLPLHRAPTTTHRC

SEQ ID NO: 44975 - protein, 78 aa, Zea Mays
MPRFSCIHRTLPPSEPLDGARRCSLGGSTSGSPPSGLTAGELALFVSCAVVLPILSSSCCCWRGATSWGLALFCHRSA

SEQ ID NO: 44976 - protein, 57 aa, Zea Mays
MVLYICLAFVPFAAPRPVYLCHVLAVHDRFRTTTILYHAYFYYLGTSETRKQSRCGH

SEQ ID NO: 44977 - protein, 98 aa, Zea Mays
MGKLSLGWTNTRKAGLQWEWRDGESIVYPPGKRLDGGVLSSRLAGTRSGLEKPVGELTYARVKCYICRVVGDPQLSINGFGSPLLLGYEDWITALHRS

SEQ ID NO: 44978 - protein, 179 aa, Zea Mays
MHTLWEPHLNALKRVLRYLPGSLDYDLLLRPSPTSKLVVYTGVDWAGCPDTSRSTSSYVVFLGANLVSCAAKRQPVISRSSAEAENRVVPNDVVEASWMRQLLHELHSPFSAPPSYTATTSALSTSSRISCSISARIMWRLTCTSSASVSLQVTFGFSAPPPRCSLSTSSLRGCRRVYF

SEQ ID NO: 44979 - protein, 152 aa, Zea Mays
MQVAPVPRTMLSTWRFSGVRRVLFVPLQGPSSRHGARRVAHTVTRLVARAWGKGKAGKWQQGAVPIGEEIRRAFCGCADEDQANRTNNHGIVVSPHTQGFTIRKRIARMIMASCSCCSTHVIRDGILDRIQSRVGVLRSTIHALQFFFGSST

SEQ ID NO: 44980 - protein, 57 aa, Zea Mays
MLGLCRRSSGTNLSEKNIYTVLPVIFPPSQCFARFSNTSHSEYLIERFLLCTCSKPK

SEQ ID NO: 44981 - protein, 69 aa, Zea Mays
MCAANPIPSCSLQEFFLVIISCKRETRWVGVFLWLHLVFKHAAIPVVTLTRIRHSIPGLYLLTNKLIKM

SEQ ID NO: 44982 - protein, 126 aa, Zea Mays
MQTTLNVHVILMKHRDDDTTSMAGVSLGWAYDADEAPLSSITSPNAISPKVAVGAALASAHRAELDGSPTDSAAGVSLRAWTGYRVVVAKTVASRPWRRGDRTRTQDNLVSLGTKYRERSNKRKII

SEQ ID NO: 44983 - protein, 91 aa, Zea Mays
MLSHVGLLILPSQAPSRGRPGPSQVSTHSLSLESSPCLLSARLIPQHRSPTRSRSAPAPRHTSTTHSGTCFLPDWIPQHRSVSPWPRAIAS

SEQ ID NO: 44984 - protein, 71 aa, Zea Mays
MISTSSLARIGISSACPAATCRRVLLQRPRTPTHGSKEGATATKESSKVVAKHCHRCNSARINRSPCSWSC

SEQ ID NO: 44985 - protein, 67 aa, Zea Mays
MQMPEFTGLQSMAKTRFRVQFCPILFAKKGGLFCQESMLLLLSNNAIGNSEVLARYKCNVQFVGKQE

SEQ ID NO: 44986 - protein, 179 aa, Zea Mays
MEVTNVPAKTRSWDTGGVQPCRRTGGGAGKTLATSTVREVFETSQPGEDDERIRNGMEEMIRVPEKTTNAADEQRGVWSRSPTRCGGGGGGGRGRELSRERGGNPIANSPPSRGCVGRAAFRFLYAGGFCGKRDRQKLVQKLDVWPRLQLLAARIRPESQPNRGILPPFRFSCRWIVQN

SEQ ID NO: 44987 - protein, 61 aa, Zea Mays
MAARAFRVLLCTWPRALSACGAHGRRVACSRAVSRIINSPRLEFLVLTILLIYLTAVSVAN

SEQ ID NO: 44988 - protein, 92 aa, Zea Mays
MGTRLLYFAHVKKNLPPTKHFLVSIGTRYIFACTVYDHLTKRDSRLSALNKRWFSFAALLALKELLSICCFGRLPLLAQPNPYCSALQQKSW

SEQ ID NO: 44989 - protein, 332 aa, Zea Mays
MPGNQSLMERFLKRKLPPASDSNDPGADGETSRRGANASNTNLDRTASHRPLRVSRNQLMLLILGHANALSLSLQRKDKDILEAMVEVKLTKQRFQQIRDDGWDSLLEDVLSFCEKHGIPKLDMDHEYINRHKPRQRTNRTNYQHYRYDCLNPVIDLQLIEFNDRFNEVNSELLTHMAAFSPNNSFGAFKHESLMELAKAYPDDFSPVELDDLSSELHCYIDNVRADARFAQLGTISEHGKLMVDTKKHLAFSLVYRLLKLVLVLPIATASVERSFSAMKIVKTVLRNRIGDDFMNDCVISFMEQELLDTISNNDVIVRFQKMDGHNRRVKL

SEQ ID NO: 44990 - protein, 94 aa, Zea Mays
MVNHHRMTTRGKRGLRFPALFEASALSPIPRSYRAALADPHWRAAMEQEYAALVGNHTWDLVPRPPHSNVVTGKWIFKHKFNADGSLERYKCNT

SEQ ID NO: 44991 - protein, 209 aa, Zea Mays
MHPGCSLPPVVIYNDDHQPRGGEKRAGVRLPPTLSFKDVHHPRWGGRRAKLGSCLPHGLVTRFFLQHLEEKDVHQPCGGGELRLHGVGRLQAPSAAACLAPWLGWLWHRLQRCLPPLTRAWLSVYRTGNGRAVRRSAASVASPVLPAALFRRRPESHTRRRTPWRWRPRSWMVLSLLRRRVGARTSSCAVRWPPSPVSHQCRGGCCRRC

SEQ ID NO: 44992 - protein, 58 aa, Zea Mays
MFYKLHGLSSTLISDHDLVFTNKFWHHLFRLAGKELCLSSSYHPHTNGQTERVNRLRR

SEQ ID NO: 44993 - protein, 128 aa, Zea Mays
MLPPSSPAITFLAARAFSLRRTPLTLLQPRRRHLRPPTLIPTAPSSSPPQPHLLTLGLPLRERAELCLSYARLCRAPSAPASPASLCRRRVLVAEHRHQRSFLNFGSACSSPSRRSGSGVLGRLAPSR

SEQ ID NO: 44994 - protein, 111 aa, Zea Mays
MIFMTFISMHSIIICVVFSSAYMRCTRLCSLNPGVTGLPKVSTTTTTTPRKRRMASVLDAVLQFTKTPTSAFAGAFDKKTEDAREVTTASATSIHVETGPSGAAPVEMMKE

SEQ ID NO: 44995 - protein, 353 aa, Zea Mays
MHSMDYAKMGSSKAKETIRGKRVTVVGYLKSALDIAAECAQVNGTAHPCTMVVRTKHWVLPDYFAWGFHISRLYLNRFSELLIHKPGEGLLLSALATLLSPLRWAFSKFAESYYSIPMRKHDMVPDHSLFQALAAATIAITPKDHYKRLDEGSIVLKKSKTFSFCKDGVVVVEGEPSSSASAPAAAAVVKSDVVIFATGFKGDDKIRDMFTSEYFRGVAVGSASTTVPLYRECIHPRIPQLAVLGYSESISNMYTSDVRAKWLARFLDGGFRLPSVAAMHQDVLAWEKCIKRYSGRYFRRSSILLLHTWYNDQLCRDMGHNPRRNKGFFSELFDVYGPGDYAGLTSCASSKEH

SEQ ID NO: 44996 - protein, 55 aa, Zea Mays
MNVCELTLVVLTSPPGQGQAPLDEALEGCGDEFASGLGRHLPVNFVLLDRCCCMM

SEQ ID NO: 44997 - protein, 150 aa, Zea Mays
MMAGRPRPQTELHSPSASTRRRERWLVVLGVALHAVYMLSIFDIYFKSPIVHGMDPVPPRLSAPPAKRLVLLVADGLRADKFFEPDERGRYRAPFLRGVIEEKGRWGVSHARPPTESRPGHVSLIAGFYEDPSAVTKVSIVFGRMEGQSS

SEQ ID NO: 44998 - protein, 80 aa, Zea Mays
MATPRSREPLCLSLISSVDCVSNEHVRPTLLPPPATAAHPRFAAAACPDHGGTIIDDSSSTKLHINPYYMEQETWSMSTR

SEQ ID NO: 44999 - protein, 57 aa, Zea Mays
MISKFLIFVIDRHGYLLNKNSPFRINSISETVTLVIFIPINRIFHPSNLPFEFSDEN

SEQ ID NO: 45000 - protein, 62 aa, Zea Mays
MTDGDGLACVSHSQFAGLPLHLLCSVILSGVPSRWLTSRYCLPPTTPPSLVLIFSWKMGFRK

SEQ ID NO: 45001 - protein, 106 aa, Zea Mays
MELAPPLRLRDPSLGWLPATCAGTYVRRNSQTSSVQYRALTVKKKDLFLLVRCHFLVSPQHRCRKANRVFFSLGTHLLVDACVLFLPFQKKWAKRMHWNRAFVSSN

SEQ ID NO: 45002 - protein, 86 aa, Zea Mays
MALYSLRPSQPLGESSRSLLLRSLQPNLLSNSLQAPVSFASHACPTLWMPPLHPAASPGLSPCSPPPCPLSTTTHMAFYNEYSTTI

SEQ ID NO: 45003 - protein, 51 aa, Zea Mays
MGGILTLMVPMPTEDARMYQLCNLLILVGTFLSFSKVSSGLPGTYFLGTFL

SEQ ID NO: 45004 - protein, 123 aa, Zea Mays
MLPCATIPLVQRMGHRRLLGNDPIDCSMIFRYFLSSMTIRTNLQKLLDFAPPAPFPRVEPSWCSSTGPEQTSSPAGGTLAASTKAGSRLASPRASLSAGATVAAPMSFSPCWSLLPGVGRMGG

SEQ ID NO: 45005 - protein, 100 aa, Zea Mays
MLCFSMHRDIAVQILRGDGGRSDAAHSTGTLLIRELKTNGGQHDAVQCISSLHVQKLRENQIKLYGSSSFLESIVDDTRGDFTHYTIDCNGIKLSAPQHC

SEQ ID NO: 45006 - protein, 160 aa, Zea Mays
MPKILRYYLESESMAMVPHGAGGSSVSMSYLVLSPASYTAWVIKVESIIDAQGLWEAVSPLDDSDVNAVKNKTAWAELLQALPDDIFMQAPPRKRRRRCRRASDSFRRGGSGQDGAPRSWGSSTSYTWRTGRHWTTTPAKSAVWRRVMLGLARRSTTLPW

SEQ ID NO: 45007 - protein, 89 aa, Zea Mays
MIHGCVAKAAFILGPGSNPDPMEDVRMKLWAHLLFGGLGIFLRCQPPSVDPRHDESKHLYGIIDGKHPTKPFCLCVHFRYHRFACGLVL

SEQ ID NO: 45008 - protein, 163 aa, Zea Mays
MSTNPDEPKSRARTDFLLNNELEVQKFWDENTVFQADPGNDSPSPGEKFFGNFPYPYMNGLLHLGHAFSLSKLEFGAAYHRLRGSNVLLPFAFHCTGMPIKASADKLAREIQQYGYPPVFPVAEGSSAAVADATQADQADVVAPDKFKGKKSKATAKAGAQKY

SEQ ID NO: 45009 - protein, 176 aa, Zea Mays
MTTSLVVGRSKPGCCLPPALSFKDVHHPCWGGGCAELRLHLRVGSDLILPSVSGGEGRSPSVALSAAACLASRPGWHWHRLQRCILPLGRSVAARPPHERWWRCARVGHIHGFSHSSGCTGRLYKTLYTVAVAVAFLDGLVLTPVGRNRGEDPFVRAEVVAVAGEAASCRSGCLRW

SEQ ID NO: 45010 - protein, 70 aa, Zea Mays
MVDKNSGAQIAYELTLSTIHYVTNMQTKGYLSGNKVHSAPITQPTNNDSLVEHHIKSKQSASNTLYEGIL

SEQ ID NO: 45011 - protein, 66 aa, Zea Mays
MPTCPLLSQDQTRFTPTESTITPPSSLLPRRVHATLAISPLLLRGSLSGCGQAKIRLTLSHTRACG

SEQ ID NO: 45012 - protein, 64 aa, Zea Mays
MPVRQAPVARKTPPPPARLPGPSPRPEGSPFPRPLASRRVDRTLRRLRTCCNVRSGHWPRRRLA

SEQ ID NO: 45013 - protein, 155 aa, Zea Mays
MTLYIFPRRRVRVVAKLAAAAQFLRSGYDRRSRDISLRLRTPSSHLRYRKPQHQRGQGEECRFHAPSQANLRFSLGQLTWVANRRLQKRARGSPVPWADWCTRNCSSERERCRRLPSTMGRDLRGIISDEQVIEDPGVQQVEVAEQELIEGKLCP

SEQ ID NO: 45014 - protein, 69 aa, Zea Mays
MVPLCIHLGCLLERINSNKSHCHVDGPHVCLLEDVPIEVIQRADIVLRDIHSKKPTRHVISEINSNRQE

SEQ ID NO: 45015 - protein, 141 aa, Zea Mays
MIWIKCKVCMIIRSKTVHRYKIFISSRNMKNMIKFQIGIRGTNNSMTNVTDIHTCTVCCTDLIFSLVLLLHGEFLELSSDVVGGAGIRTSLCPLHMNVSQPMHSSDWDKTPHRACTSIPGRCGQSCRRFGTVVCRRCSCCC

SEQ ID NO: 45016 - protein, 62 aa, Zea Mays
MSRGRGRTRATTVILFASPLEAFDGVGVHRRCTLSTRVEVEGIGVGGFPGIARRSFHCRAVP

SEQ ID NO: 45017 - protein, 69 aa, Zea Mays
MIPGSVLEYLQVAPLLSCHILVLSPQMVACCSGCLFLQSFHSLGHWFLQHNLDSALQEHQLLAHQHVQI

SEQ ID NO: 45018 - protein, 89 aa, Zea Mays
MCGCVLPAARRAAGGSHGRSPSPHRPTHGPAFASLGRGLTRRGAALDHGASMHQRCPSAIAIADNDNDARLTRAHLSSALQSVNDSFSA

SEQ ID NO: 45019 - protein, 414 aa, Zea Mays
MQNIEAIKDKSVAENKSQNLLEKVDSLEKENEGLDRQLSEEKDTAYHNRVDVITRVGVDKAHTLFVDTYHDLGMETTPFYKSGGGGDPLPRLDARGVGVPPVYCDDLMSYASLVTCEGVADALSHEGCRHFEVFDQSNEDFDHRVFQVEDVVLKSLTEALYDRMWGPHGHGVVQERAGRVLAQALRDEEIEDLAGLESLMDTQDAGAKANTEEQSSHGRVGGTDPAAVGTLHSSAAEQVLVTGLAQANFGFLDKGMEMVGAVECVTPLSCWSSTKFSNDGSEFDSWSSCSEGWLSPFAKMDEESSEENLDLFVALDVSAVESRMEESSSRGPTTTVVKSKRRRVGVPKRRLGSAGASPRGGEGSRRRRSMGLGGPRPWVSLLKVLRMLPLRPQEREGAWSEEGPHWIVCAPTTE

SEQ ID NO: 45020 - protein, 188 aa, Zea Mays
MAGSRDSSDISPSNIIEPTWETLPADEQLQFEEHKERMIQEAKAKFLANFKVDRNNKVVRHRATDPASLQPTPDIPNVSNTNDLQSLRNYVEDQREQMQNIIGGMQSDLKRLVRAFDKSSTANFPSHEVELGDNARNTSATGCHDQSQPLYGMPMETYPKQPQIGSKPADLHMPGPSARERGPSGPTA

SEQ ID NO: 45021 - protein, 287 aa, Zea Mays
MEWSPSSCNSVRWTQLDVPGCVWVMESESKDNWVWFMTQLRRAIGNMEKLAICTDAGKGLMTAVELLFPQADKRECFRHLMQNFIKRFHDNSYRGMYPAARAYRQAEFDRHIGPILHSDPEVITWLNRDHKFKWMRSTFDPDIKCDYINNNLAECFNNWVKDHKDLPVVQLADKIRELILVLWEKRRRIGGKLCGTILPAIVHQLNIRSRGLGHLKVLNAGNGHAEVFDNSPKQERHIVDLGAQECSCLEWQHTGKPCDHAIVVITSFRSEKIENYVHDFYSVQKFR

SEQ ID NO: 45022 - protein, 70 aa, Zea Mays
MLHICHVVVRAPYTSTKEARQCNTTRPLQSSTSFRKPATVSRKRNIGIPRLKSYRSKINPRTSLYQQLTY

SEQ ID NO: 45023 - protein, 91 aa, Zea Mays
MVCRLRCFECKCRACWSCWIASNIALTRLECSGLFGCRTRTLSSTGNHRIHHFSSLLDNIQVVTSRVTSLFSKEIWKATKTVAVIVFFFRV

SEQ ID NO: 45024 - protein, 147 aa, Zea Mays
MTVLPNGRNQINVLRESRILLLLLAPNSLARINVFDMIWEEILHASWSPLKGCLHAPFIMKMVEVVTQTRFEKPVKHSRYVPYWVDSSNLAAHTKRAPSGSRGPASSDEPPPQPPHHESSSRVAAGSRLMDRSGRGRGQGHGRGRGW

SEQ ID NO: 45025 - protein, 82 aa, Zea Mays
MTCTSHHPSCILKLCRDLMVRPYRYIFSIVRCPRRGTMRLHILRGMKAEVILAFADICTHEEYMKCDFTMLLLWFLPARCGN

SEQ ID NO: 45026 - protein, 108 aa, Zea Mays
MSLQPLLHIVKIRIKVSWSRLPIVLRLRRRWRRRHLLFLNIRSCSTRIARVFLIIGEWSEWPGEEPYLIFKRPEWSVNNLTWALKSCLGFYESHNVGSISQVLILVHL

SEQ ID NO: 45027 - protein, 57 aa, Zea Mays
MPASYFLLRSEHEFCDVSVILCPCAYFFVILACVAALCSCVCTLSPSLTLSCDFDHL

SEQ ID NO: 45028 - protein, 255 aa, Zea Mays
MSKNMIEKIEKYWKDIQGPMGIATILDPRFKVDYLLGFFETLIGQNSDQCVLKFDEVKESLCDLMKYYEMDEGEDTTESSTPLLDTSLLSTISAHAASRRPAMTRVKIELDRYLEDDLVQISTENFQILDWWKVAGTRYPTLRKIARDILAIPISTVASESAFNTSWWILSEHRSRLTPEILEALMCSQDWIRNNYKDGAEVNQPSFWDCLQEIQEGVEIVMMKPERTWTSSYQFGRHESYYLMLACYSCFCIVA

SEQ ID NO: 45029 - protein, 320 aa, Zea Mays
MTRSRPSRTRSMWPTPRASVAGNHVPPGRAEGSTDQRECHGAETTRAGVLRWGLSRPDDELAKHQRKPAAMLGVPAMGSQGRVPTECMKQRARGRLELSTGRDLRARRAEQGRGCAQADRGRDDQSVGEFDGGRHGAQGGQTPGRAAKGNFTPWERAERNGLREERAGRERVQGEKSSAREELATGTRRAGRGTAAMEMHCEGEKQGHAGAVDRALVRAGDGEGICKLQEELQLPGRTPGSLGHGDELGEMGKTGPPASRSTGGTTMAGAGAVGRAACRGVPWLGPGAWELELHGREMGAGKISAREMSTQMQLPYLSRG

SEQ ID NO: 45030 - protein, 96 aa, Zea Mays
MRQTLRDYGYKLTKVPLLCDNESAIHMADNPVEHSRTKHIAIRYHFLKDHQQRGDIEIAYVSTKEQLADIFTKPLDEKTFTKLRNELNILDSQNFD

SEQ ID NO: 45031 - protein, 145 aa, Zea Mays
MPSLSPALTSARSSAPARPCFSPSQCISMAAVSLPARRVPVASSSLALDFSPCARSLPARSSLSPFLSALSHGVKSPLAALPGVRPPCAPWRPLSNSPARWSSLPLSACAQPRPCSARRARRSLLVLSSSQPRARCSLHSHGARP

SEQ ID NO: 45032 - protein, 50 aa, Zea Mays
MSTEEMDPNRREEEAATKVIIGGGSGGITKSEMMSEMMSEMRIMIQELMW

SEQ ID NO: 45033 - protein, 116 aa, Zea Mays
MMSHLCNRRVREFLVLTRTWFAFDLPSKTGCDHLKGFLRRALLGACFIAEGPIRRNTFGRLAQSRSYQSKGFRVHFQMHRPKDEMTNWPVITCIMIINLCKGYECNFSQAASCANK

SEQ ID NO: 45034 - protein, 88 aa, Zea Mays
MLDKCVVSMIFLLKLRGKKLFKLRIHPPQQMKPQMKVRAVKVRAEVGNFDNGEKLRAQASEGEEVKTCAAKKKGKRRQCPCIICKSCV

SEQ ID NO: 45035 - protein, 53 aa, Zea Mays
MATRRSWWLPRGPYRVACIPLRPLRPAPTSNAKWICTLYLEKETSTVLSNKGL

SEQ ID NO: 45036 - protein, 101 aa, Zea Mays
MRERCTATRDLVRGRRAEMRMIRTRDTHTQRVTTRAKQHDSVQTTRGHTRHSTLTTHETACATSANDALISTRPRAHHARTARRQHLRHVRITNNHRVYTK

SEQ ID NO: 45037 - protein, 60 aa, Zea Mays
MLLLPFYSSLKILVRQWGSRAKNHLVLVLDAKGGEIKGQSNKWISYHLRISKNSRIELLV

SEQ ID NO: 45038 - protein, 60 aa, Zea Mays
MLEFLASCISSPAAKLSGTSASKPCSFSNRANARQPSARVSGTSRPVSCRSFLTSSYQRH

SEQ ID NO: 45039 - protein, 102 aa, Zea Mays
MPLSTPAFQPLTAGSLPLCALGILRSSVLRSADDGYLAVVLHHWASPRCRSVTPFLAPCSDQARPSRDLAESRLCLTPVMAAVGPCVLPRSSHLPSTPLFFP

SEQ ID NO: 45040 - protein, 129 aa, Zea Mays
MATEAKQGEARWDKMMVMMERLTGKVDAMEKVHHQLLGQSELTADLVKQAADERTILSRRVEENGKALARMRLEAMAREMEDVGTGPESSDTGGRRGAIPNQDQGGRELQQHVPKMLFPKFGGKEPAIW

SEQ ID NO: 45041 - protein, 144 aa, Zea Mays
MLVDIELSSPTITNTISFPRTTTIGSITLPCVNNTCKYHFNVCIGMQCVGTLSSYLWGYKTTSSANITSMNAYECNAYVLCLHTSKGMKPHRTPSRATYDAKLYRYGRTIGHDKTSYANESCNVYGMLHLSINFTSFRYNTNLK

SEQ ID NO: 45042 - protein, 132 aa, Zea Mays
MDHMKNGHRRCGIHCEGWFLGSRGCMWVGPGNLQAHTEVSFASHARGSCMRLLHDVCTVVGFACMRPCRVDPTSFLLSSLAENAHGGFFYAKRGAQRLRAMVARWPGWISRRLAARMVAAPEKHLGRSELGR

SEQ ID NO: 45043 - protein, 266 aa, Zea Mays
MYSDTMFSINVEALFTNFFTLPPNYYEVVPIGLAILGCKFHGSHILEDYCRVEVTTFVQGSKDDILDIPGPEGIETLRQAIKNFILCPRRDVESVDPPPSSSPAQPSLPPQNAVPIVHTLSPQTSHATPHPLFDPSSLPQASPFSAPPPSPPHPLGDPLSTPPARDLHSPQPSRDPQLSKKSKISIPKLVSPYEKKKSEATTADTTQFLSGIVRRLMTHTIDLTEHVKSGKKVEAMIVKIKKPTKEYYKNVLKNMCQADLYSLLRN

SEQ ID NO: 45044 - protein, 56 aa, Zea Mays
MSGSDTHMIKLWNLNSICHMHCIAGEVVTFILLNWAGIYLYLVIANKILTNFKSNA

SEQ ID NO: 45045 - protein, 51 aa, Zea Mays
MGVAARVEEMAAAKNLRMERGRLQHLGKREEGRGGRVTAKGGKGGGCSQGP

SEQ ID NO: 45046 - protein, 168 aa, Zea Mays
MLYFAAGRRFQEPGGGGPCMQTCRGCTLLEVKIKVQTVFLLTCMHSQKGVRSAGEACPMEKKGTCTHRSAGRPAGWLAGFQKLAAAPAPVSRAGDDLPCLSLSRAPLRRRTRDCESRAAGRCQAGRRRKECTCPASPPRAPRHPQHTSIELPCRPAHMHACRRRCALS

SEQ ID NO: 45047 - protein, 98 aa, Zea Mays
MPTTFIKPPCDPSGPGPLSKGRAPIVSRRTSFSEKGVSKRLRSIAPLWQLTRSRVKGLWTIEPKRLEKKSSRTSCICSWLVTILPSSSKWEIKFLFLR

SEQ ID NO: 45048 - protein, 88 aa, Zea Mays
MFHGVGWILIDVQFTCTTVTITARACCRGHTSTAVPCYGSEEVANEGLRHKDNRWAFPRITIVFLFVKLQVTFIWFLRNIDGGFVVCS

SEQ ID NO: 45049 - protein, 186 aa, Zea Mays
MQKPRRSTFLLLKPRRLTARSPRTSSRKSMSTLVLAWRLRPEGMVLGACEHYPRSRHIVPISCQASEATYPALVGNVKARSLVTSASGSDQRTGSTVSRQEKPSRSTNKSLPRTTNASLLEDDSFERAICLIFSFYGRASYTSCRVSLSRPYRMLSQKFTKDIGSEHNRIKPRSSSSYSTSMDFNQ

SEQ ID NO: 45050 - protein, 75 aa, Zea Mays
MKGEGERREPRREFRFFNDEARRGGPRCFPIPRGSRPRPRLHRAGDWSIAVGSKGTVTPRPSVGNRIYAGKTTFL

SEQ ID NO: 45051 - protein, 102 aa, Zea Mays
MPERSQAAGSKGEACSRIRAWCPAQLVLVRALRCGDDCGSGVAALTERSIVRGFPFFRGIILGDGLCRISFPGLVVMQYITTPVSMLACIALRGLLPSTVGS

SEQ ID NO: 45052 - protein, 66 aa, Zea Mays
MMFSLTLVTVMGCSCFVVKARKLSGRTSVGLSLKELLAWEFTCSSLVDPRGLYIQSYTQWSDVSRI

SEQ ID NO: 45053 - protein, 67 aa, Zea Mays
MLWCNVTISIICLIVCIATSRGEVTSNLKPNFWVNAYYHKSQACCALDHASLPNNVPVNHCDMLRLI

SEQ ID NO: 45054 - protein, 228 aa, Zea Mays
MRSSPSALLPVAPSLVHARSSLCLPWPRRFGAIFTRPGSCTQSSSPTATLSSLHLSCARPAPVPGRDPWPPRPALGCCSPVLQLVGRAPAPRPSPAEAPPSRFPWPSVRPELLLLSSLLLSSSGCASLLSAFLPTLSLLWTWMLRRSGSPSSATPIGSLEPASLSSPSACHWSLLLPRPPSSRRTRPFPARPCARPAPCACHSSNSGVNAPCSCCLECSSISPSWPSS

SEQ ID NO: 45055 - protein, 448 aa, Zea Mays
MAPPTEVAPASTSPAGPKPHPYGTRLQHAIRKPKLRTDGTVSYSVEQVSTVEPHSHIQALKHPLWRQAMNDEFAALLRNRTWHLVPPRSGINVIDSKWVFKLKYKPDGSIDRYKARLVAKGFKQQYGLDYDDTFSPVVKPTTIRVLLSLAVTHGWSLRQIDIQNAFLHGVLNEDVYMKQPPGFQDTHHPDYICKLEKSLYGLKQAPRAWFSRLSTTLIQLGFIPSKEDVSLFIFNREGIHMYILVYLDDIIIVSSSSSATERLLHQLHREFAIKDLGNLSYFLGIEVHQSSNGLLLTQHKYINDLLLRTNMEASVGSPTPMLPVEKLSLHDGDPLSPEDATRYRSAVGALQYLSFTRPDISFSINRVCQFLSTPTTTHWAAVKRILRYLRATTSHGLCFTKSGSMLLSAFSDADWAGNPDDRRSTGGYTIFLGNNLVSWSSRKHPTVS

SEQ ID NO: 45056 - protein, 82 aa, Zea Mays
MMIYKEKKEQHRSKFTKNCVAGTFFGSVYFQCALCIFSTEHNEHNSSVQCALCIFSTEHFLNIYFRNEFAQVILAAKKGYEV

SEQ ID NO: 45057 - protein, 96 aa, Zea Mays
MFNLVMNLISKILDEQRKFLGWKFSVIVVLVLVFYLRKVILRKFLKSIISIIANPLLHHFLHILNCHQGNVLLLKMRKNTCLTYCILMMLGISCML

SEQ ID NO: 45058 - protein, 1036 aa, Zea Mays
MPGPSARERGPSGPTAVGPIFNELPRYVPEPPHMTQNPNYPVGRSAYNDGRSAYDHGRSGYISGQPAHESFEEDYYLNPRPSQQHFPSHYAMHQPINSGSRAQESFPAPPKRPERNDQTYEPYRANGNAPRSSNQWGERQHTNMQPTPPMFDQRAGGLAPAAIDIVREEIAGAFRDKLGVSMVPGGQSYRKPYDSRFDHHPFPQGTRIPEFAKFSGDQGKNTREHIGQFLAQLGELADIEAFRVRLFSLSLTGTAFAWYATLPPNSISSWGDLEQKFHDHFFSGDYELDLVDLVSLRQTKDESVNDYIRRFRDTRNRCFQIHLAEKQLVGLAFNGLRYYLKERLEGIQFFTLAQLHQRALACESRSKETAKTMRHNVHIVECDQSSSDDESTEVYAAEMVWPKQAKSSACSSLQPVQKKRQEEVKFTFNVGKCDKIFDELLKNGNIKINHTVPSADELKRRAYCKWHNSFSHATNDCNVFRRQIQSAINEGRLKFQEMQVDTEPFPMNMIDFEGKKVLVRPNTADKGKGKETIIGNAKKADGDCKISCRKVVSEKTPDGGETLKVTITASSTGGQAQTGRQMQEPVLRIPDGPTRRRGRSGTPPDGPESSSRRSGHAQDSQRPRTFKPRRPEIGTWKTNTFKAAGRLIKPGPTFDQLLSKYVKKKAGPSDRPPKRPRSPIHEQRQVRPIGPHHQSEEMKGPIVQLRPNMPTWTPPPPYPPMPYPYTYLPPPYVPNQMWGMPPYPFGMPQYPAWGAPQTSVFNRLTPPVQDRLSAAQSGHQAQTQQDCRTTRPSRPTNPAGGHMPAATQKTTKGDIIKIGTADVVIQGDNKGPMILGESANATEKDTATIKTADPKYSMPRWCPAGLTRSQKRKLQRLRAKESQEKEAEKTFNDTHPLYPPPQKKWRPKAVEKKQTVTEIESQSAPSTDRPAPTHGPSAVHQEVSGQPAPGADRSATARGPSAVHQEASNDTTTSMEEDDLLGEDLVDYEASPEHTGMDVNIITFSVDCTIIGDDEPVVAQFDFGPKEAAFTKPKES

SEQ ID NO: 45059 - protein, 85 aa, Zea Mays
MNLLIINMGCPNRVIAFLYRLGNVAPYNGVVTLPGLPPEREVDLCIKTKQATDGATSAKAVAHFGLLYTPCHCHCHSRKNKLLLV

SEQ ID NO: 45060 - protein, 163 aa, Zea Mays
MVRVSRTTKFNSTTAVVGTTLPSSSVRAHYLAPPHSATGRHEGASAGYCCDLLQVPVHVLPFRPDGVHGIQVATHVQVQCAEGVCLILWDKKIQIRNNKISRDVKGLSSRCLVLGQVDSVLEYPSCCSSRTSCLFRRGVVSGPKEAHRGAATAATMGPPRGIR

SEQ ID NO: 45061 - protein, 182 aa, Zea Mays
MRTAWLSGGKSPPVKSWTRCASSKRPTRGSRVWKRLSYSSTVPVRRHSVNSNKGAARRGGPNLRLRSSLKRPHGGVPSSSWSWMYHSYATSSMLYDAIHTRSSAMVRCCWKYDSHLLMKSMARSCRRSGGSRSCGTWAGDRNHDGPQCGRRHLLRTRRSSPSCPPCLPSRPSSRRTCPGAFS

SEQ ID NO: 45062 - protein, 128 aa, Zea Mays
MQPPPPVQPPPSPLLSRSAPPVRPPPAPPPLACYCSLVVRPPCPALPLSARRPVPLSACCCSLVVALLSRTPTAPLFLACCCFSSCSNKQLCVCSCSCCSLAEGNVVVDMSFCTILLCELMLVVWYLT

SEQ ID NO: 45063 - protein, 89 aa, Zea Mays
MAGLAAPALSLTLHAIACSSWPSSSPTRYSHPWHLLSSMAASLKLQPSSLLRAARQQANAPCSSLPTAPSPSSSSPPWLSSPDLLPSAQ

SEQ ID NO: 45064 - protein, 59 aa, Zea Mays
MTICAMYGVFVEYLGVSLGKARFEMAHATDLLSSAMACRTRQKVATLLSALAARDKASF

SEQ ID NO: 45065 - protein, 180 aa, Zea Mays
MRPVPSAGRRRQGHPADSAPAGSAGEQYACAERRAILIFSSARSLLGTPGIRRSRAEKIVSTTDIRGSKHYILYVPGPTCRGPVPLCMPPFSYKRGGMRCYTHTRNLRLASSYKLSSNTSHSGVGYYAPAARTTLNPCVSLCIAPSLQQSSETPKPLLISGLRAGALRHPAGDLLSDRSH

SEQ ID NO: 45066 - protein, 69 aa, Zea Mays
MILTLGSLYSLLCLLCPHSCSPGKTSRSVTHPKIALIQAHCTLNLYDLSRYDSEKENVPYCYEYSIKFY

SEQ ID NO: 45067 - protein, 80 aa, Zea Mays
MSIITRQVRSSVSSLHHPRVFYPSRIYYITSEKRMSRSRLQYLIYIHKIYRESIITILGVKSAYSIITNQGGKTPSRTKV

SEQ ID NO: 45068 - protein, 67 aa, Zea Mays
MQSVINEFDMLLLCFILETLKVFLQEAPTGLRPQMARTCNRGQTNWKSSNSYRYYIKPKANELKGHK

SEQ ID NO: 45069 - protein, 65 aa, Zea Mays
MCSSRLRNTHPFYTWCTHVYISSPDSLFSSCCGLRIQLTRCREQCGMGHVVATCPRLGGAGLCTA

SEQ ID NO: 45070 - protein, 120 aa, Zea Mays
MEEEEMVGGCHGRRGDAQPREKWGRVAAKRGGVEGKGVAPLGFCGRKEPTPQMTFAFASNGSQPFPTSTHRRSTFRQHFFGILHSTPLKKNSSSNSATPSKTPKVPHIAPPFKTWVHYWS

SEQ ID NO: 45071 - protein, 226 aa, Zea Mays
MRTAAALGEERLAVWGAARRASAPAAARGATALVSGRTAWRGSMAVEGEGTTTMLLRRGASQGGGPAAQRSSAMRRRCVCCTARGGGGACACAAAGAWSCGARWPATGGAVPRRGWGWTRPAAKRARARGGDRRREMSWGRRWDEAQPPTGGSRSSVRQSTDPTGRQWEEADCPTDRVEMAGQRSSRSAREAARPGAGGGDWQAGERPGAGGGGWQGRNTKLPLIP

SEQ ID NO: 45072 - protein, 70 aa, Zea Mays
MKILVPKVEKTLEELFYGVMMIMEHKLPKKKCISWLQELFDYVMVMELRNHQSEVHAISTRVIQILLPQT

SEQ ID NO: 45073 - protein, 98 aa, Zea Mays
MSTPPPQSSGNCLSRQTMPGERHRPTTPRTRRRTPPPSTRNRRSPPREESARASVCRQSGATNFRPSCSCPWWSRREESKQQAAERCVKTTVKQAHYL

SEQ ID NO: 45074 - protein, 103 aa, Zea Mays
MAKTDSVVCARQIGTNMLHAAQGTYKPPSPMPQVQLRTCRSNSHSDISIIVDYPHRTQEMAILVTCPENSSAYLNYECDYPHDQKQNHGNEERAVEGAHDAYP

SEQ ID NO: 45075 - protein, 170 aa, Zea Mays
MVWRTALSGAPGVVHSKLLSFGFPRHSSALIHRTVWCTSGAMAICAQWSTLMDEQCTTVTRQKSEQKVRGAPDCPVWHRTIRCGTGLSGVGPDCLLPHEDKASNGRPAPDPNDRVTWRRTRHYPMAHRTVRCAHRQQPSPTATIWLVAINTTPTGHFKVWEPKQHSKSYS

SEQ ID NO: 45076 - protein, 79 aa, Zea Mays
MGAPERPVRHQTLSGALATSPNQPLGFGRRRPLEALSSSGTGQVLFIVRCASDGCSALPRTVCALFISNSAFAGDRSAK

SEQ ID NO: 45077 - protein, 1498 aa, Zea Mays
MSTITHVDSSAGDSDSDCSVGFSLLFGDDVLAAQIHLPMALPYATISVQSYVPMKLDLHADNFSKWKACFEALCGTFELLSHIDGTAPPNPLTPVWLQEDCCVRAWLYGTVSDAVHDLIMTPEPTARKHWAIITARFEVNKAPRAIFLSQAFMTLTQGDLTVEAYGQEMKRAADRLRDVGKPVDDSTMVLNLLRGANPRFSTTCDIIAGDATMDFAGALDMLALKELRLAEEGKMVKSTALHVSSTSSSSSSGCTGPCRSCTSSPQQFWVQHQQPGKQQRGGGQPKRKKTHFRKGGGGGNQQQQQHRAPNPTGPWICINPWGQQQGQAGGSSGPGGGGQTWRAANSGQQRGGPGLLGSSPQAHTAISDQQSAGPHYFDTAGLMAALQQMSLQGDAWVMDTGASTHMHSSEGILHSHLPAAASSIMVGNGASIPVTTRGSSILDINSTKFVLNNILVAPSIVRNLLLVRQFTRDNGGSIEFDAFGFSVKEPKTGRVILRCNSSGDLYTLSPAAQSTASALLAASSSVWHRRLGHPGPAVLSSLKRKNLISCNKVDQTLCHACQLGKHARLPFSTSTSHTVSPFEIVHCDVWTSPVPSISGCSYYLVLLDDFTHFCWTFPLKHKSEVRQHIADFIPYVRTQFSYTIKCFQADNGTEFVNHAMDELLAAYGIVFHLSCPHTSPQNGKAERILRTLNNSVRTMLLHASMPPKYWVEALAAATYLLNRRPASSIRHEVPYTRLYNTPPSYEHLRVFGCLCYPNLQATSPHKLAPRSAACVFLGYPSAHKGYRCLDLSTRRIIISRHVVFDELSFPFAHDPPTPASSFDFLLGRDLDTAPCVTDHAASDSSSGGRGPVPLPGIFSSGGRGFVPPSGASDAPTPGGCGLVPPSGSLDDTGVVAPSGSGSGASPSTPAPSAAGAPCSSQPPPVPVRDHYIVYSRRPPPPAPQAPAGPPPAPALSRPVTRTQTGTIQRVSYTNLSATTPSPIPANYRSGLADPNWRTAMADEYKALIDNDTWCLVPRPPGANVVSGKWIFKHKYHSDGTLARHKARWVVRGFSQQHGIDYDETFSPVVKPPTIRAVLSIAASRSWPIRQLDVKNAFLHGHLEETVYCQQPPGFVDPAAPDHVCLLQRSLYGLKQAPRAWYQRFASYIRQLGFTASVSDVSLFVYKEGGDMAYLLLYVDDIILTASSSTLLQRIIDRLHSEFAMTDLGDLHHFLNISVERLPTGIFLSQRQYAVDLLQRAGMAECHSTTTPVDTHAKLSATAGAPVADPSMYRSIVGALQYITLTRPDLAYAVQQVCLFMHDPREPHLALLKRILRYLKGTLSSGLHLGVGHIQSLTAYSDADWAGCPDSRRSTSGYCVYLGDNLISWSSKRQTTVSRSSAEAEYRAVAHAVAECCWLRQLLAELHVSITSATVVYCDNVSAVYMAANPVHHRRTKHIEIDIHFVREKVALGQVRVLHVPSSHQFADIMTKGLPVQLFNEFKSSLCVRDPPAATAGGC

SEQ ID NO: 45078 - protein, 396 aa, Zea Mays
MGETISFAPRKAIKSQVLADFVAEWVDTQLPAAPIQPELWTMFFDGSLMKTGAGAGLLFISPLGKHLRYVLRLHFPASNNVAEYEALVNGLRIAIELGVRRLDARGDSQLVIDQVMKNSHCRDPKMEAYCDEVRRLEDKFYGLELNHIARQYNETADELTKIASGRTTVPADVFSRDLHQPSVKTDDTPEHEKASAQPEAPSARPEAPSAPEGEALRVEEERNGVTPNRNWQTPYLQYLHRGELPLDRTEARRLARRAKSFVLLGDGKELYHRSTSGILQRCISIAEGQELLQEIHSGLAVITQHLGPSLETPSDRVSTGQPRWPTPLGLYAPSKGVNSTQSRLTCPLRLYKQYPSPGRLLYGVWTSSVPCRKHPGATRTCWSPSTSSPSGLRSDP

SEQ ID NO: 45079 - protein, 1329 aa, Zea Mays
MAQAIVRDIGPGGGWPTLTKTNYVEWAAVMRVRLQVRQMWEAVWYDDVDYHEDRRALDALIAAVPSEMQFSLSQKRTAKEAWDAIAATRIGSDRTRKTTLQALRKEWENLAFKPGEDVDDFALRLNTLLQKMVQFGDDTCDEERAVEKLFRCIPEKYKQIARSIESLLDLSTMTIEEAIGRLKVVDGDEPQAPSGPITIGGKLHLTREQWEACQGDQKKGESSSTRGRKRGKPRKARGGAQAGARGHAEGGARGGAQGGAVGNKKPARDDGCHNCGKLGHWARDCRQPRRGQANVAQAEAEEESLLLAHASIEISPAAPAAAALHLDESKARAFLGDGSNKDMIEGWCLDTGATHHMTGRQEFFTELDSSVRGSVKFGDASGVEIKGAGSVVFTAASGEHRLLTGVYYIPALRNSIISLGQLDENGSRVEVEHGVMRIWDPSRRLLAKVRRSPNRLYILNVKVAQPCCLAARRDDGAWQWHERFGHLNFEAPKRLSAKEMVRGLPCLDNVEQLCDVCVLTKQRRLPFPQQSSFRAKERLELVHGDLCGPVTPATPGGRHYFLLLVDNLSRYMWVMILGSKGEAANAIRRVQVAAEAECGRKLRVLRTDNGGEFTAAEFASYCADEGVQRHYSAPYSPQQNSVVERHNQTVVGMTRALLKQRGMPAVFWGEAVVTAVYILNRSPTKALNGMTPYEAWHGRKPAVSHLRVFGCLAFTKELGHIGKLDDRSTPGVFIGYAEGSKAYRILDPGTQRVRMARDVVFDEGRGWAWDKAVDDGTTPTYDDFTIEYVHFEGAGGVGNSSPSRSTPAPKSPPTPTPRSPAPATTSSSPPRTPATTPATPSSSPPGTPAPTVPSPGTSSPTPARVEHDPVELVTPLSRDEERVDACYDGEPLRYRRVEGLLIDPSVPGPASRILAGELHLACDDGEPRSFAEAEKHAAWRAAMQSEMDAVETKRTWELADLPHGHRAITLKWVFKLKRDEAGAIVKHKARLVARGFLQQEGIDFDDAFAPVARMESVRLLLALAALEGWNVHHMDVKSAFLNGDLKEEVYVHQPPGFAIPGKEGKVLRLRKALYGLRQAPRAWNAKLDSTLKRMGFMPSPHEATIYRRGNGENALLVGVYVDDLVITGAKDAEMAAFKEEMKATFQMSDLGHLSFYLGIEVHQGDSGITLRQTAYAKRIVELAGLTDCNPALTPMEERLKLSRDSTTEEVDATQYRRLMGSLRYLVHTRPDLAYSVGYVSRFLQRPTTEHEQAVKRIIRYVAGTLDHGLYYPRCPGGHTLSGTATATTPETSTLARAQAGSSSSSASASLVGSRSSSRWWPCPAARPST

SEQ ID NO: 45080 - protein, 673 aa, Zea Mays
MGLNLKYSAKLRKEKSENQEQSPLPFGGLLSCPSPVSVVPNLKWLCKRARTPYTVIGTMRGSSATATAAELKPGVKTEIFTNGNVCEDDNRHHSFRQTGLEQPGGLQDCDKPSCSEENGHGRHCLVNIPIAVAEYPMMHQVREGPVSVSTCNDSICLSGSLDLPPHASPVEVTRYLGCIQSTELSSLPAFSVQHFFNDESTSVEGSIDCVSNGCLESQDDILGSRDERLQVQQYQEKMGLRNNPNMKSVDSHLIEGLAVSEGKHGETVAAFLENKERCAKTSYCSNTETKTTKSAIDNRLETHHLGTGPVKLNSSFNEMHSADRQCSLVFGCLDSADVPASTQALSVSPVLMSDEQQVDDAHSAVKAIEHLGNNLANIKHKSLHMDVLMLEDAQVASMAAVPGHEGESVEAGSNSFDILLGALAEESKAADAPGKDEVGKASLTLITLASNEPSVTEGRVVDVVETDTILGAGKDDKQLDQPHGFHLSDLVSRCIGSSNRSDIICYVRRKHKRKRDYSCFVRSPCESLRPRSKPAVVEESEWSRTAEASFAKRGKRTQAVGSFQCDIDLCDMAFETRAELNAHKRNICTDESCGKRFSSHKYLKRHQCVHSEMRPFKCPWEGCKMTFKWLWAQTEHVRVHTGERPYKCSAPDCGQTFRYVSDYSRHRKKFNHY

SEQ ID NO: 45081 - protein, 676 aa, Zea Mays
MSPPPAVATGGSGEPTVPAWLRGLPRAPEYRPTESEFADPIAFLSRVEREAAAYGICKVIPPYPRPSRRFVFAHLNRSLVSSSEAANPTTASGSSATAPSLPESAAVFTTRHQELGTPRRGRPPPQVLKQVWQSGERYTLDQFEAKSRAFSKIHLAGLREPTPLEVESLFWKASADRPIYIEYANDVPGSGFAAPKQSQRHKKRRRESDQVEEGEKGSGWRLSGSPWNLQAIARAPGSLTRFMPDDVPGVTSPMVYIGMLFSWFAWHVEDHELHSLNFLHTGAPKTWYAVPGDRASELEEVIRVHGYGGNPDRLGICPFSCSPSECFGCGLAGTSSEMASVSIGSNVHDIIQTSDSYEFFADMYCFSFIELIVMCYLLTMFIPALLDFHLHGFNCGEAANFATPQWLKFAKEAAVRRAVMNYLPMLSHQQLLYLLAVSFITRTPNVLSGIRSRLRDRKKEERELLVKQEFLQDMISENKLLCSFLEKKSIRHVVLWEPDLLPSSTALHSCSSGSKAPEKKSEDGCRIESSERGTKDNSSDGSAHMIGAQTKFMSGNSKSSGTASASMDEVNADTDDEDDLPFDLSIDSGSLTCVACGILGYPFMAILQPSREVLEGISLAHTSRYKMSSEKDNCSNTIPCCPTDRCSFVPSRPSWPAEQQCLATPLGQANISHQNK

SEQ ID NO: 45082 - protein, 104 aa, Zea Mays
MSGSVCLDVINQTWSPMFDLVNVFEVFLPQLLLYPNPSDPLNGDAAALMMRDRPAYEQKVKEYCEKYAKPGDAGVTPEEQSSDEELSEDEDDSGDEEIMGKPDP

SEQ ID NO: 45083 - protein, 966 aa, Zea Mays
MQHVFKMEQEEYTREEINWSYIEFVDNQDVLDLIEKKGGLIALLDEACMFPRSTHETFAQKLYTTFKNNKRFAKPKLSRTDFTVVHYAGDVTYQADYFLDKNKDYVVAEHQDLLNASSCLFVAGLFPPLPQETAKSSKFSSIGSRFKIGKTKVFLRAGQMADLDARRAEVLGRAARIIQRQIRTYIARKQFAELKRSATQLQSFVRGTLARKLYECMRQEAAAVKIQKNMRRHKARESYLQLQAAAITLQTGLRAMSARKEFRFRKETKAAVHIQAQWRRHRDYSHYKNLQGAALTYQCAWRQRLARRELRKLKMAARETGALKEAKDKLEKRVEELTWRLGLEKRLRTDLEEAKAQEIAKLQETLHDMQLQVEESKAMVVKEREAARKAIEEAPPVIKETPVLVEDTEKINSLTTEVEQLKALLLTERQATEAAKREHAESELRNEELIKKFESAEKKIEQLQETVHRLEEKATNMESENKVLRQQAVAISPTSKSLAAYPKSPFQLKTPENGNALNGEVKSSPDITPILPNPKELEAEEKPQKSLNEKQQENQDLLIKCVSQDLGFSSGKPIAACLIYRCLLHWRSFEVERTGVFDRIIQTIGSAIESQDNNDKLAYWLSNSSTLLLLLQRTLKTTGAAGFTPQRRRSSAASFGRVFSGMRASPQSAGRAFMGSRLIGGLGDLRQVEAKYPALLFKQQLTAFLEKIYGMIRDNLKKEISPLLGLCIQAPRTSRASLIKGSRSQANALAQQTLIAHWQSIVKILTNYLNVLKANYVPSVLISKVFTQIFSFINVQLFNSLLLRRECCSFSNGEYVKAGLAELEQWCIYATEEYAGSSWEELKHIRQAVGFLVIHQKPKKTLKEITNDLCPVLSIQQLYRISTMYWDDKYGTHTVSSDVISSMRVMMTEDSNNAVSSSFLLDDDSSIPFSVDDISKSMTEIEVTDVDMPPLIRENSGFTFLHQRKD

SEQ ID NO: 45084 - protein, 117 aa, Zea Mays
MMDSRPSPSILRMILHCMCIHMSTFSQMGMTYTVWDSKMVHYNQKMGRTLCLWEILCFQTSWLSMTWKIKSSGGLTITVRRALKLRTTRQAQPILSNHMTYPPDGNSTGTSPWFCCW

SEQ ID NO: 45085 - protein, 531 aa, Zea Mays
MPTFPRAGRWSTSSTWPRKTAGAASTALAAVVFAVLDVADVILCFAYALLDGVLEDSPVRCYCHRSYDDGIREAAAGASVDGGGHEEVSDTLYACGRRSTVRDALLGLVRRVVPRTRRTRAPPDETVAPCKWRSPRWSDCACKSCVAWRCGEEGGGRLHVVVKEPGPKDAAAAGTTTRAPDPENAIFVHGFASSSSFWSETVFRESSCILDGCRLFAVDLLGFGRSPKPANCMYRVRDHVEAIERTLILAGDGESQSLMSSFHLVSHSMGCTIALALAAKHPTRVKSITLVAPPYFLPCEQRASQVALNRLAEKKLWPPLLFGSAVMSWYEHVGRTVCFLVCKNHLLWEWLFSLLNLNRGVDFRVRDLTKHTHHSAWHTMHNVICGGAALQDANLEAVAAAGIPVQVLHGADDQVVPVECGRHVKAKIPRAKLRVMERRDHSTVVLGRERGFAEELKAFWCASRSPVHVQDAEQQETLDISSPSKDSKIIQHDNTSVPTILARRLRIDLCISSLQQELRAIMQQVLEFPFA

SEQ ID NO: 45086 - protein, 209 aa, Zea Mays
MHISEALQMQIEVQRRLHEQLEVQRHLQLRIEAQGKYLQSVLEKAQEALAKQSGGADETTTTTQQQQQLLLPDLISRATATRRGNVQQEHLHQQHHLGGDGSVDSCLTACEGSRCQRERDQDLLSIGLSSAPPPTPTPSRGYNDRGGGGSASCEEFLQFLDEPSRRGAGGGGSSDEQQELDLSISGGRSNPRPRGSQSQRIDLNGSSWN

SEQ ID NO: 45087 - protein, 826 aa, Zea Mays
MSQSYAAAASKRPFSSPTTSPSPTSSPATPLMKKAKHPAAASSSSVGTVEKNGIQLDTVAAAMGGGRTNGEEDADMVLVNQDKLPAPSVPASAGVAANLFRKKATLPQPSTSARKPLRIKIGQPKLPKNFEEDTWSILKDAITAIFLKQKLSCDVEKLYQAAGDLCLHKLGANLYDRIKKECGIHIAEKISALVGQSPDLVVFLSLVQRTWQDFCDQMLIIRGIALLLDVKYVKNVANICSVWDMGLQLFRKHLSLSTEIEHKTVTGLLRLIESERLGEAIDRTLLSHLLKMLTALGMYSESFEKPFLECTSEFYATEGVRYMQQSDIPDYLKHVESRLQEEHERCILYLEANTRKPLIATTEKQLLERHTSAIIEKGFTMLMDANRINDLSRMYNLFQRVNAVELLKLALSSYIRATGQGIIMDEEKDRELVPFLLDFKASLDKILEESFAKNEAFSNTIKDSFEHLINLRQNRPAELIAKFLDEKLRAGNKGTSEEELEGILDKVLVLFRFIQGKDVFEAFYKKDLAKRLLLGKSASIDAEKSMITKLKTECGSQFTNKLEGMFKDIELSKEINDSFRQSSQARTKLPSGIEMSVHVLTTGYWPTYPPMDVKLPHELNVYQDIFKEFYLSKYSGRRLMWQNSLGHCVLKADFPKGKKELASVVLMLFNDAQKLSFIDIKDSTGIEDKELRRTLQSLACGKVRVLQKIPKGRDVEDKDEFVFNEDFSAPLYRIKVNAIQMKETVEENTSTTERVFQDRQYQVDAAIVRIMKTRKVLSHTLLITELYQQLKFPVKPADIKKRIESLIDREYLERDRSNPQIYNYLA

SEQ ID NO: 45088 - protein, 246 aa, Zea Mays
MLAAVMDYFSSCWGPRSGAGHREKGSDAAGRQDGLLWYKDVGQLVTGEFSMAVVQANQLLEDQSQVESGSLSLADTGPQGTFVGVYDGHGGPETSRFINDHLFNHLRRFATEHKFMSADVIRKAFQATEEGFLSLVSKEWSLKPQIASVGSCCLVGVICAGTLYVANLGDSRAVLGRLVKATGEVLAIQLSSEHNACYEEVRQELQSSHPDDPHIVVLKHNVWRVKGIIQSEDGRAKQEEARARCR

SEQ ID NO: 45089 - protein, 330 aa, Zea Mays
MGCIMACTTSFNMGSLEGQTLVAIISELPSALILKRHAHILRGTRNVQDTPSTDTEDMSSTASNGIGPLASVSGSSHYGDAKASSSAPAPREELAVDPASLVAPAEHREESVEAMVSSSAPATSVGHGEGNGAGGIAPSVAHCAIEASQGEGAGDNASPSILRVGGGSSFRACLGNLGLEWIEVVLRQWGLLGPSRPDLAFTGHPSLLFSGSGAPCAAHSRIRPSLHRTSLPPLLGEWCSLRCPFSDKVPRGHPIILEGLEGEDMDVEQWQLIEGASARADKGLETIERCLDNFEEAMLIACTMMMWDLLPIGQRLFYRSMAQREVLLTA

SEQ ID NO: 45090 - protein, 518 aa, Zea Mays
MCRVWLGGRLLSIRVQFFALDLYCHISVLDPLKDNGSAIQEVPREKVNFSEELLSSTSFARQLVDQMTLAKAYVILAKEQGNLQLAWELSSQIRNCQRLLSEGAVNGRAITKDEAHPIISRLARLIYKAQDSHYDISTTIVTLKNHALALEERAKAAIVQSAEFGQLAAESFPKNLHCLTVKLTEEWLRNPKHRSHSEENRNSTRLVDNNLYHFCIFSDNVLATSVVVNSTVSNANHPQQLVFHVVTDRIHFGAMSTWFLINDFKGCTVEVRCIDEFSWLNASSSPLVRQLSEAETQGYYYSAGSKNPERETKFHNPKFVSLLNHLRFYIPQILPNLEKVVFLDDDVVVQKDLTQLFSIELHGNVIGAVETCLESFHRYSKYLNFSHPTISSKIDPHTCGWAFGMNIFDLIAWRKANATSLYHYWQEQNSDLLLWRTGILPAGLLTFYGLVEPLDRRWHVLGLGYDVDIDDRLIESAAVVHYNGNMKPWLKLAIRRYKYIWERYVNISHPYVRECMLQ

SEQ ID NO: 45091 - protein, 301 aa, Zea Mays
METMNEMGGLDQNAPTEEEQKQLAKSERFAINLSNAVNLVLFVTKVVASVESASMAVIASTLDSLLDLLSGFILWFTAYKMKKPNKYNYPIGKRRMQPVGIIVFASVMGTLGFQVLIESGRQLITQHVLCCGREFFLMLYCRTFKNEIVRAYAQDHFFDVITNSVGLVSALLAVRFKWWMDPVGAILIALYTITTWARTVLENVGTLIGKSAPAEYLTKLTYLIWNHHEEIQHIDTVRAYTFGTHYFVEVDIVLSGDMPLSQAHDIGESLQEKLEQLTEVERAFVHVDFEFTHRPEHKAEV

SEQ ID NO: 45092 - protein, 359 aa, Zea Mays
MSPAAATTTFVAISIAVPNPTAPSRGRVRLPLGGVPAAPRRAVASMAVSAPRSGAATSFLERRESERALHFVKYQGLGNDFIMVDNRDSSVPKVTPEEAAKLCDRNFGIGADGVIFVMPGVNGADYTMRIFNSDGSEPEMCGNGVRCFARFIAEIENLQGTNRFTIHTGAGKIVPEIQSDGQVKVDMGEPILSGLDIPTKLLATKNKAVVQAELAVEGLTWHVTCVSMGNPHCVTFGANELKVLQVDDLKLSEIGPKFEHHEMFPARTNTEFVQVLSRSHLKMRVWERGAGATLACGTGACAVVVAAVLEGRAERKCVVDLPGGPLEIEWREDDNHVYMTGPAEVLGTKIEGLAATQSL

SEQ ID NO: 45093 - protein, 53 aa, Zea Mays
MPCLRHSTIREGSCSMITTLARGTTCSLCGGCLRSLESKWETSYAECFVICFS

SEQ ID NO: 45094 - protein, 170 aa, Zea Mays
MMLFQYLVNTLEADFVPRQIATKESLDWVIFRESLLSMLLGSRKLVFKSFVKNCMCILLNQYYHEAKDDYEDIIPSERETESTSYHNFSLNYLSFELKKTLISLRKLFVMVMKLDLTRKEADTLGLTSRADRFRPLWNGSGNWRLFCSTFQNIVARAQSVLEGLIIHKKI

SEQ ID NO: 45095 - protein, 487 aa, Zea Mays
MGSAESAMVLFIYQAATNFLPIFGAIVSDALLGRFLTISLTLFACTIGAVLLWLTTVVPTLVAEDCSNEDQSCHSPTTLQFFVLLTSLLFLSIGASGVRPCSLPFGVDQFTHWSGAPKDRALKVLFGWYYVSMGGSAIISITLIVYLQDKLGWKIGFAISMVIAAFAAILNIVTSPLYIKVKPQKSTWISLVQVVFIAIRNRHIQLPKAAGENDLHYCNVGGLAMVPSSKMSVCTVEQVEDIKRVLSVIPMWSATITSLLIQTASFRVLQAETMDRHVGSTRFQMPAGSVAIFEGITFTLVSGCITGREKTLSHKQKMGIGVLFSIACALSASVVEAIRRKQATRQGLENNTDDGGVVNMSVLWLAPQCVFAGLISAFGSIGQIEFYYEVLPKSMSSLALALLPLAIGVANIASTVVVKLVKVITCSGGRVGWLLDNLNQGHYDYFYFVLAMLGIAGFIYFVACCYWFEEPSPNQLVQSNEDEPNMR

SEQ ID NO: 45096 - protein, 681 aa, Zea Mays
MEQPQCNAPLQAVGQEKPRERRKRRYRRCVAEQLRESFAVDADYEYISKDHKPDCQNGSSRSTKVSSPDVITKPDHDESAEVVDSKSEEAQITDSEQATYASANNDLKGTKAYQEADVSGLYNLAMAIIDYRGHRVVAQHLFVYYYAKLSQMSIIPGILQGDKSDSLLYGSVDNGKKISWNETFHSKVVEAAKRLHLKEHVVLDGSGNPVKLAATVECKGIVGSDDRHYILDLMRVTPRDSNYIGQGHRFCVLRPELIASFVEAESMKQSLKQKVPDAPVASTSDAKATSVEADDKSEESSVHTHKENDNSSSEILFNPNVFTEYKLDGSPEEIAADEELVKRAGTYLIDIVIPKIVQDLCSLDISPMDGQTLTDALHLHGINIRYLGKIAGMVKHLPHLQDLFSAEIIVRSAKHVIKDILRQSLDHDIGPAIAHFLNCFMGKVLGASTEGSLSDMQSKTLKGHENSQTQKSTKGHKLSNAAASRKSLSAYSHLTSDGIWFSIKEFAKSKYQFEVPDDARLSAKRVAVLRNLCQKVGITIAARKYDLDASTPFEASDILNLQPVVKHSVPTCTEAKNLMEAGKVRMAEGTLNEAYALFSEAFSLLQQITGPMHKDAANCCRYLAMVLYHAGDTAGAVVQQHRELIINERCLGLDHPDTAHRHDASNMNTALSMKRRHMIYW

SEQ ID NO: 45097 - protein, 731 aa, Zea Mays
MEQPQCNAPLQAVGQEKPRERRKRRYRRCVAEQLRESFAVDADYEYISKDHKPDCQNGSSRSTKVSSPDVITKPDHDESAEVVDSKSEEAQITDSEQATYASANNDLKGTKAYQEADVSGLYNLAMAIIDYRGHRVVAQHLFVYYYAKLSQMSIIPGILQGDKSDSLLYGSVDNGKKISWNETFHSKVVEAAKRLHLKEHVVLDGSGNPVKLAATVECKGIVGSDDRHYILDLMRVTPRDSNYIGQGHRFCVLRPELIASFVEAESMKQSLKQKVPDAPVASTSDAKATSVEADDKSEESSVHTHKENDNSSSEILFNPNVFTEYKLDGSPEEIAADEELVKRAGTYLIDIVIPKIVQDLCSLDISPMDGQTLTDALHLHGINIRYLGKIAGMVKHLPHLQDLFSAEIIVRSAKHVIKDILRQSLDHDIGPAIAHFLNCFMGKVLGASTEGSLSDMQSKTLKGHENSQTQKSTKGHKLSNAAASRKSLSAYSHLTSDGIWFSIKEFAKSKYQFEVPDDARLSAKRVAVLRNLCQKVGITIAARKYDLDASTPFEASDILNLQPVVKHSVPTCTEAKNLMEAGKVRMAEGTLNEAYALFSEAFSLLQQITGPMHKDAANCCRYLAMVLYHAGDTAGAVVQQHRELIINERCLGLDHPDTAHSYGNMALFYHGLNQTELALRHMSRTLLLLSLASGPDHPDVAATLINVAMMYQDASNMNTALSMKRRHMIYW

SEQ ID NO: 45098 - protein, 283 aa, Zea Mays
MSRSESEIDNCYKPFVKLFKALEVHRLLREKCPARGQGAAANAIMVTIEEKIFDFMKSCSTNAMLISYSGAHGERTKKHIVGSEDRGDEALISEVSDVTKDLKASNVPLKVRNFMGNKELSVEGKTTTAEGNVEIVPGDELTATLLDAVNTIQRTTTGYDQIRSAKKKVMSHVKQMRMYQIRLFKLLQEKVMHKDLEIDLEGPKNASVKLKAVNASAIVDTHRHGMAHAMQPDNVNLVEHLPEGNQESLSKEPYDVNDVVDLFQYKCSEYLTIAVAEFDEREI

SEQ ID NO: 45099 - protein, 153 aa, Zea Mays
MEDLGIEAKEAAVREVAKLLPFPELLSSIASIKYDYLTRQQINDAQLSTMVADQVEQAHAGINALALSQITINKLRENFIDIDKLCQECQTLIENHDKIKLLSNTRNNLNTTLKDVGGMMSISVEAAAAHDSLSNDQELIHTYELLMVRGVLL

SEQ ID NO: 45100 - protein, 178 aa, Zea Mays
MSPTCLGRSPSDQPCQAPRRPLSVVLSTVWSAVSKPSRPLAHAPASDAPTAQTPCPRLTVPSAQPRSRGATDRGGALATPSPTSHGPPSFPLPRSQGPKFGNAPSPPTIVLDLAIACMISAADLESARSTTMIWKVPCQTIPTQIPQIVHPSSLKRSQLPDCYNHPTATEILRSHSSR

SEQ ID NO: 45101 - protein, 53 aa, Zea Mays
MSPPAPLWERARRRSSAVAELHHAVDPGPLRHHIRVLLARALFHRLPELPPPW

SEQ ID NO: 45102 - protein, 167 aa, Zea Mays
MPNCFSKTKQARMMIMYLLENKLSKTYLLLHFSKTIDHTQEVQIRKQAVATPVRFSDGSRQGLTMEKSTVVVSVPVVVMAETAETDYSSSFSIHGYEMYWGSIFLVLDFLSWIHICYLGMQSPRKMLGRVINQGIRELLRSLQYIRSIVLRWQTLFNSGGQLLQLPV

SEQ ID NO: 45103 - protein, 224 aa, Zea Mays
MPNCFSKTKQARMMIMYLLENKLSKTYLLLHFSKTIDHTQEVQIRKQAVATPVRFSDGSRQGLTMEKSTVVVSVPVVVMAETAETDYSSSFSLLVVDSHLLPGAPLQDAESQKDVGKGDKSRDKGTAEKFAIYQKHRSSLADTVQFRRPAAPTSSVNADIVGTSTLQSASLPKQEPSTATSKSYTFREGDRVRYMGPAQLSSLSQRLLSFCWLRCWKRDIMWCG

SEQ ID NO: 45104 - protein, 169 aa, Zea Mays
MAVLCPTQGTGYLSLQETKRLILFGHMAQRIIKGPCDVLVANMLAVVGEIETLPFLRHPWGQNNRGLFSRTLEAAASKPLLKQLPPLNYCRHRQSHLKETRPLRWTWFNSRQHRCRSIVASDSSSTKEQKYTSRKQQAPLTEDVLPHLAKKLFADAASGNTGGSGSAST

SEQ ID NO: 45105 - protein, 322 aa, Zea Mays
MVSNPAPSSAPRYSAYSLPSTHLPGEDILFCIDADLEVHAKMKSAAVASSGSTSTASPQSVGADGAPAVGTRTVVAREPPTLRLTHPKPDKDGYPHIFDYFAVQTHDFLVPLWLPPDLAFARIDHRAAAVTYHGALPRRARRDDGGRVPEDGTDDRRAEEEARRWHCARTLRGDDAHGGEDGVPGRPAGACVHGAVRAKMEKYAAKKSAAQAKEKRAVWEWDYESFVDVSWRFRRLFPPTRWACEFNTALTVPFFRWLVGPSEVEVGGLRQRSEVRIEKCRYLESSGCVGMCVNMCKVPTQDFFTNEFGLPLTMDPMHISKT

SEQ ID NO: 45106 - protein, 989 aa, Zea Mays
MLEVLDMAPPPPPPPPPPHARHHQGAAKGGHAERRKQPLQSSVTQPKAEPAAAAAAAVLPEGGKRCGGGGGRRRGGRGRAKAPPGEPRVALALAPPPRTVIGPPVPSKGLSFCRRPGFGTVGARCVVKANHFLAELPDKDLIQYDVKITPEVSSRTVNRAIMAELVRLYRSSDLGMRLPAYDGRKNLYTAGTLPFDAREFVVRLTDEDDGTGVPPREREYRVAIKFAARADLHHLRQFIAGRQADAPQEALQVLDIVLRELANQRYVSIGRSFYSPDIRKPQRLGDGLQSWCGFYQSIRPTQMGLSLNIGELCGLGNISCPHACDSFLFCPVAAAYMAMLTADMSSTAFIEPLPVIEFVAQILGKDVISRPLADANRIKIKKALRGVKVEVTHRGNVRRKYRISGLTTQPTHELIFPIDEQMNMKSVVEYFKEMYGFTIQHPHLPCLQVGNQKKANYLPMEACKIVEGQRYTKRLNEKQITSLLKVTCQRPREQEMDILQTVHQNGYEQDPYAKEFGINISEKLTYVEARVLPAPWLKYHDTGKEKECLPQVGQWNMVNKKVINGCKVSHWACINFSRSVPEATARGFCQELAQMCQISGMEFNSEPVMPIYSARPDQVVKALKSVYNIALNKLKGKELELLLAILPDNNGPLYGDIKRICETDLGLISQCCLTKHVFKISKQYLANVSLKINVKMGGRNTVLLDAISWSIPLVSDIPTIIFGADVTHPETGEDSSPSIAAVVASQDWPEVTKYAGLVCAQAHRQELIQDLYKTWHDPQRGTVTGGMIRELLISFRKATGQKPLRIIFYRDGVSEGQFYQVLLYELDAIRKACASLEPNYQPPVTFVVVQKRHHTRLFTNNHKDRSSMDKSGNILPGTVVDSKICHPTEFDFYLCSHAGIQGTSRPAHYHVLWDENNFTADEMQTLTNNLCYTYARCTRSVSVAFRARFYMEPEMSENQTSKSSNGTNGGLVKPLPAVKEKVKRVMFYC

SEQ ID NO: 45107 - protein, 751 aa, Zea Mays
MGNNNVTGQQVSEETTNGADKIVEPSNSSPGPNGTNDTEKDGAEYVNWSKSSKEPVITNAEDKQMASYQKKSPDKVEGLDEKSRSSIQYNTSTRDDQTSNLQKDDEPLRKEATETAIFSSETIALVSTTEDVTSYKDSSIYNEEIVPLMHGTTETSEETIQGNYKSLLQEKIEGSLEELEESSSHDNSPMGGSLAGENTTENTEQGYIEVATVEEILVVMQGETTSSTESIVSTYLDADDSEIKEVVIEDKPVQKESLPDVQPSDGTNLEISKNDNMQIQIPHDQEENRAISKIATVNIMTESDEAFEDDNNILALGNQDEDNAVSTLCGNLYNDEVVAKCQPYLKNPTSMNDPELENEQNERVVGSRRQSSVSVTTTMKHNGIGTIYKEEGIAEKNITAWNLEDNFATENKPEEHYGNLVSITEVNGKDFTGLQSSLSDHHYIGNEEIQRKVSGVSGIVEFDKETVKEILEEDKVNNVEGLGLHFDAHVVTKEGGDLSNLPKAIPLIPLQSLEDIDRKVYRTRDKQETITNSQVDQSQLILLEKYEVLKLENGEILRKCMQLVEDSSNVVIISTDGINHEKVDTNTTSSDFTFEANHYQKEVTEGISAAAFTAQCNQVKVTTCFGTATEEQHTHQTSTPGREASEVTPLLQGAQNIGFSNCIEQHSHVHMEIPTADIAVMQFKIEADEESERSPLLSPREPTGGDFRIANHSARFKKPFESLLMQSEAGIWSPLKEPESNSKSNTMFPKI

SEQ ID NO: 45108 - protein, 574 aa, Zea Mays
MDQQLFTGLIDIAHDHDTESDDWHIALEALCEVLPSLQPIIVYFPDSSQWLSRAVSKSDRREFVQRVEKMFDRLTGPVVLICGQNLLAAAPKDKEQPALMFHNLSRLSSLPSPLKRLVGGLKGERYSRSSDISKLFTNSLTVPLPEEDEQLQLFNNQIEEDRKIMISRHNLVKLHKVLEEHDLSCVELLDVKLDGIVLTKQKAEKAVGWARNHYLSSTTLPSIKGDRLIIPRESLDISIERLKEQGITAKKSSQNLKVLAKDEYERNFISAVVPPNEIGVKFDDIGALEDVKRTLDELVTLPMRRPELFSRGNLLRPCKGVLLFGPPGTGKTLLAKALATEAGANFISITGSTLTSKWFGDAEKLTKALFSFATRLAPVIIFVDEVDSLLGARGGAFEHEATRRMRNEFMAAWDGLRSKENQRILILGATNRPFDLDDAVIRRLPRRIYVDLPDAQNRMKILKILLAKEKLESDFKFDELANATEGYSGSDLKNLCVAAAYRPVHELLEEEKKGRVSNENSYLRPLCLDDFIQAKAKVSSSVSYDATSMNELRKWNEQYGEGGSRTKSPFGFGN

SEQ ID NO: 45109 - protein, 305 aa, Zea Mays
MAAGSQEQGDGLIDKIRGDIAILTLLAEVLCLLDMIVNSFAHTISTKPVDRYTRPEFTDDGPMAINAGRHPILETLHTNFVPNNIFLSEASNMVLVMGPNMSGKSTYLQQICLIVILAQIGCYVPAQFASLRVLDRIFTRIGNGDNVENNSSTFMTEMKETAFIMQNVSSRYTVFATHMERLSELSTMYPNVKILHFEVDLRNDRLDFKFCLKDGIRRVPHYGLLLARVAGIPTSVIDTSTSITSQITEQEMTRMNANCEEYWSLQMTYQVVQRLICLKYSNHGDDYIREALQNLKESYSAGRLT

SEQ ID NO: 45110 - protein, 1614 aa, Zea Mays
MAAPGRRTADVSSSSPSPSPAAPSTGRRLLRTQTVANLGESIFDSEVVPSSLVEIAPILRVANEVEVENPRVAYLCRFYAFEKAHRLDPTSSGRGVRQFKTALLQRLERENDPTLKGRVHKSDASEMQRFYREYYRKYIQALQTVVNKDDRARLTKAYQTAAILFEVLRAVNDSQSVEVDQAILDTHIKVEEKKKLFLPYNILPLDPESTGEAIMRYPEIQAAVYALRNTRGLPWPKDQDKKPEEKNTGKDLLDWLQAMFGFQKDNVSNQREHLILLLANVHIRKIPKADQQPKLDDKALDDVMKKLFKNYKKWCKYLGRKSSLWLPTIQQEVQQRKLLYMGLYLLIWGEAANLRFMPECICYIYHHMAFELYGMLAGNVSPMTGENVRPAYGGDEEAFLTKVVTPIYKVIEKEAERSKTMKSKHSHWRNYDDLNEYFWSVDCFRLGWPMRADADFFKTPKDPYLNHLNGENRSAGNVHWMGKVNFVEIRSFWHIFRSFDRMWIFLILSLQAMIIIAWNGGTPSDIFDAGVFKKVLSIFISAAILKLGQAILDLVFGWKAKRSMSFAVKLRYVLKLISAAAWVVILPVTYAYTWENPTGLARTIKSWLGDGQNQPSLYILAVVIYMAPNILASMLFLFPFMRRILESSNVKVITIMMWWSQPRLFVGRGMHEGAFSLFKYTMFWIILLAMKLIIKPLVQPTKDIMREPIRTFQWHEFFPHGTNNIGVVISLWAPIILVYFMDTQIWYALFSTLIGGIYGAYRRLGEIRTLGMLRSRFESLPEAFNERLIPSDANKSKGLRAAFSSRPKASGDESEREKRAARFAQMWNAIITSFREEDLIDNREKDLLLVPDCKDRELDIFQWPPFLLASKIPIALDMAADSGGKDRDLTKRIKSDPYFSFAIRECYASFKNIINTLVFGQREKDVLVQIFTVVDKHIEEETLITGLNMKNLPALSKKFVELLELLQKNKEEDLGQVVILFQDMLEVVTRDIMEEQDLLETLDSLHGANSRKHEGITPLDQQDQLFAKAIKFPVVESNAWTEKIKRLHLLLTVKESAMDVPINLDARRRISFFANSLFMDMPNAPKVRNMLPFSILTPYYKEDVLFSLQNLEERNEDGVSILFYLQKIYPDEWKNFLERVGCKNEEVLREDEQLEEKLCLWVSYRGQTLTRTVRGMMYYRKALELQAFLDMANNDDLMKGYRAMEVMSEDSPLKTQCKAIADMKFTYVVSCQLYGIQKRSNEPCAHDILRLMTEYPSLRVAYIDEVEAPSKDRIKKIEKVYYSVLVKASVTKPNEPGQSLDQVIYKIKLPGNAILGEGKPENQNHAIIFTRGECLQTIDMNQEHYMEEALKMRNLLQEFEKKHGVRHPSILGVREHIFTGSVSSLAWFMSNQETSFVTIGQRVLANPLRVRFHYGHPDVFDRLFHVTRGGVSKASKIINLSEDIFAGFNSTLREGNVTHHEYMQVGKGRDVGLNQISLFEAKIANGNGEQTLSRDIYRLGHRFDFFRMLSCYYTTIGFYFSTMITVWTVYVFLYGRLYLVLSGLDEALATGKSFSWPLFSSHSRWEQKLTTTEGRYSMEERNTEPLDVGLWCSMPNLLRTIDFIPVAILSRALS

SEQ ID NO: 45111 - protein, 751 aa, Zea Mays
MPANGKLSAKPSPSPMVAPASRPKFTAVTFLGDCDDDDDFQPPRPRPLKPCIGAAALRFRKKLKAPSSGKENSSAAGGAVTVVGVASTAVKDAETLAAGSRVSGDVPKTKRRKTGESCGLSRYGSDSTKLSCKPKIELDRYGYGKGCCSFLPSAIDSTVLALGAVCDFGVRRCDEAQIAVSRHCTSVLEAGHATEELTPTGSGCDPPKTEKKPGSSEAVEGHHDSRLIEPRLVESDANLEFVTGILGSLTDKQDTKKANGVVFGCGVGFQNGNYHLDSLQPELLTSNSKYDSRVCVSNEIQEPGLGACNLISQERKVAAGHSACATPENVTAENKSSAPEACKGQCHSDSSASKLPESHMIHDFEVDGCDNFEIGTQLSELINLCMKDSIEGQSNFGAAPMEQNTLDSKRLSSDYEAKCPLCGSDISDLSEELRQLHTNNCLDEPAKESSPNHKKEPSVGQNVETGRVVEWLRNLGLSKYEEVFIREEVDWETLQWLTEEDLLGIGISSLGPRKKIIHALGELLKKHDDPSEMEAVLNSGNTKKTKLPMNGNKLITEYFQCSSFDQRQRRVCKANKPSNLNEKKISSAKVPTRRTAGKGKIKDTPLWCCIPGTPFRVDAFRYLRDYQGLTRSFCHGKIYCSSITASLVHHKIGIPWDRLHVLTLNEKLNIAGVNLICFDANHCPGSIIILFEPPNGKVSVSLSIFFHLFDISIQYVIFLYLPFRLFCTLEISVFLPRWPTILFCSLPVSTL

SEQ ID NO: 45112 - protein, 780 aa, Zea Mays
MPANGKLSAKPSPSPMVAPASRPKFTAVTFLGDCDDDDDFQPPRPRPLKPCIGAAALRFRKKLKAPSSGKENSSAAGGAVTVVGVASTAVKDAETLAAGSRVSGDVPKTKRRKTGESCGLSRYGSDSTKLSCKPKIELDRYGYGKGCCSFLPSAIDSTVLALGAVCDFGVRRCDEAQIAVSRHCTSVLEAGHATEELTPTGSGCDPPKTEKKPGSSEAVEGHHDSRLIEPRLVESDANLEFVTGILGSLTDKQDTKKANGVVFGCGVGFQNGNYHLDSLQPELLTSNSKYDSRVCVSNEIQEPGLGACNLISQERKVAAGHSACATPENVTAENKSSAPEACKGQCHSDSSASKLPESHMIHDFEVDGCDNFEIGTQLSELINLCMKDSIEGQSNFGAAPMEQNTLDSKRLSSDYEAKCPLCGSDISDLSEELRQLHTNNCLDEPAKGKHGVVVRAVSLVPSVVGLKQSLRICGRKESSPNHKKEPSVGQNVETGRVVEWLRNLGLSKYEEVFIREEVDWETLQWLTEEDLLGIGISSLGPRKKIIHALGELLKKHDDPSEMEAVLNSGNTKKTKLPMNGNKLITEYFQCSSFDQRQRRVCKANKPSNLNEKKISSAKVPTRRTAGKGKIKDTPLWCCIPGTPFRVDAFRYLRDYQGLTRSFCHGKIYCSSITASLVHHKIGIPWDRLHVLTLNEKLNIAGVNLICFDANHCPGSIIILFEPPNGKVSVSLSIFFHLFDISIQYVIFLYLPFRLFCTLEISVFLPRWPTILFCSLPVSTL

SEQ ID NO: 45113 - protein, 1129 aa, Zea Mays
MPANGKLSAKPSPSPMVAPASRPKFTAVTFLGDCDDDDDFQPPRPRPLKPCIGAAALRFRKKLKAPSSGKENSSAAGGAVTVVGVASTAVKDAETLAAGSRVSGDVPKTKRRKTGESCGLSRYGSDSTKLSCKPKIELDRYGYGKGCCSFLPSAIDSTVLALGAVCDFGVRRCDEAQIAVSRHCTSVLEAGHATEELTPTGSGCDPPKTEKKPGSSEAVEGHHDSRLIEPRLVESDANLEFVTGILGSLTDKQDTKKANGVVFGCGVGFQNGNYHLDSLQPELLTSNSKYDSRVCVSNEIQEPGLGACNLISQERKVAAGHSACATPENVTAENKSSAPEACKGQCHSDSSASKLPESHMIHDFEVDGCDNFEIGTQLSELINLCMKDSIEGQSNFGAAPMEQNTLDSKRLSSDYEAKCPLCGSDISDLSEELRQLHTNNCLDEPAKGKHGVVVRAVSLVPSVVGLKQSLRICGRKESSPNHKKEPSVGQNVETGRVVEWLRNLGLSKYEEVFIREEVDWETLQWLTEEDLLGIGISSLGPRKKIIHALGELLKKHDDPSEMEAVLNSGNTKKTKLPMNGNKLITEYFQCSSFDQRQRRVCKANKPSNLNEKKISSAKVPTRRTAGKGKIKDTPLWCCIPGTPFRVDAFRYLRGDCSHWFLTHFHVDRGAAVADMVATARFGARGWYTGPGMVALVVVSHAAGDEDDPQGAMQLVGIVAHEDVGAGAGDDGQAAGAGVLLESAKLIVLSLANRSSKVPVVEVAGDAVDEAAPRLGQRRAFRRVPWGCAPGRATTARHWVGSRQPAVVPTSWCGGGVPAARGRGVPKARRVTQPAGMEVEAAAADPERNYLAKYALYKGPSLWDLATTHNSILGHDYQGLTRSFCHGKIYCSSITASLVHHKIGIPWDRLHVLTLNEKLNIAGVNLICFDANHCPGSIIILFEPPNGKAVLHTGDFRFSSKMANNPVLQSSCVHTLILDTTYCNPRYDFPSQEIVIQFVIEAIQAEAFNPKTLFLIGSYTIGKERLFMEVARLLQKKVYVGAAKLQILKHLELPQEIMHWFTANEAESHIHVVPMWTLASFKRMKYLSNQYAGRYDLIVAFCPTGWAFGKGRKKTPGKRWQQGSIISIRP

SEQ ID NO: 45114 - protein, 180 aa, Zea Mays
MEAFGLRNPMVDGSLEWLSPRSLTTANTISPENRSLGQRSLLAPVGEERLLASSNTNLLWCSSPSFSFDYSTSAALPMAATAALTSSKVWVTIRMASASTAAPLRPRDTRLLRRIDGGNVGTVYLCRHGLRLLNVHTSKPFSLISKLMEEKNSAVELNNKLRQELVHMIPPSTFIKCIFI

SEQ ID NO: 45115 - protein, 276 aa, Zea Mays
MENPPPSSAGPYSAPAPAAQHQDAAKEDQDVAQLVLNLCIPELREKAIIILSKKREKCEDLALLLWHSFGTMAALLQEIVSIYRLLSPPQLSFDQSTRVCNVLVLLKCVASHPDTRMPFLNAQFPLYLYPFLNTTYKTREYEFLRISSLSVIGALVKSDDHEVIVNLLCSEIVPLCLRAIEMGSELSKKMVEALAEQPSPRTLKNTIRCYLRLTDDRRACQALRDYLPIALRDGTFNGLIEVDLTARLWLHQLLHNVMMSDSGGGPRPAPGPVMGM

SEQ ID NO: 45116 - protein, 130 aa, Zea Mays
MGSELSKKVATFILQKIMLDDTGLAYVCASSERFCAVANVLAQMVEALAEQPSPRTLKNTIRCYLRLTDDRRACQALRDYLPIALRDGTFNGLIEVDLTARLWLHQLLHNVMMSDSGGGPRPAPGPVMGM

SEQ ID NO: 45117 - protein, 342 aa, Zea Mays
MAESRTVSNSENKRTLPAWMLKATSGNQTAKTADQNKQALESADIGALDQSKPIKRNNRRPLKNLDSVAAGELGVLQRCEGRGKARRKSKDAVKDEVEEIVELKSKNARKTSGRGAAKNSKKRKLDNVESGPSSPVSTDDDIELTVEDLVSIAEEFVNADKQKQCELQTVEVTRHKEHHLCPKISTEVDRGQSVVNAQSVKGSMQCATATSNTGAIKYTEDESTSHQEVQFSSFKTTEDVAQDMINLLFGHLLSKPVANTEKSDPVESTTRTVNQVPEGRGWHSEVPRQEEPVKKPEPVVESMPTTINHVPEKKDWRSELTKLGEPVAKKKSSLRDKVALFL

SEQ ID NO: 45118 - protein, 929 aa, Zea Mays
MAAMQQLLLLFLLLVYLRPSFGQTNPQDVAALQALMNNWQNEPPSWTGSTDPCTSWVGISCSNGRVTEMRLTGMNLQGTLSNTIGQLSALKYLDLSNNQNLGGPLTPNIGNLKQLTVLILLGCTFTGNIPKEIGNLSQLTFLALNSNKFTGGIPPTLGLLSNLFWLDMSANQLSGQIPVSPGLDQLVNTRHFHFSENQLTGPMSESLFSDKMNLIHVIFNNNNFTGPIPASLGQVKSLQIIRLDHNQFSGPVPNSITTLSNLMEVSIANNLLNGTVPDLTNLTQLDYVFMDHGELNGTIPSAMFSLPNLQQVSLARNSFSGKLNMTGNISSQLQVVNLTSNQIIEANVTGYSNTLILTENPVCLDNTSLCKLKQKQQASYATNLGPCAAIPCPFDQSASPVTSQNCACTSPIQGLMIFQAPAFSDVISPTMFQIVESTLMQNLSLAPRSVAISNVQFSQGNPLTFIVSIFPASGTSFNRSEVIRIISPLVNQTYKAPPNFGPYSFIANTYFTVPSNKKPSMGKAAIIGISIGGVVLILGLVAVATYALRQKRIAKEAVERTTNPFASWGAGGTDNGDAPQLKGARYFPFEELKKCTNNFSETQEIGSGGYGKVYKGRLANGQIAAIKRAQQGSMQGAAEFKNEIELLSRVHHKNLVSLVGFCYEQGEQMLVYEYIPYGTLRENLMGKRGVNLDWKNRLRIAIGSAKGLAYLHELADPPIIHRDIKSTNILLDESLNAKVADFGLSKLVSDTQKGHVSTQVKGTLGYLDPEYYMTQQLSEKSDVYSFGVVLLELVTASQPIEKGRYIVREIRTAIDQYDQEYYGLKGLIDPKIRDSAKLIGFRRFIQLAMECVEESAVDRPTMNDVVKELEIIIQNEGAQLLNSASLSVEQFGNEKRRDPYAEHLPMNDESSSSTFDYNSGYSYSAVQPK

SEQ ID NO: 45119 - protein, 652 aa, Zea Mays
MACNRRRKLLCACLLLACAAPAAAAAVNISVYWGQNSNEGSLGQTCSSGRYALVAMAFLSTFGSGQTPVLNLAGHCDPASGGCTALAADIAACQARGVRVLLSIGGGAGSYNLSSASDAESCPYPDASLGAALATGLFDHVWVQFYNNPGCEYQQKDGDGVANLAASWKAWTQSLPSSASVFLGLPASPAAAGSGYVPPDDLVSRVLPAVSGSANYGGLMLWNRYYDNSTGYSARILSSITADRPNSSPVPGGSGDESPPPDNSPAPPPSTGRSRKRRIKTYIIAGTAGVSGLCAIIALAALMWWYKRRYGMVIPWRRGVSGVESFLQKQGALLHPKGYTYSEVKRMTRSFAHKLGQGGYGAVYRGSMPDGREVAVKMLTGMLEGDGEEFMNEVASISRTSHVNIVTLVGYCLQGPKRALLYEYMPNGSLERYTFGSSSGEDALSWDRLFGIVVGVARGLEYLHTGCNTRIVHFDIKPHNILLDQDMCPKISDFGLAKLCGQKASRVSIAGARGTVGYIAPEVFSRSYEAVGSKADVYSYGMVVLEMVGARKNVHVSATDDGGNSSSSRYFPQWLYENLDQFCRPTTTSNGEIRGDDDDATEVLLVRKMVVVGLWCIQSKPDSRPSMGQVLEMLESNAADLQLPPKALCTAY

SEQ ID NO: 45120 - protein, 146 aa, Zea Mays
MASGPVPNAPRQEPNNPWTPLHRGQGKRNTGKAVSTAAGWNYFTHPNPPTNLATKSRTEAPQAIAVVDLLATGGLTPLQILRLAYVLQGLFTEFVLRSWDLMETDAAGMEGIDAGIGGSAAVFGTTWICGTTPTAVTSVWRASMEG

SEQ ID NO: 45121 - protein, 791 aa, Zea Mays
MSHLLEREADTAFLPHLDQRDGVEAWLILRRCTPASFNVASTDPNNEVSSAVTADALAKAAPALFASRAPRPSLKYLELLLQAEIDFDHIDLPTAAAAEHIVAQVTGNNAVSVVEDQLRCTLFLTRNFLSSHHQAVSKEWDMVAVVHPVCNVGEKKVDAICTGQIEHLLLHHLKRSPTSIGAKAVFDEMQQSTNSATTTPASSALTTTTTTTMAAPATWLDAQPAVSTCSSASSAQEDTPIPLLFLRGGLSMMDNVLPANSTFLSTNISLSNMECLREFMLHLKLGTARFTICDESVVNLWSSPVERVVQQQTWLQLELTNSGLDLWPISWQSQQVYFGTHHGFAAWPRSHGTILVFDFSNTLSWNNSMSIVASCSTNTLLAKDDGDSMNRCFSWCWKPPWLHPGQSKFRDFLWWSFWYFQFVRSKYYGCRASQLLTPWTPPMTLCLVGDDLVVMLVIPSMLLLSRCYFSGVECVLAAADPLFSTFHAERELFWKPPWQHLVPNTRSEIQLLMEFVYLNTGVCRSLHMITKFSKQYFVGLFLLITREKFMSGRIMLALLPLLKLFTSGGARIVNASSLASELKRMPNEKLRNDLSNIDIWDEDRIQAVLNTFLEDLRSGRLEEAGWPVMLPAYSLSKMVINLYTRIIARRYPEMRINCVRPGFVTTDISWNLGVLTPKQGARGPVMLALLPDDGPTGWYRDEMGDKMGSLLFFKMVKYSSLVEGFCGVQFSFPNILLCKSWSQELATNTESHLLPEMLEAANGYICHELHLMLTSIGVTHMIDCEDTPSFL

SEQ ID NO: 45122 - protein, 88 aa, Zea Mays
MPLSSAIPKRANPVSSALVAREISTPPPRPQHRSWQQRKRGRWWACPGRQHLHRSWQQMMKGGRRRACPRRKWPSPAWSPLALETVPW

SEQ ID NO: 45123 - protein, 148 aa, Zea Mays
MAATPDRVNADLHRRLAVDTPPPPQGGIVQALSTRNRWNGYSMDYQGKNKLVFSLTDPKSCTAQGRDCTIVDCTRKIVAQMGKKELMGGKDFYHVEVQSGYDQAFIIGVMAILDSIHGERHGTNRRHLKLSKADASRGYLLSGHMIDA

SEQ ID NO: 45124 - protein, 394 aa, Zea Mays
MPSTANVSQQEAPRPLEKVNLLAARNERESFQIALRPKVSWATSGIAGSVQIQCTDLCSSSGDRLVVGQSITLRRVVPILGVPDALVPIDPLSPQISIQPGETAAVWVSVNVPCGQPPGLYEGEIFITAVKTELDSRTESLPKSEKCRLYRELRSCLDLTGPRDYSSPEEMVQRLTSASTVLRRVLDNPALQDCQENNGFGDMMDEDVINNISVRLKLSLTVWDFTLPVTPSLPAVFGISETVIEDRFCLEHGTEGWYSALDHHFRWLLQYRISPFFCRWGDSMRILAYTCPWPADHPKANEYYSDPRLAAYAVPYAPILSCTDAAKNSLRREVEILKSKPHWSKAYFYLWDEVQVALNWLPLHLKLLQKFQMFCVRTRKSFAQVNGFLAQEKT

SEQ ID NO: 45125 - protein, 661 aa, Zea Mays
MDPSDSNSAAGGKTQNVSVPPVEGVAGGGTSYGWVDGGLRGTNIGAGVIDPTKVHSDDLLHVWSMPSTANVSQQEAPRPLEKVNLLAARNERESFQIALRPKVSWATSGIAGSVQIQCTDLCSSSGDREDQHSHSSIPMVINVVPGVPDALVPIDPLSPQISIQPGETAAVWVSVNVPCGQPPGLYEGEIFITAVKTELDSRTESLPKSEKCRLYRELRSCLDLTGPRDYSSPEEMVQRLTSASTVLRRVLDNPALQDCQENNGFGDMMDEDVINNISVRLKLSLTVWDFTLPVTPSLPAVFGVSWQYSFLLCSISISVLCNCYGTGCNGLRLMGLLGPAELAATEGSVGIAAALAKPAAGTPDHPKANEYYSDPRLAAYAVPYAPILSCTDAAKNSLRREVEILKSKPHWSKAYFYLWDEPLNVEQYDMICNISNELRSYAPDVRILTTYYCGPSGSELAPSTFEAFAKVPNVLRPHTQIFCTSEWVLGTREDLVKDIVAELRPDLGEEWWTYVCMGPSDPQPNWHLGMRGTQHRAVMWRVWKEGGTGFLYWGSNCYEKAMIPSAEICFRRGLPPGDGVLFYPGEVFSSSHEPVASTRLERILSGMQDIEYLKLYSSRYGREEGLALIEKTGMYLGPDRYTLDHGPVDVMRGEVYRTCRS

SEQ ID NO: 45126 - protein, 982 aa, Zea Mays
MAPTLAAGRLEEGATTTDALYLAERKGHDQTKKSLSEAQETNKELLKKIEKAEKNIDQLLENVERLEKDAITRESLLLTTKQSYGDTAKLLLESQEKNQELVHKVEDSDSKIVLLEDSVKRLEGKLAITEALLLTEKEQNASTLKLLAEAQLRIEELIKKLEGSDRKSDSLQDTITRLEQDVTAKEALLLTEKEAHDATRKTLTEAQEESGELLKKIHDNDKHILQLQFTIQRLEETTVANENLLLREREQNDITTKAHNESQEKYEELLSKFVDVDRKIDLLQGTIERLGENTTKDSLLLSERHEKDAIKKALTEAQEKNEELLMKVEDANEKIEQLQTTIDMLEDNVAAKDVSLEAAMKENDAIRRSLTEAQERNDELLKKISDSEYRIHLLQDTIQKLQVDAISRLSSFVMEKQESDASKRAVTEAHERNEDLLKRNEDLLKRNDDLIKKIEDSSKIVTQLQEALQRLEGKACNLEAENQVLRQQATSTPPTSAKSPASRAKISRIHRSPENGHNLNGDIRQTEMKPSTGTSEAITSAANVPDLGDQKDFEHGEKLQRIPKQKYQPSHHQQPQDDQQWLLACIPQHLGFSGSKPVAALLIYQCLLHWKSFEAMKTGVFDSILHAINSATEAQNDMRTLAYWLSNLSTLTVLLQRSFKTTRTAISTPQRRRFSSERIFHGNQTSNAGLAYLSGQSVVGSAGLPQVEAKYPALLFKQQLVDLIEKVYGMISDSVKKELNPLLELCIQDPRTSHSSIAKGNLNGMGQQNQLTYWLGIVKILTSYLDVLRVNHVPSILVHKLFTQIFSLIDVQLFNRLLLRRECCSFSNGEYVRAGLTELKHWSDNATREFAGSAWEALRHIRQAVDFLVISLKPMRTLREIHTDVCPALSIQQLERIVSMYWDDVNGTNTISAEFTSSLKSAVRDESNMATSFSILLDDDSSIPFSLDDITKTLPVIEVADDDFVPFVHENPSFAFLLQRGE

SEQ ID NO: 45127 - protein, 2442 aa, Zea Mays
MASTLNIVIGSHVWVEDKDLSWVDGEVSRIDGKKAHVRTTKGKTVIANISDIHPKDTEAPPDGVDDMTRLSYLHEPGVLDNLAVRYAKNIIYTYTGNILIAINPFQRLPNLVDARTMEKYKGANLGDLDPHVFAIADVSYRQMINEGKSNSILVSGESGAGKTETTKLLMGYLAYLGGRSGTGERTVEQQVLESNPVLEAFGNAKTVRNNNSSRFGKFVEIQFDKSGKISGAAIRTYLLERSRVCQINSPERNYHCFYFLCAAPSEDLKKYKLGDPSLFHYLNQSACIKVDGINDAEEYLATRKAMDTVGITDQEQEAIFRVVAAVLHLGNINFTKGREADSSIIKDDKSRFHLNTAGELLMCDCEKLENALIKREINTPEGVITTTVGPNSATISRDGLAKQIYSRLFDWLVNRINASIGQDPNSNKLIGVLDIYGFESFKTNSFEQLCINFTNEKLQQHFNQNVFKMEQEEYTREQINWSYIEFVDNQDVLDLIERKPGGIIALLDEACMFPKSTHETLSQKLYEKFKNHKRFTKPKLSRTAFTIQHYAGDVTYQSDQFLDKNKDYVVAEHQELLNASKCSFVSGLFPQATEENTKSSKSSIATRFKIQLHELMETLSSTEPHYIRCIKPNSVLKPGIFENTNVLQQLRCSGVLEAIRISCAGYPTRKLFHDFLHRFRVLAPEILKEKNDEKVSCQKVLDKMGLQGYQIGRTKVFLRAGQMADLDARRTEMRNNAAKGVQSQFRTHVAREQFLVLRDTSIYLQSFVRARLACKQHEFLRQQAAALRIQKNARWYFAWKTYYQLRLSAITLQAGLRSMAARNEFTFRKKNKASVHIQSQWRCHRDYSNYMNLKRAALTYQCAWRRRVARKELRKLKLAARDTQALKVAKEKLEERVEELTSRLDREKKLRADLEKSKADEVSKLKEALHEMEQRVEEVKAMQEQESAKKAVEEALAQEREKISLLTTEIEGLKVLLVAEREENDKMKKAHANALETNEELNKEVSDADEKIKQFSDTVRRLEGTVSEHEGLLLTERQQNEAANAALAESQARNEALVSKLEDAVKQNDLLHEADQRFQEATKNLESSLTFEKQRHEANLIELAEAREKIEELQREVGDTDEKFTLLQTSIQSVEERLREKDALLTTERLESEATKKSLNESEDRNQDLLLKIEIAQKDIAHFQETVRRHEENMAALETSLRSERQQNDAIMKQLAESQGEIGELQRKLEDADARNGLLQDSLQRHEENMAALETSLRSERQQNDAIMKQLAESQGEIGELQRKLEDADARNGLLQDSLQRHEENMAALETSLRSERQQNDAIMKQLAESQGEIGELQRKLEDADARNGLLQDSLQRLEDDATTREALMETERKETEMTKKTLTEALDQIEELVKEVECANHSVHQLQDSMQRMEQTAVAREATLLAEHQEKDATSKALAEAQGRIEGLLKEIYSANRKNDQLQSTIERLEEGATTTDALYLAERKGHDQTKKSLSEAQETNKELLKKIEKAEKNIDQLLENVERLEKDAITRESLLLTTKQSYGDTAKLLLESQEKNQELVHKVEDSDSKIVLLEDSVKRLEESTADKDSLLAIERHENSETKKELVGSQKKIAELLTEVQDTRANVAELEDLIRRLEQDVTAKEALLLTEKEAHDATRKTLTEAQEESGELLKKIHDNDKHILQLQFTIQRLEETTVANENLLLREREQNDITTKAHNESQEKYEELLSKFVDVDRKIDLLQGTIERLGENTTKDSLLLSERHEKDAIKKALTEAQEKNEELLMKVEDANEKIEQLQTTIDMLEDNVAAKDVSLEAAMKENDAIRRSLTEAQERNDELLKKISDSEYRIHLLQDTIQKLQVDAISRLSSFVMEKQESDASKRAVTEAHERNEDLLKRNEDLLKRNDDLIKKIEDSSKIVTQLQEALQRLEGKACNLEAENQVLRQQATSTPPTSAKSPASRAKISRIHRSPENGHNLNGDIRQTEMKPSTGTSEAITSAANVPDLGDQKDFEHGEKLQRIPKQKYQPSHHQQPQDDQQWLLACIPQHLGFSGSKPVAALLIYQCLLHWKSFEAMKTGVFDSILHAINSATEAQNDMRTLAYWLSNLSTLTVLLQRSFKTTRTAISTPQRRRFSSERIFHGNQTSNAGLAYLSGQSVVGSAGLPQVEAKYPALLFKQQLVDLIEKVYGMISDSVKKELNPLLELCIQDPRTSHSSIAKGNLNGMGQQNQLTYWLGIVKILTSYLDVLRVNHVPSILVHKLFTQIFSLIDVQLFNRLLLRRECCSFSNGEYVRAGLTELKHWSDNATREFAGSAWEALRHIRQAVDFLVISLKPMRTLREIHTDVCPALSIQQLERIVSMYWDDVNGTNTISAEFTSSLKSAVRDESNMATSFSILLDDDSSIPFSLDDITKTLPVIEVADDDFVPFVHENPSFAFLLQRGE

SEQ ID NO: 45128 - protein, 2498 aa, Zea Mays
MASTLNIVIGSHVWVEDKDLSWVDGEVSRIDGKKAHVRTTKGKTVIANISDIHPKDTEAPPDGVDDMTRLSYLHEPGVLDNLAVRYAKNIIYTYTGNILIAINPFQRLPNLVDARTMEKYKGANLGDLDPHVFAIADVSYRQMINEGKSNSILVSGESGAGKTETTKLLMGYLAYLGGRSGTGERTVEQQVLESNPVLEAFGNAKTVRNNNSSRFGKFVEIQFDKSGKISGAAIRTYLLERSRVCQINSPERNYHCFYFLCAAPSEDLKKYKLGDPSLFHYLNQSACIKVDGINDAEEYLATRKAMDTVGITDQEQEAIFRVVAAVLHLGNINFTKGREADSSIIKDDKSRFHLNTAGELLMCDCEKLENALIKREINTPEGVITTTVGPNSATISRDGLAKQIYSRLFDWLVNRINASIGQDPNSNKLIGVLDIYGFESFKTNSFEQLCINFTNEKLQQHFNQNVFKMEQEEYTREQINWSYIEFVDNQDVLDLIERKPGGIIALLDEACMFPKSTHETLSQKLYEKFKNHKRFTKPKLSRTAFTIQHYAGDVTYQSDQFLDKNKDYVVAEHQELLNASKCSFVSGLFPQATEENTKSSKSSIATRFKIQLHELMETLSSTEPHYIRCIKPNSVLKPGIFENTNVLQQLRCSGVLEAIRISCAGYPTRKLFHDFLHRFRVLAPEILKEKNDEKVSCQKVLDKMGLQGYQIGRTKVFLRAGQMADLDARRTEMRNNAAKGVQSQFRTHVAREQFLVLRDTSIYLQSFVRARLACKQHEFLRQQAAALRIQKNARWYFAWKTYYQLRLSAITLQAGLRSMAARNEFTFRKKNKASVHIQSQWRCHRDYSNYMNLKRAALTYQCAWRRRVARKELRKLKLAARDTQALKVAKEKLEERVEELTSRLDREKKLRADLEKSKADEVSKLKEALHEMEQRVEEVKAMQEQESAKKAVEEALAQEREKISLLTTEIEGLKVLLVAEREENDKMKKAHANALETNEELNKEVSDADEKIKQFSDTVRRLEGTVSEHEGLLLTERQQNEAANAALAESQARNEALVSKLEDAVKQNDLLHEADQRFQEATKNLESSLTFEKQRHEANLIELAEAREKIEELQREVGDTDEKFTLLQTSIQSVEERLREKDALLTTERLESEATKKSLNESEDRNQDLLLKIEIAQKDIAHFQETVRRHEENMAALETSLRSERQQNDAIMKQLAESQGEIGELQRKLEDADARNGLLQDSLQRHEENMAALETSLRSERQQNDAIMKQLAESQGEIGELQRKLEDADARNGLLQDSLQRHEENMAALETSLRSERQQNDAIMKQLAESQGEIGELQRKLEDADARNGLLQDSLQRLEDDATTREALMETERKETEMTKKTLTEALDQIEELVKEVECANHSVHQLQDSMQRMEQTAVAREATLLAEHQEKDATSKALAEAQGRIEGLLKEIYSANRKNDQLQSTIERLEEGATTTDALYLAERKGHDQTKKSLSEAQETNKELLKKIEKAEKNIDQLLENVERLEKDAITRESLLLTTKQSYGDTAKLLLESQEKNQELVHKVEDSDSKIVLLEDSVKRLEESTADKDSLLAIERHENSETKKELVGSQKKIAELLTEVQDTRANVAELEDLIRRLEGKLAITEALLLTEKEQNASTLKLLAEAQLRIEELIKKLEGSDRKSDSLQDTITRLEQDVTAKEALLLTEKEAHDATRKTLTEAQEESGELLKKIHDNDKHILQLQFTIQRLEETTVANENLLLREREQNDITTKAHNESQEKYEELLSKFVDVDRKIDLLQGTIERLGENTTKDSLLLSERHEKDAIKKALTEAQEKNEELLMKVEDANEKIEQLQTTIDMLEDNVAAKDVSLEAAMKENDAIRRSLTEAQERNDELLKKISDSEYRIHLLQDTIQKLQVDAISRLSSFVMEKQESDASKRAVTEAHERNEDLLKRNEDLLKRNDDLIKKIEDSSKIVTQLQEALQRLEGKACNLEAENQVLRQQATSTPPTSAKSPASRAKISRIHRSPENGHNLNGDIRQTEMKPSTGTSEAITSAANVPDLGDQKDFEHGEKLQRIPKQKYQPSHHQQPQDDQQWLLACIPQHLGFSGSKPVAALLIYQCLLHWKSFEAMKTGVFDSILHAINSATEAQNDMRTLAYWLSNLSTLTVLLQRSFKTTRTAISTPQRRRFSSERIFHGNQTSNAGLAYLSGQSVVGSAGLPQVEAKYPALLFKQQLVDLIEKVYGMISDSVKKELNPLLELCIQDPRTSHSSIAKGNLNGMGQQNQLTYWLGIVKILTSYLDVLRVNHVPSILVHKLFTQIFSLIDVQLFNRLLLRRECCSFSNGEYVRAGLTELKHWSDNATREFAGSAWEALRHIRQAVDFLVISLKPMRTLREIHTDVCPALSIQQLERIVSMYWDDVNGTNTISAEFTSSLKSAVRDESNMATSFSILLDDDSSIPFSLDDITKTLPVIEVADDDFVPFVHENPSFAFLLQRGE

SEQ ID NO: 45129 - protein, 218 aa, Zea Mays
MASLLARQAAQALRARQTAQLGPAASAMQGHLRTYMNAGIPKRFKEDEEKEQLAKDLAKDWNAVFERSINTLFLTEMVRGLMLTLKYFFDRNVTINYPFEKGPLSPRFRGEHALRRYESGEERCIACKLCEAAITIEAEEREDGSRRTTRYDIDMTKCIYCGFCQEACPVDAIVEGPNFEFATETHEELLYDKEKLLENGDRWETEIAENLRSESLYR

SEQ ID NO: 45130 - protein, 206 aa, Zea Mays
MAASSADPAQHHASSRPPLLLAVRHLPFPGVPRTRTFPVPGPDVLAPLARRLEELASAAAAHPLLKPLFAAHSHLSSFSQGRRRLVAARRATVLSSGELCFAAVLGDSVAGTVVASGINNFLNLYNTVLVVRLVLTWFPNTPPAIVAPLSTAAALPAELPSCSATAQHHQRTAVSPCSAPHEATLSQRKWMRRMRSQKPQGDDGDH

SEQ ID NO: 45131 - protein, 152 aa, Zea Mays
MFNLHDVYDANTNKPILVLFVGCLPKFFKGVYLSGGPACRWYFNPTIPEAEPYLTSQSTKRIVLQLPQNLQHPPAMETKPIVEHKSLYELLTVNPYDFPETGFECTITIAEIPAEHKWWFPSCTKCNKATIPHTTGYHCESCNWDGYKFKNF

SEQ ID NO: 45132 - protein, 159 aa, Zea Mays
MFNLHDVYDANTNKPILVLFVGCLPKFFKGVYLSGGPACRWYFNPTIPEAEPYLTSQSTKRIVLQLPQNLQHPPAMETKPIVEHKSLYELLTVNPYDFPETGFECTITIAEIPAEHKWWFPSCTKCNKATIPHTTVAQTCSALILLLLHMGDNVLYQCK

SEQ ID NO: 45133 - protein, 431 aa, Zea Mays
MEYTLLPDLAPHKIHAKIQVHVSRKWLFRGATDSGPLQHVDMVLSDREGNAIYAEIPGNLAEQKATNIEEGGVYDINRFRVCAAKTVFKIVDGDKMIQFTFHTIVKCATSPPTTFPLYVYRLTSFDLIEPHVQTTNNFVGVYLSGGPACRWYFNPTIPEAEPYLTSQSTKRIVLQLPQNLQHPPAMETKPIVEHKSLYELLTVNPYDFPETGFECTITIAEIPAEHKWWFPSCTKCNKATIPHTTGYHCESCNWDGYKFNCPNVFRINSIVAAHGRQRSLPMQIGISDQQGPSTPQNKSKPMLLEDSPSTTLEKLSTTTPTTVVRKLLYSETDNTPKTHSISFTQLSFIHFKIYANKSNINSPEKDDGDKETAQNFDICSLIQYPLTKEKDQQIQLNRHLKGSNKGRYASEKKWTSNPPRTKVSLRSSSTF

SEQ ID NO: 45134 - protein, 311 aa, Zea Mays
MEYTLLPDLAPHKIHAKIQVHVSRKWLFRGATDSGPLQHVDMVLSDREGNAIYAEIPGNLAEQKATNIEEGGVYDINRFRVCAAKTVFKIVDGDKMIQFTFHTIVKCATSPPTTFPLYVYRLTSFDLIEPHVQTTNNFVGVYLSGGPACRWYFNPTIPEAEPYLTSQSTKRIVLQLPQNLQHPPAMETKPIVEHKSLYELLTVNPYDFPETGFECTITIAEIPAEHKWWFPSCTKCNKATIPHTTGYHCESCNWDGYKFKYKLKFLASDETDIAEMFCFDTVARHIVVAQTCSALILLLLHMGDNVLYQCK

SEQ ID NO: 45135 - protein, 545 aa, Zea Mays
MAGTPQFQSPHFPPPSPPLGPTFVPPAMNSGGRGGKRRGPPPLAPSGAAAKRVNPSPGTPHVPPPASAAAAVEEDMMDEDVFLDESILAEDEAALLMLQRDEALASRLARWKRPAIPTDLAAGCSRTVAFQQLEIDYVIGESHKELLPSSSGSAAILRIFGVTREGHSLCCQVHGFEPYFYIGCPSGMGPDDISRFHQTLEGRMKESNRSSNVPRFVKRVELVQKQTIMHYQTQQSQPFLKIVVALPTMVASCRGILERGITIEGLGSKSFLTYESNILFALRFMIDCNIVGGNWIELPAGKYRKAACIMSYCQLELDCLYSDLVSHAAEGEYSKMAPFRILSFDIECAGRKGHFPEPTHDPVIQVEFIIHVSDTRYHLVSIQIANLVTHQGEDQPFVRNVMTLKSCSPIVGVEVMSFDAERDILLAWRDFIREVDPDIIIGYNICKFDMPYLIERAEVLKIAEFPILGRIRNSRVRVRDTTFSSRQYGVRESKDVTIEGRVQFDLLQAMQRDYKLSSYSLNSVSAHFLGEQGAAKESPLAPTIS

SEQ ID NO: 45136 - protein, 740 aa, Zea Mays
MGDACFSTQLIDGDGIFNVSGLENFMKDVRLGECGLSYAVVSIMGPQSSGHRLPKDDTAFEKQSALFALAVSDIVLINMWCHDIGREQAANKPLLKTVFQVMMRLFSPRKTTLLFVIRDKSRTPLENLEPILREDIQKIWDAVPKPHAHKETPISEFFDVQVVALSSYEEKEELFKQQVSDLRDRFQHSIAPGGLAGDRRGVVPASGFSFSSQQFWKVIKENKDLDLPAHKVMVATVRCEEIGNEKVTSFIADEEWQQFEEAVQHDFVTGFGKKLSSLLDRCLSEYDMEAIYFDEGVRSSKRQQLESKLLQLVNPAYQSLLGHLHTRTLEAFKEYFGKALEKEGFAVAACNCTETFLEKFDRGSEDAAIQQVNWDTSKVRDKLRRDIEAHVASVRAAKLSELCAKYEAQLTKALVEPVESLLDSASEDTWPAIRKLLQRETKTAVLGLESAVSAFELDEATEKELLAKLEKHGRSVVESKAKEEAGRVLIRMKDRFSTLFSRDADSMPRSVKLLSTMAAIRLEEDGDNIENTLSLALVDTSRHGTTDRSIQLSDPLASSSWERVAEEKTLITPVQCKNLWRQFKAETEYTVTQAIAAQEANKRNNNWLPPPWALAAMAILGFNEFMTLLRNPLYLFAIFVIYLVGKALWVQSEIGREFQHGFLPAILSLSTKFVPTVMNILKRLADAGQEPAAAPERQREMELQPKSTRNGSLYSNVTSAGSSSVTTSEIGPEYSSPVVQ

SEQ ID NO: 45137 - protein, 702 aa, Zea Mays
MDLEGTDGRERGEDDTAFEKQSALFALAVSDIVLINMWCHDIGREQAANKPLLKTVFQATFEVMMRLFSPRKTTLLFVIRDKSRTPLENLEPILREDIQKIWDAVPKPHAHKETPISEFFDVQVVALSSYEEKEELFKQQVSDLRDRFQHSIAPGGLAGDRRGVVPASGFSFSSQQFWKVIKENKDLDLPAHKVMVATVRCEEIGNEKVTSFIADEEWQQFEEAVQHDFVTGFGKKLSSLLDRCLSEYDMEAIYFDEGVRSSKRQQLESKLLQLVNPAYQSLLGHLHTRTLEAFKEYFGKALEKEGFAVAACNCTETFLEKFDRGSEDAAIQQVNWDTSKVRDKLRRDIEAHVASVRAAKLSELCAKYEAQLTKALVEPVESLLDSASEDTWPAIRKLLQRETKTAVLGLESAVSAFELDEATEKELLAKLEKHGRSVVESKAKEEAGRVLIRMKDRFSTLFSRDADSMPRSVKLLSTMAAIRLEEDGDNIENTLSLALVDTSRHGTTDRSIQLSDPLASSSWERVAEEKTLITPVQCKNLWRQFKAETEYTVTQAIAAQEANKRNNNWLPPPWALAAMAILGFNEFMTLLRNPLYLFAIFVIYLVGKALWVQSEIGREFQHGFLPAILSLSTKFVPTVMNILKRLADAGQEPAAAPERQREMELQPKSTRNGSLYSNVTSAGSSSVTTSEIGPEYSSPVVQ

SEQ ID NO: 45138 - protein, 168 aa, Zea Mays
MTAFEYHGTDSRFNRVFNEGMKNHSVIITKKLLDFYTGFEGVSTLVDVGGGVGATLHAITSRHPHISGVNFDLPHVISEAPPFPGVRHVGGDMFASVPAGDAILMKWILHDWSDAQGVFHVDMIMLAHNPGGKERYEREFRELAKGAGFSGFKATYIYANAWAIEFIK

SEQ ID NO: 45139 - protein, 267 aa, Zea Mays
MRRDDAGGGTGFHDLFDSVRRSISFRPTAPAPEAPAGPFGAGAGGIGVRISSCLRKSRGMGLLGLITKSPSPPRRMLPPMPDQSDGGSGGGGANGGVGEENPLIRWRKGELIGAGAFGQVLIGTSNATREKAQAHIKELEEEVKLLKNLSHPNIVRYLGTVREEDTLNILLEFVPGGSIQSLLGKLGSFPEPVIKKYTKQILQGLEYLHSNAIIHRDIKGANILVDNKGCIKLADFGASKQVAKLARFRDVKFIQSRMKGLNFQAKA

SEQ ID NO: 45140 - protein, 532 aa, Zea Mays
MGASRKLQGEIDRVLKKVYDTENANQKEKFEADLKKEIKKLQRYRDQIKTWIQSSEIKDKKALMDARKQIEREMERFKVCEKETKTKAFSKEGLGQQPKTDPKEKAKAETRDWLNNVVSDLESQIDNFEAEIEGLSIKKGKQRPPRLVHLETSITRHKAHIKKLESILRLLDNDELSPEQVNDVKDFLDDYVERNQEDFDEFSDVEDLYSTLPMEKVEALEDMVSLAPSSLVKGVAPVSTTAVLSTKSSVATSPTQPTVSTASSQSTSQDQTEETASQESNPEPTPQTPPPKGGNPGPSVPAVPIVVSTGSAAVSVPAETISSPVRLTVPATAATVLSSAIPRSAPENTLAVTSIPANLSTTLKDDESMSVPPRRPSPATEIGIGRGITRGTTSQALGTAPITIGPVSGNGSLVMPLGSKVQPQQVPRTNDAIGSDSANTNENPILGGRVFSPPVVSGVQWRPQAAAAFQNQIETNQYRGRPEISADHREKYIQRLQQVQQQGGSLLNVSHITGINQKQFPTPQPNPLLQQF

SEQ ID NO: 45141 - protein, 547 aa, Zea Mays
MGASRKLQGEIDRVLKKVQEGVDVFDSIWNKVYDTENANQKEKFEADLKKEIKKLQRYRDQIKTWIQSSEIKDKKALMDARKQIEREMERFKVCEKETKTKAFSKEGLGQQPKTDPKEKAKAETRDWLNNVVSDLESQIDNFEAEIEGLSIKKGKQRPPRLVHLETSITRHKAHIKKLESILRLLDNDELSPEQVNDVKDFLDDYVERNQEDFDEFSDVEDLYSTLPMEKVEALEDMVSLAPSSLVKGVAPVSTTAVLSTKSSVATSPTQPTVSTASSQSTSQDQTEETASQESNPEPTPQTPPPKGGNPGPSVPAVPIVVSTGSAAVSVPAETISSPVRLTVPATAATVLSSAIPRSAPENTLAVTSIPANLSTTLKDDESMSVPPRRPSPATEIGIGRGITRGTTSQALGTAPITIGPVSGNGSQLVMPLGSKVQPQQVPRTNDAIGSDSANTNENPILGGRVFSPPVVSGVQWRPQAAAAFQNQIETNQYRGRPEISADHREKYIQRLQQVQQQGGSLLNVSHITGINQKQFPTPQPNPLLQQF

SEQ ID NO: 45142 - protein, 553 aa, Zea Mays
MGASRKLQGEIDRVLKKVQEGVDVFDSIWNKVYDTENANQKEKFEADLKKEIKKLQRYRDQIKTWIQSSEIKDKKVSASYEQALMDARKQIEREMERFKVCEKETKTKAFSKEGLGQQPKTDPKEKAKAETRDWLNNVVSDLESQIDNFEAEIEGLSIKKGKQRPPRLVHLETSITRHKAHIKKLESILRLLDNDELSPEQVNDVKDFLDDYVERNQEDFDEFSDVEDLYSTLPMEKVEALEDMVSLAPSSLVKGVAPVSTTAVLSTKSSVATSPTQPTVSTASSQSTSQDQTEETASQESNPEPTPQTPPPKGGNPGPSVPAVPIVVSTGSAAVSVPAETISSPVRLTVPATAATVLSSAIPRSAPENTLAVTSIPANLSTTLKDDESMSVPPRRPSPATEIGIGRGITRGTTSQALGTAPITIGPVSGNGSLVMPLGSKVQPQQVPRTNDAIGSDSANTNENPILGGRVFSPPVVSGVQWRPQAAAAFQNQIETNQYRGRPEISADHREKYIQRLQQVQQQGGSLLNVSHITGINQKQFPTPQPNPLLQQF

SEQ ID NO: 45143 - protein, 576 aa, Zea Mays
MGASRKLQGEIDRVLKKVQEGVDVFDSIWNKVYDTENANQKEKFEADLKKEIKKLQRYRDQIKTWIQSSEIKDKKALMDARKQIEREMERFKVCEKETKTKAFSKEGLGQQPKTDPKEKAKAETRDWLNNVVSDLESQIDNFEAEIEGLSIKKGKQRPPRLVHLETSITRHKAHIKKLESILRLLDNDELSPEQVNDVKDFLDDYVERNQEDFDEFSDVEDLYSTLPMEKVEALEDMVSLAPSSLVKGVAPVSTTAVLSTKSSVATSPTQPTVSTASSQSTSQDQTEETASQESNPEPTPQTPPPKGGNPGPSVPAVPIVVSTGSAAVSVPAETISSPVRLTVPATAATVLSSAIPRSAPENTLAVTSIPANLSTTLKDDESMSVPPRRPSPATEIGIGRGITRGTTSQALGTAPITIGPVSGNGSVSALPAINDLSKINILNTDEKINSDGLSQQLVMPLGSKVQPQQVPRTNDAIGSDSANTNENPILGGRVFSPPVVSGVQWRPQAAAAFQNQIETNQYRGRPEISADHREKYIQRLQQVQQQGGSLLNVSHITGINQKQFPTPQPNPLLQQL

SEQ ID NO: 45144 - protein, 394 aa, Zea Mays
MGASRKLQGEIDRVLKKVQEGVDVFDSIWNKVYDTENANQKEKFEADLKKEIKKLQRYRDQIKTWIQSSEIKDKKALMDARKQIEREMERFKVCEKETKTKAFSKEGLGQQPKTDPKEKAKAETRDWLNNVVSDLESQIDNFEAEIEGLSIKKGKQRPPRLVHLETSITRHKAHIKKLESILRLLDNDELSPEQVNDVKDFLDDYVERNQEDFDEFSDVEDLYSTLPMEKVEALEDMVSLAPSSLVKPTVSTASSQSTSQDQTEETASQESNPEPTPQTPPPKGGNPGPSVPAVPIVVSTGSAAVSVPAETISSPVRLTVPATAATVLSSAIPRSAPENTLAVTSIPANLSTTLKDDESMSVPPRRPSPATEIGIGRGITRGTTSQALVGYASW

SEQ ID NO: 45145 - protein, 832 aa, Zea Mays
MGASRKLQGEIDRVLKKVQEGVDVFDSIWNKVYDTENANQKEKFEADLKKEIKKLQRYRDQIKTWIQSSEIKDKKALMDARKQIEREMERFKVCEKETKTKAFSKEGLGQQPKTDPKEKAKAETRDWLNNVVSDLESQIDNFEAEIEGLSIKKGKQRPPRLVHLETSITRHKAHIKKLESILRLLDNDELSPEQVNDVKDFLDDYVERNQEDFDEFSDVEDLYSTLPMEKVEALEDMVSLAPSSLVKPTVSTASSQSTSQDQTEETASQESNPEPTPQTPPPKGGNPGPSVPAVPIVVSTGSAAVSVPAETISSPVRLTVPATAATVLSSAIPRSAPENTLAVTSIPANLSTTLKDDESMSVPPRRPSPATEIGIGRGITRGTTSQALGTAPITIGPVSGNGSVSALPAINDLSKINILNTDEKINSDGLSQQLVMPLGSKVQPQQVPRTNDAIGSDSANTNENPILGGRVFSPPVVSGVQWRPQAAAAFQNQIETNQYRGRPEISADHREKYIQRLQQVQQQGGSLLNVSHITGINQKQFPTPQPNPLLQQFNSQSSSISSQVNLGLGVQGSDAGHIKSEDQQILAEDVGVESSATTGANKQTSEDDTKIPYSNPSAPAAENTQLPRDTDLSPGQPLQPGMPSSGVGVIGRRSVSDLGTIGDNLTGTSGSSGHDQNYYLQMLEAAFHKLPQPKDSERAKTYIPRHPAVTPASYPQVQASIVSNPTFWERIGSDTLATDMLFFAFYYQQNTYQQYLAARELKKQSWRFHRRYNTWFQRHVEPQVTTDEYERGSYVYFDFHVTEDGSGWCQRIKNDFTFEYNYLEDELSVQTN

SEQ ID NO: 45146 - protein, 175 aa, Zea Mays
MKNVDRPPSNPKRIIIQSTQECFSVDIPRVPAKTVRHKPMQAGDEDDNFMPLSKKRKELKITKETVQLILGLPNAGGETALGIDEAVAANNLRAKLGLSKEDFSVAALQDRLRKGFDDDLSSRSFFLILCNRLLFPTASWGITNHEVLLTEEMYRFHEIDWYQLIFNDLCQTAKK

SEQ ID NO: 45147 - protein, 86 aa, Zea Mays
MSLSAHYAGDDLSPKFTNGEYWKKVHGPIFMYLNSSWDASDPTMLWEDAKVQVIIFLTRKCSRIVQPEPASNYCGAAYLYACHEYY

SEQ ID NO: 45148 - protein, 370 aa, Zea Mays
MPPYYDSIIKGVATVMGFVISDWLGVDRITSPPGANYTYSVQAGINAGIDMVMVPYNYTDYINDLTSLVHKGVINISRIDDAVKRILRVKFTMGLFENPLADLSFAEQLGKKEHRELAREAVRKSLVLLKNGNSPDQQFLPLPKRARSILVAGSHASNLGYQCGGWSIQWMGDSGNITTGTTILDAIKSTVADSTSVVYSENPDDSFMKHNDFSFAIVVVGEPPYAETVGDSTDLTMLDPGPDTIRTVCAAVKCAVVIISGRPIVIEPYVPLVEALVAAWLPGTEGQGVADVLFGDYGFTGKLPHTWFKSVDQLPMNVGDLQYDPLYPFGFGLMINSSLPGFSGVDNLGYRKQRVLFAVLCSLLSLVLIS

SEQ ID NO: 45149 - protein, 109 aa, Zea Mays
MVRQTAMVVKCLLLMYYKNSRGRSYRRQGQMLTIVEYFLLLYRALLPTPVWYRFFLNKEYGSLFSSLTTGLYLTFKLTSVVEKIGKGWCVAAKERTSCLCARKKDAKDL

SEQ ID NO: 45150 - protein, 2032 aa, Zea Mays
MYRKACVTTTEEAVASCQVVGYPAMIKASWGGGGKGIRKVHNDDEVRALFKQVQGEVPGSPIFIMRLASQSRHLEVQLLCDQYGNVAALHSRDCSVQRRHQKIIEEGPVTVAPRETVKALEQAARRLAKAVGYVGAATVEYLYSMETGEYYFLELNPRLQVEHPVTEWIAEVNLPAAQVAVGMGIPLWQIPEIRRFYGMDYGGGYDIWRKTAALAAPFNFDEVDSLWPKGHCVAVRITSEDPDDGFKPTGGKVKEISFKSKPNVWAYFSVKSGGGIHEFADSQFGHVFAYGLSRPAAITNMSLALKEIQIRGEIHSNVDYTVDLLNASDFRENKIHTGWLDTRIAMRVQAERPPWYISVVGGALYKTVTTNAATVSEYVSYLTKGQIPPKHISLVNSTVNLNIEGSKYTIETVRTGHGRYKLRMNDSTVEANVQSLCDGGLLMQLDGNSHVIYAEEEAGGTRLQINGKTCLLQNDHDPSKLLAETPCKLLRFLVADGAHVGADVPYAEVEVMKMCMPLLSPASGVIHCMMSEGQALQAGDLIARLDLDDPSAVKRAEPFDGMFPLMDLPVAASSQVHKRYAASLNAARMVLAGYEHNINEVVQDLVCCLDNPELPFLQWDELMSVLATRLPRNLKSELEDKYKEYKLNFYHGKNKDFPSKLLRDIVEENLAYGSEKEKATNERLVEPLMNLLKSYEGGRESHAHFVVKSLFEEYLTVEELFSDGIQSDVIETLRHQHSKDLQKVVDIVLSHQGVRNKAKLVTALMEKLVYPNPGAYRDLLVRFSSLNHKRYYKLALKASELLEQTKLSELCSSIARSLSDLGMHKGEMTIKDSMEDLVSAPLPVEDALISLFDYSDPTVQQKVIVTYISRLYQPHLVKDSIQMKFKESGAIVFWEFSEGHVDTRNGQGAILGGKRWGAMVVLRSLESASTAIMAALKDSVQYNNSEVNTMHIVLLNAETESNISGTSDDQAQHRMEKLTKILKDSSVASDLQAAGLKVISCIVQRDAGRMPMRHTFLWFDEKNCYEEEHILRHVEPPLSALLELGKLKVKGYNEMKYTPSRDRQWHIYTLRNTENPKMLHRVFFRTIVRQPNAGNKFTSAQVSDTGLGCPEESLSFTSNSILRSLMTAIEELELHAIRTGHSHMFLCILKEQKLLDLVPFSGSTIVDVGQDEATACSLLRSMALKIHELVGARMHHLSVCQWEVKLKLDCDGPASGTWRVVTTNVTSHTCTIDIYREVEDTESQKLLYHSATSSAGPMHGVALNNPYQPLSVIDLKRCSARNNRTTYCYDFPLAFETALQKSWQSNCSSVPEGSENSKSYVKSTELVFAEKHGSWGTPIIPMERPAGLNDIGMVAWILEMSTPEFPNGRQIIVVANDITFRAGSFGPREDAFFEAVTNLACERKLPLIYLAANSGARIGIADEVKSCFRVGWSDERSPERGFQYIYLTEEDYARISSSVIAHKLQLDNGEIRWIIDSVVGKEDGLGVENIHGSAAIASAYSRAYEETFTLTFVTGRTVGIGAYLARLGIRCIQRLDQPIILTGFSALNKLLGREVYSSHMQLGGPKIMATNGVVHLTVSDDLEGVSNILRWLSYVPANIGGPLPITKPLDPPDRPVAYIPENTCDPRAAIRGVDDSQGKWLGGMFDKDSFVETFEGWAKTVVTGRAKLGGIPVGVIAVETQTMMQLIPADPGQLDSHERSVPRAGQVWFPDSATKTAQALLDFNREGLPLFILANWRGFSGGQRDLFEGILQAGSAIVENLRTYNQPAFVYIPMAGELRGGAWVVIDSKINPDRIECYAERTAKGNVLEPQGLIEIKFRSEELQDCMGRLDPELINLKAKLQDAKHGNGSLPDIESLQKSIEARTKQLLPLYTQIAVRFAELHDTSLRMAAKGVIKKVVDWEESRSFFYKRLRRRISEDLLAKEIRRIIGDNFTHQSAMELINEWYLASQATTGSTAGWDDDDAFVAWKDSPENYKGYIQELRAQKVSQSLSDLADSSSDLQAFSQGLSTLLDKMDPSQRVKFVQEVKKVLG

SEQ ID NO: 45151 - protein, 306 aa, Zea Mays
MARASLSSQDWLKFSSYKERLLGLSFGLLSTRNHDLSYNLAWRTLTDPSRVSSKAIRRQLGHNLLSALKYTYKIDKRDSHLRPTKGYAFQSTSQVGGLWNSKGLRYFRQEFDVRGAVPLGFYSAALNVGVGAGVILPLAGGFMNSTSSVPERFYLGGNSSPVCSLGGPSSLLGFRLRGVGPTEARRHVLNNSESGSADPGRDYLGGDLAVSAFADLSFDLPLKIFRDAGIHGHAFLTAGNLAKLSEGEYKNFSASEFRQTFRSSAGVGIILPTKLFRVEVNYCRILKQAEHDSAKTGIQFSFSSPM

SEQ ID NO: 45152 - protein, 885 aa, Zea Mays
MASRAPIPPAPPHLRLHAASLFSQRLPLPRARAPRCRGGRSRLLSALPSPPPSPASRSQGVSTAPIEREPPGLAPTPAPTPAQQPHQDPAIAAEVARLSAARERLRAAHTLHEKLRALDAEPRVAAFFGEESSRGVLGVLEPREVLLLKCLVAAGQEHVLGHELDWYGGDGGHHEHHHRNGVSGGSALRDALYSLAGLVGKWTSEGVVAAKERREEMEVLPRLLKFLDNVEEFYDCIGGIIGHTRSYQIMVLELLSASKDRMHRPSKDKFVDFHVPSGLNLLKDKEYASQAALWGIEGLPELGEIYPIGGAGDRLGLVDSDTGESLPAALLPYCGRSLLEGLIRDLQAREFLHFKIFGGQCITPVAIMTSSVKDNHEHIIAICERLDWFGRGRDNFRLFEQPLVPVVNAKDGKWLISKSLFPVGKPGGHGAIWKLAYDRGVLQWLQNCGRKGATVRQVSNVVAATDLTMMALAGIGLRCNKKLGFASCERRPGATEGVNVLIEKQNLEGLWSYGITCIEYTEFEKYGIPEPTLTNSSQVSFPANTNILYVDLQAVQEVGSRKNASCLPGMVLNLKKAVSYPNHLGFECSAAGGRLECTMQNIADDFMNTFNYRCSKGIESELNTFIVYNERKRVTSSAKRKLKSEDRSLHQLLCIPELCSTPEGSLLDIMRNAHDLLSSCGIDIPMVQDNSEYMHSGPPFLIFLHPALGPFWDIIRQKFVGGSVSKGSELQIEVAEFLWKDVELDGSFIILADNVMGSTKNSKNGEQILHYGSRCGRCRLQSVKIVNEGINWTSPNNVYWKHDVERSESVKIILHGNAEFEAKDVVLKGNHVFEVPDGHRMCIIQDRAGFVVKLDLIRDELMDSGTWHWKYAVDGVHVKLNMVEL

SEQ ID NO: 45153 - protein, 876 aa, Zea Mays
MASRAPIPPAPPHLRLHAASLFSQRLPLPRARAPRCRGGRSRLLSALPSPPPSPASRSQGVSTAPIEREPPGLAPTPAPTPAQQPHQDPAIAAEVARLSAARERLRAAHTLHEKLRALDAEPRVAAFFGEESSRGVLGVLEPREVLLLKCLVAAGQEHVLGHELDWYGGDGGHHEHHHRNGVSGGSALRDALYSLAGLVGKWTSEGVVAAKERREEMEVLPRLLKFLDNVEEFYDCIGGIIGHTRSYQIMVLELLSASKDRMHRPSKDKFVDFHVPSGLNLLKDKEYASQAALWGIEGLPELGEIYPIGGAGDRLGLVDSDTGESLPAALLPYCGRSLLEGLIRDLQAREFLHFKIFGGQCITPVAIMTSSVKDNHEHIIAICERLDWFGRGRDNFRLFEQPLVPVVNAKDGKWLISKSLFPVGKPGGHGAIWKLAYDRGVLQWLQNCGRKGATVRQVSNVVAATDLTMMALAGIGLRCNKKLGFASCERRPGATEGVNVLIEKQNLEGLWSYGITCIEYTEFEKYGIPEPTLTNSSQVSFPANTNILYVDLQAVQEVGSRKNASCLPGMVLNLKKAVSYPNHLGFECSAAGGRLECTMQNIADDFMNTFNYRCSKGIESELNTFIVYNERKRVTSSAKRKLKSEDRSLHQTPEGSLLDIMRNAHDLLSSCGIDIPMVQDNSEYMHSGPPFLIFLHPALGPFWDIIRQKFVGGSVSKGSELQIEVAEFLWKDVELDGSFIILADNVMGSTKNSKNGEQILHYGSRCGRCRLQSVKIVNEGINWTSPNNVYWKHDVERSESVKIILHGNAEFEAKDVVLKGNHVFEVPDGHRMCIIQDRAGFVVKLDLIRDELMDSGTWHWKYAVDGVHVKLNMVEL

SEQ ID NO: 45154 - protein, 468 aa, Zea Mays
MGKSMPSPPVPPPPSHGGRNGASGNIVPPPAPPGSNAKLFGPQGRGPAPPSGPMSKSFQSGQAVLRRSNLKPLHWVKVTRAMHGSLWAESQKPDETLKAPVFDMSELENLFSAALPSSDSRRSDKSGSRASGSKPEKIHLIDLRRANNCGIMLTKVKMPLPDLMSAILALDDTVLDADQVENLIKFTPTKDEIELLKGYKGDKQVLGECEQFFMELMKLPRVESKLRVFSFKIQFRSQVSDLKRNLNIVNSSAEEIRGSVKLKRIMQTILSLGNALNQGTARGSAVGFRLDSLLKLSDTRARNNKMTLMHYLSKTLKDFLIGAEAEVRSLTSLYSNVGRNADALALYFGEDPARCPFEQVVTTLQNFVRLFTRSHEENCKQLDLEKKKALKEAEDNSKQLDLEKKKTQKEAETEKIKKKSDSEKACKKELENDKSSKKDSANEKGKLNNPIKELDISLQSPAQTASAK

SEQ ID NO: 45155 - protein, 1180 aa, Zea Mays
MALFRKFFYRKPPDGLLEITERVYVFDSCFTTDVFDDDKYRDYIGDIVAQLQSHFADASFMVFNFRDGDSQSLLANILSSYDMVVMDYPRQYEGCPLLTIEMIHHYLRSGESWLSLGQQNVLIMHCERGGWAVLAFMLAGLLLYRKQFIGEQRTLEMIYRQAPHELVQLWSPLNPMPSQIRYLHYISRRNVSSEWPPQDRALTLDCVILRNIPGFNEEGGCRPIFRIYGQDPLPATNNTPKVLFATPKRSKYVRLYKKADCELIKIDIHCHIQGDVVLECISIDVDQEREEMMFRVMFNTAFIRSNILMLNRDEIDILWDAKDRFPKEFRAEVLLSEMDTANQLGPMEVAGIGEKGGLPVEAFAKVQEMFSNVDWLDPTGDAAVQLFQRLTSSENIQLRQGFLSPSKKEAESLELGSISPIDKHFDNVQQEPSKVEHPTVYVNKLENVGQERLVLLEQTTNSEVKTGISVVQENPGSLVHKVDSNAKQSISLEKAVPSTMKSIDPVLKDQNAKLDEQHGSGQHSFPTIIMSQRFPISSSCPALSGYSSPRLLSACPRFNSAPSALGITALLEDHAGSAENRCGSTTLTFDTTGTPVVTKGMPLLRPPPSPLDLLVSDSTMMSEAKGSSQPTLNNSGLPSHPERQLTFQSLGTTTPATNHQKSSTTVTIELLPTSAPPPPPLPPPSSVFSSRIYHLPPSPTSFRSPAPAAPQPPPVPPPPPPMPRPFPVRSHAPQPLTPQPPALSSSLILSGTPQSPPSPPPSRCSLSKPPAPPPPPPPPPLLASTSSTIRPAASHLPLFASTSSPVRPAAPPPPPAPTSSPIRASALPPPPPPGTSSSPRPPPPPCYSSKQSSSPMGKSMPSPPVPPPPSHGGRNGASGNIVPPPAPPGSNAKLFGPQGRGPAPPSGPMSKSFQSGQAVLRRSNLKPLHWVKVTRAMHGSLWAESQKPDETLKAPVFDMSELENLFSAALPSSDSRRSDKSGSRASGSKPEKIHLIDLRRANNCGIMLTKVKMPLPDLMSAILALDDTVLDADQVENLIKFTPTKDEIELLKGYKGDKQVLGECEQFFMELMKLPRVESKLRVFSFKIQFRSQVSDLKRNLNIVNSSAEEIRGSVKLKRIMQTILSLGNALNQGTARGSAVGFRLDSLLKLSDTRARNNKMTLMHYLSKHIHLAFEREAA

SEQ ID NO: 45156 - protein, 1140 aa, Zea Mays
MALFRKFFYRKPPDGLLEITERVYVFDSCFTTDVFDDDKYRDYIGDIVAQLQSHFADASFMVFNFRDGDSQSLLANILSSYDMVVMDYPRQYEGCPLLTIEMIHHYLRSGESWLSLGQQNVLIMHCERGGWAVLAFMLAGLLLYRKQFIGEQRTLEMIYRQAPHELVQLWSPLNPMPSQIRYLHYISRRNVSSEWPPQDRALTLDCVILRNIPGFNEEGGCRPIFRIYGQDPLPATNNTPKVLFATPKRSKYVRLYKKADCELIKIDIHCHIQGDVVLECISIDVDQEREEMMFRVMFNTAFIRSNILMLNRDEIDILWDAKDRFPKEFRAEVLLSEMDTANQLGPMEVAGIGEKGGLPVEAFAKVQEMFSNVDWLDPTGDAAVQLFQRLTSSENIQLRQGFLSPSKKEAESLELGSISPIDKHFDNVQQEPSKVEHPTVYVNKLENVGQERLVLLEQTTNSEVKTGISVVQENPGSLVHKVDSNAKQSISLEKAVPSTMKSIDPVLKDQNAKLDEQHGSGQHSFPTIIMSQRFPISSSCPALSGYSSPRLLSACPRFNSAPSALGITALLEDHAGSAENRCGSTTLTFDTTGTPVVTKGMPLLRPPPSPLDLLVSDSTMMSEAKGSSQPTLNNSGLPSHPERQLTFQSLGTTTPATNHQKSSTTVTIELLPTSAPPPPPLPPPSSVFSSRIYHLPPSPTSFRSPAPAAPQPPPVPPPPPPMPRPFPVRSHAPQPLTPQPPALSSSLILSGTPQSPPSPPPSRCSLSKPPAPPPPPPPPPLLASTSSTIRPAASHLPLFASTSSPVRPAAPPPPPAPTSSPIRASALPPPPPPGTSSSPRPPPPPCYSSKQSSSPMGKSMPSPPVPPPPSHGGRNGASGNIVPPPAPPGSNAKLFGPQGRGPAPPSGPMSKSFQSGQAVLRRSNLKPLHWVKVTRAMHGSLWAESQKPDETLKAPVFDMSELENLFSAALPSSDSRRSDKSGSRASGSKPEKIHLIDLRRANNCGIMLTKVKMPLPDLMSAILALDDTVLDADQVENLIKFTPTKDEIELLKGYKGDKQVLGECEQFFMELMKLPRVESKLRVFSFKIQFRSQVSDLKRNLNIVNSSAEEIRGSVKLKRIMQTILSLGNALNQGTARGAF

SEQ ID NO: 45157 - protein, 149 aa, Zea Mays
MCQPLRTVSYSNSWDGTCVAAANENDHTGISGTLDREDDSCSRHSINKEVSLVQGVMKMEQSMVQSIQFVSFYLQNHLRNFMYIYLFRSLLQQQQQQQQQQQQSLLSQARWGRLEMKPRMKTSELNPQRKKGETKAKENRKRRNGGTHK

SEQ ID NO: 45158 - protein, 350 aa, Zea Mays
MQELGPFRVNSDNKTLSRNKAAWNNVANVIFLESPAGVGFSYSNTSSDYGLSGDRRTAADAYLFLANWLERFPEYKSRPFYISGESYAGHYVPELAATILTQNSYNSRTAINLRGILVGNPLLDSYMNLKGAVAYYWSHGLMSDEVFDNITRHCKYDSSDGVACSGALEAVDPGQIDPYNVYAPICVDAANGAYYPTGYLPGYDPCSDYYTYSYLNDPAVQNAFHARTTSWSACANLNWTDAPISMVPTVAGLIEKKLPVWIFSGDFDSVCPLPATRFSIHDLNLHVTTPWRPWTVNMEVGGYVQQYQGGFTFASVRGAGHMVPSSQADRALVLLDSFLKGVLPPYVQEQ

SEQ ID NO: 45159 - protein, 277 aa, Zea Mays
MLSVPEAVAVVRLLRIEKGKAFVDLLNEKANDSGDKEIGYVQRTLGFSTRYLEDRDIRLVTVIVAGTVRWKRYLDYLIMSLCSEEKVFREMEPLLLQILRIGFFEILKLDVPAYAAVDENVRLAKVALRPGAGNMVNAILRKLVLLKETDSLPLPKIEGDDRAQARALSIIYSHPVWMVRRWIRFHGKDEALRLMNWNNSDPHFSLRVNTSKGYTRADLVKRLESLQVHYEESIMDEFVRIREGMQQVLKAGLLKDGICAVQDESAGKTANYRPKWV

SEQ ID NO: 45160 - protein, 317 aa, Zea Mays
MSLCSEEKVFREMEPLLLQILRIGFFEILKLDVPAYAAVDENVRLAKVALRPGAGNMVNAILRKLVLLKETDSLPLPKIEGDDRAQARALSIIYSHPVWMVRRWIRFHGKDEALRLMNWNNSDPHFSLRVNTSKGYTRADLVKRLESLQVHYEESIMDEFVRIREGMQQVLKAGLLKDGICAVQDESAGLVVSVVDPQPGETIVDCCAAPGGKTLFMASRLSGEGKIWALDINKGRLRILMDAAKLHGLDDMITDIHADLRLYAKETTVKYDKVLLDAPCSGLGVLSKRADLRWNRQFENLEELMCLQDELLDSASM

SEQ ID NO: 45161 - protein, 90 aa, Zea Mays
MESPPRNPASCCAATRSLPTFASQRRAGSWSGTSSSRRRSSRGAADARSLRKTMRTSKPTPAIWIWSSQKGLTPEGLSPEGPLIEEPPSL

SEQ ID NO: 45162 - protein, 162 aa, Zea Mays
MDDAANPTPPPSTSAASAAAAAAQHQQLQRQLFLMQQAQSHPQQLSQQAMSRFPSNIDAHLRPLGPLRFQQPQPQPQPSHSQGPSQSPSQATQQASPQQQQQQAAAAAAAAQAQAQAQAQAARVRSPEMEMALQDAMRVCNPDVKTPFQSIEDAVNRKKQLS

SEQ ID NO: 45163 - protein, 175 aa, Zea Mays
MDDAANPTPPPSTSAASAAAAAAQHQQLQRQLFLMQQAQSHPQQLSQQAMSRFPSNIDAHLRPLGPLRFQQPQPQPQPSHSQGPSQSPSQATQQASPQQQQQQAAAAAAAAQAQAQAQAQAARVRSPEMEMALQDAMRVCNPDVKTPFQSIEDAVNSHAPVIFSAISTSPSLAHH

SEQ ID NO: 45164 - protein, 160 aa, Zea Mays
MDALTNSNQKKVKDSWRIVNHRDIIPTVPRLMGYCHVEAPVYLKFGDAKDAPVNNSILDDEDQGDVIGEYTPDVLVTEFMKGEKQLVEKLLQTEINLLRSIRDGSALMQHMEDFYYVTLLEVFENYFCFSHTKLCQKLLKNVRSSYQVADTANDEYQLTA

SEQ ID NO: 45165 - protein, 460 aa, Zea Mays
MGLMGGIVATCWEALEAHDGASKGKYTIGLGQDCMAFCSEVEDVISMSLTVVNSLLKKYKIDPKLIGRLEVGSETVIDKSKSIKTWLMQIFEESGNSDIEGVDSSNACYGGTAALLNCVNWVESNSWDGRYGLVVCTDSAVYAEGPARPTGGAAAIAMLIGPNAPISFESKYRASHMAHVYDFYKPDLASEYPVVDGKLSQTCYLMALDSCYRQFCNKYEKIAGKQFSICDAEYFVFHSPYNKLVQKSFARLYYNDFLRNCSSVDDDAKEKLQSFSNLTGEESYQSRDLEKASQQVAKHLHDIKVQPSTLLPKQIGNMYTASLYAALASVLYNKHDSLNGQRIVMFSYGSGLTSTMFSLRLNNGQHPFSLSNIASVLDVTEKLQSRHETLPEKFVETLKLMEHRYGAKDFETSRDTSLLQPGTFYLTKVDSMYRRFYSQKLSEETGGGKTKCCNGLANGH

SEQ ID NO: 45166 - protein, 364 aa, Zea Mays
MDRKDVGILAMDIYFPPSCVQQEALEAHDGASKGKYTIGLGQDCMAFCSEVEDVISMSLTVVNSLLKKYKIDPKLIGRLEVGSETVIDKSKSIKTWLMQIFEESGNSDIEGVDSSNACYGGTAALLNCVNWVESNSWDGRYGLVVCTDSAVYAEGPARPTGGAAAIAMLIGPNAPISFESKYRASHMAHVYDFYKPDLASEYPVVDGKLSQTCYLMALDSCYRQFCNKYEKIAGKQFSICDAEYFVFHSPYNKLVQKSFARLYYNDFLRNCSSVDDDAKEKLQSFSNLTGEESYQSRDLEKASQQVAKHLHDIKVQPSTLLPKQIEWAKNCDVLLRQWFDIHYVFIEAKQWPASLQPIKHCFSS

SEQ ID NO: 45167 - protein, 255 aa, Zea Mays
MNKDKAPMPGDGDPSDGLPPQSTRRAGAPPSSSTPPREYDISRMPDFPTRSTGHRRAHSEILGLPDDLDLSAPGGGDGPSLSDENDEELFSMFLDVDKLNSSCGASSEAEAESSSVADGVGEGAELGHAPRPRHQHSQSMDESMSIKAEQLVGAPGMEGMSSAEAKKAVSAAKLAELALVDPKRAKRVVGGLSKTPPRSAPGWIWANRQSAARSKERKMRYISELERKVQTLQTEATTLSAQLTLLQLSSLCKKG

SEQ ID NO: 45168 - protein, 476 aa, Zea Mays
MTSLSHAIGTVSMPPKWSVGYHQCRYSYDSSEKVLKVVRTFREKGIPCDVVWMDIDYMDGFRCFTFDSIRFPDPKSLVDDLHSIGCKAVWMLDPGIKKEKGFFVFDSGSKNDVWVQKADGSPFVGGYVSYSLHSGEVWPGDCVFPDFTSEKARAWWASLVKDFISNGVDGIWNDMNEPAVSKTVTKTMPESNIHRGDADIGGVQNHSYYHNVYGMLMTRSTYKGMEMANAAKRPFVLTRAGFIGSQRYAATWTGDNLSTWEHLHMSLPMILQLGLSGQPLSGPDIGGFGGNATPKLFGRWMGLGALFPFSRGHTETGSIDHEPWSFGEECEEVCRLALLRRYRLLPHIYTLFYHSHTKGIPVAAPVFFADPQDPELRKVETSFLLGPLLVCASTLPNKGAHECAHKLPKGIWLPFDFADSHPDLPLLYLQGGAILPVGLPIKHVGEASLEDDLSLIIALNENALVTVTVTRDSKAE

SEQ ID NO: 45169 - protein, 460 aa, Zea Mays
MALQLRRFLPHGYGQRHRAVTHVLSPPPPLAMLQFEVFQRYSSAPWPLSPFRPCEMCGVAFRSNSTRKMCSRNIFGVASQPKSSTFFTTGLSGNRSSVCFRARDSRGIALKTNNIVNSRPFSTIYSKKLRFLIKNKTSCNNLNVRREDGSVAHSLFCRSEKRQSTVATCSTIADEASTSTSNSSKSVTDSKTDTAKMRRSRGSKKEVDGVMKDKEVHTKKKRISSRTCIAATKTTESSSAKQENKKTDNCKLKKGTDSPKEKKVNNRSKSKAKVSASSVSSEAEICMKSSIDGSGIEKKPLVPLYPPRAKSVVVVESATKAKVIQNYLGDMYEVLPSYGHVRDLAGRSKSVRPNDDFSMVWEVPAAAWTHLKSIKVALKGAENLILASDPDREGEAIAWHIKEMLEQQGALGCDVTVARVVFHEITENAIKKALMSPRNTGQLPKSFMRVSIFPQKKQLG

SEQ ID NO: 45170 - protein, 372 aa, Zea Mays
MDADVGAGATNQPWPEPDDAHLSPPPPPPPPPASAPTPAAEAAAPTASAAVSPPAPAEANGNSDRKRSYCVCYASGSHCTELCGCEPCHNKPPQGAPWTAPVLPLKPVQTLEAGQEIVEQLIRSPMDLIRRKCTCKKSGCLKKYCDCYQGGAGCSINCKCDDCRNPFGRKVGVILDGKSSGLPAPVHVHERNGTEADSSGDDEEDDDLYMNRQLSPSPVSRESSFQQETLVGVEVQTMNGHLYPKPLTQVRPEPSSWQLSAARRPAEEPRGEVWRFSGRPGEDGASDAVEAARAVAVAPPRESRRPGTRGGDRLRFSIPRCVEAMSAMAELSPVEKSLAPDVFLDESNREIFLSLSVDVRPIWLRRKMKSLV

SEQ ID NO: 45171 - protein, 357 aa, Zea Mays
MATKPFFLWGDTHATSTAAPDSDDVGVFRSSATQATAAGDAPELGAAAAVARPRLRRADAASGPSGKKKQQAGAGGGVGANKKPQRGLGVAELERLRCGGDPLLELSTVVGDPAAAAQGHPMLHYPHRHPHSAFEAAGARYCSQLLAPAPPGGPVCALHSPPAAAGCQRAPVAPEQQYFRDRWTSRVGGFTSSGGGADHQPQCQSQSQLLPPATLEPEHPSSQSTIWRPAVSSSSSCLHTGHRCGICSRRMRALAENNGGALALAPAPTPPDYSIYDLATAMATARQGDAPLAEPPAKKEVREIEFFPAASAHHRAGGGGGGRVSVPDEPAELAASFSSPYGAASHTAPQLDLSLRL

SEQ ID NO: 45172 - protein, 197 aa, Zea Mays
MLETLTKRYEKELIHPIQNLFSGELARAMLIQIQKLKLDLESGLLEMDQILRANAINFAVLAALPAFGLSLLLLVLLRAWVQRDHGAEGRGNIARCQRRLLLVDVERRLMEFQHYRDNGMEEEARCKFGLVLYTLDRLCKAVESHAKETGEWLSLRQDIFDLSKLDMGMPDKMIVVSRLKWMYNCLLPFSSSRLPRL

SEQ ID NO: 45173 - protein, 392 aa, Zea Mays
MATSPPQNPSSGEPSDASSLAAAALEAPVRVWRSLVARFPPLPDSSSFLAGVSDLQLRYFGNSRPRRRRRSALPLPLRPVAAHSARIAGEMPKAFVILDDVVQHTLTNLHSIHKSLLFWQAKAEGTNSQKVYFMIFERGPRAFVDATYQTLTRLGSNGRPVQYILHSASDMVSTKLAALTSMQHCLAAFLAEVHSEVDKCREGLTENSDKSLHTLFIVLNTTFSKLEVSLRNACEGQDELFIDDGNLHELFGKLPEVDVESSEWTEALATDGTSLIYQNLQKLDSFLSSQLSSHKRPNKLTIYWLPYTCGAVGLSVCSLWLLRHSSLMGSPDIDNWIRDAKESVAGFWDEHVEKPIISIRDELFETFKQRDKGVMEKQEVQLTEDSLRSCLL

SEQ ID NO: 45174 - protein, 233 aa, Zea Mays
MLHFDFYEDRLGGNATADFFSTARRADPLATLFLNDFNVVEACDDLSSSADSYVSRLRQLADDAGVTFEGIGLEGHFAKPNVPYVRAVLDKLGTLRLPVWLTEVDVSAAFDHATQAAYLEDVLREGFAHPAVDGIVLWTAMGANATCYQMCLTDADFTNLPAGDVVDRLLGEWQTKEVLGATDDRGSFNFSAFYGEYRLSVTYLNRTADATFSLPRSDDTKHINIRLPPGPAA

SEQ ID NO: 45175 - protein, 1266 aa, Zea Mays
MLDEYNPLVKIFRQARDFLEEHKGIDVSIRIVGADETDRIQYEMPHQEELAMLIVGDLSLENYKRDIIVSTHQNSLQRISIFHPAYMPLQYPLLFPYGERGFQLGIKYHGQHISQNRDDSKRDRVTLHEFLKYHVHYRPNQPNPWLCYGRLSKQVVVDGRAMEDEDRLDYIVRNQSKLRAEYVQGIFDAVEKGIYDASRIGKKVLLPSSHVGSKRYMIQNYHDGIAICCAYGPPDLFITCTCNPKWPKITTCLLPGEHPNDRPDIIVRVFHMKLQQLLDDLQSGKVFGLVLALLYSIEFQKRGLPHVHTLIWLDKKGCEITTETIDSWISAEIPDPELDPLGYALVAEHMMHGPCGDKNWNCPCMKKGKCSKIYPKDFEENTTFSENGFTIYRRRNNGIFIRREQHNLDNKWVVPHNLKLLKRYQAHINVEYVNKSTVLKYLCKYVNKGPDRAKVIFKKIQKGEESHVNKEAETIDEIQEYLDCRYICEQDALWRLLGYEIHYHWPPIERLPVHLPLMNIIKMKSNDKLIDIAKDLKYRKTMLTEWFNANKQYEDAKELTYYEFPKQWRWDGEKRQWKKRQHGFKFGRLYYVNPAEGERFYLRMLLMIVKGAKNYEDIRTYNGVLYQTFKEACAARGLLDDDNEWYRTYQEATNWATSFELRNLFVIMLTYCQIKDEKEFFNTTWHTMVDDIHKHLIQKYHPIKYTPSELELQHYLLEELEELFSKNGQEINNYNLPRRQHTKHIDNINRLIQEEMSYDINYLEEEANKLYIQLNKDQKNAFHTIVSSVLSNNPNFYFVSGHGGTGKTFLWNAIVSYLRAIRKIVLTVASSGVASLLLPNGRTAHSRFRIPIDLDQLSMCDIKRGTNLAKLLIDTDLIIWDEALMTNKQCFEAFDRSLRDIVGETYEKALDIPFGGKVVVLGGDPKQILPVIENGTKEQIINACIIASYLWNHVNIIFLSENMRLRQSNISNEEYEDLLSFNNWILAIGNGVYNNNDNFSSDSTLIEIPKEFLIETTEDKIQALVQFTYPDLQTKYNDPDYIKKRAILATTNDVVDEINDYIISLLPTVEREYYSADSISKCTDAPNDANILYPIEYLNTLNANNFPSHRLKLKIGTPVMLLRNLNQSLGLCNGTRIIITQLGDTIIEGTIITGTHVGEKIHIPRINLTTKGNKWPFTLCQRQFPIKVCYSMTINKSQGQTLSNVGLYLKKKVFTHGQLYLAVSRVTEKKGLKILIENDDGSCGTITENIVYKEVLQSIESHGNIN

SEQ ID NO: 45176 - protein, 52 aa, Zea Mays
MGGGNAQKSKMARERNAEKNKGGKGSQLEANKKAMNIQTPHVQRVIIILQVN

SEQ ID NO: 45177 - protein, 134 aa, Zea Mays
MERGAVVLPLQGAGVGRVLLPVQVRVRSFLRSRRATERRRRLASSAAPARCSKMYVPGFGEGSPERKAAINLQHFFNYIAVSIVLAQLECMKLLRHVWFRLLETNSLEDSGGPICICEERVRVGQFEGIILQDG

SEQ ID NO: 45178 - protein, 428 aa, Zea Mays
MEGAGRDANPLGGYRIGKTLGIGSFGKVKIAEHILTGHKVAIKILNRRKIRSMEMEEKVKREIKILRLFMHPHIIRLYEVIDTPADIYVVMEYVKSGELFDYIVEKGRLHEEEARRFFQQIISGVEYCHRNMVAHRDLKPENLLLDSKCNIKIADFGLSNVMRDGHFLKTSCGSPNYAAPEVISGKLYAGPEVDVWSCGVILYALLCGTLPFDDENIPNLFKKIKGGIYTLPSHLSPSARDLIPRMLVVDPMKRITIREIREHMWFKIQLPRYLAVPPPDTAQQVKKLDEETLNDVIKMGFDKNQLIESLHNRLQNEATVAYYLLMDNRLRTTSGYLGSEFQESMDPSFSQVHAETPTSATEHRQHVFTESPGSGLRQHFASERKWALGLQLYKTRDEKYLLDLQRVSGPQLLFLDLCSAFLTQLRVL

SEQ ID NO: 45179 - protein, 289 aa, Zea Mays
MQSLERRLAQMEERQRNIVASLRDILLPVGHGVVSWGSATGADHFSKKRRVPKMDFFVDEPKVEEQQVPFLQTVGAETPGMSPIRLLSAEPFEKMELALVSLESFLQRATAHTSAAQGMLYAAGVAEPSPALALGEMLSAPMDTEIDLQPSACQNPFASTSGQDQSSSPLAEPPSYYAQSPMLPMAQLHEHAHRTAAGVDMNSDTTTGDTSQDDTTSETGGSHVPAKVNDVFWERFLTDAAEGKSEAIEAKEDVKTAVDRCCPRLQDNVDQITEQMGQLDSASYAPENY

SEQ ID NO: 45180 - protein, 522 aa, Zea Mays
MVYLAFLQDDASCHGEETQSLLEANLGSQLKSKCSDWRAPALILGLECLESMAFNGIATNLVVYLRSVLHGGIASSAATVSLWYGTSFFVPILGAAIADTCLGNYKTILISLIMYLFGIVLITVATFMPSTSVLCDVSSCLSSNGTQTVIFFAGLYLTAVGCGGVRSALLPFGANQFNNENSLDIKKRRNFFSLFYICVIFGVITSGTIIVWVQENVSWAIGYGVATTCIGLALIGFLVGTPIFQEDEPCGSPVKSIFQVIVASFRNMSLEVPADSCLLYEVGSNHIQRTKLAHSDDFRFLDKAAVISDPSLVYGGCRSSWSICTVTEVEELKVLIRLLPIWVTGIFFGAAISQMHTTFIQQGTVMDTKIGSLSIPPASLYSFEVICVTLWVLAVNKVLVPAIRTYFANGVELTQLQRIGIGRFLMIFAMAMAALLETKRLHIVQEGELLSIVWQLPQYFVIAGAECFGIITQLEFFRGQAPDSMKSILTAFALLTTALGNYLSSAIITLIAGVTRIYVSFC

SEQ ID NO: 45181 - protein, 410 aa, Zea Mays
MPSTSVLCDVSSCLSSNGTQTVIFFAGLYLTAVGCGGVRSALLPFGANQFNNENSLDIKKRRNFFSLFYICVIFGVITSGTIIVWVQENVSWAIGYGVATTCIGLALIGFLVGTPIFQEDEPCGSPVKSIFQVIVASFRNMSLEVPADSCLLYEVGSNHIQRTKLAHSDDFRFLDKAAVISDPSLVYGGCRSSWSICTVTEVEELKVLIRLLPIWVTGIFFGAAISQMHTTFIQQGTVMDTKIGSLSIPPASLYSFEVICVTLWVLAVNKVLVPAIRTYFANGVELTQLQRIGIGRFLMIFAMAMAALLETKRLHIVQEGELLSIVWQLPQYFVIAGAECFGIITQLEFFRGQAPDSMKSILTAFALLTTALGNYLSSAIITLIAGVTRVWHSPGWIPDDLNKGHLDYYY

SEQ ID NO: 45182 - protein, 593 aa, Zea Mays
MDPVSHEKVIVRLVRGLDKLKEPAARSLIIWMFGEYSFMGDLTTKIVPPVLKYLAWSFVAEVVETKLQILNSSAKVIMRCTEEDMEEFKSIVAYVIELATCDLNYDVRDRARLLSRLLPCYMTHQGSSHQPQNGDIYKELANHIFNGKLQPTSHPASNYRIYLPGSLSQVVLHAAPGYAPLPKPQSMELNHNVTAAIRGKAKLSGSDSDAESGSSTYESSSVYDSESEGAGLSDRDTVESHQAQEDNQDAPLVQIYDASIQQGQAGQNTEENLADLISTDLTELMSKSALESWLDEAPAEPVVQNLTQTSSARVSFTNRNFERKPKLHTLLDPSGSNGLSVLYAFSPEVSPRSRLLVCVDLYFENVTTQQLTDITIESEEASSSVDFIDQTSEGYSGVPTIVPVEGIHSLAPQQMAKLVLQVHFHHHILPLKLSVFCNGKRHPAKLHPDIAYFVRPLPMDLNTFLCKENQLRGMFEYARRCAFKDHLQKLGHEDSAEHIDKNLQVAQSVASKILSNANIHLVSMDMPVTFSVDDASGLCWRFSGEILSTSKPCLITILAEGRASGPLDLAVKVNSEDTVFALNLLNRVVAIID

SEQ ID NO: 45183 - protein, 604 aa, Zea Mays
MDPVSHEKVCCNVQSCIRAVIVRLVRGLDKLKEPAARSLIIWMFGEYSFMGDLTTKIVPPVLKYLAWSFVAEVVETKLQILNSSAKVIMRCTEEDMEEFKSIVAYVIELATCDLNYDVRDRARLLSRLLPCYMTHQGSSHQPQNGDIYKELANHIFNGKLQPTSHPASNYRIYLPGSLSQVVLHAAPGYAPLPKPQSMELNHNVTAAIRGKAKLSGSDSDAESGSSTYESSSVYDSESEGAGLSDRDTVESHQAQEDNQDAPLVQIYDASIQQGQAGQNTEENLADLISTDLTELMSKSALESWLDEAPAEPVVQNLTQTSSARVSFTNRNFERKPKLHTLLDPSGSNGLSVLYAFSPEVSPRSRLLVCVDLYFENVTTQQLTDITIESEEASSSVDFIDQTSEGYSGVPTIVPVEGIHSLAPQQMAKLVLQVHFHHHILPLKLSVFCNGKRHPAKLHPDIAYFVRPLPMDLNTFLCKENQLRGMFEYARRCAFKDHLQKLGHEDSAEHIDKNLQVAQSVASKILSNANIHLVSMDMPVTFSVDDASGLCWRFSGEILSTSKPCLITILAEGRASGPLDLAVKVNSEDTVFALNLLNRVVAIID

SEQ ID NO: 45184 - protein, 257 aa, Zea Mays
MTGVVVDVGDGATHIVPVADGYVIGSSIRSIPITGKDVTQFIHQLLKERGENIPAEESFDVARRIKEMYCYTSSDIVKEFNKHDKEPSKYIKHWTGTKPKTGAKYTCDIGYERFLGPEIFFNPEIYNNDFTTPLQVVIDKCIQSSPIDTRRALYKNIVLSGGSTMFKDFHRRLQRDLKKIVDARVRASNSRLISGDAKAQPIEVNVVSHPIQRYAVWFGGSVLASTAEFYEACHTKAEYEEYGASICRTNPVFKGMY

SEQ ID NO: 45185 - protein, 238 aa, Zea Mays
MWVMGLPISFRLLMVMSLGAVSDLFQLQERGENIPAEESFDVARRIKEMYCYTSSDIVKEFNKHDKEPSKYIKHWTGTKPKTGAKYTCDIGYERFLGPEIFFNPEIYNNDFTTPLQVVIDKCIQSSPIDTRRALYKNIVLSGGSTMFKDFHRRLQRDLKKIVDARVRASNSRLISGDAKAQPIEVNVVSHPIQRYAVWFGGSVLASTAEFYEACHTKAEYEEYGASICRTNPVFKGMY

SEQ ID NO: 45186 - protein, 377 aa, Zea Mays
MLFKGWKRLIEDLIGREGPFLETACMPFAGLAILLWPFAVIGAFIASVICSVPFGVYAAVVVYQESSLFLGLSYAISSVSIFDEYTNDVLDMAPGSCFPRFKYRTNEASSHGGSLSRPASFKDKHDGKKAPQRVTSFKSSFDEFNPFKLLDHLFIECKHHGKDLVAEGVITPKDIEGTKAGKASTGVLNVGLPAYVILKALLRSAKANSDGLVLSNGSEITSDNRPTSKIFEWFFDPLMVIKDQIKAENFTEEEEAYLEKQVLLISDPKRIKENLIRLPPLSERKQAEIEAFARRLQGITKSISRYPTSKRRFDALVKALSEELARTMGGNQSANGSQVRKIRSGIVRMLSQRSLGKTTGIPGDDHEAQLTSDGFTS

SEQ ID NO: 45187 - protein, 617 aa, Zea Mays
MVSLHDVLEDSELSSLLSLPDYESFVRERLVKNINRKGNIDDTSSFSTIVEQLSNQTEYLSSFLKDLSTYMNSNIIVVLRSLQLVSNTFAHTLEEHDMLKVELGNKDAHNRAQESEVLSLQKDLRAMSSKCIYCVQQIEIVFDDMVDLGYAIDLATGSSSIGSELEVTVSDLKNEDTSDYSKVADTLLATIDTLKSKSEKLSTIKGLVITSLDDFKMKLKQAEAAAETASHEHQLSVERVCMLEKELKILQDECNKMELNIQEYKEREGALKARELELLSVEHTQISADRGLTDNAISKDQTEALVEKISKLNMLSGESNVQREEATSPLDKLFVVIDEFSALQHEVETLRYENEDLQLNIESYTREIEQLREVSRNSDLTNRELESKGSELLEVAVSMERMIQRLGYLGGKDVLEDNKPASTQALLSKLEKLIIASSTESGNSKSIIQELGAKLQSREKAVDELSTKVKMLEDLCHAQLSQPEPSKDRSFEASSSTIGSDMSDIEDAGPVGKTTSVSSVSTAAHARTMRKGSADHLVVNIGSESERLIAAQDSDDKGRIKSLHTSGFIPAQGKHIADRVDAFWVSGSQILMNRPRARLGLMLYWLAVHLWLMGSIL

SEQ ID NO: 45188 - protein, 190 aa, Zea Mays
MGPYAVKSSAIFPNSCKIENSSRLALVCHFKDNGDALIPGQQSTSVFLSHLTFDDNISHDQMVSICLLKEGVFSTIPISISLHESGIFAWRTRVSPVKDLTTFSGPFIVVKVSHSSEEGLSLSVQPLVRIHNKSDFPLELRFQRPNKASEEAAFVTVRSGDMVDESTGVFDAMDLSGGPKRALMSLALGK

SEQ ID NO: 45189 - protein, 57 aa, Zea Mays
MALSDVGTMSAKRGGGGCFLVPVPRALALLPDNDWAPTTLRHVSNSLPSLREGGKVG

SEQ ID NO: 45190 - protein, 265 aa, Zea Mays
MAVLSALSWRWLLALSSLPCFLLLLFFRITPESPRYLCAQNRMTDARFVLERMAIANQAALPMGVLTYHQETKTECITHVSEDEHLIPVREKEHTDRNAISSKSGAVAVLHKLLSHNLLKSTLLLWFVYYASSFAYYGITLLTSQLSDVNRSCKSDLVFEVHQNNGNLYKDTFITSLAARACGTGATTTLCLYAPEVYPTYVRSTGVGIATAIGKIGGVICPLVAVGMLRSCHQMEAVLVFELVLFLAGVSCILFPVETKGREMD

SEQ ID NO: 45191 - protein, 293 aa, Zea Mays
MCDACLMIILLPTHLNSDFSASNKNVWNSAVLSALSWRWLLALSSLPCFLLLLFFRITPESPRYLCAQNRMTDARFVLERMAIANQAALPMGVLTYHQETKTECITHVSEDEHLIPVREKEHTDRNAISSKSGAVAVLHKLLSHNLLKSTLLLWFVYYASSFAYYGITLLTSQLSDVNRSCKSDLVFEVHQNNGNLYKDTFITSLAARACGTGATTTLCLYAPEVYPTYVRSTGVGIATAIGKIGGVICPLVAVGMLRSCHQMEAVLVFELVLFLAGVSCILFPVETKGREMD

SEQ ID NO: 45192 - protein, 334 aa, Zea Mays
MVIFSFFWTIGTVLEASLAWAVLSALSWRWLLALSSLPCFLLLLFFRITPESPRYLCAQNRMTDARFVLERMAIANQAALPMGVLTYHQETKTECITHVSEDEHLIPVREKEHTDRNAISSKSGAVAVLHKLLSHNLLKSTLLLWFVYYASSFAYYGITLLTSQLSDVNRSCKSDLVFEVHQNNGNLYKDTFITSLAEIPGLILSALLVDRFGRKATMSCLMFACCAFLGPLVLHQNELLTTTLLFGARACGTGATTTLCLYAPEVYPTYVRSTGVGIATAIGKIGGVICPLVAVGMLRSCHQMEAVLVFELVLFLAGVSCILFPVETKGREMD

SEQ ID NO: 45193 - protein, 732 aa, Zea Mays
MAAAAPSSSSSSSARARARAPPRPLHPLARGGPEREEMEAVAATHPGAPPMRRKGRKQKQLWPRTVLRKWLNIRSPESDFSADEGDTTGDDTDSEVDYEEMCAWERKLHDEERSVRGFGAEAIGNQLGVVPCGLRRRRKSETLRAQYIDVRELRICAGTWNVAGRLPPNDLDIQEWLDMEEPADIYVLGFQEIVPLNAGNIFGAEDNRPVAMWEHIIRETLNKISPDKPKYKSHSDPPSPSRFKPSDDAFVMEDELISESDSEGDGEVHPLNEQDLVDSVDGIHGNKCEPQTILQDEEFSRLPSVKTFDRSNNLSFKESNLEEKICQKILTKTFSHSERLGMIWPEPPLDMFAQCLPDSTKPFASGKVLRSYLSFKSVNGDSGPFAEDNSVPDFYMSCAAVKRKRPYFVRIISKQMVGVYLSIWSIYVLAPIVFQSFHSHITGIYFPSIHQHYIWKRGSISVSMSIYQTHFCFICCHLTSGEKEGDELKRNADVQEIHRRTIFNLVSRVNMPKTIYDHERIVWLGDLNYRINLPYEKTHELISKQDWNKLFGKDQLKVELKKGHLFEGWTEGVINFPPTYKYKVNSEKYISDDNKSGRRTPAWCDRILSHGKGMRLLSYKTVDLRLSDHRPVTAVYMADVEVFSSKKLQRALTFTDAEAEEQLSFEEDNASGIYNLGLYESSSEVYTPLVRAKVFSKVTWLKPQPLMRALSRPRRNGLPAVSRSFPTLRLRR

SEQ ID NO: 45194 - protein, 569 aa, Zea Mays
MGKSPGKWIKSVLLGKKSTKSGPTKSNESKADNNRYSTGEDRTLSESSPVISEPVLVNIHKNVAINGKAADASDRARQQDPQSQSVVESRSSAPAAQLGEDQAAAKAQAAFRGYLARRSFRALKGIVRLQALIRGYLVRRQAVSTLRATWLIVKFQALVRGRNVRLSGSRMQLNVKFGQSNFGGVRSSDAWKEKLSSNAYVRKLLSSPIVLEPLHFQYDKRDPNSTYNWFERWTIGCIWKPAFQPKRVADGKPLVKKASYAMETQSAKLKRNIRKGSAAIAGSFHTSGESDKVKRNPKNFSSFPADSVPDSQLSELEKVKRNLRKVTDSMAEASKISSSRVDSSKVCNSTAEVPKESNPVAEISKIRSLLNGISDHQDIQCENTRESSFPLGTQEDSDNDHLLRYSNMDSLDLVPGLKSDQEIQLDSVSIGENVDDPTVVAPAVEEMSPQNIDTEDNVLCKKEEARSKEEHLSNGSLRTSKRKSSFPNKSEYVENGTHATPVQPRQPSYMAATESAKAKLRAQNSPSLDSDSAAEKNGFTRRHSLPSSTKTYRLWYSFRHHVQKEVILN

SEQ ID NO: 45195 - protein, 559 aa, Zea Mays
MGKSPGKWIKSVLLGKKSTKSGPTKSNESADNNRYSTGEDRTLSESSPVISEPVLVNIHKNVAINGKAADASDRARQQDPQSQSVVESRSSAPAAQLGEDQAAAKAQAAFRGYLARRSFRALKGIVRLQALIRGYLVRRQAVSTLRATWLIVKFQALVRGRNVRLSGSRMQLNVKFGQSNFGGVRSSDAWKEKLSSNAYVRKLLSSPIVLEPLHFQYDKRDPNSTYNWFERWTIGCIWKPAFQPKRVADGKPLVKKASYAMETQSAKLKRNIRKGSAAIAGSFHTSGESDKVKRNPKNFSSFPADSVPDSQLSELEKVKRNLRKVTDSMAEASKISSSRVDSSKVCNSTAEVPKESNPVAEISKIRSLLNGISDHQDIQCENTRESSFPLGTQEDSDNDHLLRYSNMDSLDLVPGLKSDQEIQLDSVSIGENVDDPTVVAPAVEEMSPQNIDTEDNVLCKKEEARSKEEHLSNGSLRTSKRKSSFPNKSEYVENGTHATPVQPRQPSYMAATESAKAKLRAQNSPSLDSDSAAEKNGFTRRHSLPSSTKSRALKAEWKR

SEQ ID NO: 45196 - protein, 1020 aa, Zea Mays
MDPAPDQLSISASAPFPTIPAASSPRPRAARTRRHAAPFRSDHPTAGSWRSGIDLPRRPSASAFSQQERYPSVASWSASRDANFVFGSGVAGAPEMRRSFSSGSGEASLAELSYAVHRFALDGSGRPSDIDAPGGEGTLPVTDSGGRFGARGCSSTLYEGFSLDSIHHQTEHLDEERGVPSQTIQCESVGMRSLASPTRTDENAPIEFAKRGDSLPIQDSVDQSRNSGHDANAHHDFFVFGGHAGSNSFATNATQTNTSKDAKHVFGSSDNDLPGSEPCEISTTVETPDTITSSFGSEDGIVTVSSIKVPCNIEVVPASELVECQPFDEKSFTFDDQNVPYRNKGGVKGMGMNRGAFMPNKSSANQASFESVSRSGHCSKKVSPEEKLNLKEASSSLQTTESGHAEAEFTSAANTEHSGQSDFIFSASTFHQSMLHPQRRHNKKKSGGMGNHASSIQSLPSSAIGLACSEVSGSQQCVDLAAKWTEYNKIEPNRVAISRGARCSTSENFGDHDNCETWRLRGNQAYAEGLLTKAEECYTHGIDSFSPNEVSRKALMLCYSNRAATRMSLGKMRDALSDCQEAIDIDSSFLKAHARAANCLLALGDVEEAQKAFEMCLKSNHLSSLDHKIVEEASDGLQKAKKISGLISHSEEYLIKKAFDKIPSALQMISDALSISIYSDKLMEMKAEALLLLQRYEEVIRFCEETLYVAERNSVCLCLDKQSESNNMVNNTCFVKLWRYHLIAKSYFFLGKLEEANQFLKKNDQIKVMGCRTLARCGNQSQDSILSFSMAISELLRLKAAGNEAFQSGKYLEAVEHYTAALMSNSESLRFLAVCFCNRAAAYQAMGQILDAIADCSLAIALDADYAKAISRRSSLYELIRDYGQAANDLRRLIALLEKQLQEDMTMPVERSESIRNNLNRANLRFSSLERDARKGASLNMYLILGIESSSSAVDIKKAYRKAALRHHPDKASNFLVRSENISDAVWRDITNEIRRDADYLFKIIGKAYAMLSDPTTRRE

SEQ ID NO: 45197 - protein, 1033 aa, Zea Mays
MDPAPDQLSISASAPFPTIPAASSPRPRAARTRRHAAPFRSDHPTAGSWRSGIDLPRRPSASAFSQQERYPSVASWSASRDANFVFGSGVAGAPEMRRSFSSGSGEASLAELSYAVHRFALDGSGRPSDIDAPGGEGTLPVTDSGGRFGARGCSSTLYEGFSLDSIHHQTEHLDEERGVPSQTIQCESVGMRSLASPTRTDENAPIEFAKRGDSLPIQDSVDQSRNSGHDANAHHDFFVFGGHAGSNSFATNATQTNTSKLNTSVSKDGNCIKFILQDAKHVFGSSDNDLPGSEPCEISTTVETPDTITSSFGSEDGIVTVSSIKVPCNIEVVPASELVECQPFDEKSFTFDDQNVPYRNKGGVKGMGMNRGAFMPNKSSANQASFESVSRSGHCSKKVSPEEKLNLKEASSSLQTTESGHAEAEFTSAANTEHSGQSDFIFSASTFHQSMLHPQRRHNKKKSGGMGNHASSIQSLPSSAIGLACSEVSGSQQCVDLAAKWTEYNKIEPNRVAISRGARCSTSENFGDHDNCETWRLRGNQAYAEGLLTKAEECYTHGIDSFSPNEVSRKALMLCYSNRAATRMSLGKMRDALSDCQEAIDIDSSFLKAHARAANCLLALGDVEEAQKAFEMCLKSNHLSSLDHKIVEEASDGLQKAKKISGLISHSEEYLIKKAFDKIPSALQMISDALSISIYSDKLMEMKAEALLLLQRYEEVIRFCEETLYVAERNSVCLCLDKQSESNNMVNNTCFVKLWRYHLIAKSYFFLGKLEEANQFLKKNDQIKVMGCRCGNQSQDSILSFSMAISELLRLKAAGNEAFQSGKYLEAVEHYTAALMSNSESLRFLAVCFCNRAAAYQAMGQILDAIADCSLAIALDADYAKAISRRSSLYELIRDYGQAANDLRRLIALLEKQLQEDMTMPVERSESIRNNLNRANLRFSSLERDARKGASLNMYLILGIESSSSAVDIKKAYRKAALRHHPDKASNFLVRSENISDAVWRDITNEIRRDADYLFKIIGKAYAMLSDPTTRRE

SEQ ID NO: 45198 - protein, 285 aa, Zea Mays
MAAVAAGELAAFLTGANLIMEYVFSNAAVARSFTAYLGTAVGVDAPREWRIAVRGLPEGFNQVDLVAVAVILLVSVCICYSTKESSAVNLALTAVHVAFILFVIGMGFRHGDARNLTRPADPARSPGGFFPHGAAGVFNGAAMVYLSYIGYDAVSTMAEEVQRPARDIPAGVSGSVVVVTVLYCLMAASMSMLLPYDAIDPEAPFSGAFKGRERCAWVSNVVGAGASLGILTSLMVAMLGQARYLCVIGRSGVMPAWLARVNPRTATPVNASAFLGLFTAALAHV

SEQ ID NO: 45199 - protein, 484 aa, Zea Mays
MCDFFLPRMEGDQAGGGDLTDIVRSGGAVPSSAAEATARDEWQLHQGEPPMLFPPLPSSTATASEAGCAAGSTGANVFGADDPFSGLVDPFCTDYYSSCADFLDATMPDAMPKVGFDAAICGGSGSGCGGGGGQGQLIDVRRKQPLLPRGVQMLPVGALAPREIQPYPAFASDMVKLGITAGQVAGCAIDAAVVGMQMPSPRAAGGIKRRKNQARKVVCIPAPTAAGGRPTGEVVPSDLWAWRKYGQKPIKGSPYPRGYYRCSSSKGCSARKQVERSRNDPNMLVITYTSEHNHPWPTQRNALAGSTRNHHGKNSSGSSGSKGSQNEKQEQQQPSNVKEEPKDPAATTTATSTITTLTTSISPAAVVKEETLAAGSSEALGQVMDTAVADHNIELMDQVFSESYRPMIPEAGHPDDFFSDLAELESDPMSLIFSKEYMEAKPSGGDRGHHEKAISKDLDPLFDMLDWSANSSSAGSSFEQGKRG

SEQ ID NO: 45200 - protein, 204 aa, Zea Mays
MLSQAGIDNIQLVPLHSDILFLHGKIRVVKIRLQQQKGLSPDLLRYKGPIHCARTIVREEGLFGLWSGALPTVMRNGTNQAAMFSAKNTFDIVLWKKHEGDGKVLLPWQSMVSGFLAGTAGPVCTGPFDVVKTRLMAQGRTGDAKYKGMVHAIRTIYAEEGLRALWKGLLPRLMRIPPGQAIMWAVADQVMGLYERTHLQPVHI

SEQ ID NO: 45201 - protein, 314 aa, Zea Mays
MGRTIKKAKKAQSKKSKKKTESSSSSNPAIASGPAKVWQPGVDTLEDGEELQFDPQAYNYLRGFGIGWSCLSFDVVRDQLGLVRSEFPHTFYGVAGTQAEKASWNYIGVFKLSNISGKKREPIPASAVEADTDVDSDSSSDEEDEEINEDTKPILHLKKVAHAGCVNRIRSMTQKPHISATWGDTGHVQVWDLSSFLNSLAESGTAAPKEDDIIHKHLPLKVFSGHKDEGYAIDWSPLVTGRLVSGDCNKCIHLWEPTSNNWNVDANPFVGHSASVEDLQPTYLPHVLWMVRYQYGIYVQGRNLVFLSKLMKPM

SEQ ID NO: 45202 - protein, 264 aa, Zea Mays
MAAHPVDAPTAVHTRAPAPPPHRAALPTLYEFDDLESIIDRTLKRDFDTEEALWLLKIGLVCIPDSPKIKPSMSMVAKMLQGPFGGPGCQNQEHEKHFEHFTPNMSKARNESAFPQDEIDSHREHFYNELTSDSIASKKPKIRKRENNNSVSSSAPNIPNTQGGGGFLWKTEIPEDGNCGDWLSIPLGDVKVLVNEITSVRSKRILHEVPMDTVTRLLDVIDRQIRYSQGLSIDVKENVSYLPCHSSLHDYSCFVARINLTTML

SEQ ID NO: 45203 - protein, 205 aa, Zea Mays
MAEDSGAILRHISSVKDMVDKVNEEIEQNIQKTREIESEIVQHSETEKHYLNKESELTKEVSVTEFELNGLIQVAASESDLLKVAEGNLEFQKVAHDVIRKRVSDKMEKFINESMGFQANMLKSSNEDLVLLLNEKSSLEDESAKLKVKINSIHSSSKEYIAEILEEVNTENSVLESELRYMISEYKDVQKDINNLKILFSSSNS

SEQ ID NO: 45204 - protein, 823 aa, Zea Mays
MIVRTYRRRSRSISEGGGGVSSSQEAFDFDADVDVLGSSASQPLPPSQESSSMWDFDEDPPPSPPRPGKEGRRSGRGGARRGGGLELAEAPAMAPTVTLMEAEEYGEMMESVDDVTFALDGLRPAAQKRTRRASLLALLGICDSAERRRVLRSQGLVQQIIDAILVLDIDDPPCAIAAGALLFVLASDVQDNNLLSSETCVHFLLKLLNPPVNVVDAKAPSIGSKLLGISKFQMLNGSNKDVDSCSEDILLKVEEILLSCKEIKPADRDYKRTTRPELCSKWLALLTMEKACLSAVALEDTSDMVLELGGNFKETLRQLGGLDDIFNVMVNCHSELEKLVKDASTTVVEGKEGAPLQSTTLLLKCLKILENATFLSDNNKTHLLSMSRKLSPKCRSLSFVGVILNIVELLSALSLLQKPSTVSRKADPKNTKVCNGACSDSRGLSLLNHHCKCNNSKKKSILLNRRCQYCSSTKSEASHVTLSSSSDVSQSERILNCSSFSSNGTSSGSFGVKHINGASLKLNVRMDRSKAYPVRGSTGWISMKAQTSDWNSREMAKKRRLSENVRTDLSNGGDDPFAFDDIDQEPSNWDLFGPKRKSPQKRAKRTNGEVLDDCGTALMGSPKLCQPEDIYQSVATSGSKVVDESNLLEDCLLASVKVLMNLANDNPSGCEQIASCGGLNNMASLIIKHFPSFDFSMNSNNQMNESVSSGDPLSSQNSKSPQIKTKQLRDYELDFLVAILGLLVNLVEKDSLNRVRLANARVSVNLSQNPDSKEVQRDVIPLLCSIFLASQGTGETAEAISPAMVTDWTVHLSSLLRVDTFAW

SEQ ID NO: 45205 - protein, 602 aa, Zea Mays
MLNGSNKDVDSCSEDILLKVEEILLSCKEIKPADRDYKRTTRPELCSKWLALLTMEKACLSAVALEDTSDMVLELGGNFKETLRQLGGLDDIFNVMVNCHSELEKLVKDASTTVVEGKEGAPLQSTTLLLKCLKILENATFLSDNNKTHLLSMSRKLSPKCRSLSFVGVILNIVELLSADSRGLSLLNHHCKCNNSKKKSILLNRRCQYCSSTKSEASHVTLSSSSDVSQSERILNCSSFSSNGTSSGSFGVKHINGASLKLNVRMDRSKAYPVRGSTGWISMKAQTSDWNSREMAKKRRLSENVRTDLSNGGDDPFAFDDIDQEPSNWDLFGPKRKSPQKRAKRTNGEVLDDCGTALMGSPKLCQPEDIYQSVATSGSKVVDESNLLEDCLLASVKVLMNLANDNPSGCEQIASCGGLNNMASLIIKHFPSFDFSMNSNNQMNESVSSGDPLSSQNSKSPQIKTKQLRDYELDFLVAILGLLVNLVEKDSLNRVRLANARVSVNLSQNPDSKEVQRDVIPLLCSIFLASQGTGETAEAISPGRLMRTDFYLWSYDLYIHYQALKYPTRPTEGVCLSISFLIASILARMMKNLCCKENAKLK

SEQ ID NO: 45206 - protein, 660 aa, Zea Mays
MIVRTYRRRSRSISEGGGGVSSSQEAFDFDADVDVLGSSASQPLPPSQESSSMWDFDEDPPPSPPRPGKEGRRSGRGGARRGGGLELAEAPAMAPTVTLMEAEEYGEMMESVDDVTFALDGLRPAAQKRTRRASLLALLGICDSAERRRVLRSQGLVQQIIDAILVLDIDDPPCAIAAGALLFVLASDVQDNNLLSSETCVHFLLKLLNPPVNVVDAKAPSIGSKLLGISKFQMLNGSNKDVDSCSEDILLKVEEILLSCKEIKPADRDYKRTTRPELCSKWLALLTMEKACLSAVALEDTSDMVLELGGNFKETLRQLGGLDDIFNVMVNCHSELEKLVKDASTTVVEGKEGAPLQSTTLLLKCLKILENATFLSDNNKTHLLSMSRKLSPKCRSLSFVGVILNIVELLSALSLLQKPSTVSRKADPKNTKVCNGACSDSRGLSLLNHHCKCNNSKKKSILLNRRCQYCSSTKSEASHVTLSSSSDVSQSERILNCSSFSSNGTSSGSFGVKHINGASLKLNVRMDRSKAYPVRGSTGWISMKAQTSDWNSREMAKKRRLSENVRTDLSNGGDDPFAFDDIDQEPSNWDLFGPKRKSPQKRAKRTNGEVLDDCGTALMGSPKLCQPEDIYQSVATSGSKVVDESNLLEDCLLASVKDYA

SEQ ID NO: 45207 - protein, 249 aa, Zea Mays
MAEDQTNPSGPAPASGEEREVVVEHQQEEPRRRAPKLRYLDFVQVAAAQAAVCIAALYGLAKDHAGPLRPGVDAVESAVKGVVGPVCGLPLDVLAFVDRKVHEVGKHLPGALKAASARAYAVARELAAEAQQSLARQGGAGGPGCVRPRGAHCETCTCGTSPRRSTWPSPLGARSTACRCSRTSRRSLCPPPRTGPRSTTGRSPQRRITATPGPRTFPPSPPSASPRCSRRDGGRVPVVCGRQGSASFT

SEQ ID NO: 45208 - protein, 167 aa, Zea Mays
MAEDQTNPSGPAPASGEEREVVVEHQQEEPRRRAPKLRYLDFVQVAAAQAAVCIAALYGLAKDHAGPLRPGVDAVESAVKGVVGPVCGLPLDVLAFVDRKVSLVASPRVARARPVTDPSSSCSFVSQRRRSAPAWRGAVSPTSPVDSGHNDDSSLASAFCARLHSGA

SEQ ID NO: 45209 - protein, 80 aa, Zea Mays
MENWNVFSPIKCHLICRSCSKGLLVASLDCQRMSRAMKHCQEILGAGLKKAQRNSNWEQQPLTQNQCRLPSIVASPKPEI

SEQ ID NO: 45210 - protein, 64 aa, Zea Mays
MPQLLLSGVVAVPLAPVTSRSDLGAQLRVPMRRNLRCARTCPSQSPWSSSPSSPRLDRSSEREP

SEQ ID NO: 45211 - protein, 73 aa, Zea Mays
MVASSGPPRATAAVRTRPLPLRWQSHDLPLPPLNFKNENQKHTVSGLPIRGFHGGTPLRKKPSGYHFSHRLLQ

SEQ ID NO: 45212 - protein, 114 aa, Zea Mays
MASLLQVPRNQLHCHCDPLPPMALTFHRQNCSSSIPPMALTLNPHLLDPVLITILPLARRPTSPRALAVPREDTEVQCSAVLYSSAPRIFGTGQIGTNSTFIGSTKDSVSSYLI

SEQ ID NO: 45213 - protein, 163 aa, Zea Mays
MAEQGKGNNTQAKVTQVSSKDGPVESLVLEDESHVIVEKDLVSQGEEEDIEALLGNYVMAIGEAEAFSERMKRELVALESANVYALLETESVVEEVLQGLEIASICVEDMDEWLGIFNIKLRHMREDIQSVCLLSPLLMYMGKSCFLRVVVIKIIFSFNARYI

SEQ ID NO: 45214 - protein, 105 aa, Zea Mays
MAIGEAEAFSERMKRELVALESANVYALLETESVVEEVLQGLEIASICVEDMDEWLGIFNIKLRHMREDIQSVCLLSPLLMYMGKSCFLRVVVIKIIFSFNARYI

SEQ ID NO: 45215 - protein, 627 aa, Zea Mays
MRRKYRISGLTSQATRELSYVSFIAGMRFPVDDRGTVKTVVQYFMETYGFSIQHTTLPCLQVGNQQRPNYLPMEVCKIVEGQRYSKRLNEKQITALLKVTCQRPQERELDILQTVHHNAYYEDPYALEFGIRIDERLAAVEARVLPPPRLKYHDSGREKDVLPRVGQWNMMNKKMVNGGRVSNWACINFSRNVQDSAARGFSHELAVMCQISGMDFALEPVLPPVTARPEHVERALKARYQDAMNILRPQGRELDLLIVILPDNNGSLYGDLKRICETELGLVSQCCLTKHVFKMSKQYLANVALKINVKVGGRNTVLLDALSRRIPLVSDRPTIIFGADVTHPHPGEDSSPSIAAVVASQDWPEVTKYAGLVSAQAHRQELIQDLFKVWQDPQRRTVTGGMIKELLISFKRATGQKPQRIIFYRDGVSEGQFYQVLLYELDAIRKACASLEPNYQPPVTFVVVQKRHHTRLFANNHSDQRTVDRSGNILPGTVVDSKICHPTEFDFYLCSHAGIQGTSRPAHYHVLWDENKFTADELQTLTNNLCYTYARCTRSVSIVPPAYYAHLAAFRARFYMEPDTSDSGSLASGARGPPPGAARSSTRGAGSVEVRPLPALKENVKRVMFYC

SEQ ID NO: 45216 - protein, 1094 aa, Zea Mays
MVRKKRTGPGGSGETSGESSGASGQGSSQQPERTQQPGGGRGWVPQQGGHGGGQHQGRDRHYQGRGGPGPHHLGSGAPEYHPREYQGRGGEYQGHGGEYQGRGGDYQGRGGGRSRGGMPQPYYGGHRGGNVGRNVPPGPSRTVPELHQAPYVQYPAPVVSPSPSGPGSSSQPMAEVSSGQVQQQFQQLADRGQSSTSQEIQVAPASSKSVRFPLRPGKGTYGDRCIVKANHFFAELPDKDLHQYDVSITPEVTSRGVNRAVMGELVTIYRQSHLGGRLPAYDGRKSLYTAGPLPFTSMAFEITLQDEEDSLGGRQGGHRRERVFRVVIKFAARADLHHLAMFLAGRQADAPQEALQVLDIVLRELPTARYSPVGRSFYSPNLGRRQKLGEGLESWRGFYQSIRPTQMGLSLNIDMSSTAFIEPLPVIDFVAQLLNRDISVRPLSDSDRVKIKKALRGVKVEVTHRGNMRRKYRISGLTSQATRELSYVSFIAGMRFPVDDRGTVKTVVQYFMETYGFSIQHTTLPCLQVGNQQRPNYLPMEVCKIVEGQRYSKRLNEKQITALLKVTCQRPQERELDILQTVHHNAYYEDPYALEFGIRIDERLAAVEARVLPPPRLKYHDSGREKDVLPRVGQWNMMNKKMVNGGRVSNWACINFSRNVQDSAARGFSHELAVMCQISGMDFALEPVLPPVTARPEHVERALKARYQDAMNILRPQGRELDLLIVILPDNNGSLYGDLKRICETELGLVSQCCLTKHVFKMSKQYLANVALKINVKVGGRNTVLLDALSRRIPLVSDRPTIIFGADVTHPHPGEDSSPSIAAVVASQDWPEVTKYAGLVSAQAHRQELIQDLFKVWQDPQRRTVTGGMIKELLISFKRATGQKPQRIIFYRDGVSEGQFYQVLLYELDAIRKACASLEPNYQPPVTFVVVQKRHHTRLFANNHSDQRTVDRSGNILPGTVVDSKICHPTEFDFYLCSHAGIQGTSRPAHYHVLWDENKFTADELQTLTNNLCYTYARCTRSVSIVPPAYYAHLAAFRARFYMEPDTSDSGSLASGARGPPPGAARSSTRGAGSVEVRPLPALKENVKRVMFYC

SEQ ID NO: 45217 - protein, 180 aa, Zea Mays
MLIATTMPRGFAFAAPCRSLQTTTVRCKATGAADRRDVLLGLGGAAASGLLRSSSSSSSGGAPIQAPDLRNCHPPDLPDTAEDVNCCPSPGIVDFTPSPRLRVRPAAHLVDAEYVAKYEKAVALMKQLPDDDPRSFAQQWRVHCAYCDGAFDQVGFPDLEIQIHNCWLFFQWHSLISFTN

SEQ ID NO: 45218 - protein, 300 aa, Zea Mays
MAFGRRSPGSSRHPPALTIVTALLLASLYFAAAAAALSPTDAMHNNNWAVLVCTSRFWFNYRHMANTLSLYRTVKRLGIPDERIILMLADDMACNPRNSYPAQVFNNENHQLNLYGDNVEVDYRGYEVTVENFLRVLTGRHESAVPRSKRLLSDEGSHILLYMTGHGGDEFLKFQDSEELQSHDLADAVKQMKEKHRFKELLIMVDTCQAATLFSQLQSPGVLAIGSSMKGENSYSHHLDSDVGVSVVDRFTYYTLAFFEKLNMYSNASLNSLFTSYNPSMLLSTAYYRMDLYERPLNES

SEQ ID NO: 45219 - protein, 52 aa, Zea Mays
MLLLHFCLPLSDAHLHLSRHHIVPQVCKQFLFLIFLLVSLIDLSPVFICGLG

SEQ ID NO: 45220 - protein, 82 aa, Zea Mays
MSRGEVVIGGPNVSSFLPTAVPLLQNTVKQKSFIGSSHLGSHAVLEYQFLPEQPSDAYERGSQLRFYDALAEVLNSRKEEQM

SEQ ID NO: 45221 - protein, 96 aa, Zea Mays
MLFNSKGGGGMGDYNHLQDGIFCSICPLLISVGELKTADLVSTPAHSVASIPPSTPALHVAPALLSTPVRCSSPFITPPYCSSGMQAIFIFDLSPC

SEQ ID NO: 45222 - protein, 123 aa, Zea Mays
MEPPSLRPRPPWPRHRRRICAFPRPRPPPSPPPTPSPPSASSPPSSALPAHCNRLLTMLAWDGDGDAAIRGLCPLRRLQHLLCHRHLHPWRGMVGPTLLFLRLKCPGQPEEEISQRNKESSKW

SEQ ID NO: 45223 - protein, 81 aa, Zea Mays
MAQIHGQKLASLKLSDLKAPSHPLKDWVIMMKNMSRGQKNTRTIFMDILFFSSFVLLYSYPFLPLYYYFLYMLYLSNITSS

SEQ ID NO: 45224 - protein, 130 aa, Zea Mays
MCGSMVQVGREHSRGAQSPQDSIKRGPKTLKTGGWRSFFLALVAVRSVEEILCFFDDNCPPLREVVVSSHGFPLAQFVMDSWAERPISICLDSQGDCISPSIHFMEGFSSAVSVSLIGDGSQPCCTLWVC

SEQ ID NO: 45225 - protein, 149 aa, Zea Mays
MRGEKQGREAGVQRPVGVRRQPCWREAAAASSASGGAAAASLASAVQERREKQASKGEELKKQAGTFQPQTLDPIPRARHPFPSHARVAFFPPARAAFFPPARAPLSCALFPARVRGARVARLSAAESPRNRRPAPPRRSNRLGARLPP

SEQ ID NO: 45226 - protein, 170 aa, Zea Mays
MKKATHTGQRAALPLRPSLLSPPPSLRSTLPSCSDFRPRRALPMAAGRGDAASMVAVGLVWGATNALMRRGALVWDRRARACPSGNVLRRWAELLLTWQYSAPFAANLSASAAFFALLGGAPISVAVPVTNAVTFAATAAAAAALGERVRPAPAVLGTTLIVLGVWVCIS

SEQ ID NO: 45227 - protein, 187 aa, Zea Mays
MLGNCILCQGWSRKRAKSNYLERRECEYDQKISIDFYKEGDPLKPAVTGVLVFISTPDPIGNKYYLGPAPLQDMARQIATANGPTGYNRDYLFSMEKALAIISHEDDSILELANEVRKVLNRTKETKITGCVNSSTTSRVSRWTMARSTARLVATTGLGEYITQGTILFVTSTTQCILWGTLLAHRL

SEQ ID NO: 45228 - protein, 858 aa, Zea Mays
MDIGGSGGIILSPGSEDDKFARRRSRRVSFADTTAVHVFDRDEDFETPPEEREPDSTPAPPSPRRSSVGREVEDDTEEDFNRPPVIFLHDVDSSYPDSAAESIASADDENFFGPVSASFIQTGRPSDSGMSEDDNHDITMDSRTFSLHFRNIAPPDDCTAYSAGSLMTPNTASEGPLKELTASNPARASINGRDTLTDMSLLSGNPRTYGYDKLSPTLNSMMKKIKGSKQTNSPKLGISDVTSDCVLTLSTSEEESREENLCIDNGVSSDELVMVNTIAEHISMRNPVSTSTDLIQDDNEMIIDVQENSKNCNHDHMDDDPGANNTAEPPAKISPAYKSFMINGDVQSHLVDQSSSKDRPSGSNCTASVSSMCNVDMETHLLDQLPGKDNTYAAQSSSEATAILLMDAEQLRQKNEVMDTETVLHTPRTAGLQLQVPRGSISSLRSKRHKLFTNTVSNSKVARQEGCSSGTEFVHHDKRLSSLKHQELAAASQLQLVEKNELGHRASDMFSNTEDHDSTLSVSSHSVPKLKKTNESFVLGTPRRHGLNESTKVLDTLCHAFTLDSQPSRECNSHVDLNGVGRKRTAEENGYAVQECPEKTTKTARSPRKSRKEIPCVSQPSMIEEKQNGAHDNGKSVDIDWSKVVCTITNATEQVLPASISKYNLQQLDMLSDRLDEIHMARKYKRLSTAVRIKAFCGDKQKRLEEARFLHDKLFYEKAKLQINNMKLVKLQKKAQLCQDGIQECCFLKSKILGAGHMEDSSLPAATTVSAGDRQVGDEGIPIPSERGGEDGGCGASMGRKGNAGRRDGDEATRSGGGVLQARRGDGNEAARVCGGGVQSPLSRPHGGCSRVRRDEQD

SEQ ID NO: 45229 - protein, 1053 aa, Zea Mays
MDIGGSGGIILSPGSEDDKFARRRSRRVSFADTTAVHVFDRDEDFETPPEEREPDSTPAPPSPRRSSVGREVEDDTEEDFNRPPVIFLHDVDSSYPDSAAESIASADDENFFGPVSASFIQTGRPSDSGMSEDDNHDITMDSRTFSLHFRNIAPPDDCTAYSAGSLMTPNTASEGPLKELTASNPARASINGRDTLTDMSLLSGNPRTYGYDKLSPTLNSMMKKIKGSKQTNSPKLGISDVTSDCVLTLSTSEEESREENLCIDNGVSSDELVMVNTIAEHISMRNPVSTSTDLIQDDNEMIIDVQENSKNCNHDHMDDDPGANNTAEPPAKISPAYKSFMINGDVQSHLVDQSSSKDRPSGSNCTASVSSMCNVDMETHLLDQLPGKDNTYAAQSSSEATAILLMDAEQLRQKNEVMDTETVLHTPRTAGLQLQVPRGSISSLRSKRHKLFTNTVSNSKVARQEGCSSGTEFVHHDKRLSSLKHQELAAASQLQLVEKNELGHRASDMFSNTEDHDSTLSVSSHSVPKLKKTNESFVLGTPRRHGLNESTKVLDTLCHAFTLDSQPSRECNSHVDLNGVGRKRTAEENGYAVQECPEKTTKTARSPRKSRKEIPCVSQPSMIEEKQNGAHDNGKSVDIDWSKVVCTITNATEQVLPASISKYNLQQLDMLSDRLDEIHMARKYKRLSTAVKKAQLCQDGIQECCFLKSKILGAGHMEDSSLPAATTVSAGDRQEELDIISEKRLELKIIQRKVEKLRSSLECFHNIEGGIGSDSVVRYAEEQLMMRNQHRIIHWQAGLCKLNDIVKRGNKCDIILNYHNLLFQRIILNISDTSSIFVNNSLNGNQIGKTFPNLDASLAFNFVFEAEENQRVSDLQSLQKKTMETSLLLGNLIDVLEEIKLSKLELVNLTSAAFVLESQTRKLGLHLSFMSFKSGKKIAFIIDMTDLNRSVYPSEPSELIKVFEAHTTLAQPSIDETMASIRNLQSGRTAILRLCRMVSRLIHGYNDDLITGVQAVGSKHHPDMWTCKRFWLLQILVTARLLQQQCITGSLVR

SEQ ID NO: 45230 - protein, 844 aa, Zea Mays
MDIGGSGGIILSPGSEDDKFARRRSRRVSFADTTAVHVFDRDEDFETPPEEREPDSTPAPPSPRRSSVGREVEDDTEEDFNRPPVIFLHDVDSSYPDSAAESIASADGSQVAAFFNWIMSDENFFGPVSASFIQTGRPSDSGMSEDDNHDITMDSRTFSLHFRNIAPPDDCTAYSAGSLMTPNTASEGPLKELTASNPARASINGRDTLTDMSLLSGNPRTYGYDKLSPTLNSMMKKIKGSKQTNSPKLGISDVTSDCVLTLSTSEEESREENLCIDNGVSSDELVMVNTIAEHISMRNPVSTSTDLIQDDNEMIIDVQENSKNCNHDHMDDDPGANNTAEPPAKISPAYKSFMINGDVQSHLVDQSSSKDRPSGSNCTASVSSMCNVDMETHLLDQLPGKDNTYAAQSSSEATAILLMDAEQLRQKNEVMDTETVLHTPRTAGLQLQVPRGSISSLRSKRHKLFTNTVSNSKVARQEGCSSGTEFVHHDKRLSSLKHQELAAASQLQLVEKNELGHRASDMFSNTEDHDSTLSVSSHSVPKLKKTNESFVLGTPRRHGLNESTKVLDTLCHAFTLDSQPSRECNSHVDLNGVGRKRTAEENGYAVQECPEKTTKTARSPRKSRKEIPCVSQPSMIEEKQNGAHDNGKSVDIDWSKVVCTITNATEQVLPASISKYNLQQLDMLSDRLDEIHMARKYKRLSTAVKKAQLCQDGIQECCFLKSKILGAGHMEDSSLPAATTVSAGDRQEELDIISEKRLELKIIQRKVEKLRSSLECFHNIEGGIGSDSVVRYAEEQLMMRNQHRIIHWQAGLCKLNDIVKRGNKCDIILNYHNLLFQRISVANF

SEQ ID NO: 45231 - protein, 1058 aa, Zea Mays
MDIGGSGGIILSPGSEDDKFARRRSRRVSFADTTAVHVFDRDEDFETPPEEREPDSTPAPPSPRRSSVGREVEDDTEEDFNRPPVIFLHDVDSSYPDSAAESIASADDENFFGPVSASFIQTGRPSDSGMSEDDNHDITMDSRTFSLHFRNIAPPDDCTAYSAGSLMTPNTASEGPLKELTASNPARASINGRDTLTDMSLLSGNPRTYGYDKLSPTLNSMMKKIKGSKQTNSPKLGISDVTSDCVLTLSTSEEESREENLCIDNGVSSDELVMVNTIAEHISMRNPVSTSTDLIQDDNEMIIDVQENSKNCNHDHMDDDPGANNTAEPPAKISPAYKSFMINGDVQSHLVDQSSSKDRPSGSNCTASVSSMCNVDMETHLLDQLPGKDNTYAAQSSSEATAILLMDAEQLRQKNEVMDTETVLHTPRTAGLQLQVPRGSISSLRSKRHKLFTNTVSNSKVARQEGCSSGTEFVHHDKRLSSLKHQELAAASQLQLVEKNELGHRASDMFSNTEDHDSTLSVSSHSVPKLKKTNESFVLGTPRRHGLNESTKVLDTLCHAFTLDSQPSRECNSHVDLNGVGRKRTAEENGYAVQECPEKTTKTARSPRKSRKEIPCVSQPSMIEEKQNGAHDNGKSVDIDWSKVVCTITNATEQVLPASISKYNLQQLDMLSDRLDEIHMARKYKRLSTAVRIKAFCGDKQKRLEEARFLHDKLFYEKAKLQINNMKLVKLQKKAQLCQDGIQECCFLKSKILGAGHMEDSSLPAATTVSAGDRQEELDIISEKRLELKIIQRKVEKLRSSLECFHNIEGGIGSDSVVRSLSIQLTILLFIQLCKLNDIVKRGNKCDIILNYHNLLFQRIILNISDTSSIFVNNSLNGNQIGKTFPNLDASLAFNFVFEAEENQRVSDLQSLQKKTMETSLLLGNLIDVLEEIKLSKLELVNLTSAAFVLESQTRKLGLHLSFMSFKSGKKIAFIIDMTDLNRSVYPSEPSELIKVFEAHTTLAQPSIDETMASIRNLQSGRTAILRLCRMVSRLIHGYNDDLITGVQAVGSKHHPDM

SEQ ID NO: 45232 - protein, 106 aa, Zea Mays
MNLDFLRSLRRVCPLSYSPTAFAMLDVTTPRVFDNAYFNNLRYNKGLLASDQVLFTDRRSRPTVNLFAANATAFYEAFVAAMAKLGRIGLKTGADGEIRRVCTAVN

SEQ ID NO: 45233 - protein, 203 aa, Zea Mays
MATPCRSRGFERVELRCPRELDPRPSWTLGDVLAELDALDATRRAAPPTPLKQPPDWANGGGEKAFVMRVDDDDEDDTEDEDDGTSGGKSRALVAKGARFSCNDLASSDSEDELDGQVAPYHLMEKRDLAKSILLELEHEHHLKVQEEVRSKLASLEVCHQNEIRRTISAFARLQKYAESRKEIDRRLDVHFQRRMVSSSMKC

SEQ ID NO: 45234 - protein, 284 aa, Zea Mays
MQQLLNLVRIPRIILQEFSKYDRQIAKSISKLMPTTDSVRTRASELVKALNGQDCPRPISCCLFANKIISIVKSRNTKDKTFGNLAFACGYVMLLVTNQVPDAMDYLLAEFNRVCIYTVPKHMHALNAQARNRDYYRLIGYQEENGQLESTESYLTYVVAYVKLYAAMIQTEIKGVRHPHGLAEGWKWLAMFLNSLPATTATACALHAFLKMAGFALHKKYGSQFMKILDVISRCFLPALKEQGNKMQAEAVNNLQNYLNDKIYLEEPEGQYLVQQLLSKELFM

SEQ ID NO: 45235 - protein, 609 aa, Zea Mays
MATPCRSRGFERVELRCPRELDPRPSWTLGDVLAELDALDATRRAAPPTPLKQPPDWANGGGEKAFVMRVDDDDEDDTEDEDDGTSGGKSRALVAKGARFSCNDLASSDSEDELDGQVAPYHLMEKRDLAKSILLELEHEHHLKVQEEVRSKLASLEVCHQNEIRRTISAFARLQKYAESRKEIDRRLDVHFQRRIAEVLDKHLSMVQRDHEQKSQIVERRIRDDAALEEAKRKEQAVKEEKLRQERAQQEAEARQKEAAKLAAEARKTAFEAAKKEAAEKEAAEKEAAKLRDAAASQPSPNSQNNTAGIKVFGDKYALEAESRRHALVQNQVPENIHHSKEFSKYDRQIAKSISKLMPTTDSVRTRASELVKALNGQDCPRPISCCLFANKIISIVKSRNTKDKTFGNLAFACGYVMLLVTNQVPDAMDYLLAEFNRVCIYTVPKHMHALNAQARNRDYYRLIGYQEENGQLESTESYLTYVVAYVKLYAAMIQTEIKGVRHPHGLAEGWKWLAMFLNSLPATTATACALHAFLKMAGFALHKKYGSQFMKILDVISRCFLPALKEQGNKMQAEAVNNLQNYLNDKIYLEEPEGQYLVQQLLSKELFM

SEQ ID NO: 45236 - protein, 206 aa, Zea Mays
MLSHRGCCEIRLCKMEVLKKSHTSVEDSDHIFLESSGLQDGLSCKKDLHSCGTKASDEEISDRLQENHDNTQPSDNHNYSVDQTQLPFLQALLRVQMKRSHRFLDKLPVVHWHLLTDKSIDPTYLVVMTATAAVGAATLLQRVIQIRTKPTPPNPRRPSSVQAFHSSTSCAGHQSRAIRKAVAQSAVHRFSAFKLLKRFSRVSSKN

SEQ ID NO: 45237 - protein, 394 aa, Zea Mays
MVVVVSTSLCSFLPAHPFSLARPRRPHPTNPTAKPLSRTLSIRCIATTAAGPPPLPPPKLVRCPALDRQAARASRLRFARKLLTLLLSKPRHFLPLRVLNRCRRFLGLPRRGRPLIPMVLRYPTLFRLFQAHTSLPLSPSLSTLAVALTPAAEALAADLAALRATGTGAGALAAKIHRLLLMTPRRNIPVSPFEPLDEGASLEMLERRACAVVREVLAMTVEKRTLVDHLTHFRKDLGLPNRLRAMLVRHPELFYVSVKGVRHSVFLVEAFDDDGRLLVEDEMLVGRDRLEELVREGKRMRRARKKGVLTFDGDSDEDEDDDAAEEEGSLKVDDEFGDLFEDGVIGEDWEEVGDGGGSDAYEEYDAESGDMEEFWVKKAVAQGLVGNGNEQDVW

SEQ ID NO: 45238 - protein, 246 aa, Zea Mays
MLSGVDHDVPDGIGMARLAWTRLPTADGEGAGPSTSEAADDELLSGAAIESLDYEVIENYAYREEQAQRSKFWVPYYVMLKWLFALLIGVGTGLAAIFINLAVENFSGWKYTATFAIIKHSYFVGFFVYTVFNLALVFSSVYIVTNFAPAAAGSGIPEIKGYLNGVDTHGILLFRTLVGKIFGSIGSVGGGLALGKEGPLVHTGACIASLLGQGGSAKYHLSSRWVRIFESDRDRRDLINMLYQTL

SEQ ID NO: 45239 - protein, 967 aa, Zea Mays
MMLTRDRMATLPFPPDPSYPLTISSTPDASSHSSTSPTPETTPIPAANHLSSSPASAGPSACGGRSKAQRWCEDGAAGAAGVGAVPAHAAGAGVVPVGAGVVPAGAGVVPAAVGVAPSQNRRSYRDALVSSQRPVSRVAVVSAGGGWETVQSRRGRRLARRPPQPEPRPVPVDLRGRCFNCFSADHRAARCSNRVRCFFCRRRGHRVSECPRRQTNLVALQTNLAAPVAAPVRRLVWRPISKETSAAVSGADHAMAGAGGDHAMAGGSTLGGSDVAISGKRRTRRGQRKRRAGTGGGLGGDPLLLSSGNLSPAAQDGPRPVRFIGRSRMIDRAELELRHALIVSVVGQEGTGCATEVREALASRFGLDADALRLRRAAPGSFIVLFPSEELAGRVFSGGPSLFVPPLRLHIKRWTRQAFASGGSVLSSLIDVELRGIPAHLWGLETAEGLHPDSTSGEDLSVIRLSAWCRSPVELPEVLDLHAVEPAVPDEDEVWIPRSLVFPVFVKIIGPEGVLVEEQLQPPPSDPSDDEPEQSRRARRVQRLGDQASLPRTSVHSRLGPRLHSSSTRVGPSDDVELLDALMDNSDDVAASVSSDSLAEPVDAPTLPCAAVEKLAAPGVLALCDVVVPVYSPDGASADLAAELREDSLLAVSCVVNTSSARWNLKPPVFKVYSRRLRPSILDDQDGPLVQSGLDNSMVISSPLCEFQCLVTKPVDALLPTPQIPKRRKKPLPSNFIPRRSRRVAKFPPELGSEAAAQDGSNYAELFVSGLSSVHIAALAALFGWTVLVAFEPDCFEPAIELPVSEEQQDKDDDGYKKKSRMDDNGDQVIKKQTSAVNSSSSPSNQENGGPVPMQTTSFSLLASLSSVGVTNSPPRTEGLSATLSHLPLSLIGCHSVHLAGINPEHQKQGSDMIQEQVGTGAGTVIAEGVNNDVFAAATTTMEKLEVSKADQRIEGTVQLVQHSAKR

SEQ ID NO: 45240 - protein, 190 aa, Zea Mays
MGNKELSDETKSTTAEGNVEIVPGDELTTTLLDAVNTIQRTTGYGFLSCYKRKICTFQTLALDLAPLRSRIMTLRLRSRPRAHCYGVRSSWGHQGRRTLRRGYRRVMGRARASTSSAPSGTDGGRSGLPAGGVGDPDSAGAFMSLRSGPRIRWCWRPDACAVRASHRRRSVRRDVWTRDLGRPHAWDTHI

SEQ ID NO: 45241 - protein, 116 aa, Zea Mays
MDFQFPNVDAATGVLCYTGHGEAGFWLGNPRVSRVPNEFVICEGALLASGSADCTVKLWDVASSTKTLKTEDTKGSSANRLRLLKALPTKSTPVYSLRFSRRNLLFASGALSLSSS

SEQ ID NO: 45242 - protein, 714 aa, Zea Mays
MEVELPNIHKATSSDHWSLTSSQYPSGKFPKVSVGIMIPKAGSIPRARGGDATPTPTFDRNLSQGTDGLSRPKGTFSFGTRREQGISVEKLETPEFLSSQRKRNTESADKAKPNSEMLRMKLWEILGGTSQNKQAAASPNPDDMETPDQPKGQTVKGPSSGNKEVFTSPFLDNIKTPDPLKRQTVNFTKCKLSLDPIESDSDSPKVDERRPVTRSLGRKKALASSKKQSRSSKKPLSTFQSTPKKKMLDNVFIFNEKCTPKTVDQGETNKATESRGSRSPDSAKKRVNRKQPYLSPTEDEGIKSSETSFAKGYKSHKWPSDIDVPDKSPVEHMGRKSNLKEDRMSKRRLSSAAPFPTAATQENTDSDKEQEQCPENFLTRAFDQASKELSKSAKKPFSTFHSTPKKKMQGNVFTFNEKRAPKTVDQDKMNQTTESPGSESPGSAEERENSKQPSHSPLSPTEDEGTQGSKSSEQSFAKGYKSQKWIPDIKGTDKSPLEYVGRKTKLKEDRMNKRYLSSPTPFATSGTQETIVSDKDQEQCPENYLTRAFDQLIVVLGRFQTKIKSETSKKSSEILAATRETICQHLEGVEAQMQADVDKLVNAGRSKRKRLESTFEDQQEKLRILHEKFKEEVNKQLLNCRSSLEDFESYHAELKGVADKQKSSHKKLLANAEKTVGAQLNDAETKIAEVQKRARKRMNGLKYVLKELITETVD

SEQ ID NO: 45243 - protein, 202 aa, Zea Mays
MELDPATIDSQEELVDYELDPLEQEKLEVKIIDQNFKERTKKLSNVLNNDSSAIHLPPDWKNMDMVPDTSHTTDKEKQSSDILKVGEANQGRVITKISAIATRSSSRVADLGEGNCDIKSGTSSLTAFSTSDPESLMHFTSFCNIKLGHDLVESLDTIPTIQDQEAANAAWAENKVRTVQSKDWVDVNNASNEEALLTFSEL

SEQ ID NO: 45244 - protein, 78 aa, Zea Mays
MTTDGQLREWVSDKLMSLLGYSKSVVVQYVIRLAKECSSPGDLVGKLVEFGFSSSAETRTFASDVYAKVPRRASGISK

SEQ ID NO: 45245 - protein, 108 aa, Zea Mays
MVLIILHFWQGTSRSSHYHGGHLRFATLLCIVLHTKHPLHRKNLQDELDAKPEELEGEELESKLLEPVAALSVHPVHVPGNKQLACPTSQKVIAKYDELAALQAEMAL

SEQ ID NO: 45246 - protein, 98 aa, Zea Mays
MDWLEFSKYRCLVSSHGHRENIIADIFTQVKDPQKGFVPYGMIRELLVPFYKANGSRKPNRKIFYGDMPVRSSLAGSCIMKWMQLERRVPAWKRATFL

SEQ ID NO: 45247 - protein, 412 aa, Zea Mays
MRPLIRTARCWLLRARVRGMATLPMALSPAAISPFTTLPLYYSSRPHRRLLARFFSVASAPGGAKGHRPAASAVEVGGVKIAREDVVKEDDPTNNVPDNIFSKIGLQLHRRDNHPLGILKNTIYDYFDKNFTGQFDKFDDLCPLVSVKQNFDDVLVPSDHVSRSYNDTYYVDGQTVLRCHTSAHQAELLRHGHTHFLVTGDVYRRDSIDSTHYPVFHQMEGFRVFSPDEWSGSRMGGTAYAAAELKKTLEGLARHLFGAVEMRWVDTYFPFTNPSFELEIYFQDDWLEVLGCGVTEQEILKRNGRRDHVAWAFGLGLERLAMVLFDIPDIRLFWSNDKRFTSQFSEGKLGVKFKPFSKRTTYVRLSEELLVILLRRYDNSAFDAHWLSLVISSFYDPSAFMLSFRIITEFKQ

SEQ ID NO: 45248 - protein, 227 aa, Zea Mays
MAPPDAPLPATRKPDIVGVLAPTDLACLPQDCRRSPPSPSRRAMPAVIPASARPTSTNLLCRCPPAHRHPSPAAATDDLPRPPQGGFCKRACRGSYRRARRGTRTRRRPRGCWRTSSPSRSTLGPPTRSFWPRNGGGDAAPSRPSAGGRTNEFHAATLHLPRRRCPPRTCDRFLPDKAIDLIDEAGSRVRLRHAQLPDEAKELDKELRQISKQKNKAVRGQDFEKNL

SEQ ID NO: 45249 - protein, 702 aa, Zea Mays
MWATLHKPVAHANLRLLLTVSAFSGPLHLGTASAVAAAVTTRRSSSSRGVAATAMPSSSPPPLPPAEETTASAAALAPEGGFSLTEPSFLESLMPKKEIGVDRFLAAHPEYDGRSALIAIFDSGVDPAAAGLQTTSDGKPKILDVLDCTGSGDVDTSKVVKADADGAIVGASGARLVINPSWKNPSQEWHVGCKLIYELFTDTLTSRLKKERKKKWDEENQESISDALKQLNEFEKKHPKPDDTMLKKAHEDMQSRLDYLRKQAEGYDDKGPVIDIVTWNDGDVWRVAVDTQTLEGNNDGGKLADFVPLTNYRLERKYAIFSKLDACSFVANVYNDGNLVSIVTDCSPHATHVAGIAAAFHPDEPLLNGVAPGAQLISCKIGDTRLGSMETGTGLVRALIAAVEHKCDLINMSYGEPTLLPDYGRFIDLSNEVVDKHRIIFISSAGNNGPALNTVGAPGGTSTSIIGVGAYVSPAMAAGAHCVVQPPAKGMEYTWSSRGPTADGDLGVSISAPGGAVAPVPTWTLQSRMLMNGTSMSSPSACGGVALLVSGMKAEGIPLSPYSVRKAIENTAASISNAPEEKLTTGNGLLQVDRAFEYAQQAKKLPLVSYRISINQVGKSVPKLRGIYLRGGNACCQTSEWTVQLDPKFHEGASNLEQLVPFEECLQLHSTDTSVVQIPEYILVTNNGRSFNDSISSSIEAE

SEQ ID NO: 45250 - protein, 130 aa, Zea Mays
MVDMEQQLTANQSPSMASGQRCQQIVHVGNDNHKNLEERARAVRRLNKVNPSEVRRCRWGRFDWNLVGIGADLKLARAWEAATAMGKAICMVGPRKKVLAGPCSRCIWSREQPICPRRESSGVKRVSSSI

SEQ ID NO: 45251 - protein, 136 aa, Zea Mays
MYKCLGKAVSCPLLPYEHRHLNTQRTESAEKLKVCMLPDHQTANKLTKKSNGELLTFGPKSKEMYTGSCNQRRSYFFEKLMIPSKSQSVHPKNSVSSVKSSDFGVCMYGTNISSQLFRAQNQSSAKTETLHSDSLV

SEQ ID NO: 45252 - protein, 298 aa, Zea Mays
MAISCFNGGAGWPEPVVRVQAVSDTCGDTIPERYVKPLSERPRLSPASDGSGPNIPVVDLSMLDVDATSSAVAAACREWGFFQAVNHGVRPELLRGARAAWRGFFRQPAEVRERYANSPATYEGYGSRLGTAKGGPLDWGDYYFLHLLPASLKSHEKWPSLPSSLRGATEEYGEEVLQLCRRVMRLLSSGLGLEAGRLQAAFGGEGGEGACLRVNFYPQCPQPELTLGVAGHSDPGGMTMLLVDDHVKGLQVRSPDGQWIVVEPVPDAFIVNVGDQIQHGGIKKRSASKLRQSVPGSD

SEQ ID NO: 45253 - protein, 118 aa, Zea Mays
MKPSVRVSSSRDLAPAPSMEGSPPVRAYARNLARAQDVALSPTVVLASSLQHLLSFSLNGVDQDGPRGGSHLRKPCAPALAPASPDRSDTVQLTGTQYASSLDLLWLFTYNTLNDYKR

SEQ ID NO: 45254 - protein, 118 aa, Zea Mays
MKPSVRVSSSRDLAPAPSMEGSPPVRAYARNLARAQDVALSPTVVLASSLQHLLSFSLNGVDQDGPRGGSHLRKPCAPALAPASPDRSDTVQLTGTQYASSLDLLWLFTYNTLNDYKS

SEQ ID NO: 45255 - protein, 201 aa, Zea Mays
MKPSVRVSSSRDLAPAPSMEGSPPVRAYARNLARAQDVALSPTVVLASSLQHLLSFSLNGVDQDGPRGGSHLRKPCAPALAPASPDRSDTVQLTGTQYASSLDLLWLFTYNTLNDYKSLMFMLRHWLSSSAVVADFAKSLVLASPLRPAVATTAGHLVRSGRARAGDSYAILVAMLVSPLILLQLLVFSWCCFIREYCFTI

SEQ ID NO: 45256 - protein, 429 aa, Zea Mays
MGCLRLFNGRFKTKRSKRRPLATAPAPAPAASAEARSMASAAAASCASFASSANVSETSASGSGSASSARSIPELYEERGALREFGLRELRVATRDFSPLLMVGEGGFGCVYRGVLRLPGSTPVAVKRLNLNGRQTDRGPQRLLVYEFMPNKTLDDHLFNRAYPVLPWEVRLQIALGAAEGLLYLHEGLELQIIYRDFKASNVLLDEEFRPKLSDFGLAREGPSEGQTHVSTAVMGTFGYAAPDYVRTGHLTTKSDVWSFGVVLYEILTARRSIERNRPKNEQKLLDWVRRHPPESDQLGQIMDPRLQGRYPTRGAAEVARLANGCLAKLGSNRPTMREVVEGLRRAMRHTEMDGFVVVAGAATEYQGSPPRAEEEAPGTPGAEDASAVAMAAEARKRRMLHLAALGNAADAHARRRLMLMTAAAAAPT

SEQ ID NO: 45257 - protein, 1911 aa, Zea Mays
MAESEDATAAEPGSGPPHEDEDALLARAHTVISRIIDRELDPNPRLLHTLATMCELHEARYLELRSADTMFNSTNTRTAFTIGKLANLLRDNDEFYELVFCKFLSDTSYSVAVRAATARLLLSCHPAWTPPYPHVFEDSIIDNIKKWVTEDPEASNECKWKYLGNNKPTDAEMLRTYGIGLLAMALCSSGQLIEDVLTLGVSAKLMRYLRIRVLGDASSSQRDANHPQDTKHPWGGDDSRGKSRLSQDGSRLDGTRVGYGMLTNPTAEKNNEPCVGMMQAYGARSLDDSFASLDDSDVPEADWTNDRSYSTRVCDTKSKHGERNSVTRLLKDEEVSENGELLKRKLNRAPSRLRVKGKAGDSLPECEMTPLSPTSGLRIGGQATRDRNVARVDDPKEATDVNNRLFNTISKEEYEDRFRDCIIGLKDISDIVLKAVRAAEAEARSANAPDEAVKAAGDAAAELVKFAALEVWKSENNSDAVVVVAEKAASAVVEAALSISVSRSANQVGEERAMEEAVQTSEDQDLENFVISDKAQLLQLRENYSIQCLQILGEYVEALGPVLHEKGVDVCLTLLQRSMKNQEGCDHFAQLLDVLKLVCALAAHRKFAALFVDRGGIQKIVSMPRVTQTYMGLSACLFTFGSLQSTIERVCALSSDTLDSVVELALLLLECPQDLARKNVAIFFAAAFVFKAVLDLFDARNGMQKLLDILCGCASGRSGSNSGGAGSSNVNQGNDRSPAEVLTASEKQVAYHTCVALRQYFRAHLLQLVDSIRPSKSIRSIARNTSSARAGCKPFDISNEAMDAIFCQIQRDRKLGLALVRACWLALDKFVASNGHMTMLELCKFQAHGDRYLRDLTQYAIGVLHIITLMPQPHVRKSIVQGTLSNNRAGMAVLLDTVKSLDYIDHEFCEKTTQVMVICPALNVLVNLVCPPPSISNKPLSSSNQQPAAAQALASESREKNFEKTISDRNLLTNLGESRERSGDGNPAEKNNTLHQGTPSTPVVPSGVVGDRRIMLGVGGGGPGLAAQLEQGYRQAREVVRANNGIKILLQLLGSRMVTHPVAIDSIRALACRVLLGLARDDTIAHILTKLQVGKKLSELIRDISAQTSGGDSGRWQTELTQVAIELIGVLTNSGKETTLAATDAAAPALRRIERAGIAAAAPISYHSRELMQLIHEHLLGSGFAATAAMLQKEAGLAPLPLTAAVLPAHQVAALEASSVQQQWPSGHVQGFLSDKINTSTYQSAQRSDPKLPSSKKKALAFSSSFSRRARSPHPSNILKSPVPIAADTGDAEMLNKAPLSLPLKRNFVDVKDISFASASKRLAITDQIYQSSAFQTPAPTRKGLSVSVDSPTSSHCGWTNFNNAFTENLDNSQGTPGALTTTALPGVNDQQSGNLERMTLDSLVVQYLKHQHRQCPAPVTTLPPLSLLHPHVCPEPSRSLSAPANIAARVGSREISRQFSGIQIPRRDRHFIYSRFKQCRVCRDEASLLTCLTFLGDAARVVAGNHTGELRIFDCNTANLLETQTCHQHLVTMMESTYTGGIEMILTSSLNEVKIWDAFSVSAGPLHTFDDCKSARFNHYGTSFAALSTDTAQREVQLYDVQTYTLATRLPDNTSSSGSGRGYVQPIIHFSPSDTMLLWNGVLWDTRQPNPVHQFDQFTDYCGGGFHPAGNEVILNSEVWDLRKFKLLRSVPSLDQTVIKFNGTGDVIYATLRRNLDDVTSCINARRVRHPLFPAFSTIDAVTYSDIATVQMDRCVLDLATESNDSLIGVVAMDDHQELFSSARLFEVGRKRITDDDSDPEDAGETDDDSDDDDDDSDDGVLAPVLEGGTDSEDISSSSSDDGDEDGGDDDIPSSDGIEDDRFIDERRREFMMDLFGDGWDDDEAYMMGSFSSGDEEGWIICSWRGRGRS

SEQ ID NO: 45258 - protein, 340 aa, Zea Mays
MDQAAEESCVPPGFRFHPTEEELVGYYLARKVASQRIDLDIIQEVDLYRIEPWDLQERCKPQHAGGGHDEQTQEWYFFSYKDRKYPSGTRTNRATAAGFWKATGRDKPVLSSSTRTTRCSRVIGMRKTLVFYKGRAPNGRKSDWIMHEYRLQSNEHAPAQASSFILPCVYIINSHRIARWLAVDFCFRSVDQNKSNKTKEQLFDTFTYTAGAVVACNGYDVCSSDLSGGRLGGVPRFPEAYPQPAALLPHQLRRLLRPQPLNDGTAARRRRPPFPGGLISSSSSTATAATRACRQQLPAAVLRRRLGVQEAAVEYPAAGEPHCHGLLFRRRRLRAEKQLR

SEQ ID NO: 45259 - protein, 173 aa, Zea Mays
MTQHVSMISITLSPRELDKHTPGYQAPVYVEQPRQQQVPPPHRQPRRPPAQFQQLEYEDSYARGRGRGVGVEGAGVEVATVAMVDMETTKVAIIRVVGIMTIKVEIMAMIIKTDIVAMIIKVGMVVDMAITKADMGTIKAMTHLDKLIQKMVDITETQEVVCEEEAIGVTEEG

SEQ ID NO: 45260 - protein, 90 aa, Zea Mays
MGGEERTPDPKPRWNPRPEQIQILEAIFNYGFCGGAPCCVTGNRCERGDRWAHSFACKFFRASGGGLKVQCSLWPPAQMQWNHATQGQSC

SEQ ID NO: 45261 - protein, 103 aa, Zea Mays
MSSSKTYTGLPVLMDLCLFGTLPLLMGNRQGENLLIDLFRHCDNHLGEKQKTPSGSARQPLQLTNDVTKMMQKHQLETPQFHQTRFSVLQNVPRSTEKCHFHP

SEQ ID NO: 45262 - protein, 88 aa, Zea Mays
MSFPSLRQTRTTGCFRLHPIRDEDAKFKLCNRRSVQFDVGNMVMVTGGRNTGRVGVIKNWEKHKGIFEENIEWNSNLVVVKVWRLEFK

SEQ ID NO: 45263 - protein, 110 aa, Zea Mays
MMQKHQLETPQFHQTRFSVLQNMSFPSLRQTRTTGCFRLHPIRDEDAKFKLCNRRSVQFDVGNMVMVTGGRNTGRVGVIKNWEKHKGIFEENIEWNSNLVVVKVWRLEFK

SEQ ID NO: 45264 - protein, 413 aa, Zea Mays
MQGHAYSRLGSFGAAAFPPPPPSSPGPAGAGAGGGSWTPAKAGSARRGGGVARRVARAVLATLLRRQAVFLFAPLLYVAAMLLYMGSLPLDAVPRIIARQPLGSVYRSPQLYRRLRADMDADNSTGALATVWRHTYIGGTWRPCINNMTNGLPESNGYIYVEANGGLNQQRTSICNAVAIAGFLNATLIIPNFHFHSIWRDPSKFSDIYDKDHFVQRLQNDVRVVDKIPDFIMEQFGHNLSNVFNFKIKAWARIRYYNDVVLPKLVEERFIRISPFANRLSFDAPFAVQRLRCLANFEALKFSKPIVSLSETLISRMRERSVESDGKYISVHLRFEEDMIAFSCCVYDGGDEEKKEMDAAREIGWRGKFTKRGRVIRPGIIRMNGKCPLTPLEVCQDLKAEGWVNASWNGFQQ

SEQ ID NO: 45265 - protein, 1129 aa, Zea Mays
MVMVPPGEWVPHVEAYVDVSRPAVQHSASVDALAALVNKDKLTLFDLVSKMDLYLTTTDHIVRSRGILLLGETLSRISFKYLDVITITTLSDFFISRLSDWQAIRGALVGCLALLHRKHGVGCIVIADVKRLVESFLQNVPVQSLAAADRKLCFEILSCILDRYPEAVKQMDGEQLYGICEAIDEEKDPECLMLSFHVVEVVMKLFPDPSGLAAQFAGDVFEILSKYFPVYFTHGVGNGLDTTREDLSRALMHAFCSTQYFEPFVIPLLLDKLSSSLPLAKIDSLKYLDKCIRFYGADRMVRHASAVWYKLKEVIFNLSSDQLLISEALNCLKTAIMYTDSSDKDLFINLILLDEDIVNKIHSVSSVEKTILSSLEDLAQLHALGSVISILAESSTYFCTRVLQEHFAHLVDIVGTKADYESWQLNNCNGSSSAPVNYGALYLSVQLLSSCREVALVSYEDFSSVKLAKGSWWLILQKKLEQLIHLLRSIFAIASQSMQPNFRQEYVSCAVKGLLTLATFPEQCSPLPANAYEDILLMFTSIIINKFENLDLWRLSLKALASIGSSIAKFHASEREVVYYRTVVDKIVSLAESYDTSMPLGLRLEASYEVGTAGLNYMLRVAKSLEVAVVTNISESEANGRMECADHVAHLFECYSNRVLPWLLASGGVNELALSFALHLLDETEDLTVLDRISSQGLLDSLMTGMKLLVGVCTEEQQSLIVQKAHSTISSMLSLPMELMTDRLLPVDELVPLHSVSETALISMFSSIIIGLRPQTPVPDMMVMIKLFTVFLLNGKMPAAYALASIFNKYLHNPEFSHENQMDKILDDILERCFSTVLANSCSKTSQSCAGTSDVNFSDVSSRNKLSKINILSSLAWIGKGLLMRGDEKVKDISMFLLKILFSDEILSTVPSHQEEPYGGDSSDTSLAISAASAFHVMMSDSEMCLNKKFHARIKPLYKQRFFSIMMPIFLSKIKETTVVTTKLALYRAFGHIISNAPVPAVITEAHQILLVMVDSLAKLSMDVGDKDLVYSLLLVFSGMLMDEKGKECILDNIQITISVLTELVSYPHMMVVRETALQCLVAFSTFPHSKIYPVRRKVVQAAVRALDDKKRAVRRVAVRCRHTWQSFT

SEQ ID NO: 45266 - protein, 1126 aa, Zea Mays
MVMVPPGEWVPHVEAYVDVSRPAVQHSASVDALAALVNKDKLTLFDLVSKMDLYLTTTDHIVRSRGILLLGETLSRISFKYLDVITITTLSDFFISRLSDWQAIRGALVGCLALLHRKHGVGCIVIADVKRLVESFLQNVPVQSLAAADRKLCFEILSCILDRYPEAVKQMDGEQLYGICEAIDEEKDPECLMLSFHVVEVVMKLFPDPSGLAAQFAGDVFEILSKYFPVYFTHGVGNGLDTTREDLSRALMHAFCSTQYFEPFVIPLLLDKLSSSLPLAKIDSLKYLDKCIRFYGADRMVRHASAVWYKLKEVIFNLSSDQLLISEALNCLKTAIMYTDSSDKDLFINLILLDEDIVNKIHSVSSVEKTILSSLEDLAQLHALGSVISILAESSTYFCTRVLQEHFAHLVDIVGTKADYESWQLNNCNGSSSAPVNYGALYLSVQLLSSCREVALVSYEDFSSVKLAKGSWWLILQKKLEQLIHLLRSIFAIASQSMQPNFRQEYVSCAVKGLLTLATFPEQCSPLPANAYEDILLMFTSIIINKFENLDLWRLSLKALASIGSSIAKFHASEREVVYYRTVVDKIVSLAESYDTSMPLGLRLEASYEVGTAGLNYMLRVAKSLEVAVVTNISESEANGRMECADHVAHLFECYSNRVLPWLLASGGVNELALSFALHLLDETEDLTVLDRISSQGLLDSLMTGMKLLVGVCTEEQQSLIVQKAHSTISSMLSLPMELMTDRLLPVDELVPLHSVSETALISMFSSIIIGLRPQTPVPDMMVMIKLFTVFLLNGKMPAAYALASIFNKYLHNPEFSHENQMDKILDDILERCFSTVLANSCSKTSQSCAGTSDVNFSDVSSRNKLSKINILSSLAWIGKGLLMRGDEKVKDISMFLLKILFSDEILSTVPSHQEEPYGGDSSDTSLAISAASAFHVMMSDSEMCLNKKFHARIKPLYKQRFFSIMMPIFLSKIKETTVVTTKLALYRAFGHIISNAPVPAVITEAHQILLVMVDSLAKLSMDVGDKDLVYSLLLVFSGMLMDEKGKECILDNIQITISVLTELVSYPHMMVVRETALQCLVAFSTFPHSKIYPVRRKAAVRALDDKKRAVRRVAVRCRHTWQSFT

SEQ ID NO: 45267 - protein, 279 aa, Zea Mays
MDAHAMDCTIVGAAAPLAPTGAAARPATPLPANLSSPSAATAGGLVPSGLGLPGYPASLDALTGLLSLTHFPRKPPPGFSTTRPLVVDATWTSVVPQSYRTVGASTAWLDSVHNSIFLLFRNDSVAIVYQIGDSLILRRRSCDSNSSDSFDRRRRGALVVMEVDLSLGEDAAPVEDRDVVGYEDVDFNTQSRTMECVDAGIHATHEGDHTAQVANKFLHISIAPKVGMAFESGDNAYEMCNNYASKIGFSIRKSSSKLRPDGTIYHKYIVCSAEGHEKT

SEQ ID NO: 45268 - protein, 64 aa, Zea Mays
MIREDGSIQSYSFFFDSKLFVITISLEATVFPCSAWSGNLPVSFVTTDLLYYLLLSSPARYALL

SEQ ID NO: 45269 - protein, 186 aa, Zea Mays
MTDRNPAAASSKRHCDLSLDDPTPSAKLQRCSEPSEPTPAGKPNGGAATGEESEMMAGARNPRAQRYLVAVEYIGTRFSGSQKQPNQRTVTGVLEEAFHRFIGQPVSIIFSSRTDAGVHALSNVCHVDVERISKRKPGEVLTPHEPGVVKRAVNHFLLKSEGDIMVTDVCCVAPDFHARYKSLERT

SEQ ID NO: 45270 - protein, 257 aa, Zea Mays
MTDRNPAAASSKRHCDLSLDDPTPSAKLQRCSEPSEPTPAGKPNGGAATGEESEMMAGARNPRAQRYLVAVEYIGTRFSGSQKQPNQRTVTGVLEEAFHRFIGQPVSIIFSSRTDAGVHALSNVCHVDVERISKRKPGEVLTPHEPGVVKRAVNHFLLKSEGDIMVTDVCCVAPDFHARYKSLERTYHYRLLAGPESTSVFEKNSVWHISEDLDIQSMKKACSILVGHHDFSSFRAAGCQPGGTGQNILLVLKRAGN

SEQ ID NO: 45271 - protein, 147 aa, Zea Mays
MAHEVGDNGGELPPPAKKKSPAEEEAEKRRKKLTPGSLMKGIIRSGSGDATPAEGDQVILHCTTRTMDGIIVNSTRREHGGKGIPLRFVLGKSKMILGFAEGFPTMLKGEIAMLQLQMASRKMMNFNLRLKCWISLKPRLWQRIWGW

SEQ ID NO: 45272 - protein, 484 aa, Zea Mays
MLDFFKAKVVAEDLGVVKKIVEEGKGWETPREPYEITARITVRTADGKEIIPSKEEAYFFTIGKSEVPKGLEMGIGTMARKEKAIVFVSNTYLTKSSLMPELEGLEEVHFYIELVQFIQVRDMLGDGRLIKRRVVDGKGEFPMDCPLHDSLLRVHYKGILLDEPKSVFYDTRADNDGEPLEFCSGEGLVPEGFEMCVRLMLPGEKSVVTCPPDFAYDKFPRPANVPEGAHVQWEIELLGFEMPKDWTGLTFEEIMDEADKIKNTGNRLFKEGKFELAKAKYDKVLREYNHVHPHDDEEGKIFANSRNSLHLNVAFCYQKMGEYRKSIETCNKVLDTNPVHAKALYRQGMSYMLLGEFDDARNDFEKMITVDKSSEPDATAALLKLKQKEQEAEKKARKQFKGLFDKKPGEISEVGVESEGGKDAGDARGSGEATSADRGANTMDSPTRESEYAFEEERPGLLGRLWPSARRIFSSVGINRCTIL

SEQ ID NO: 45273 - protein, 246 aa, Zea Mays
MIVPTVTSEIARGKEEGSQPNLNLKGYLVGNPVTDFNFDGPSRIPFAHGMGLISDEIYEAYEKSCSVGDSRRQSIECINSLGAIDECIKGISPNHVLEPLCAFASPKPKLISSGAREMLQLPVPVHTEEEEEELRLSEISLQCRTAGYMMSSMWANDASVRQALGIHKGTVPSWSRCNYDIPYTNDIPSAVKYHLDVTTKGYRSLVYNGDHDMVVPFIGTQAWIRSLNFSTVDEWRPWFVDGQVAG

SEQ ID NO: 45274 - protein, 464 aa, Zea Mays
MAITPRLAAIFFSLLCCRSASSLRPPNLISNSSGGVITHLPGFQGPLPFHLQTGYVEVDEDNGVHLFYYFVRSEREDSPGDDPVVLWLTGGPGCSVLTGLAYEIGPLSFDLNGYVGGLPKLVYKQDSWTKVSNVIFLDSPVGAGFSYSHTEEGYKSSDTRAVNQILVFLKKWFDKYPQFFSSPLYIAGDSYSGMIVPTVTSEIARGKEEGSQPNLNLKGYLVGNPVTDFNFDGPSRIPFAHGMGLISDEIYECIKGISPNHVLEPLCAFASPKPKLISSGAREMLQLPVPVHTEEEEEELRLSEISLQCRTAGYMMSSMWANDASVRQALGIHKGTVPSWSRCNYDIPYTNDIPSAVKYHLDVTTKGYRSLVYNGDHDMVVPFIGTQAWIRSLNFSTVDEWRPWFVDGQVAGYIIQPGYLCRFTRSYSNNLTFATVKGGGHTAPEYMPRQCFAMFVRWVSGDPL

SEQ ID NO: 45275 - protein, 275 aa, Zea Mays
MTMVVYGCHMMLPIPFLNAVAFRIFQLYMVVKVEKTLSQVDSILAGGLSLADVSTKQCTVYDWESPELSRILSIFSSKRCKEKCVYLLEVLDRFWDDHYRAKSRIFTDATHCGENRAVESSFMKCIQSFKWIASRMDEDLHYATDLFYDCENVRSLFGSVAPYVVSQVSSSSLKKAIGFKTEVSYCDALMVLKSWITSKVPFRASMSQMWKFYTLLSEGVADAKIDIKREFMSSPSIFTPLQRPRASEFMSSPSILPLKFLFTRSTVTRQNSQKC

SEQ ID NO: 45276 - protein, 388 aa, Zea Mays
MVRPQHVEESKASCFDVGAIVDAWWHGGWWEGIVLCQGGRGRLQVYFPGEKRITEFGEDELRYSLEWVGNKWNPLKGRKDIAHKLTSTADRGSEYLIGKQDHLNFDVLLKPEPQLEGLQYDKRGIEKSSVTTISRDQKRVLADLTNDLKLDSLRWRPRKRSRRSGSRKQSDTSSGSSSGDMDLSSPGPSGFCQLNLVPDDETCKSSGEQPFMGVPVQAPKSDCLPLHAPKFRAYAIQPTDQPSMRGETSAFSVVRALATASLVAEPSSRRASSSLATKLGEKRSWVGGSGGGPLRALRSEEEGRVKRATEVAAVEAVPRRRIAIAKCLRCPPPSFKVVGDKRKRSSSPPSSSSSIRSSALDLSRERYDLRFRLRICSIQFALYFVRFF

SEQ ID NO: 45277 - protein, 203 aa, Zea Mays
MTVCRAISNFWTLAREFQSQRAESAACSVGVTTWTRCSAWCTQRSARRRRRRRPPPPTTPARPRGTAPPTRTRPPSATARRTRTGASTASASGATCPGSADRVQELQGGGGGGGGRRSHAESSIRTPIRPDDSEKGRRRNADLFFFLLLNISACQMPSITDKSVCVLFSVPDRLVAGSISNSAAIESASASLASMLFSSFPFN

SEQ ID NO: 45278 - protein, 398 aa, Zea Mays
MSSLLLRVLLIQLAAVECLSAAIPGCLTQCGGVEIPYPFGVGTNCSRKGFRIKCINGSAGEEIPVLLPTTRYQNIRVLNLSVSPLPEARVLLPVAWQCFNATGGVTGIYSGDVDFNPEGVYRISNTQNELFVLGCDTYAFTKGVRVHNVNARFPYRYFTGCITVSVDDKDPRDGACAGLGCCRVDIPPGITDTSMTFSSTWTRANQTFCPCDYAFIVEKGNYTFKASDLVSHTPDNRLPLDWWTMPLRLDWAIRDNNGDSMTSISCAQAPNEPDYGCRSKHSECTNSTNGPGYFCKCAHGYDGNPYVQSDGECTNINECQDPKSHNCSSGSKCIDTDGGYYCQCNFFRRGQQCDPLIPMAAVALLNGRRIREATAACRRPSKAEPKKTFKGDRRKRID

SEQ ID NO: 45279 - protein, 371 aa, Zea Mays
MSSLLLRVLLIQLAAVECLSAAIPGCLTQCGGVEIPYPFGVGTNCSRKGFRIKCINGSAGEEIPVLLPTTRYQNIRVLNLSVSPLPEARVLLPVAWQCFNATGGVTGIYSGDVDFNPEGVYRISNTQNELFVLGCDTYAFTKGVRVHNVNARFPYRYFTGCITVSVDDKDPRDGACAGLGCCRVDIPPGITDTSMTFSSTWTRANQTFCPCDYAFIVEKGNYTFKASDLVSHTPDNRLPLDWWTMPLRLDWAIRDNNGDSMTSISCAQAPNEPDYGCRSKHSECTNSTNGPGYFCKCAHGYDGNPYVQSDGECTNINECQDPKSHNCSSGSKCIDTDGGYYCQCNFFRRGQQCDPLIPMAAVALLKMEVNY

SEQ ID NO: 45280 - protein, 268 aa, Zea Mays
MEADIAFRYEIPRTAQFLRDGAYTRVALQFPDEMLKDAAAVARALRRELASGGADSGVRVFVMADTAYNSCCVDEVGASHIDAQCVVHYGHACMSPTSNLPAFFVFGKAPLDVHACAGTLLECSRKSNKRILVLYGLEYAYALDDLRQTFMESCKSNSGNHEVQYAEVLCSVMSPSSSTTEENKIPQSSGPSCNGDISRNSESATFLNNRNGMECSSSTQKYSLAGMTWNISVEEKMEDYFIFWIGQDSSAFANIVLTFNKCEIDMMQ

SEQ ID NO: 45281 - protein, 597 aa, Zea Mays
MDLLSIILVIASLLPFAASDGQGYSHAYHMCFPLRFSSLSLPMRSFQALANNKEVPFVYLGDALYDMKLKLNATGSQLSDWNQNQVNPCTWNSVICDNNNHVVQVTLASMGFTGVLSPRIGDLEYLNVLSLPGNNISGGIPEEFGNLSRLTSLDLEDNLLVGPIPASLGRLSKLQLLFSGNNLTCGANFLHPCASNMSYQGSSRGSTIGIVLGTVGGLMGLLIIWAVFIICNGRRKSHLREIFVDVSGEDDRRIAFGQLKRFAWRELQLATDNFSEKNVLGQGGFGKVYKGALPDGTKIAVKRLTDYESPGGEAAFLREVELISVAVHRNLLRLIGFCTTQTERLLVYPFMQNLSVAYRLREFKPGEPILDWSARKRVAIGTARGLEYLHEHCNPKIIHRDVKAANVLLDEGFEPVVGDFGLAKLVDVQKTSVTTQVRGTMGHIAPEYLSTGKSSERTDVFGYGIMLLELVTGQRAIDFSRLEEEDDVLLLDHVKKLQREGHLDAIVDRNLNSCYNGQEVEMMIQIALLCTQASPEDRPSMSEVVRMLEGEGLAERWEEWQQVEVTRRQDYERMQQRFDWGEDSIYNQDAIELSAGR

SEQ ID NO: 45282 - protein, 605 aa, Zea Mays
MDLLSIILVIASLLPFAASDGQGDALYDMKLKLNATGSQLSDWNQNQVNPCTWNSVICDNNNHVVQVTLASMGFTGVLSPRIGDLEYLNVLSLPGNNISGGIPEEFGNLSRLTSLDLEDNLLVGPIPASLGRLSKLQLLILSQNNLNGSIPDTLASILSLTDIRLAYNKLTGQIPSQLFQVARYNFSGNNLTCGANFLHPCASNMSYQGSSRGSTIGIVLGTVGGLMGLLIIWAVFIICNGRRKSHLREIFVDVSGEDDRRIAFGQLKRFAWRELQLATDNFSEKNVLGQGGFGKVYKGALPDGTKIAVKRLTDYESPGGEAAFLREVELISVAVHRNLLRLIGFCTTQTERLLVYPFMQNLSVAYRLREFKPGEPILDWSARKRVAIGTARGLEYLHEHCNPKIIHRDVKAANVLLDEGFEPVVGDFGLAKLVDVQKTSVTTQVRGTMGHIAPEYLSTGKSSERTDVFGYGIMLLELVTGQRAIDFSRLEEEDDVLLLDHVKKLQREGHLDAIVDRNLNSCYNGQEVEMMIQIALLCTQASPEDRPSMSEVVRMLEGEGLAERWEEWQQVEVTRRQDYERMQQRFDWGEDSIYNQDAIELSAGR

SEQ ID NO: 45283 - protein, 325 aa, Zea Mays
MSASSLRSHTCWVFLDLGDFAISWVPDVPYVYCLFYVIFVPLRWIYYRYKKWHYYLLDFCYYANTFLLVMILFYPEDEKLFMVCFSFAEGPLAWALIVWRCSLVFSSFDKLVSVLIHLLPGIVLFTIRWWNPQTFAAMHPEGRDARVTWPYVEDKSYLWTWLFFVPLAAYTLWQLMYFLIVNVLRRQRLLRDPEVMTSYRELSKKAQKANNIWWRLSGLLGDRNRQVMYILLQALFTVATMALTVPIFLSYRMHVVFLILKVCASTWNGGSFILEVMPRQVVQKQLKKLDMKPMEQGSSTQGAPGGDGGTLGNHHQHTSEEHIQE

SEQ ID NO: 45284 - protein, 348 aa, Zea Mays
MDARDWVYEGGPHRVQKNCALPTARMMMGVRLLRLCGDLGRPRKCRGWSLAGGRRWQPRTPRGSTDDHRGGPHRSWRCACNHLHARCRRAITDVVGVDEAGFAGGQNHVDWEPKVPARGGRSQVVAVAVTRAKTWLAVAVYKDPGKETKKKDSEQGDIKKCTSPVRCYFICTKSGWRGDEAYIPIDKCRKLFMHIHTAPTIANYMKRFHLILSKTLTLDVDLSTIDVILIDDEPCRDEHGNIVMLDGKRLIHTDGTGFISENLAKKCPSRIIKGKKSKVYMHQGETTPLLMQVRLFYNGYAVKGTLLVDKRIYLSINRDPYIIEIDLSVNGDPSHIGMLYRDSNTPSV

SEQ ID NO: 45285 - protein, 666 aa, Zea Mays
MTTSAADDGSSLAPTITEGETTADAGAGAGVECVEGKEMKVGAAAPVEEPDKEAAREEDPGDDDDYEEEEEEEEEEEEEEEEEEEEKEELDEEPEASEEDPEEVEELKEEGDGIAEEGLVDGSEANDDKDADQLSSGSDSGGSRSRGMQNSELAGGLEIFVDDLPQDCVKEDIAMAFSQSGEVKSVRIIKNSSTGKNQDIAFVCYTSIEAAKKVLAEFKEGIEVKGKMVRVSACQDNNTLYLGNICKGWTRDQVLNTLKSIGIQECEISFPSYKGGSRGFAFLKFTSHYYARAALRRLMKSDAIFGTDRSAKVSFYRTPTKSSKRLIQAKIVYLEHVPLSWDENKVKEYCEEYGEILKADVFQISKNMENETISFVEFSSRKGALACVTGINKANIVDGSFKLCAYLAWPKSASKVNSAAPSNAATATEKDKTHTEKILVDIDLQHKFQKGDKSKLTSQTKEAIMKKKKSSKLPNDNDTKLTSQGAAEVPQTSKSSEGKRKVGKNKHASVYQKPLKKAINNRNVDESQLTHRSAAVLQTSNTSKGKRKASENRSLYLNEKALKKARGNSNLGGSSRSKSYASDLEPHAGFISPAIRDNGSDAYNRQRTARYDIHPIDVHPYARAPPSAYSGYKSHAGYEAANTYEYAGNRAPTPPSGSYIPRRGHY

SEQ ID NO: 45286 - protein, 285 aa, Zea Mays
MTFELSVFRELGSTTLKDGRTINVIDTPGLFDMSITSDEAGKEIVKCMNMAKDGIHAVLMVFSATSRFSREDASTVETIKVFFGERIVDHMILVFTYGDLVGESKLKKMLNNAPEYLQNVVELCQNRVVVFDNVTEDRRLQAQQLDKLLDVVDSVCAKNGGKPFSDQMFTSIKEVHDREKEVHTSGYSDEQISELKKEIHRTRDEQLAHITNMVEEKLNCTVEKLQQQLMEEQNARLEAEKVAYEARLKSEAEIQKLKESLKKAQMENDEFRRMAQSQGSKCAIL

SEQ ID NO: 45287 - protein, 169 aa, Zea Mays
MGGSQYDDDWVLPSADITLVLVGKLGYGKSATGNSILGREAFVSEYSHASVTNTCQLGSTTLKDGRTINVIDTPGLFDMSITSDEAGKEIVKCMNMAKDGIHAVLMVFSATSRFSREDASTVETIKVFFGERIVDHMILVFTYGDLVGESKLKKMLNNAPEYLQSGCLR

SEQ ID NO: 45288 - protein, 53 aa, Zea Mays
MGGVASELVGASRERQSRKRKQFHTVELKIRMDCDGCELKGWSRWRSTGSSRR

SEQ ID NO: 45289 - protein, 499 aa, Zea Mays
MGYEESKKHLLSLSYPELQCLCKRYNLPAKKTHSQLASSLASLLEASPSPAPPPVQLANMKEASTCNHANNKRGPYNGRDDGKPLVHAKHQKGDQTPVDETSKKQGIDTGTSIPPVSMNHGRPEYHGHLSSDLRTAHNLQSQCDVGIATNTTNLEFVGKHDCSPANVIDQICPPIIQKYPSNGNGQASTKFGRMNDNTEKGCRLSDKISANAAAVQFSVMSDEGIDLLVDLNSSSATWAKNFMAEMHITPPSEHGNFSSFISSLSTKDDHSTASPSGNIIVDIQNKGAENIVPSTDSSLASDVGESSRSVLYPVDTTTVNSVSSTSTVAGTPVELSGYQEGAPVVCSSCLTADVQNNVTSDMPGASDNEVLPPEPADVFLQSERITAPAVCGSVQPIGNKCTMSSGDEVRSGSNEDSCPKSSGKQTGDETLMENEPVKAVAVEENIGRDDSLSISYQLACKTVAELPVTDAQSPASSSGHFIAGNFDNTHPTSSATSVS

SEQ ID NO: 45290 - protein, 513 aa, Zea Mays
MGYEESKKHLLSLSYPELQCLCKRYNLPAKKTHSQLASSLASLLEASPSPAPPPVQLANMKEASTCNHANNKRGPYNGRDDGKPLVHAKHQKGDQTPVDETSKKGIDTGTSIPPVSMNHGRPEYHGHLSSDLRTAHNLQSQCDVGIATNTTNLEFVGKHDCSPANVIDQICPPIIQKYPSNGNGQASTKFGRMNDNTEKGCRLSDKISANAAAVQFSVMSDEGIDLLVDLNSSSATWAKNFMAEMHITPPSEHGNFSSFISSLSTKDDHSTASPSGNIIVDIQNKGAENIVPSTDSSLASDVGASDNEVLPPEPADVFLQSERITAPAVCGSVQPIGNKCTMSSGDEVRSGSNEDSCPKSSGKQTGDETLMENEPVKAVAVEENIGRDDSLSISYQLACKTVAELPVTDAQSPASSSGHFIAGNFDNTHPTSSATSDNAINSLTSKFGAELAQSHDSTDKKGQNDAEEVEELESMTPAAYSEPPRNIQLSLRSASAKVKPSTLPRRSARLLPK

SEQ ID NO: 45291 - protein, 511 aa, Zea Mays
MGYEESKKHLLSLSYPELQCLCKRYNLPAKKTHSQLASSLASLLEASPSPAPPPVQLANMKEASTCNHANNKRGPYNGRDDGKPLVHAKHQKGDQTPVDETSKKGIDTGTSIPPVSMNHGRPEYHGHLSSDLRTAHNLQSQCDVGIATNTTNLEFVGKHDCSPANVIDQICPPIIQKYPSNGNGQASTKFGRMNDNTEKGCRLSDKISANAAAVQFSVMSDEGIDLLVDLNSSSATWAKNFMAEMHITPPSEHGNFSSFISSLSTKDDHSTASPSGNIIVDIQNKGAENIVPSTDSSLASDVGESSRSVLYPVDTTTVNSVSSTSTVAGTPVELSGYQEGAPVVCSSCLTADVQNNVTSDMPGASDNEVLPPEPADVFLQSERITAPAVCGSVQPIGNKCTMSSGDEVRSGSNEDSCPKSSGKQTGDETLMENEPVKAVAVEENIGRDDSLSISYQLACKTVAELPVTDAQSPASSSGHFIAGNFDNTHPTSSATSILVYPEQFTNLLLSF

SEQ ID NO: 45292 - protein, 496 aa, Zea Mays
MGYEESKKHLLSLSYPELQCLCKRYNLPAKKTHSQLASSLASLLEASPSPAPPPVQLANMKEASTCNHANNKRGPYNGRDDGKPLVHAKHQKGDQTPVDETSKKGIDTGTSIPPVSMNHGRPEYHGHLSSDLRTAHNLQSQCDVGIATNTTNLEFVGKHDCSPANVIDQICPPIIQKYPSNGNGQASTKFGRMNDNTEKGCRLSDKISANAAAVQFSVMSDEGIDLLVDLNSSSATWAKNFMAEMHITPPSEHGNFSSFISSLSTKDDHSTASPSGNIIVDIQNKGAENIVPSTDSSLASDVGESSRSVLYPVDTTTVNSVSSTSTVAGTPVELSGYQEGAPVVCSSCLTADVQNNVTSDMPGASDNEVLPPEPADVFLQSERITAPAVCGSVQPIGNKCTMSSGDEVRSGSNEDSCPKSSGKQTGDETLMENEPVKAVAVEENIGRDDSLSISYQLACKTVAELPVTDAQSPASSSGHFIAGNFDNTHPTSSATS

SEQ ID NO: 45293 - protein, 85 aa, Zea Mays
MLRLSVEAGGCSGFQYSFALDDKKNADDRFFETDGVRLVVDDISYNFVKGATVDYEEELIRSTFVVSTNPSAVGGCSCKSSFMVK

SEQ ID NO: 45294 - protein, 951 aa, Zea Mays
MQDLLCDAGMIPYPEPFQSMYQKRRLGTLGLEWRPPSVNFAVGPTYNATTGEYQTIPIIDPDRWEPLPEITDFIELEPENEVISDDTDSEYNGMDEYSSEGEQDIMSGDSSGTSYSSGEIDADNPDSAHLRRSRRKKKKSEADLVTSSGRRVIRKRFLDDPGVATVSRPHRGRKSRNGCSSKKKRSPKSRGLRPRRRAAETALITFPKKGVSTEEDEDDSESFSDSELNTDSTEAEQLEWSGQLRTRREINSPFDIDDVTDPSQFTDNKENSGTGKKLVLRIPRRDLRTQFPLGSGKAECSIQDKAVKSLSLANHEPVEHELTIEPGHSPASKAELTIDGDLHDSSAVCSNNSIRWGEVKMRSSKRCKYSEPAGGLWSSSNNVALQDIEGSSSQQIPHEYGDGIQPSVVQNVQEVQHGTILDNIPENNSTDEHTRENFGDLEKIANNINAHADGVNDTVQVPNTSQPQLKVKFKSRGSADAVGNIMNSKHVKDSVQCGDDSSINQPRNADFYIVPKSSQECLDKSTSLHDSKKPYLDASKKYTAVYKRSKRKNKKKMDSDECPNEDSTSISNDDGGYQPAEYSPVAAASSRLRRSARKSFAYNINGTTQDDISEVKVSYGSHEASTSGRRVVTDVREGMWRQNSRSVGLRSARNKRESNSFLDTHPLGRRHQVSFKYSWLMLLEHEDSYRYIPQLDDEVMYLGQGHEEYLKQVQSSEFCPWNRIKGLKAVELCKIQGLDYATYRGSGESCYFLVERTRYEAAMERNWTHRDKCKVWWRDEEGQVGGTWWEGRVMAVTPKSPDFPESPWEKYVIQYKEDGSDHAHSPWELHETGSLWDPWKHPHMDLTVRDKLLSEMENLQEMSHRDQDHYGVFKLDKVAEKSDFINRFPVQFSIEVIKARLANKYYRTLGAVRHDTTVMLSNAESYFSKSSEMTKKIRKLSELLDQIFSSL

SEQ ID NO: 45295 - protein, 1080 aa, Zea Mays
MSAGYDGKTIIWDIWEGKPVQIYETGQFKLVDGKFSPDGTSLILSDEVGRVFIIGTGQGESQKDAKYDQFFLGDYRPLIRDTNGSVIDQETQLAPYRRNMQDLLCDAGMIPYPEPFQSMYQKRRLGTLGLEWRPPSVNFAVGPTYNATTGEYQTIPIIDPDRWEPLPEITDFIELEPENEVISDDTDSEYNGMDEYSSEGEQDIMSGDSSGTSYSSGEIDADNPDSAHLRRSRRKKKKSEADLVTSSGRRVIRKRFLDDPGVATVSRPHRGRKSRNGCSSKKKRSPKSRGLRPRRRAAETALITFPKKGVSTEEDEDDSESFSDSELNTDSTEAEQLEWSGQLRTRREINSPFDIDDVTDPSQFTDNKENSGTGKKLVLRIPRRDLRTQFPLGSGKAECSIQDKAVKSLSLANHEPVEHELTIEPGHSPASKAELTIDGDLHDSSAVCSNNSIRWGEVKMRSSKRCKYSEPAGGLWSSSNNVALQDIEGSSSQQIPHEYGDGIQPSVVQNVQEVQHGTILDNIPENNSTDEHTRENFGDLEKIANNINAHADGVNDTVQVPNTSQPQLKVKFKSRGSADAVGNIMNSKHVKDSVQCGDDSSINQPRNADFYIVPKSSQECLDKSTSLHDSKKPYLDASKKYTAVYKRSKRKNKKKMDSDECPNEDSTSISNDDGGYQPAEYSPVAAASSRLRRSARKSFAYNINGTTQDDISEVKVSYGSHEASTSGRRVVTDVREGMWRQNSRSVGLRSARNKRESNSFLDTHPLGRRHQVSFKYSWLMLLEHEDSYRYIPQLDDEVMYLGQGHEEYLKQVQSSEFCPWNRIKGLKAVELCKIQGLDYATYRGSGESCCKLTIEFVDCTSSGFGKTFMITLRELVNFPDFLVERTRYEAAMERNWTHRDKCKVWWRDEEGQVGGTWWEGRVMAVTPKSPDFPESPWEKYVIQYKEDGSDHAHSPWELHETGSLWDPWKHPHMDLTVRDKLLSEMENLQEMSHRDQDHYGVFKLDKVAEKSDFINRFPVQFSIEVIKARLANKYYRTLGAVRHDTTVMLSNAESYFSKSSEMTKKIRKLSELLDQIFSSL

SEQ ID NO: 45296 - protein, 431 aa, Zea Mays
MQERAHTHNNLPWHALMEYFWDFRSSIPHALISISCQKLYLQMTDCLVDEEPGIRTNTTILLGNIAGYMNDGTRKRVLINAFTVRALRDTFPPARAAGIMALSVTSSYYEMTEIATRILPNIVVLTFDPNSDVRTKAFQATDQFLQIAKQHHEKIQGFWYFSWFRSQLNTGDNSVAESTGVKLKPGNAGLLGWAMSSVTQKGKPFDHAPISTANANNSQASTTSTATPDTQASTLAYAPSTSTSLDQAASASARSSVDGWGELEDGNIHEENSSDKDGWDDVDPFEDKPSPSLLSNIQAAQKRPVVQPKQPVANSSKPNPLKAPKSEDDPLWGPIAAAPPKSAVKSADIKPSTSHNDEDDLWGSIAAPPKSSGKPLKPAVANSDDLWGAIAAPPPATKARPLASSGRGRGTKPAQPKLGAQRIGRTSSTGM

SEQ ID NO: 45297 - protein, 593 aa, Zea Mays
MKNQVLANWLIRLEKDPSQMMRQQTTRLLFETEYKEQIKACMDISWRCTLRKPMDRPTTQHILLTLEETEAKIKSVVGPTPPNAGQLQIAKFGPWGGDGGKTRDIRMTPCHLHSVTISSGTIIDSIGFSFTDHYGQHHTTGPWGGKEGTNKIELGPSEFLTGVSGTSGPFKNLTNVVTSLTFVTNTRSYGPFGKGRGTPFHIQTQNNGRIVGFFGRSGQYLYAIGVYTNQDARVARIGRPLGGDEGVLHGITDLSGQQRSRGGGPSGECGDSDDEPNGDFAKFGPWGGDGGQPQDIGTLPCRLDRIKISSGLIIDSIEFSYAGPDSQYRTAGPWGGHGGDNSSFQLAGSEFLTGVSGSIGTFNGHANVITSLTFVTNARSYGPFGRGRGTSFHIPVQGNGCIVGFFGRSGRYLNAIGVYTAPKPEPKAVGKQDGGDEAVVARIGPWGGVGNALHDIAERPHRLHRVTIFSGTIVNSLEYLYSDGDGQQHTTGPWGGCGGTGRKIHLAPEEFIVEVTGTFHPCAWDRTIPSVVSSLTLVTSTGKTHGPFGTQLGAAFQVPVQSDSRIVGFFAHGDNYIEAIGAYVKKLTESSNR

SEQ ID NO: 45298 - protein, 377 aa, Zea Mays
MFSFKHLLISPVHFQARVARIGRPLGGDEGVLHGITDLSGQQRSRGGGPSGECGDSDDEPNGDFAKFGPWGGDGGQPQDIGTLPCRLDRIKISSGLIIDSIEFSYAGPDSQYRTAGPWGGHGGDNSSFQLAGSEFLTGVSGSIGTFNGHANVITSLTFVTNARSYGPFGRGRGTSFHIPVQGNGCIVGFFGRSGRYLNAIGVYTAPKPEPKAVGKQDGGDEAVVARIGPWGGVGNALHDIAERPHRLHRVTIFSGTIVNSLEYLYSDGDGQQHTTGPWGGCGGTGRKIHLAPEEFIVEVTGTFHPCAWDRTIPSVVSSLTLVTSTGKTHGPFGTQLGAAFQVPVQSDSRIVGFFAHGDNYIEAIGAYVKKLTESSNR

SEQ ID NO: 45299 - protein, 824 aa, Zea Mays
MSPWQCMPSTATLLHVHQVTDATRRLPPIRFSHLNAPNPRPRPGCAMGATKGEKLKTLGHDLLVPATPQHKDKQSGMPEMIEAIRVALRSMGDGEISISAYDTAWVALVRSLNNNGDDGPEFPSCIDWIAQNQLPDGSWGHDIFFLAQDRIINTLACVIALKSWKIHDDACTKGLSFITENMWRLTRDDENWALSGFEIIFPMLLEKAKHLGIDIPLDDPMLEAIRAKRELKLNKIPREALHAEPTTFLLSIEGMPGLDWKRLRKLQCPDGSYMSSPAPTAYALMQTGDAKCFEFLDKLIDKFNGGVPFVYPMEMFGRLWAVDRLERLGISGYFKSEIEDYLDYVYRHWSEEGLAYTKGCLVKDIDDTAMGFRLLRLHGYDHVSPCVFKRFENGDGQFVCYARQSSQSVSAMYNLYRAADQASFPGDDDDHVLRRARSYSRAFLRQRRASGQLNDKWIISEGLPDEVGYGLDFPWGASLPRIETRMYLEQYGGSRDVWIGKVLYRMNMVSNDMYLEVAKVDFSNFQRLCRLEWHDLKRWCDKSDLETYGVAPGGALRAYFLAAACIFEPGQAAERLAWARAAVLAKAISCCLLSNNDTCACNKTTAEWLVREFTNGDNVAGYYYDYNPARRDDDEPNSPAWGASSLAGVLRELVHLQASGNAAVAECLRGAWMEWLMAWTEKETEEASHAGDTALLLARTVEICSGRLRGTEQDLELRLPDYSKLQQLTRCICSRLATEAPALIESNVLKQNGETMDKVDALDRMVGLEMRELAQCVFRSGGSSVDRETRQTFLHVTKSYYYVALCSPETLEHHISKVLFEDVV

SEQ ID NO: 45300 - protein, 204 aa, Zea Mays
MDISDLPDDVSRMISSIEENGTQNLHGPKPCVVSIEDDNRTAQDVPSDDCNEPNARKPKSGHNVSKQISAHKTNQVRNQKVGETQSRAPKNIVNHTVGMVGVGSSLMNWMKNTHNKKIRAQKKDTGHKNLDSCAVSNSNPDTVASSVGDMGQEKMLSTSNGKHGNENTQNNNLEQNMQNVDDLCQNESGNLKRGFSNGKNQRFC

SEQ ID NO: 45301 - protein, 461 aa, Zea Mays
MDYVVARMQLQQAAVPPPVHSIADHRPPPVSQRTRGSATMQRQRREALEQEVAELKQQLSNEQTVHQILERALQPSSSMALANIPAFIPTKAKELLAELLLVEEEIARLEDQIKRMKKSAATQQQQQQQTEHCKSMFFISQAMDGEAYLSTVVNNKRHSLASSSDGHAVLEKKIAQHELPITKKSPTVIAKRRARDQQQPPNKLSERILKCLVCIFMRLLRSSRASESAAGNLGGFRMDMGLVNVAAAAAAKEKERGQQDHYGIFGIQDSMVRDIGPYKNLVRFTTSAGSGSGSGSGSLDLHLLSRGFSASPLVSKLREMLEALQQVDVRSLNHHQRLAFWLNIYNTCIMHGILQHGLPSNSDKLLALKNKATINVSGQTFNALVIENFILRQPSSVKQQELWQCDVDVEEEQAVREVYGLKTSEPNILFALCCGIRSSPAIVFLWIWTRQSLSTCRHRWW

SEQ ID NO: 45302 - protein, 199 aa, Zea Mays
MWTISAASATQIRRTCVSTAFPTVAGRSRRRRTRFLRSCPSRRSASTLRAMACSAATGSHSSRSTLTRGSSQSPSSTAPASTPTTAFADRKHVRDRSGVDSSGKSRHSSKRGNDGHAKNSRAAAPAAKEYDDDDDEEDEEHTETFCGSCGGLYNANEFWIGCDICERWFHGKCVRITPAKADHIKHYKCPDCSSKKIRQ

SEQ ID NO: 45303 - protein, 281 aa, Zea Mays
METKDVSPLAAAAAAPVLAPASQQQQQQPPQPQQHHHQPPQPQHQHQHQPPPPPFPQQAAPAAASSPAASMPGGMRLSFDHMPGKAPGEQHHHHHHAAPPMLYAAPPQGAGAPGGSVLGMGELMRKKRGRPRKYAPDGSMALALAPISSASAGGGGGAAAPGQQQQHGGFSIGSPPSDPSAKRRGRPPGSGKKKQFEALGSWGIAFTPHILAVKAGEICESAHLLCARVMCGFLPEGQVTAERCSFVLCPGMPLGSPAGCELAWRGCSSDRLPARLTHDRG

SEQ ID NO: 45304 - protein, 1423 aa, Zea Mays
MALTRQRASLPTVDGPDPPVDCAPHRPAWPYFAFVPVSACEQLILLSRPIVTGPRTLRCESIIFGSFMHHIFQQHRKFMGENGHLGNSIYRRLETSLYKNEAVNLFFSDTSAWGTSKEGTSRNTGGMEVALVSTVLKVLGTKLAPLALKELSSKAGVAKDLQELQDLVEEINNWLQTVGDKDRSSKWLKKLKEVAYDAEDLVHEFHIEAEKQDREITGGKNTLVKYFITKPKATVTEFKIAHKIKKIKNRFDAIVKGRSDYSTIANSMPVDYPVEHTRKTIGEVPLYTIVDETSIFGRDQAKNQIISKLIETDSQQRIKIVSVIGLGGSGKTTLAKQVFNDGNIIKHFEVILWVHVSREFAVEKLVAKLFEAIAGDMSDHLLLQHVSRTISDKLVGKRFLAVLDDVWTEDRVEWERFMVHLKCGAPGSSILLTTRSRKVAEAVDSSYAYDLPLLSMEDSWKVFQQCFGIAMKALDPEFLQSGIEIVEKCGGVPLAIKVIAGILHGMKGIEEWQSICNSNLLDVQDDEHRVFACLWLSFVHLPDHLKPCFLHCSIFPRGYVINRCHLISQWIAHGFVPTNQARQAEDVGIGYFDSLLKVGFLQDHDRDQIWSTRGEVTCKMHDLVHDLARQILRDEFESEIETNKQIKRCRYLSLTSCTGKLDNKLCGKVRALYVCGRALEFDKTMSKQCCVRTIILKYITADSLPLFVSKFEYLGYLEISDVNCEALPEALSRCWNLQALHILNCSRLAVVPESIGKLKKLRTLELNGVSSIKSLPQSIGDCDNLRRLYLEGCHRFEDIPNSLGKLENLRILSIVHCFSFEKLSPSASFGKLLNLQTITFNCCFNLRNLPQCMTSLSHLEMVDLGYCYELVELPEGIGNLRNLKVLNLKQCTQLRGLPAGCGQLTRLQQLSLFVIGDSAKHARISELGNLDKLDGELQIKNIRYVKDPSDTDKVRLKKKIGIRKLSLDWYSRLEVQPDDVEEELSLNMEKELHLLDSLEPPSKIEKLRIRGYRGSQLPRWMAKQSDSCGPADDTHIVMQRNPSEFSHLTELVLDNLPNLEHLGELVELPLVKILKLKRLPKLVELLTTTTGEEGVEVLCRFHHVSTLVIIDCRKLVVKPYFPPSLQRLTLEGNNMQLVSSGCFFHPRHHHASHAHGDESSSSSYFADETGTHLERLELRRLTGSSSGWEVLQHLTGLHTLEIYMCTDLTHLPESIHCPTTLCRLMIRSCDNLRVLPDWLVELKSLQSLDIDSCDALQQLPEQIGELCSLQHLQIISMPFLTCLPESMQHLTSLRILNLCECNALTHLPEWLGELSALKKLLIQSCRGLTSLPRSIQCLTALEELYISGNPKLLQISASYSKEDKDGQLQPFRCCRPDDQHCSEAQEFDLVRNMLIVAVEERYKDAAQYRGQHSMLRSKKKNAI

SEQ ID NO: 45305 - protein, 1261 aa, Zea Mays
MEVALVSTVLKVLGTKLAPLALKELSSKAGVAKDLQELQDLVEEINNWLQTVGDKDRSSKWLKKLKEVAYDAEDLVHEFHIEAEKQDREITGGKNTLVKYFITKPKATVTEFKIAHKIKKIKNRFDAIVKGRSDYSTIANSMPVDYPVEHTRKTIGEVPLYTIVDETSIFGRDQAKNQIISKLIETDSQQRIKIVSVIGLGGSGKTTLAKQVFNDGNIIKHFEVILWVHVSREFAVEKLVAKLFEAIAGDMSDHLLLQHVSRTISDKLVGKRFLAVLDDVWTEDRVEWERFMVHLKCGAPGSSILLTTRSRKVAEAVDSSYAYDLPLLSMEDSWKVFQQCFGIAMKALDPEFLQSGIEIVEKCGGVPLAIKVIAGILHGMKGIEEWQSICNSNLLDVQDDEHRVFACLWLSFVHLPDHLKPCFLHCSIFPRGYVINRCHLISQWIAHGFVPTNQARQAEDVGIGYFDSLLKVGFLQDHDRDQIWSTRGEVTCKMHDLVHDLARQILRDEFESEIETNKQIKRCRYLSLTSCTGKLDNKLCGKVRALYVCGRALEFDKTMSKQCCVRTIILKYITADSLPLFVSKFEYLGYLEISDVNCEALPEALSRCWNLQALHILNCSRLAVVPESIGKLKKLRTLELNGVSSIKSLPQSIGDCDNLRRLYLEGCHRFEDIPNSLGKLENLRILSIVHCFSFEKLSPSASFGKLLNLQTITFNCCFNLRNLPQCMTSLSHLEMVDLGYCYELVELPEGIGNLRNLKVLNLKQCTQLRGLPAGCGQLTRLQQLSLFVIGDSAKHARISELGNLDKLDGELQIKNIRYVKDPSDTDKVRLKKKIGIRKLSLDWYSRLEVQPDDVEEELSLNMEKELHLLDSLEPPSKIEKLRIRGYRGSQLPRWMAKQSDSCGPADDTHIVMQRNPSEFSHLTELVLDNLPNLEHLGELVELPLVKILKLKRLPKLVELLTTTTGEEGVEVLCRFHHVSTLVIIDCRKLVVKPYFPPSLQRLTLEGNNMQLVSSGCFFHPRHHHASHAHGDESSSSSYFADETGTHLERLELRRLTGSSSGWEVLQHLTGLHTLEIYMCTDLTHLPESIHCPTTLCRLMIRSCDNLRVLPDWLVELKSLQSLDIDSCDALQQLPEQIGELCSLQHLQIISMPFLTCLPESMQHLTSLRILNLCECNALTHLPEWLGELSALKKLLIQSCRGLTSLPRSIQCLTALEELYISGNPKLLQISASYSKEDKDGQAPTTFRSHGLTGRHTNPRSM

SEQ ID NO: 45306 - protein, 1258 aa, Zea Mays
MEVALVSTVLKVLGTKLAPLALKELSSKAGVAKDLQELQDLVEEINNWLQTVGDKDRSSKWLKKLKEVAYDAEDLVHEFHIEAEKQDREITGGKNTLVKYFITKPKATVTEFKIAHKIKKIKNRFDAIVKGRSDYSTIANSMPVDYPVEHTRKTIGEVPLYTIVDETSIFGRDQAKNQIISKLIETDSQQRIKIVSVIGLGGSGKTTLAKQVFNDGNIIKHFEVILWVHVSREFAVEKLVAKLFEAIAGDMSDHLLLQHVSRTISDKLVGKRFLAVLDDVWTEDRVEWERFMVHLKCGAPGSSILLTTRSRKVAEAVDSSYAYDLPLLSMEDSWKVFQQCFGIAMKALDPEFLQSGIEIVEKCGGVPLAIKVIAGILHGMKGIEEWQSICNSNLLDVQDDEHRVFACLWLSFVHLPDHLKPCFLHCSIFPRGYVINRCHLISQWIAHGFVPTNQARQAEDVGIGYFDSLLKVGFLQDHDRDQIWSTRGEVTCKMHDLVHDLARQILRDEFESEIETNKQIKRCRYLSLTSCTGKLDNKLCGKVRALYVCGRALEFDKTMSKQCCVRTIILKYITADSLPLFVSKFEYLGYLEISDVNCEALPEALSRCWNLQALHILNCSRLAVVPESIGKLKKLRTLELNGVSSIKSLPQSIGDCDNLRRLYLEGCHRFEDIPNSLGKLENLRILSIVHCFSFEKLSPSASFGKLLNLQTITFNCCFNLRNLPQCMTSLSHLEMVDLGYCYELVELPEGIGNLRNLKVLNLKQCTQLRGLPAGCGQLTRLQQLSLFVIGDSAKHARISELGNLDKLDGELQIKNIRYVKDPSDTDKVRLKKKIGIRKLSLDWYSRLEVQPDDVEEELSLNMEKELHLLDSLEPPSKIEKLRIRGYRGSQLPRWMAKQSDSCGPADDTHIVMQRNPSEFSHLTELVLDNLPNLEHLGELVELPLVKILKLKRLPKLVELLTTTTGEEGVEVLCRFHHVSTLVIIDCRKLVVKPYFPPSLQRLTLEGNNMQLVSSGCFFHPRHHHASHAHGDESSSSSYFADETGTHLERLELRRLTGSSSGWEVLQHLTGLHTLEIYMCTDLTHLPESIHCPTTLCRLMIRSCDNLRVLPDWLVELKSLQSLDIDSCDALQQLPEQIGELCSLQHLQIISMPFLTCLPESMQHLTSLRILNLCECNALTHLPEWLGELSALKKLLIQSCRGLTSLPRSIQCLTALEELYISGNPKLLQISASYSKEDKDGQVRHFCFSLACAHTFVSE

SEQ ID NO: 45307 - protein, 268 aa, Zea Mays
MPPTLGLLLAAAAAVLLLLLPPPPSAGAQETCWSGPAPRRGAWMSVASFGARGDGQTLNTGAFARAVARIARRRGARGGTLLYVPPGVWLTGPFNLTSHMTLFLARGAIVRATQPCLATIELISEQDTSSWPLIDPLPSYGRGRELPGGRYMSLIHGHGLQDVFITGENGTIDGQGGVWWDMWKKRTLPFTRPHLLELMYSTDVVVSNLVFQDSPFWNIHPVYCSNVVIANLTVLAPHDSPNTDGIDLGKIQAATCASRTATSPPATT

SEQ ID NO: 45308 - protein, 219 aa, Zea Mays
MEHMRFDIVPESIQILVVLCLKLLRLDQMLYVGLTEDHEESARLFAHMVGAQVLLQSGTLSLDLKEDLHSETDSHPSMVEPGDEEASEHLNNTHGWQNNEALNSTSDEQGKGNMTVGKLMEAYETCIAKLRKSQSSRRKISLKKVEEANFSKEARKLVPEAILKQIISLNSLDMELYDHAKKIFTQEHLMLKAQQSMAGQHRQLAEQEDPSDVQSASHG

SEQ ID NO: 45309 - protein, 294 aa, Zea Mays
MARAALRLGDRALALLVLVSVALLPLVSSDDGHKHCEGVVRGWADSSTGRVKDGDKLSLKDLLFFLHIPRTGGRTYFHCFLKKLYTNAQECPRSYDKLRFDPSHPDCKLVVSHDDYSLTSKLPRERTSVVTILRNPVDRVFSTYEFSVEVAARFLVHPNLTSAKLMTTRVLKKSRAVSTLDIWPWKYLVPWMREDLFSRRDARGIDKVHSSKKVNAYDVEDMVMPLHQYINDPVAHEIIHNGATFQITGLTNNSYFDGAHEVRHCARKHPDLGRIVLEVAKAGPDAVCRTYRGS

SEQ ID NO: 45310 - protein, 450 aa, Zea Mays
MARAALRLGDRALALLVLVSVALLPLVSSDDGHKHCEGVVRGWADSSTGRVKDGDKLSLKDLLFFLHIPRTGGRTYFHCFLKKLYTNAQECPRSYDKLRFDPSHPDCKLVVSHDDYSLTSKLPRERTSVVTILRNPVDRVFSTYEFSVEVAARFLVHPNLTSAKLMTTRVLKKSRAVSTLDIWPWKYLVPWMREDLFSRRDARGIDKVHSSKKVNAYDVEDMVMPLHQYINDPVAHEIIHNGATFQITGLTNNSYFDGAHEMLYVGLTEDHEESARLFAHMVGAQVLLQSGTLSLDLKEDLHSETDSHPSMVEPGDEEASEHLNNTHGWQNNEALNSTSDEQGKGNMTVGKLMEAYETCIAKLRKSQSSRRKISLKKVEEANFSKEARKLVPEAILKQIISLNSLDMELYDHAKKIFTQEHLMLKAQQSMAGQHRQLAEQEGGGRKHDRI

SEQ ID NO: 45311 - protein, 727 aa, Zea Mays
MSDRMDLIIGRPEAVYFYEVDGRGPCWAFDGEKKFVGWFRGYLLCIIEDQRTHKSTLNVYDLKNRLIAHSMPVGDVSHLVCEWGYIILIMSDKKILCIGEKDMESKLDMLFKKNLYTVAINLVQSQQADPASTAEVLRKYGDHLYGKQEYDEAMSQYIHTIGHLEPSYVIQKFLDAKRIYNLTNYLEKLHDRGLASKDHTTLLLNCYTKLKDVEKLNHFIKDEDGVGEIKFDVETAIRVCRAAGYHEHAMFVAKKAGRHELYLKILLEDLGRYDEALQYISGLEANQAGLTVKEYGKILVEHRPAETVEILLRLCTDVGDPTSRRGSNSMHLLMIPSPMDFVNIFVHSPQYLMGFLENYIKTVTDSPAQTEIHNTLLELYISNDLSFPSISQENEYENHYIKEIKGKETANVYRSGIKEKTGLGKEDPKVAKNIVDRRRKGLALLKSAWTSEMEDPLYDVDLALILCNTNAFKDGLLFLYEKLKLYKEVISCYKQAHDHQGLIACCKKLGDSSQGGDPSLWGDLLKYFGDLGEDCSKEVKEVLTYIEKEDVVPPIVVLQTLSKNPCLTLSVVKDYIARKLEQESKLIEDDRKSIDKYQAETELMKREIQDLKTNAKVFQLSKCSACTFTLDLPAVHFLCMHSFHLRCLGDNEKECPECAPEYRSVMEAKQKLEQNARDHDLFFRQLRGSKDGFSVIADYFSKGIFWKLWSQPKFFSAKRAPAGSRSG

SEQ ID NO: 45312 - protein, 248 aa, Zea Mays
MASASSITSQQGTRFSPFAPPRLEASWPGVMKTEESPYRITHQIHLGSSSSSRQQHFVGAATSAYAKEGPRFPFLQEGEISFATGVVLEPPAAAPACQPLLKSGAPPPESSSAGGGKMFSDQGLTRVLDSDCALSLLSAPANYSGIDVSRMVRPTEHVPMAQQLVVSGLQFGSASWFPRPQASTGGSFVSSCPAVQVEGEQQLNAVLGPNDSEVSMNYGGMFHVGGGSGGGEGSSDGGTSSSMPFSWQ

SEQ ID NO: 45313 - protein, 337 aa, Zea Mays
MTVRVAHYTYCHQMCKTLLRNNNHGLVHFDGFKSIPSQNLLNFSIPSNTREVGSPIRFHLLAEFDADKRSCRKRLDGHNRRRRKPQPDTMASASSITSQQGTRFSPFAPPRLEASWPGVMKTEESPYRITHQIHLGSSSSSRQQHFVGAATSAYAKEGPRFPFLQEGEISFATGVVLEPPAAAPACQPLLKSGAPPPESSSAGGGKMFSDQGLTRVLDSDCALSLLSAPANYSGIDVSRMVRPTEHVPMAQQLVVSGLQFGSASWFPRPQASTGGSFVSSCPAVQVEGEQQLNAVLGPNDSEVSMNYGGMFHVGGGSGGGEGSSDGGTSSSMPFSWQ

SEQ ID NO: 45314 - protein, 222 aa, Zea Mays
MSGVGSGRPPAAQKILQSLRPPLSFATPSRSPFAAPDDYHRFPTPAAATAPAATSGGVGAGAPPRDTIEEGLFIRTPLKRKATSEENDAAAEPSDCIITSPMPTSVSGKTVKASKAKAKNSKTGPQTPTSNVGSPLNPPTPVGTCRYDSSLGLLTKKFINLLKQAPDGILDLNNAAETLEVQKRRIYDITNVLEGIGLIEKTLKNRIRWKQKLKILVCRSKH

SEQ ID NO: 45315 - protein, 235 aa, Zea Mays
MREKLRGLTEDENNKRWLYVTEDDIKGLPSFQNETLIAIKAPHGTTLEVPDPDEAGDYLQRRYRIVLRSTMGPIDVYLVSQFDEKFEELGGVATPVKHSSVPRHQPAEDFNTYAGQSSTPMDVAHDVQHGQKIPQDPSALHDFGGMTRISPSDVHTDSDYWLLTEGDVSMTDMWKTGRILDDHALRCLNFLTWKIEEVQWDQMDFLSEDVVTPRAHNQQPVTVDGPHMEVPSMDP

SEQ ID NO: 45316 - protein, 54 aa, Zea Mays
MVVASNVVLYVHVDDSVAGAYYYYIPVLCKICVLQYKQYMDSSGFFYIVLHIHL

SEQ ID NO: 45317 - protein, 114 aa, Zea Mays
MTVLVVVEMFNALNNLSENQSLLVIHPWSNLWLVGSIILTMLLHVAVLYIEPLSALFSVSPLSWVEWKIVLYLSFPVILIDEVLKFFSRRSPRGRRFPLRLWRREILPKESRDN

SEQ ID NO: 45318 - protein, 338 aa, Zea Mays
MLVEALQAHNEVVAMTGDGVNDAPALKKADIGIAMGSGTAVAKSASDMVLADDNFATIVAAVAEGRAIYNNTKQFIRYMISSNIGEVVCIFVAAVLGMPDTLIPVQLLWVNLVTDGLPATAIGFNKPDGNIMSVKPRKVNEAVVSGWLFFRYLVIGAYVGLATIAGFVWWFVYSDNGPKLPYSELCVFTGTIVPWPAVNFDSCSTRQTSYSCSIFEDRHPSTVSMTVLVVVEMFNALNNLSENQSLLVIHPWSNLWLVGSIILTMLLHVAVLYIEPLSALFSVSPLSWVEWKIVLYLSFPVILIDEVLKFFSRRSPRGRRFPLRLWRREILPKESRDN

SEQ ID NO: 45319 - protein, 339 aa, Zea Mays
MVLFSRVEPSHKKMLVEALQAHNEVVAMTGDGVNDAPALKKADIGIAMGSGTAVAKSASDMVLADDNFATIVAAVAEGRAIYNNTKQFIRYMISSNIGEVVCIFVAAVLGMPDTLIPVQLLWVNLVTDGLPATAIGFNKPDGNIMSVKPRKVNEAVVSGWLFFRYLVIGAYVGLATIAGFVWWFVYSDNGPKLPYSELVNFDSCSTRQTSYSCSIFEDRHPSTVSMTVLVVVEMFNALNNLSENQSLLVIHPWSNLWLVGSIILTMLLHVAVLYIEPLSALFSVSPLSWVEWKIVLYLSFPVILIDEVLKFFSRRSPRGRRFPLRLWRREILPKESRDN

SEQ ID NO: 45320 - protein, 863 aa, Zea Mays
MRMVEMLSHQLRVDQAILTGESCSVAKEVESTPAMNAVYQDKTNILFSGTVVVAGRARAIVIGIGSNTAMGSIRDAMLRTEDPHPSIYMVIILLTVKNLTILQEATPLKKKLDEFGTFLAKVIAGICILVWVVNIGHFRDPSHGGFVRGAIHYFKVAVALAVAAIPEGLPAVVTTCLALGTKRMARLNAIVRSLPSVETLGCTTVICSDKTGTLTTNMMSVSKVCVVRSVHQRPMTDEYSISGTTFAPDGFIYDADGLQLEFPPQSPCLLHLAMCSALCNESTLQYNPDKKSYEKIGESTEVALRVLVEKVGLPGFDSMPSSLNMLTKHERASYCNHYWENQFRKISVLEFSRDRKMMSVLCSRKHQEIMFSKGAPESIMARCTHILCNDDGSSVPLTMDIRNELEARFQSFAGKDTLRCLALALKRMPAGQQSICYGDEANLTFIGLVGMLDPPREEVWDAIHSCMSAGIRVIVVTGDNKSTAESLCRQIGAFEHLNDFSGYSYTASEFEGLPPLERTNALQRMVLFSRVEPSHKKMLVEALQAHNEVVAMTGDGVNDAPALKKADIGIAMGSGTAVAKSASDMVLADDNFATIVAAVAEGRAIYNNTKQFIRYMISSNIGEVVCIFVAAVLGMPDTLIPVQLLWVNLVTDGLPATAIGFNKPDGNIMSVKPRKVNEAVVSGWLFFRYLVIGAYVGLATIAGFVWWFVYSDNGPKLPYSELVNFDSCSTRQTSYSCSIFEDRHPSTVSMTVLVVVEMFNALNNLSENQSLLVIHPWSNLWLVGSIILTMLLHVAVLYIEPLSALFSVSPLSWVEWKIVLYLSFPVILIDEVLKFFSRRSPRGRRFPLRLWRREILPKESRDN

SEQ ID NO: 45321 - protein, 142 aa, Zea Mays
MAATLCPTRKLSCCMATILQESSNMTQLQSLTPWLIQVFHNLLSPQLQHRQIHWALVTLREKRYSLCCSAYIDGIKMAGRMVCEEFYGYVTPPSDLVTCIQPSIWSRRTDTDIEGALKDIEGPLRGIEETLIATEGDLMAIE

SEQ ID NO: 45322 - protein, 195 aa, Zea Mays
MTQKVLIATKPTNSLRSSSTSQGAAKSQQGNSKAGQFSVSPPTGKHNASLSLTHSQAKAIPCYMDDFKYGFPSSGLSCETMKWWGTSSDTDYVPTKDGSHEPHESTTHEPSKGMTDDDELDWGADEAEAEADGTVTAEASAQLCSLRRKAVDDGRKLLNGHNRRGQEFSRLNKRQKTALAQVFGASLPECCITRV

SEQ ID NO: 45323 - protein, 1122 aa, Zea Mays
MTTAEAASRMSADTVLIQDALGEKVGKYIQLLTTFVGGFIIGFIRGWMLALVMLACIPPSILSFATVSRLRAQISRKRQESYEDAGNIVEQTIGAIRTVVSFNGEKKAIAMYNNHIKKAYKATIMEGIITGLGVGSIFFVVFSSYSLAFWYGAKLIISKGYTGGQVINIVFAILVGSMAIGTASPSISAIAEGQSAAQRLFEIINRKPNIDINDTSGIVLEDIEGDVELKDVFFRYPARPEQLILDGLCLQVPSGTTMAIVGESGSGKSTVISMVERFYDPQAGEVLVDGVNIKSLQLQWLRGKISLVSQEPLLFMTSIKDNITYGKADATIEEIKRAAELANAATFIEKLPDAYETTVGQHGSQLSGGQKQRIAIARAILKNPKILLLDEATSALDVESERVVQEALNRIMVGRTTLIVAHRLSTIRSADCIAVVHQGKVVERGVHDKLIKDPDGAYSQLIRLQQAHATERHEVPDTDVSGSIYKSRSLPLEQSTGRDSPRNKGHHSFTKTTGLSKELNRQDFTDRQEDQEHGNSKAPKKAPIGRLFKLNKPEAPVLLLAAIVAFVHGLLFPSFSIMMSGGIRTFYYPPHQLRKDSRFWALTCLLFAVIALISIQLEYFLFGVAGGKLIQRVRSLSFQSIVHQEVAWFDEPSNSSGALGARLYIDALNIRRLVGDNLAILVQCIVTIAAGFSIAFASDWKLTLIVICVIPVMGSQNYIQVKFLKGFSEDAKVMYEDASQVVTEAIGSIQTVASFCAEKRVITSYIQKCQASMKHGIRSGMVGGLGFSLSNLIMYLTYALCFYVGALFVHEGKTTFKDVFRVYFALIFTAFGVSQTSATATDSTKAQESTISILTIIDRRSKINSTSDEGVIIEKVDGNIDFRHVSFKYPSRPDVQVLSNFTLAIPARKTVALVGESGSGKSTIISLLERFYDPDSGTISLDGTELKKLKLSWLRDQTGLVSQEPVLFNNTIRTNIAYGKQGEVREDEIVAAAKAANAHEFISSLPQGYSTIVGERGTQLSGGQKQRVAIARAILKDPKILLLDEATSALDAEGEHIVQDALDQVMVSRTTIVVAHRLSTIKGADMIVVMKDGEVAEKGKHEYLVGKGGVYASLVELHSKSA

SEQ ID NO: 45324 - protein, 865 aa, Zea Mays
MAIVGESGSGKSTVISMVERFYDPQAGEVLVDGVNIKSLQLQWLRGKISLVSQEPLLFMTSIKDNITYGKADATIEEIKRAAELANAATFIEKLPDAYETTVGQHGSQLSGGQKQRIAIARAILKNPKILLLDEATSALDVESERVVQEALNRIMVGRTTLIVAHRLSTIRSADCIAVVHQGKVVERGVHDKLIKDPDGAYSQLIRLQQAHATERHEVPDTDVSGSIYKSRSLPLEQSTGRDSPRNKGHHSFTKTTGLSKELNRQDFTDRQEDQEHGNSKAPKKAPIGRLFKLNKPEAPVLLLAAIVAFVHGLLFPSFSIMMSGGIRTFYYPPHQLRKDSRFWALTCLLFAVIALISIQLEYFLFGVAGGKLIQRVRSLSFQSIVHQEVAWFDEPSNSSGALGARLYIDALNIRRLVGDNLAILVQCIVTIAAGFSIAFASDWKLTLIVICVIPVMGSQNYIQVKFLKGFSEDAKVMYEDASQVVTEAIGSIQTVASFCAEKRVITSYIQKCQASMKHGIRSGMVGGLGFSLSNLIMYLTYALCFYVGALFVHEGKTTFKDVFRVYFALIFTAFGVSQTSATATDSTKAQESTISILTIIDRRSKINSTSDEGVIIEKVDGNIDFRHVSFKYPSRPDVQVLSNFTLAIPARKTVALVGESGSGKSTIISLLERFYDPDSGTISLDGTELKKLKLSWLRDQTGLVSQEPVLFNNTIRTNIAYGKQGEVREDEIVAAAKAANAHEFISSLPQGYSTIVGERGTQLSGGQKQRVAIARAILKDPKILLLDEATSALDAEGEHIVQDALDQVMVSRTTIVVAHRLSTIKGADMIVVMKDGEVAEKGKHEYLVGKGGVYASLVELHSKSA

SEQ ID NO: 45325 - protein, 111 aa, Zea Mays
MKLSGCGRTALIENRPLLVGTDLTEGEAHVLEGYGWLRNTGLGTMVNYRDRVVHDRWTEKSVSDWRSKIGKLLMVGYAEGQSITTLGPKKILDMLEATGDAEFEVKLEDPY

SEQ ID NO: 45326 - protein, 361 aa, Zea Mays
MASNADQHAAVVSAAPSDSPVGAKKAGAAAAVWKLPAAAAVPVAEVVENPIMDAHSWPALPGLSSPPPPPPPHAGPTAKASPKAASPAPTGAATSPVSLGNPGAPDASHGNDARVRNPVARRALVMPAADGLEKSAPAPEPSPVYVPNARSNGADPHQNGRPGSHHHGRGGGYGGGNRRGNGGGGGRRGSEHHGGFDGQRRGGGRRDGHGPVHQLRGHQPTYIKAPVVAGAPPPPPPFVSPATPQTPPYGPPMGFHDMSAHVYYFPAPTSEGIQGLPFVPLPASPQAVLIDPSRKNLLEQIEYYFSDDNLCKDLYLRQHMDGQGWVPLSLIAGFRQVQKITNNIQFILETVMLSNIVEVQF

SEQ ID NO: 45327 - protein, 170 aa, Zea Mays
MDDAESASRAGRRRAAAAAGMRLFSPEYYALCAGGGMLAAGATHLAITPLDVLKVNMQVNPMKYNSIFSGLNVLVKEEGPSSLWRGWGGKFFGYGVQGGCSASAQIIADVGLCPFESVKVRVQTQPMFAKGLVDGFPRVYATEGLSGFYRGLLPLWGRNLPFSMLMFSTF

SEQ ID NO: 45328 - protein, 189 aa, Zea Mays
MDDAESASRAGRRRAAAAAGMRLFSPEYYALCAGGGMLAAGATHLAITPLDVLKVNMQVNPMKYNSIFSGLNVLVKEEGPSSLWRGWGGKFFGYGVQGGCRFGLYEYFKKRYSDVLVDSNKSTIYFLSSASAQIIADVGLCPFESVKVRVQTQPMFAKGLVDGFPRVYATEGLSGFYRGLLPLWGRNLP

SEQ ID NO: 45329 - protein, 212 aa, Zea Mays
MEVTPKTLADVKGGTLISYEGRVQLLEIAQVPDEHFLPNRWVNLKAVKRLVEAEALKMEIIPNPKEVDGVKVLQLETAAGAAIRFFDKAIGINVPRSRFLPVKATSDLLLVQSDLYTLVDGFVIRNPSRANPANPSIELGPEFKKVANFLARFKSIPSIVELDSLKVSGDVWFGSGITLKGKVTITAKSGVKLEVPDGAVFENKDVNGPEDL

SEQ ID NO: 45330 - protein, 386 aa, Zea Mays
MVFPSPSVQVYLDPHPPNWNNQQQGQQPRANGGADAPLLPLGPAAATSAAPEQGGLPRSSSMANAAVAAHARPNSMAERARLARMPHPEPALKCPRCESTNTKFCYYNNYSLSQPRHFCKTCRRYWTRGGSLRNVPVGGGCRRNKRSSKSSSSSAGSSSSKMSPSGRLLGGPSATPSTTPGTTGAIITPGLSSFSHHLPFLGSMHPSGPNLGLAFSAGLPLVGMQHLDTVDQFPVASGGGTTIGASLEQWRVRQQQQQFPFMTGGILDLSQPPTYQFGLEANRGGSGSAAVAFNSGQTTTTSATTGRQEGSSKKMGDSKGEDMSLQKQYMVPLRHGSGSHGVWDGSAGGTGSNGGGTGNGGSSWPMNMIPGFHSSSTSGCNDSGLS

SEQ ID NO: 45331 - protein, 110 aa, Zea Mays
MYATLAVSPGQSSLISDDADVVALIGTSKDLAKQINQKEVHWGLLEDSVEEQMEKALAESDKIEAESNDADAEDNKARKKGIQKVESKILLLCGDTCFQLRRSIACIGVG

SEQ ID NO: 45332 - protein, 81 aa, Zea Mays
MAAIEDEEMEKKVQQYLHRKGFRLTELALHEERSRLSTSDVALTRSDNNPARYHEGYSRLIAWAMNYFASFTQFLSIASWI

SEQ ID NO: 45333 - protein, 71 aa, Zea Mays
MEKALAESDKIEAESNDADAEDNKKRNTEGGKQNTSLVWGHLLSAAKEHCLHRGRLTVLLSSGMSLSAQKP

SEQ ID NO: 45334 - protein, 223 aa, Zea Mays
MFCSSDTGKETMTRLEFKQRLSIAIGAAKGLSHLHSLAPPLIHRDFKTSNVLVDENFIAKVSDAGIHRLLRGPDGGAVAALASRGVFQDPEVHSSAQAQLSETESSDVYSFGVFLLELVTGREAAGLMPPGSSKDSLAQWMEARFASNELVDPRLGGSFTSEGMAEVVGLASSCLSPSARRRPRMRLVAAELDRILEKEMALTTVMGDGGTAIVTLGSQLFTS

SEQ ID NO: 45335 - protein, 488 aa, Zea Mays
MYHGGTNFGRFASSYVTTSYYDGAPLDEYGLIWQPTWGHLRELHAAVKQSSEPLLFGTYSNLSIGQEQEAHIFETETQCVAFLVNFDQHHISEVVFRNISLELAPKSISILLDCKQVVFETAKVNAQHGSRTAEEVQSFSDISTWKAFKEPIPQDVSKSAYSGNRLFEHLSTTKDATDYLWYIVGLFLNILGRIHGSHGGPANIIFSTNISLQEGPNTISLLSAMVGSPDSGAHMERRVFGIRKVSIQQGQEPENLLNNELWGYQVGLFGERNNIYTQDSKITEWTTIDNLTYSPLTWYKTTFSTPVGNDAVTLNLTGMGKGEVWVNGESIGRYWVSFKAPSGNPSQSLYHIPREFLNPQDNTLVLFEEMGGNPQLITVNTMSVSRVCGNVNELSAPSLQYKDKEPAVDLWCPEGKHISAIEFASYGGPTGDCKKFGFGRCHAGSSESVVKQACLGKSGCSVPVTPIKFGGDPCPGIQKSLLVVANYR

SEQ ID NO: 45336 - protein, 806 aa, Zea Mays
MAAAEIVVVAVVTLLLGLTSCMAESSVWREEDRRVRGEVTYEQRALVLDGARRMLFAGEMHYPRSTPEMWPKLIAKAKEGGLDVIQTYVFWNVHEPIQGQYNFEGRYDLVRFIKEIQAQGLYVSLRIGPFIESEWKYGGFPFWLHDVPNITFRSDNEPFKQHMQRFVTDIVNMMKHEGLYYPQGGPIITSQIENEYQMVEPAFGSSGQRYVSWAAAMAVDLQTGVPWTMCKQNDAPDPVVGIHSYTIPVNFQNDSRNYLIYGNDTKLRSPQDITFAVALFIARKNGSYVSYYMYHGGTNFGRFASSYVTTSYYDGAPLDEYGLIWQPTWGHLRELHAAVKQSSEPLLFGTYSNLSIGQEQEAHIFETETQCVAFLVNFDQHHISEVVFRNISLELAPKSISILLDCKQVVFETAKVNAQHGSRTAEEVQSFSDISTWKAFKEPIPQDVSKSAYSGNRLFEHLSTTKDATDYLWYIVGYEYTPSDDGQLVLINVESRAHILHAFVNNAYVGRIHGSHGGPANIIFSTNISLQEGPNTISLLSAMVGSPDSGAHMERRVFGIRKVSIQQGQEPENLLNNELWGYQVGLFGERNNIYTQDSKITEWTTIDNLTYSPLTWYKTTFSTPVGNDAVTLNLTGMGKGEVWVNGESIGRYWVSFKAPSGNPSQSLYHIPREFLNPQDNTLVLFEEMGGNPQLITVNTMSVSRVCGNVNELSAPSLQYKDKEPAVDLWCPEGKHISAIEFASYGGPTGDCKKFGFGRCHAGSSESVVKQACLGKSGCSVPVTPIKFGGDPCPGIQKSLLVVANYR

SEQ ID NO: 45337 - protein, 354 aa, Zea Mays
MEGRRLSRRQLRSLPDAASFSPEVAASPGLVGSGQLGLGLSAAFETLPPGKGRAFCAGGDVAAVVRSIHKDSWKYGADFFRNEFLLNYIIATYTKPQVSLLSGIVMGGGAGVSLHGRFRVATDNTVFAMPETALGLFPDIGASYFLSRLPGFYGEYVGLAGARLDGGEMLACGLATHFVQSNVGCVCASLITPSKYSVPQSLLSLEESLKKVDTSNAFAVCGIIDQFAQQPSLKESSSLNRLEIINKCFSKRTVEEIISALIREGRTQTVGECLQREYRMVCHVMRGDFSRDFFEGCRAILLDKDRNPKWMPPRLEQVHDEAVEQYFSRIDDPQWEDLNLPARRSHGRNIESKL

SEQ ID NO: 45338 - protein, 386 aa, Zea Mays
MEGRRLSRRQLRSLPDAASFSPEVAASPGLVGSGQLGLGLSAAFETLPPILVEVNGFTRTLILNRPKQLNALSSTMIMGLLRCFTAYEKDDGVKLLIMKGKGRAFCAGGDVAAVVRSIHKDSWKYGADFFRNEFLLNYIIATYTKPQVSLLSGIVMGGGAGVSLHGRFRVATDNTVFAMPETALGLFPDIGASYFLSRLPGFYGEYVGLAGARLDGGEMLACGLATHFVQSNSLLSLEESLKKVDTSNAFAVCGIIDQFAQQPSLKESSSLNRLEIINKCFSKRTVEEIISALIREGRTQTVGECLQREYRMVCHVMRGDFSRDFFEGCRAILLDKDRNPKWMPPRLEQVHDEAVEQYFSRIDDPQWEDLNLPARRSHGRNIESKL

SEQ ID NO: 45339 - protein, 236 aa, Zea Mays
MEGRRLSRRQLRSLPDAASFSPEVAASPGLVGSGQLGLGLSAAFETLPPILVEVNGFTRTLILNRPKQLNALSSTMIMGLLRCFTAYEKDDGVKLLIMKGKGRAFCAGGDVAAVVRSIHKDSWKYGADFFRNEFLLNYIIATYTKPQVSLLSGIVMGGGAGVSLHGRFRVATDNTVFAMPETALGLFPDIGASYFLSRLPGFYGYLICLFFFFIFSRITCCDVISIYTVLLDIIQS

SEQ ID NO: 45340 - protein, 289 aa, Zea Mays
MVVTAPYDAHDRVLVGVVVAVSMPRGEVDMEGEGIEELEVVATISSSSGRELGREGTNWQREDMASLVIRDQRCFLVRRKRMTSMSPPSAAGDDSDQVLFLYILVEVNGFTRTLILNRPKQLNALSSTMIMGLLRCFTAYEKDDGVKLLIMKGKGRAFCAGGDVAAVVRSIHKDSWKYGADFFRNEFLLNYIIATYTKPQVSLLSGIVMGGGAGVSLHGRFRVATDNTVFAMPETALGLFPDIGASYFLSRLPGFYGYLICLFFFFIFSRITCCDVISIYTVLLDIIQS

SEQ ID NO: 45341 - protein, 218 aa, Zea Mays
MAGLRAKLETAYKTSGGKKVNLISHSMGGLLVRCFMSMNHDVFTKYVNKWICIACPFQGAPGCINDSLLTGLQFVYGFESFFFVSRWAMHQLLVECPSIYEMLPNPEFKWKEKPIIQVWRKNPEKDGTVELVQYEATDCVSLFEEALRNNELTYNGKKVALPFNMSVFKWATKTRQILDNAELPDTVSFYNIYGTSYETPYDVWLIGCQCIKFKVEKL

SEQ ID NO: 45342 - protein, 433 aa, Zea Mays
MLGAALRLRVRVLRRRRSHRGRRRGRRSLGRVGDDDDDEGGREPVLLVSGMGGSVLHARRRSNSKFDLRVWVRILFANLDFKKYLWSLYNADTGYVEPLDDDVEIVVPEDDHGLFAIDILDPSWFVELLHLSMVYHFHGMIDMLINCGYEKGTTLFGYGYDFRQSNRIDKAMAGLRAKLETAYKTSGGKKVNLISHSMGGLLVFTKYVNKWICIACPFQGAPGCINDSLLTGLQFVYGFESFFFVSRWAMHQLLVECPSIYEMLPNPEFKWKEKPIIQVWRKNPEKDGTVELVQYEATDCVSLFEEALRNNELTYNGKKVALPFNMSVFKWATKTRQILDNAELPDTVSFYNIYGTSYETPYDVWLIGCQCIKFKADGFSAKERVGVKADHRGLLSDENVFKLLKKWLGVSEKKSEWRCVSKSYSKVGNWVAL

SEQ ID NO: 45343 - protein, 143 aa, Zea Mays
MYHQHQGPSELFTTRTSFPMEQHPFLRGGNAQGDSGLVLSTDAKPRLKWTPELHQRFVDAVNQLGGEEKATPKTVMRLMGIPGLTLYHLKSHLQKYRLSKNLQAQANASTSKNAIGCTPVADRIPGTTAATMSSTNVLPQAEK

SEQ ID NO: 45344 - protein, 1647 aa, Zea Mays
MHGWRGAEGCDVRRRRLVRLMWPAARVEAEAPPPPAQGPATSPSGSSVPPSRTTSLPPESAAQQECIDLPRPVSPGSFVKDGREIRVGDCALFRAVGAPPFIGLIRWIEKKEEAHPKLRVSWLYRPTDVKLNKDIQLSAAPNEIFYSFHQDEASAVSLLHPCKVAFLRKGVELPAGISSFVCWRVYDIDNKCLWWLTDKDYINKRQEEVNRLLHRTRLEMRAALQSGGRSPKRLNGPSASQQLKTASVGTQNGGLSKGKKRDRSEQGVDPAKRDRDHLLKVDESEPGNFNLDDIKSEISKITEKGGLPNAEAVEKLVHLMQLDRTEQKIDLSGRVILADVIAATESPDCLGRFVQSRGLPVLDSWLQEAHKGKSGDGTSPKEADKPIDELLSALLRALAKLPINLSALQSCSIGKSVNHLRSHKNLEIQKKAKCLVENWKKRVDAEMKSNDVKPLVSGQSVSWSGKAGFQEISNAGTKRGGSSENSPKNPVPTLSSSKILTDKPGGTDAEAKLNPGVSALSNSQHVQPTNVTTNLKDQPCKSTGGTGPELPTVKEEKSSSSSQSPNNSQSISSEPSKDARSSTAASGGASKTSESSSRSHRKANNGLVSGNLKEASVGRSVSLDRSLLQDKSSQTGTASEKGVDMPPDHGNNHRLIVRFPNPGRSPANSASAGSFDGPSVTGDRASSPVVADRHDQTERWVKGKTENSRPHLASDANTESWHSNDGAAGSEEGDKSPCAILDDDNSRTPDDSVKDAHASRVACSSHMNEKDVSETKVGTLFSPMNALIEIKYSEASHSRQAGDDAAMNLLASVAGEISKSELVSPVSSPRSSSAKKLARESDNIGKVKVESDMGPSHPGQADAKKGAMGKEVKNDACLVSMDEQRQTTPSPELPYSKAVVSSAKIETHEVEAKIANKCNSQHASIDSKGEHDQNFNLRHSANTKVVNMSNMYSSAGESQDACTAHGNVEDGSTDKDGAMESALGSQCSLVVSSRNSRLVHAGESALSAADKQAQGLLKSTNHKQLLSVSDNPGAFDRRDSMAGKLDLMAAEVRKTDVLGNSSIVQNEAEKKEHASSFLPDVPKLVVAAASPVGVANVNKEIKESKDSSSESNSHVKSEGVNSHQSEQSAKQSSKKSSDGVSGKEDEKEDHVLSDEGSSLAANTKSNATAKLDFDLNEGIPGDDGHQSEPTISPVVCSSAIHLTGILPFTSPITTGLQPASVTVAAPAKGPFVPPENLLRAKPEIGWKGSAATSAFRPAEPRKILEMPVAARDISVSHAAGKQSRPTLGFDLNVADDQALEEDIPQSSAQTTCSESGNTRSRDGSSRSAGIEFDLNRADEVADNGQFVPSASHRVEVPLLSTRSLHGVFSNAGLNSSRDFDLNSGPGLDDVGTEAAPKSLPSKNTSSIQFLPQVPVRMNSAAMSNISPWLASASPCGPVAIQSFLPTREQPYPIEAAAGAQRIIAPTADAGQFGGDPCRPPVVSTSPAMVYHPPAYQYPGFPFPPSVHLQTPAFSIGSATFNNSASPGVPYFPTVSPSFVGPAGALTPQHLRQFAINLAEGSSSSGRDSNRKWESQGLDLNSGPGSIDLEGKDERVPLPVRQNLIPPPHGFVEDQGRIYQMPVVGTKRKEPDGSWDSERSTYKQLSWQ

SEQ ID NO: 45345 - protein, 436 aa, Zea Mays
MCVILTRYCVPTTISERPRQRTSVPRAAATAIYPGSLLLSTQPRRPPSTGRHLSWTPALHATPGSPASAPHPPRQLSLRPVAPHDSPGPVVRTGTGCTVVGAEPEQPRRHIYSGLRTSLGLNPSGVWILPFHTISASPLPARWPWSGGKRGDYKELFVMALPKDGCLDGAKITEVGGVGYKELLVMALPKDDSIDGAKVAEAIGVKLPDVGGAIRTILNSREAREFASGALAGAMSKAILAPLETIRTRMIVGVGPRHIFGSLVDIIQQNGWQGLWAGNTINMLRIIPTQAVELGTFECVKRSMAEAQEKWKEDGCPKIQLGNMKIELPLHLLSPVAIAGAAAGIAATLACHPLEVIKDRLTINREVYPSIGLAFRRIYKTDGIGGFYAGLCPTLIGMIPYTTCYFFMSYCKHNQLPSGSSKEAVDGRRPAGEVPA

SEQ ID NO: 45346 - protein, 291 aa, Zea Mays
MSKAILAPLETIRTRMIVGVGPRHIFGSLVDIIQQNGWQGLWAGNTINMLRIIPTQAVELGTFECVKRSMAEAQEKWKEDGCPKIQLGNMKIELPLHLLSPVAIAGAAAGIAATLACHPLEVIKDRLTINREVYPSIGLAFRRIYKTDGIGGFYAGLCPTLIGMIPYTTCYFFMYDTIKTSYCRLHKKSSLSRPELLLIGALSGLTASTISFPLEVARKRLMAGALQGKCPPNMIAALSEVIQEEGVMGLYRGWGASCLKVMPNSGITWVLYEAWKDVLLADRNKPRSLAN

SEQ ID NO: 45347 - protein, 248 aa, Zea Mays
MCVILTRYCVPTTISERPRQRTSVPRAAATAIYPGSLLLSTQPRRPPSTGRHLSWTPALHATPGSPASAPHPPRQLSLRPVAPHDSPGPVVRTGTGCTVVGAEPEQPRRHIYSGLRTSLGLNPSGVWILPFHTISASPLPARWPWSGGKRGDYKELFVMALPKDGCLDGAKITEVGGVGYKELLVMALPKDDSIDGAKVAEAIGVKLPDVGGAIRVRKSPPDFMSFPCLWSNERDTTFGFGQLLFFLN

SEQ ID NO: 45348 - protein, 457 aa, Zea Mays
MNPVDDTEEPADVCVIELGGTIGDIESMPFIEALGQFSYRKTKPTQHSVRGLRGLGLMPDILACRSTQPLEEHVKVKLAQFCHVPIPNIINLHDVTNIWHIPLLLRDQKAHEAILKVLDLQCASKVAREPQLSEWTERVSRCDRLKSPVRIAMVGKYTGLSDSYLSVIKALLHASVALDRKLVVDWVPSCDLEDSTAKETPDAYEKAWESLKGADGVLVPGGFGDRGVQGKILAAKYARENNVPYLGICLGMQIAVIEFARSVMKLHGANSTEFDPTTKTPCVVFMPEGSKTHMGATMRLGSRRTFFQATNCKSAKLYGNACYVDERHRHRYEVNPDMVPEFEKAGLSFVGRDESGERMEIIELPTHRFFVGAQFHPEFKSRPGKPSPLFLGLVAASSGQLDHLLQRGLTSSAGRDICGKGGAQKPKACQNGHVMKPLNGLVHGHYSATRCNGVIPI

SEQ ID NO: 45349 - protein, 290 aa, Zea Mays
MRRGAALLLVAVFAVVAVAKEGGVSNDIGDNNKKDNSTEVTNIRRDGSIQQPKHKDSIMTKSSQPLDFLEDSLIKECDPSHRCIIENKKFIACLKVSGEDSLALSLLMDNRGINPLDVSIMAPDYVTLAEDSIHVEANGHNETQVRVSVNDDANSTTIVIKVAEKSCNISIHSAITRETAGSGRVIRMPLTPTYTLLPVFLLLVAVAVCIVVRRWRNQDGDPAYQKLDMSDLPVSVGGKKEHDDRSDKWDDNWGDDWDDEEAPVTPSKPLPNPSSKGLAPRRSAKDGWKD

SEQ ID NO: 45350 - protein, 84 aa, Zea Mays
MSGISTTVPKPKGSQADHQTEYQRPKVHDQHAPPPRGSDGLSSPALATAGSRKKQRQQEPYNKRPDSGEKAGPKATGISYLNWP

SEQ ID NO: 45351 - protein, 458 aa, Zea Mays
MLPLSLFVSLLVLHLPHASADGDICIIGGGISGASTAFFLTSYTSTLGGAQLRVFERRQKVGGRLGTVTLAGDSFEAGGSIIHPRNLHARRFADLLGLAVKTGGDDWLGIWDGKSFVFQTARPPPVGSSWWRRKLHSLVNSLLLLRRYGLSLLKMDKFVQEMLRRFMLFYNGMESRPVFATVEEMLQWTGLYGLTRRTLEEELLDAGLNTRTIAELVTVITRINYGQSTHISGLAGAVSLAGSESGLWAVKGGNWQLAAGLLKTSNATLHLQEGIDSITDAGDHYVLRSNSGSEYECMVTVVATPLDELNITFSPPISIPPRKMQHTHATFVRGILNPRYSEGDMAAYKMFSRAKLDDGLLDQIFRARIETIRINWAAYPHYQAPEEFAPIVLDGKQLYYVNTFESAASAIETGAVAAENVARLIISRLSLLPQAQQQQPHIIKSFAEQESQRRHVDL

SEQ ID NO: 45352 - protein, 1257 aa, Zea Mays
MAGVCGSPFCSREASAPAPASCGRWDELLNSSTCANNILATGAAALLAVVLALQLLVRVARNGLRHAPVVALSSPLQRAAVAANACLGLAYLGLAAWMLGTDLTQRASVYLPHRWLVSLAQGLCLLLAGFAFSVRAQLLGAAFLRVWAALLAAYAAFVCCTSVVHMVADKVLAVKTCLDVLSLPGALLLLVYGIRHAREEEEGDGNGGTESSLYKPLNAEAHDDGAADSRVTPFAKAGVFSIMTFWWLNPMMKKGYEKPLEEKDMPLLGPSDRAYSQYLMFLDNLNRKKQLQAHGNPSVFWTIVSSHKSAILVSGLFALLKVLTLSAGPVLLKAFINVSLGKGSFKYEGFVLAAAMFAIKCCESLSQRQWYFRTRRLGLQVRSLLSAAIYKKQQKLSGSSKLKHSSGEIINYVTVDAYRIGEFPYWFHQTWTTSVQLCIALGILYNAVGLAMIASLVVIVLTVICNAPLSKLQHKFQTRLMEAQGVRLKAMSESLIHMKVLKLYAWETHFKKVIEGLREIEIKWLSAFNLRKSFNGFVFWTSPVLVSAATFLTCYLLKIPLDASNVFTFVATLRLVQDPIRQMPDVIGVVIQAKVAFTRITKFLDAPELSGQARKKYCVGDEYRIVMNSCSFSWDENPSKPTLKNINLVVKAGEKVAICGEVGSGKSTLLAAVLGEVPKTEGMIQICGKTAYVSQNAWIQTGTVQDNILFGSSMDRQRYQETLERCSLVKDLEMLPYGDHTQIGERGVNLSGGQKQRVQLARALYQNADIYLLDDPFSAVDAHTATSLFNEYVMGALSDKTVLLVTHQVDFLPVFDSVLLMSDGEIIRAAPYQDLLAHCQEFQNLVNAHKDTIGVSDLNRVRSHRTNENKGSIDIHGSLYKESLKPSPADQLIKTEEREMGDTGLKPYILYLRQNKGFFNGSMGILCHVIFVCGQIAQNSWMAANVQNPDVGTLKLISVYIAIGFITVFFLLFRSIALVVLGIQTSRSLFSQLLNSLFRAPMSFFDSTPLGRILSRVSSDLSIVDLDVPFGLMLALGASINAYSNLGVLAVVTWQVLFVSVPMMVLALRLQKYYLASAKELMRINGTTKSALANHLGESVAGSITIRAFEEEDRFFEKNSELVDKNAASYFYNFAATEWLIQRLETMSAAVLSFSAFIMALLPAGTFSSGFIGMALSYGLSLNNSFVFSIQNQCQLSNQIISVERVNQYMDIPSEAAEVIEENRPSPNWPQVGRVELRDLKIQGRCSPCTAWNHMHF

SEQ ID NO: 45353 - protein, 360 aa, Zea Mays
MASPPPPRVCVTGGGGYVASWLVKLLLSRGYAVHATVRDPSDPKNAHLQQLDGARERLRLFKADVLDRDALATAVVACEGVFHVASPVPADKVLDPESEVLSPAVKGTLNVLQACSANNVQKVVVVSSTAAVYFNPSWPQGRTKDESCWSDRDLCIKNENWYCAAKTIAEETAVEYGEKNGLIVVTVCPCIVLGPLLQPLINASSELLVYIIKGGFYIFLLVSNIHWLDNYSHGGPRVLKNLPWNIVDVRDVADALLLVYEKVESSGRYICAPNRISTNNMVNLFKKSYPNYNYVNCDNKDYESEISPVTSEKLKSLGWNPRTMEKTLLDNIEYFEKAGFLRDGEGYPCRLPHIFHFASD

SEQ ID NO: 45354 - protein, 377 aa, Zea Mays
MLLVLGCKQVATGNIRTSRGGYIRTKRRTGGGSFSEALHCSGMASPPPPRVCVTGGGGYVASWLVKLLLSRGYAVHATVRDPSDPKNAHLQQLDGARERLRLFKADVLDRDALATAVVACEGVFHVASPVPADKSEVLSPAVKGTLNVLQACSANNVQKVVVVSSTAAVYFNPSWPQGRTKDESCWSDRDLCIKNENWYCAAKTIAEETAVEYGEKNGLIVVTVCPCIVLGPLLQPLINASSELLVYIIKGGPRVLKNLPWNIVDVRDVADALLLVYEKVESSGRYICAPNRISTNNMVNLFKKSYPNYNYVNCDNKDYESEISPVTSEKLKSLGWNPRTMEKTLLDNIEYFEKAGFLRDGEGYPCRLPHIFHFASD

SEQ ID NO: 45355 - protein, 113 aa, Zea Mays
MNYELNLNQILQYWSLERKLCQPLLITEKMFAYRETVLEEAHQGMELHEHCRHIVDNDDQHCRFHSLCVHQVGLRNTEQQQQYRKESAYVGQMVCHIFSSLMMLQRCIFSFLG

SEQ ID NO: 45356 - protein, 374 aa, Zea Mays
MADSNPRAHLIQGAVTTISRSVPKRSIVSGNAPVNQALGSSKVSAGMESQSQQLSAPKPLAATSLSQTQSHGIQEEPKIQGKKQLLFESLPATDLKYWSLERKLCQPLLITEKMFAYRETVLEEAHQGMELHEHCRHIVDNDDQHCRFHSLCVHQVGLRNTEQQQQYRKESAYVGQMEATQPLVAPPFQQWPPTGAVLPLPGSTASVTNPPSPPIPGASDIVAADEVCTIFMDLPIDVKETEMHNLLCWLLGFEAFEMNFKGNQPMGFALFSTVHQAITAKAMFQDTVFDTETKVVLQTDMAKKNLFVKRSNQLDLVKGGFIANVQCEEDVDDDGAERGHSKAMPEVTTRVINREEVLLQGTSRLLRDVHNLFD

SEQ ID NO: 45357 - protein, 313 aa, Zea Mays
MFAYRETVLEEAHQGMELHEHCRHIVDNDDQHCRFHSLCVHQVGLRNTEQQQQYRKESAYVGQMEATQPLVAPPFQQWPPTGAVLPLPGSTASVTNPPSPPIPGASDIVAADEVCTIFMDLPIDVKETEMHNLLCWLLGFEAFEMNFKGNQPMGFALFSTVHQAITAKAMFQDTVFDTETKVVLQTDMAKKNLFVKRSNQLDLVKGGFIANVQCEEDVDDDGAERGHSKAMPEVTTRVINREEVIVDGLRDNVFAFSENVPGTTTKGIMDTVLVTQYFGTMRLGPPRSHLVHPPWSWSCQGCLGIDKRWLPAC

SEQ ID NO: 45358 - protein, 427 aa, Zea Mays
MAMGRLNRPSIMIYGGTIKPGHFQGNSYDIVSAFQCYGEYVSGSITDEQRKNVLRNSCPGAGACGGMYTANTMASAIETLGMSLPYSSSTPAEDPLKLEECRLAGKYLLELLKMDLKPKDIITEKSLRNAMVIVMALGGSTNAVLHLIAIARSVGLHLTLDDFQKVSDQVPFLADLKPSGKYVMEDLHKIGGTPAVIHYLLEQGLLDGDCMTVTGKTLAENAKIFPPLSEGQQIIRPLDNPIKPTGHIQILYGNLAPEGSVAKITGKEGLFFSGPALVFEGEESMITAISENPANFKGKVVVIRGEGPKGGPGMPEMLTPTSAIMGAGLGKECALLTDGRFSGGSHGFVVGHICPEAQEGGPIGLVHSGDVITIDVSKRVIDVDLTEQQLEERRRKWTPPPYKSTCGALWKYIKLVAPASRGCVTDE

SEQ ID NO: 45359 - protein, 1088 aa, Zea Mays
MAKPMKYDDEEEISSSAEEEDQSDAAGSVSGEEGDDDDEDAAAPPAEEAEGEGQQEEEVDEEEIEAVTTGAGAEDEEDAGAVTAAEGDDESQSTEDDEPVARDKDDDDETDAVVGKREKARLKELQKMKKHKIQEILDTQNAAIDADMNNKGKGRLKYLLQQTEIFAHFAKGSQSNEKKPRGRGRHASKMTEEEEDEEYLKEEEDALAGAGGTRLVSQPSCIKGKMRDYQLAGLNWLIRLYENGINGILADEMGLGKTLQTISLLGYLHEFRGITGPHMVVAPKSTLGNWMKEIQRFCPILRAVKFLGNPEERNHIRDDLLQPGKFDVCVTSFEMAIKEKSALRRFSWRYIIIDEAHRIKNENSLLSKTMRIYNTNYRLLITGTPLQNNLHELWALLNFLLPEIFSSAETFDEWFQISGENDQQEVVQQLHKVLRPFLLRRLKSDVEKGLPPKKETILKVGMSQMQKQYYRALLQKDLEVINAGGERKRLLNIAMQLRKCCNHPYLFQGAEPGPPYTTGEHLVENAGKMVLLDKLLPKLKERDSRVLIFSQMTRLLDILEDYLMYRGYQYCRIDGNTGGEDRDASIEAFNKPGSEKFVFLLSTRAGGLGINLATADVVVLYDSDWNPQADLQAQDRAHRIGQKKEVQVFRFCTEIMQTKLQYTIEEKVIERAYKKLALDALVIQQGRLAEQKTVNKDDLLQMVRFGAEMVFSSKDSTITDEDIDRIIAKGEETTAELDAKMKKFTEDAIKFKMDDNAELYDFDDEKDENKVDFKKLVSDNWIEPPRRERKRNYSESDYFKQALRQGAPAKPREPRIPRMPHLHDFQFFNNQRLNELYEKEVRYLMQANQKKDTIDGEDEDQLEPLTAEEQEEKEQLLEEGFASWTRRDFNTFIRACEKYGRNDIKSISSEMEGKTEEEVQRYAKVFKERYKELTDYDRIIKNIERGEARISRKDEIMKAIGKKLDRYKNPWLELKIQYGQNKGKFYNEECDRFMNTTPTKRAALRNSEGESAPLSSFKRRRQSLMDDYVGSLSARCSLCNALSPYVLCLVSCARELNASRAGDFVVAVDSDFAIATVATLLFTFSSWP

SEQ ID NO: 45360 - protein, 599 aa, Zea Mays
MRGYVYETNEVEDEYGDEYYDQDEYEEEGSGAGDGYAEEEEPTEGQKEILELRERLKEQIRRKAKAAAACTAGRSSSSQIPQARDKFGSFFGPSKPVISRRVIEERKSLKELHSTVAREPRPSGVHKDIPSSSKVQSRVNGHQHKQKIVNQVKKKAEALKDNRDYSFLLSDDADLSSSPKEKPAARSSLTQRADREVTQSTVKRKAPTSQPARLSNGYGPKNTMSTQRHAEGKVNSMRREDFSNTERVVSRDNERMYERVVSRDNERMHSIARNGSNQASTSKTTIQKHPSRGPIANKQPSKDSNDATLRKSSVASKHHPLEIDRPKSSQSQRMQSAGQRPQHSSHGQTPHQSMQHRTQQSLQSRRPQQMTQGQKPQQSLQSQRTQQSLQNRRPQQSSHIQKSQSSQAHRPQSLSNRSQALQGQRPLSSQGQYPEQRRVHASDRVKQAERQIRPPSKSMPSRPVSSNGIRDDHAKRKQVAKRRFDEDDEDPLAMIRNMFGYCLDKLTLSFLFWTLWLFEDVAYRYLDSNFGILCRYDPSRYAGRDEDVSDMEADFATIEMEEKRSARIARQEDEEQLRLIEEEERREQERKRRKMARGR

SEQ ID NO: 45361 - protein, 500 aa, Zea Mays
MGMVPCLGVPSHVLASFVGAMAISDLVKTTLGPKGMDKILQSTGRGRNVTVTNDGATILKSLHIDNPAAKVLVAGELLKEAEKLINMKIHPMTIIAGYRMALECARDSLLKKTMDNKENTDKFRSDLMNIAMTTLSSKILSQDKEYFAELAVDAVLRLKGSTNLESIQILKKPGGSLKDSFLDEGFILDKKIGIGQPKRIENAKILVANTAMDTDKVKIYGARVRVDSMSKVADIEAAEKQKMREKVQKIIAHGINCFVNRQLIYNFPEELFADAGILAIEHADFEGIERLALVTGGEIASTFDNPESVKLGQCKVIEEIMIGEDRLIHFSGVAMGQACTIVLRGASEHVLDEAERSLHDALCVLSQTVNDTRVLFGGGWPEMVMAKEVDELARKTPGKKSHAIDAFSHALQAIPTIIADNAGLDSADLISQLRAEHHKENSTAGIDVITGTVGDMQKLGIQESFKVKQAILLSATEAAEMILRVDEIITCAPRRREDRM

SEQ ID NO: 45362 - protein, 284 aa, Zea Mays
MSLGVGTEILITPDTTLLLELFDIKKGNRGKAIFHHELPHHNITFQASWPGLFVDKKGTYWDVPLSLSADLASVGSSSGLSYHLLLQQNSGEPKCFGGDETDDVPTALLPGLCAKVAISMKKSIDAWRKKEDKLKKVQPYDVFLSDSHVSLTGIVGGVASGYLGDCSRRVAIRDETHKSNAFIMFDERNKRAAFADLFASVTFTAQYGNFQRLFLDLTKIVGPFSFRVESSVAIDPRSQDHFVRVDDPIFAIDWALKVLGSAKATAWYSPKHQEAMMELRFYET

SEQ ID NO: 45363 - protein, 353 aa, Zea Mays
MSLGVGTEILITPDTTLLLELFDIKKGNRGKAIFHHEAKNLDALNLFGIQTPLYLLQLPHHNITFQASWPGLFVDKKGTYWDVPLSLSADLASVGSSSGLSYHLLLQQNSGEPKCFGGDETDDVPTALLPGLCAKVAISMKKSIDAWRKKEDKLKKVQPYDVFLSDSHVSLTGIVGGVASGYLGDCSRRVAIRDETHKSNAFIMFDERNKRAAFADLFASVTFTAQYGNFQRLFLDLTKASARFDITSGSLFLCGASRLAQDFFFSRRPDVETFCDICPDVTVSFQQQIVGPFSFRVESSVAIDPRSQDHFVRVDDPIFAIDWALKVLGSAKATAWYSPKHQEAMMELRFYET

SEQ ID NO: 45364 - protein, 333 aa, Zea Mays
MSLGVGTEILITPDTTLLLELFDIKKGNRGKAIFHHELPHHNITFQASWPGLFVDKKGTYWDVPLSLSADLASVGSSSGLSYHLLLQQNSGEPKCFGGDETDDVPTALLPGLCAKVAISMKKSIDAWRKKEDKLKKVQPYDVFLSDSHVSLTGIVGGVASGYLGDCSRRVAIRDETHKSNAFIMFDERNKRAAFADLFASVTFTAQYGNFQRLFLDLTKASARFDITSGSLFLCGASRLAQDFFFSRRPDVETFCDICPDVTVSFQQQIVGPFSFRVESSVAIDPRSQDHFVRVDDPIFAIDWALKVLGSAKATAWYSPKHQEAMMELRFYET

SEQ ID NO: 45365 - protein, 443 aa, Zea Mays
MASSVPVVDILDDDDDDNTCLGIASPASCKRSLGSSGTSSRDFLDAFSPSPPLRKRPPLAAVAPINLDDTPSPPKRRRSSVSINLDDTPSPPKPRLSSVPKQPVGVDDDVALSPTGDVVADRPDSIFYWAAFSESPETVVPTSDGLGSLAAETPGFASPDSVRPPAAPDMSMSSAPPAQKGSGVTSLISLDSDNESDDDIMNMEPLTNLPNNKEAMMCQKDGTEQVHEKQKRQPAGKKLTKEEKDKLMQERKQKRQEDKLLKQALKDELAKKKKMEKAIQKWESGKFALECITVEIDNSVIQRGSIGGPLLSSLTENGLSYEPTKNRISGSILWKLDVPDDIAQAFSDLNNSCDMNQNPLSQVKYVAIVLEAEEFCNLISNGSFFDHVQRVCDGYPGFTICYIINKLMNYINKCEQSQYKNPSNTWRRPPVEEETTDMVICAS

SEQ ID NO: 45366 - protein, 139 aa, Zea Mays
MGGGDDRRAAALQRSSSPWSVGERWRAHAGMVLVMLAYSGYHVLAKSVLNVGMNQVVFCVYRDLLALLVVAPVAFLRERRVRPPVTPQLLASFALLGFTGLYGNPLLCLVGLRYTNASYAAAFQPSIPVLTFLLAAIVG

SEQ ID NO: 45367 - protein, 381 aa, Zea Mays
MGGGDDRRAAALQRSSSPWSVGERWRAHAGMVLVMLAYSGYHVLAKSVLNVGMNQVVFCVYRDLLALLVVAPVAFLRERRVRPPVTPQLLASFALLGFTGLYGNPLLCLVGLRYTNASYAAAFQPSIPVLTFLLAAIVGVEAISVFTKDGILKVTGTAVCVSGAILMALYRGPSLIALLRSMPTAWTSAPYHPATPDWFTPAVPVLEQGVEAWQLGVLCLIGNCLLVAVYLVVQAPVMIKYPASLSVTAYSYFFATTFMVLTGVCATSGLHEWALTKAEVIAVLYAGIVASCLSYSIMTWANKVLGPSLVALYNPLQPAFSTALSTVFLGDPVYLGRSARLPRAHGNSGLQKASEQIESVGLGHNATPAAKSTTGLCCCGS

SEQ ID NO: 45368 - protein, 143 aa, Zea Mays
MTQVTKLFALTGRMESHVGVLDQDSESFLKIDIPFSSVTNIVVSGDRSFYIEGASATLPVSIAKVTLDEKRTMATDFSIVWSSSEDVAQYESYFSLPEFVEFPNVINGQHAYAYFYAPYNNFFQGSSDEKPPLLVRTHDYAKH

SEQ ID NO: 45369 - protein, 417 aa, Zea Mays
MGTNMYPSSALLRQNKDESIASLPIDELIEKADGFAGVFPEHKYEIVKGLQARKHICGMTGDGVNDAPALKKADIGIAVADSTDATRSASDIVLTEPGLSVIISAVLTSRAIFQRMKNYTIYAVSITIRIVLGFMLLALIWKFDFPPFMVLIIAILNDGTIMTISKDRVKPSPQPDSWKLAEIFATGVVLGGYLAMMTVIFFWAAYKTDFFPRLFHVESLEKTAQDDFQKFASAVYLQVSTVSQALIFVTRSRSWSFVERPGFLLVFAFLVAKLIATLIAVYANWAFTAIKGIGWGWAGVIWLYNIVFYFPLDIIKFLIRYALSGRAWNLVLEQRIAFTSKKNFGTEERERKWAHAQRTLHGLQPPEASIFENKTTFNELNQLAEEARRRAEMARLREVSTLKGRMESVVKQKGLDI

SEQ ID NO: 45370 - protein, 199 aa, Zea Mays
MRCRGASSGYHYGNKEPVGKAEGAASGCCITCIQSQGTIASHSAPPRGPYLIFRLWQVIAPSSSSFASSNQAAPGSGHGITTKECRYQDYQQPGDPRVPGGPGWPAGAGRGARHGIVPVRGGKRQDRRPRGTGARIPPPRYRFALPLRTCRRRRRGRGSAARDRGVQGGGVRDDQDVVLAVPPGSRATFPQGELAVSAC

SEQ ID NO: 45371 - protein, 115 aa, Zea Mays
MLKRRRQWLRIIQVTKWLMSKGQTHTRSVPKRLFSRMILIYDIHQRPDKVLEIFADMEELGVRPDEDTARRIGKAFVASGQEEKEKHVLEKYLKKWKYIHFNGERVRVRRDGPLA

SEQ ID NO: 45372 - protein, 83 aa, Zea Mays
MKRLIKDRASDLKVLITSATLDGLKVSKFFSGCPVLNIPGTLFPVEKFYSTDRPTNYIESSLRTAIENDCCQISMPRNLLEMS

SEQ ID NO: 45373 - protein, 481 aa, Zea Mays
MSIVPCDVCVCEFSMDRDPWAKFRRPNSEHPAQSEETRTHQHPGVAGARRPNAMPSPSPAPPPVLPISEHEDEIVAAVDANPVVVVIGETGSGKSTQLSQILHRRGYTRRGAIAVTQPRRVAAVSVSRRVAQELGVPLGDEVGYAIRFEDRTSERTCIKYLTDGILLRESLSNPELKQYSVIILDEAHERSLNTDILLGLMKRLIKDRASDLKVLITSATLDGLKVSKFFSGCPVLNIPGTLFPVEKFYSTDRPTNYIESSLRTAIDIHAKEPPGDVLIFMTGKDDIDKMVSKLEERIRNLEEGSCIDALVLPLHGSLPPELQVRVFAPAPPNCRRFIVATNVAETSLTVDGVVFVIDCGYVKQRQYNPSSGMYSLDVVQISRVQADQRAGRAGRTRPGKCYRLYPISIYQNEFLEATVPEIQRSSLAGSVLYLKSLNLPDINILKFDFLDPPSRKIKLQILYSYSFNHSCGPVCMHLFVA

SEQ ID NO: 45374 - protein, 345 aa, Zea Mays
MISFNRYAIDNMQSASMEEAKKNGIQQLAEETTLVQFIFGGYLRSKIKCTKCQVISKHSERILDLTVEIDGDISTLDGALRRFTSSEILDGDNRYHCSRCNSYERAQKKLTILEAPNILTIALKRYQVKPVSVQKVLSRCAYMLLYARCSPRAPTSARAKKPKQMARSGSFPSGGGRYRSRHQGGQLSKDDAVHNLTYTLGTSDTSSYPVAPCFSGSNSSSLFSSSDAGSSCTFSSDSTDSAGKSSMEYDRIFGTSGYMCPVVSSAVVPEGDNQSYLRQGSSWNPSSSGHDMDEAGKFARQYQGGYQAGGGAPVGGWETPSFSYADQGGLYPIWEEQMESYEAMY

SEQ ID NO: 45375 - protein, 402 aa, Zea Mays
MDYFDARRKPHNVGKIIAALVLTTLCIFVLKQSPGFGGNSVFSRHEHGVTHVLVTGGAGYIGSHAALRLLKDNYRVTIVDNLSRGNMGAVKVLQGLFPQPGRLQFIFADLGNQKSVNKIFAENAFDAVMHFAAVAYVGESTLEPLRYYHNITSNTLLILEAMASHGVQTLIYSSTCATYGEPDKMPITEATPQFPINPYGKAKKMAEDIIIDFSNSKGADMAVMILRLEPFLQLHRYFNVIGSDPEGRLGEAPRPELREHGRISGACFDAALGVIPGLKVKGTDYPTADGTCIRDYIDVTDLVDAHVKALNKAEPRKVGIYNVGTGRGRSVNEFVDACKKATGVNIKIEYLNRRPGDYAEVYSDPTKINKELNWTAHYTDLKESLSVAWRWQKSHPRGYGPN

SEQ ID NO: 45376 - protein, 659 aa, Zea Mays
MIRYRSQPATGLFAWKSPDDPSTGDISSGMDPASSNVQVFIWNGTLPYYRSSFFNDVPASGGTYQANNTSVTYQWMMVDTGDEIYYTFTVLAGSPYMHFSLHHTGKMRLLVWENSTSSWVLISEEPSVGCDLYASCGPFGYCDLTKAMPTCQCPDHFELVDSLNFSRGCQRKEELKCGTESYFMTMPNMKIPDKFLHIRNRTFDQCAAECARNCTCMAYTYATLSTASTTGDASRCLVWTQDLIDMEKASVFLENLYIRLGESPDQKKRNFQKILLSAIACLLLLTIGALGWACKIRGKWHKKKIQTRMMLEYLSSTDEAGGKNIEFPFITFENIVTATDNFSDCNILGKGGFGKVYKGMLEGTKEVAIKRLSKSSGQGAEEFRNEVILIAKLQHKNLVKLLGCCVHEDEKLLVYEYLPNKSLDYFLFDSARKSTLQWPTRFKIIHGVARGIMYLHQDSRLTIIHRDLKASNILLDKDMSPKISDFGMARIFSSDQLHANTNRVVGTYGYMSPEYAMEGAFSVKSDTYSFGVLMLEIVSGLKISSPHLHMDFPNLRAYAWNMWKEGKIEDLVDSSVMENCSLDEVSQCVHIGLLCVQDSPSFRPLMSAVVSMLENKTTTLPTPSQPVYFAVRDPYQPGKAVGNKELSIYDMSLTVPEGR

SEQ ID NO: 45377 - protein, 361 aa, Zea Mays
MPLRLEIKRKFAQRSERVKSVDLHPTEPWILSSLYSGSVCIWDYQAQAMVKSFEVSELPVRSAKFISRKQWVVAGADDMFIRVYNYNTMDKVKVFEAHTDYIRCVAVHPTLPYVLSSSDDMLIKLWDWDKGWVCTQIFEGHSHYVMQVTFNPKDINTFASASLDRTTKIWSLGSPDPNFTLDGHQKGVNCVDYFTGGDRPYLITGSDDSTAKVWDYQTKSCVQTLEGHTHNISAVCFHPELPIIITGSEDGTVRIWHSTTYRLENTLNYGLERVWAVGYMKGSRRMVIGYDEGTIMIKMGREVPIASMDTGGKIIWAKHNEIQTVNIKTVGAGFEATDGERLPLAVKELGSCDLYPQMAST

SEQ ID NO: 45378 - protein, 131 aa, Zea Mays
MIQFGHQMPDYDSPATQSTSETSHQEASGMSEGSLNEHNNDHSGNLDGYSKSDENKMMSALSLGNPETAYAHNPKPDRTQSFAISYPYADPYYGGAVAAAYGPHAIVSDLHASSLLFHYLLPVLDDALCPL

SEQ ID NO: 45379 - protein, 131 aa, Zea Mays
MHPQLVGMVPSSRVPLPIEPAAEEPIYVNAKQYHAILRRRQLRAKLEAENKLVKSRKPYLHESRHLHAMKRARGTGGRFLNTKQQPESPGSGGSSDAQRVPATASGGLFTKHEHSLPPGGRHHYHARGGGE

SEQ ID NO: 45380 - protein, 240 aa, Zea Mays
MSTDVPMSPELEQVDGEIQDIFRALQNGFQKMDKIKDSSRQSKQLEDLTAKMRECKRLIKEFDRILKDEEKKNTPDVNKQLNDKKQFMIKELNSYVTLRKTYQSSLGNKRIELFDTGNDQVAEGTPVQMASEMSNQELISTGRKQMDQTDQAIERSKMVVAQTVEVGAQTAATLTQQTEQMKRIGNELDSVHFSLKKASQMVKEIGRQIVNPHNKNIRDIPGLAPPAMNRKLLSIDAAGL

SEQ ID NO: 45381 - protein, 137 aa, Zea Mays
MALAVRTPRFQPRPASISAPATPASNSLAAAAAANARPRTCAGAAGGGGGGRGPGRVALVGTGPGDPELLTLKAVRAIEAADLVLYDRLVSNDVLDLVGEGSRLLYVGKTAGYHSRTQVWEHCSFVSIWKFTRDWKC

SEQ ID NO: 45382 - protein, 106 aa, Zea Mays
MLGLFLRIWAWKGVRNLKVSCVGRGLMGYIRDKVNQGQVLLDNVDIKTLQLKRLRDQIGLVNQEPTLFATTILENILFGKPEATKAEVGSTTTSAESFISCFVVFS

SEQ ID NO: 45383 - protein, 98 aa, Zea Mays
MLGLFLRIWAWKGVRNLKVSCVGRGLMGYIRDKVNQGQVLLDNVDIKTLQLKRLRDQIGLVNQEPTLFATTILENILFGKPEATKAEVGSTTTSAVFS

SEQ ID NO: 45384 - protein, 342 aa, Zea Mays
MEFKRDVWSLLLVLLLGQLVAFSMAASSFASSLIANLGVDAPLTQSFLAYLLLTLVYVPIVLRRRQKLQIAWYWYLALAFFDVQGNYLVVKAYQYSYITSVTLLDCWTVVWVVMLTWYALGTRYSLWQFVGAGTCVAGLALVLLSDAKSQDEQDPKKIPLLGDALVIAGTVGFAFSNVGEEYCVKKKDRVEVVAMLGLFGLLISTAQILVFERKGLEAVTWSPTMISLFAGFAVAIFVFYTVAPFVLKMSGATLFNLSLLTSDMWAVAIRVLFYQQEINRLYYLAFAVVAIGLIIYSLNDRSSDDETAGSTEAPAQYQQLPIEDNSTRIGSSSGKRLIGPRS

SEQ ID NO: 45385 - protein, 532 aa, Zea Mays
MKNHKADPCCSLPWRKVRRARGAWRAAIMVELHHSSKQSRVEPKGALLPHNLPISWSCNLQQLLLITLVSWRRPFIHGTRTSVDHGMIGSDVDTERKTAGYLAARPPTLEIFPSWPMSHLQQPYSGNSHSVGSTTESSSGQNSMPQTELVSPGSMRADSGQRQELLMVTVDDYNYEQGLGAAATTAPIFQQHAAGQDKGKHGSTRKDGRLLDAKTERRLAQNREAARKSRLRKKAYVQQLETSRIRLQQIEQELHGARSQGLFPGGGGAAGDLSSGAVIFDMEYARWLEDDTKHMTELQAVLQPQIIDANLGAIVEDCMRHYDELFHLRAMLARSDVFHLMTGLWATTAERCFLWMGGFRPSEILKQMLIPQLDPLAEPQLIGMYNLQRSSEQTEEALVQGLQQLHQSLADAVGASPLSDGANVANYTALMALALDRLDTLESFYRQADSLRQQTLHQMRRILTTRQTARCFVSISEYHRRLRALSSVWASSRPPTPPSEGVVAAAENVSPTGTTTEQALPPYHHSQPFPGF

SEQ ID NO: 45386 - protein, 540 aa, Zea Mays
MKNHKGDSAYHCRLLLSDPCCSLPWRKVRRARGAWRAAIMVELHHSSKQSRVEPKGALLPHNLPISWSCNLQQLLLITLVSWRRPFIHGTRTSVDHGMIGSDVDTEPAGYLAARPPTLEIFPSWPMSHLQQPYSGNSHSVGSTTESSSGQNSMPQTELVSPGSMRADSGQRQELLMVTVDDYNYEQGLGAAATTAPIFQQHAAGQDKGKHGSTRKDGRLLDAKTERRLAQNREAARKSRLRKKAYVQQLETSRIRLQQIEQELHGARSQGLFPGGGGAAGDLSSGAVIFDMEYARWLEDDTKHMTELQAVLQPQIIDANLGAIVEDCMRHYDELFHLRAMLARSDVFHLMTGLWATTAERCFLWMGGFRPSEILKMLIPQLDPLAEPQLIGMYNLQRSSEQTEEALVQGLQQLHQSLADAVGASPLSDGANVANYTALMALALDRLDTLESFYRQADSLRQQTLHQMRRILTTRQTARCFVSISEYHRRLRALSSVWASSRPPTPPSEGVVAAAENVSPTGTTTEQALPPYHHSQPFPGF

SEQ ID NO: 45387 - protein, 79 aa, Zea Mays
MYTRFASWGSSIFGPPSLATGGGWPFWEGARRWTFRCCCTGAMGWLLINSNVEVACYCKPCYWLINLASKCGMWNMFMM

SEQ ID NO: 45388 - protein, 63 aa, Zea Mays
MIATILTKYGGTLYFGILCTKTSVFYDHRDLCIFKRNFMALLVVFYASTKKQSYCVLHQIYDT

SEQ ID NO: 45389 - protein, 906 aa, Zea Mays
MEGTLVQSAVVPTVYRSSSGRFRVRARARTNATMVRNMPTRTLTLGGFQGLRQTNFLDTRSVIKRDFGSIVASQIARPRGSASRGVVRAMFERFTEKAIKVIMLAQEEARRLGHNFVGTEQILLGLIGEGTGIAAKVLKSMGINLKDARVEVEKIIGRGSGFVAVEIPFTPRAKRVLELSLEEARQLGHNYVGSEHLLLGLLREGEGTDVRYDVQVIRMVGESTEAVGAGVGGGSSGQKMPTLEEYGTNLTKLAEESFGRQDQIERVTQILGRRTKKQPLPNWRAWCWKRLLLLRGLLSVLPMGMFLKQFEGKKVITLDMGLLVAGTKYRGEFEERLKKLMEEIKQNEDIILFIDEVHTLIGAGAAEGAIDAANILKPALARGELQCIGATTLDEYRKHIEKDPALERRFQPVKVPEPTVDETIQILRGLRERYELHHKLRYTDDALIAAAQLSYQYISDRFLPDKAIDLIDEAGSRVRLRHAQLPDEAKELDKELRQITKQKNEAVRGQDFEKAGELRDREMELKAQITAIIDKSKEMIKAETESGEVGPLVTEADIQHIVSSWTGIPVEKVSSDESDRLLKMEETLHTRIIGQDEAVKAISRAIRRARVGLKNPNRPIASFIFSGPTGVGKSELAKALAAYYFGSEEAMIRLDMSEFMERHTVSKLIGSPPGYVGYTEGGQLTEAVRRRPYTVVLFDEIEKAHPDVFNMMLQILEDGRLTDSKGRTVDFKNTLLIMTSNVGSSVIEKGGRKIGFDLDYDEKDTSYNRIKSLVTEELKQYFRPEFLNRLDEMIVFRQLTKLEVKEIADIMLKEVFDRLKAKDINLQVTEKFRDRVVDEGYNPSYGARPLRRAIMRLLEDSLAEKMLAGEVKEGDSAIVDVDSDGKVIVLNGGSGVAEPLEPALST

SEQ ID NO: 45390 - protein, 345 aa, Zea Mays
MSAVEEDGCSLRCDLCDTEIVHSMAELLLRGLATASVDSTTGDIFKSASSVAAAVKTELENYMLVRTESLIREFVDGAQDHSDQLMKASTRPTEFLSDLIGDFVASKRNLLSHVSGFLSSESRLNRIKDFMQKMEMENVWTLDVRQATSETILESIDMKCIFHCPEKFVEQDKLVDHRSRCKFRVVGCENDGCSVSLSAIHSEEHDSICPFKALPCEQLCEQHVMRSEMDKHCATVCAMKLINCPFYHVGCETAFPQGNLENHCSKLLQTHMLYVLQASTRQNAAVNDMNQRLQLLEKAQSLNEISGALDVRSLTLIIKEQEAKIKDLESGIKAQEAKVLGLYIA

SEQ ID NO: 45391 - protein, 98 aa, Zea Mays
MSVLRIVGDIALAEIGDGCPKLREIALSHCPEVTNVGLGHLVRGCLQLESCQMVYCRRITSSGVATVVSGCGRLKKVLVEEWKIENVVPDVVSEVMTK

SEQ ID NO: 45392 - protein, 253 aa, Zea Mays
MALNIYRSNLLGTKFAIYDTQPPCNAAEPGKTSRRFYSRKVSPKVSSSTYNIAQVSYELNVLGTRGPRRMNCVMHSIPTSCLEAGGTVPSQLDSILARSTDESFGSISFSKSSVVDRSMRFSSSRFSDISMSSSRRIGDTASGDNDECKERPLILRNKAPRWHEQLQCWCLNFRGRVTVASVKNFQLVAATQPAAGAPTPSQATPVPPEHEKVILQFGKVAKDMFTMDYRYPLSAFQAFAICLSSFDTKLACE

SEQ ID NO: 45393 - protein, 127 aa, Zea Mays
MSSEGSNLLHEVFPEVNHTVLEQLSKVDCIVYAMGSLFTSVCPSLVLRGIGETIASRSIPKRDCWAVCLWFCHCNYRFSKSDLWRPSQKLKESCKFVICSANNLLVESEAMEESDIAISRMQEAKFL

SEQ ID NO: 45394 - protein, 605 aa, Zea Mays
MYQKKIPHQDQEQALCMDRVIGVIDWELSTLGNQMCDVAYSCLPYIIDAAPSARTSYGGFQDTGIPDGIPQLEEYLSIYCSFAARPWPAANWKFYIAFSLFRGASIYAGVYHRWTMGNASGGERAKFAGRVANAMIDCAWDFINRVNVLQELPSKGSQVLGASWQEFHREEESSTSEKNQGKFVPSEKVMQLRKKLIKFIEDHIYPMEAEFYKHAQSTSRWTIHPEEENLKALAKKEGLWNLFIPLDSAARARKLLFEDHSQISLGSSNNLLLGAGLTNLEYGYLCEIMGRSVWAPQIFNCGAPDTGNMEVLLRYGTKEQQKQWLVPLLEGTIRSGFAMTEPQVASSDATNIECSISRQGDFYVINGRKWWTSGAMDPRCKILILMGKTDFSAPKHKQQSMILVDINTPGVQIKRPLLVFGFDDAPHGHAEITFENVRVPVTNILLGEGRGFEIAQGRLGPGRLHHCMRLVGAAERGMNLMVERALNRTAFGKRIAQHGSFLSDLAKCRIELEQARLLVLEAADQLDRHGNKKARGILAMAKVAAPNMALKVLDMAMQVHGAAGVSSDTVLSHLWATARTLRIADGPDEVHLGTIAKLELRRARL

SEQ ID NO: 45395 - protein, 540 aa, Zea Mays
MTKLTSELLRPVVPAAALDEAALLRYLVANVPGFPGPAPALSLTQFGHGQSNPTYCIHASAPGGGQPRRYVLRKKPPGAILQSAHAVEREYQVLKALGDHTDVPVPKVYCLCTDASVIGTPFYIMEYLEGIIYPDSALPGVTPSKRRAIYLSTAKTLAAIHKVDINAIGLQKYGRRDNYCKRQVERWERQYLASTGEGKPARYQRMLDLARWLKEHVPEEDSSPGPGTGLVHGDYRPDNLVFHPTEDRVIGVIDWELSTLGNQMCDVAYSCLPYIIDAAPSARTSYGGFQDTGIPDGIPQLEEYLSIYCSFAARPWPAANWKFYIAFSLFRGASIYAGVYHRWTMGNASGGERAKFAGRVANAMIDCAWDFINRVNVLQELPSKGSQVLGASWQEFHREEESSTSEKNQGKFVPSEKVMQLRKKLIKFIEDHIYPMEAEFYKHAQSTSRWTIHPEEENLKALAKKEGLWNLFIPTVQRELESYCLKTILKFPLEVRIIFCWARVLQILNMDICVRLWDVQFGLHKYLTVVHLIQVTWRSC

SEQ ID NO: 45396 - protein, 392 aa, Zea Mays
MMSAGSFLPLFLSLMDLPMLVVALEKVERSSGTLIGSSIATIQKSAAPEMLLALMDEAYTGSAVEEPSGNSGSDDSGPLDLTDPMFLDLLKDENDGIAAKHWISPTISSTLQAAFNSPQSDRLKQSLEMAPRFLTLYFATALRDVNDSLLCALIPVVMSRYAAMFPDKVFSFKVRERLSDFILAAFQRSPNIIAVLKKPITDRLGEAHDNLAKTELALHLCWAIGEHGAGGVGHKDVARELFENLELLLYENLATSRLGLSQEPGSDSMGASSRKSSQARLLCFVVTAIAKLATCHSELLPRARVSLGKVARSRTSDRRVWQRACDYLGLMNEPAICLSVLGPSTAQGNGPGIVNWSEGGTKMVAHVPFYLLAQQKGPPSHNFSFADLLPTE

SEQ ID NO: 45397 - protein, 164 aa, Zea Mays
MMSAGSFLPLFLSLMDLPMLVVALEKVERSSGTLIGSSIATIQKSAAPEMLLALMDEAYTGSAVEEPSGNSGSDDSGPLDLTDPMFLDLLKDENDGIAAKHWISPTISSTLQAAFNSPQSDRLKQSLEMAPRFLTLYFATALRDVNDCRLHTFFCMLFFATHVK

SEQ ID NO: 45398 - protein, 911 aa, Zea Mays
MAFKGLPRDSRGSLEVFNPDAPVSDRATTSPFLLPPAAASHPSLLAAGDGGDADVGRATQRAAEWGLVLQTDEHTGRPQGVVARPSGSNRTSESGNSIDERAAAAGAGRALPRVSEELRAALSAFQQTFVVSDATRPDHPILYASAGFFNMTGYSSNEVVGRNCRFLQGSGTDPVEISKIRQALAAGSNYCGRILNYKKDGTPFWNLLTVAPIKDEDGRVLKFIGMQVEVSKYTEGNKDTALRPNGLPESLIKYDARQKDHARSSVSELLLALKDPRSLSESRNNTLKRKSQESAGSALVPGKRSSETGSRRNSHSGMRNSLQKISEVPEGGNKTRKSGLRSFMGLIGMGHGNVEKNILKPREDPLLDSDDERPDSFDDDFRKKEMRKGIDLATTLERIEKNFVITDPRLPDNPIIFASDSFLRLTEYCREEILGRNCRFLQGPETDRGTVKKIRDAIDNQTEVTVQLINYTKSGKKFWNLFHLQPMRDQKGDVQYFIGVQLDGTERVREAAAKDGAILVKKTADNIDEAAKELPDANLRPEDLWANHSKPVLPKPHMKDTASWRAIQKVLENGESIDLKHFRPVRPLGSGDTGSVHLVELLGTGEYFAMKAMDKSVMLNRNKVHRATAERQILDMLDHPFLPTLYASFQTKTHICLIVDYCAGGELFMLLDRQPMKVLKEDAVRFYAAEVVTALEYLHCQGIIYRDLKPENILLHRDGHISLTDFDLSCLTSCRPQVFLPHDIDKKKKRRKSRSNPIFFAEPMRASNSFVGTEEYIAPEIITGAGHTSAVDWWALGILLYEMLYGYTPFRGKTRQRTFANILHKDIRFPASIQVSLAARQLIYRLLHRDPANRLGSYEGAMEIKQHPFFRGINWALVRAATPPELEAPLQDTLEATLPPPAADGAHTDMF

SEQ ID NO: 45399 - protein, 503 aa, Zea Mays
MDGPASPSAAAETDTRGGEAPSKAKRGNAEEKYQHGQPVYFPEELMDNWVSFSLRGLYYCYNISLQGSCNTTADPTDIILAVKCDMGPDFFRYSFNLGGTDITIKYLYKIHLNQEQVLFARRFQITVLSLLINSNSSEVSNAIKYFREWQVDLGVVYLLLPTASGKIDWCGIKFSTSSAYDVTDKNMRHCHSCKDADILQTMDDPCCRCILQNSVVYAPRERKFYIITGLDLNANQPLDLNNRSAVSCKSKPLLVASGLFTVQNFLYKCYGKRKEPTSVKLPPELCKIVMAPVSANTLFSFSFVPSIMYRIQCLLLSAKLKIQLGPRMQQFNITAMKGYIRGELFNPQKWTIPGFGYDSRGNNKVFFRATNNMYSLKKISIKSKRIADTVEALTGAYLSTCGELAAVHFIKALGMDVELHSKMQVERTITTKSEELIDAESLQTMLKYVFYDTSLLVEALTHSSYNITGITACNEKIPQLYTSTVDKSTKSFCEQLLLCTCSC

SEQ ID NO: 45400 - protein, 350 aa, Zea Mays
MAPVSANTLFSFSFVPSIMYRIQCLLLSAKLKIQLGPRMQQFNITAMKILEALTTKECQEKFSMESLETLGDSFIKYVTGQNLFNKYKHREDMLTSMREEKVSNPALCQLACKSEIVGYIRGELFNPQKWTIPGFGYDSRGNNKVFFRATNNMYSLKKISIKSKRIADTVEALTGAYLSTCGELAAVHFIKALGMDVELHSKMQVERTITTKSEELIDAESLQTMLKYVFYDTSLLVEALTHSSYNITGITACNERLEFLGDAVLDYILTYYFYRKYPNCTPALLTNLRKASVNNCCYAHAAVKAGLHKHILHSSSKQMVNDLENSGRSFSGPSHGWEAGISLPEICLKQ

SEQ ID NO: 45401 - protein, 169 aa, Zea Mays
MGAVASSAGGARGGDGTVLGDLPENCVAEVLLRLDPLEICRMARLSRTFRGAASGDGVWESKLPRNYARLLAVAAAGDGEGGQAAASAPGAELLPKKELYARLCRRNRFDGGKKEFWLDKGGGGLCMSISSRALSITGIDDRRYWNFIPSDESRYFNLLAIKISLAIFY

SEQ ID NO: 45402 - protein, 186 aa, Zea Mays
MKDRRGSSSVGGGERFAVFPFSMGCMSQSAVSVADPGDKKAQGDPSSTAAATVARGAGSSEEGAGEAMTKEKAVASSAAAATATAPGLVAAGVSRLMKGIRSLSQMFAGEDGGEDEDDEEEEREMVIGYPTDVQHVGHIGWDGHNSKAGAAAAAMAGMVNAFSLPSSLSLRHLDMAMDRAVAHASA

SEQ ID NO: 45403 - protein, 215 aa, Zea Mays
MITRVGCKAMIVVKKMNSGKWMVSKFEKEHNHSLSYSKMVPSTSNITSGEIVDLAAKGAHPSEVKNEGYSAGTQCNPADSLTILYNNLCQEAIKFAKEGSVTEEIYHVAVSALKEAAEKVAEVKRSRPTLSHCGFVRESKHDVLQEKSMSALQCSNQVELTRTSPGSRPLQDSASNLLLIPTDILTDSRLYSGVDTAPLTGGFPTNGKYAMVMIN

SEQ ID NO: 45404 - protein, 237 aa, Zea Mays
MLGYCVDGNYRILAYEFATMGSLHDVLHGVQGAQPGPVLDWMQRVKIAIEAAKGIEYLHEKVQPSIIHRDIRSSNVLLFEDFKAKIADFNLLNQAPDMAARLHSTRVLGTFGYHAPEYAMTGQLTQKSDVYSFGVVLLELLTGRKPVDHTMPRGQQSLVTWATPRLSEDKVKQCVDPRLKGEYPPKGVAKLAAVAALCAQYEAEFRPNMSIVVKALSPLLQQRPAPTTEEPAPQPGS

SEQ ID NO: 45405 - protein, 697 aa, Zea Mays
MRRTLYMVLRECPGAESIDQWRGAGPRSAEMATPNGLARIETTGKKKQDNGVWYDDSSAPVRAQTIDELHSLQRKRSAPSTPKRSAPTTPIKGGAHSPFAVAISEEERHTQQMQSISASLASLTRETGPKVVKGDPAAKGEAAAQGAPSTPRAHQQHRHPAAPAIAVSDSSLKFTHVLNNLSPAELYEQAIKYEKGSFITSTGALATLSGAKTGRSPRDKRVVKDEVTAQDLWWGKGSPNIEMDEKTFLINRERAVDYLNSLEKVFVNDQYLNWDPENRIKVRIISARAYHSLFMHNMCIRPTDEELEDFGTPDFTIYNAGQFPCNRYTHYMTSSTSIDLNLARREMVIMGTQYAGEMKKGLFGVMHYLMPKRGILSLHSGCNMGKDGDVALFFGLSGTGKTTLSTDHNRLLIGDDEHCWSDNGVSNIEGGCYAKCIDLAQEKEPDIWNAIKFGTVLENVVFDEHTREVDYADNSVTENTRAAYPIEYIPNAKIPCVGPHPKNVILLACDAFGVLPPVSKLNLAQTMYHFISGYTALVAGTEDGIKEPQATFSACFGAAFIMLHPTKYAAMLAEKMQKYGATGWLVNTGWSGGRYGVGKRIRLPYTRKIIDAIHSGELLTANYQKTEVFGLEIPTEINGVPSEILDPINTWTDKAAYKENLLRLGGLFKKNFEVFASYKIGDDSSLTDEILAAGPNF

SEQ ID NO: 45406 - protein, 753 aa, Zea Mays
MDVAFDSLHEDVRLLSIRLSSMGFGFFPVGSLESRLAHFICQQCEASLQFLLLLCQQKLFRDRILKNKELSRNGGILSLSHTILKLVVPECLKQSTDLVASISRLKAKILSILLQLCEAESVSYLDEVATNPNNMRLGQTLALEVLNLLKISFGRKINITSDSHDKGKIYPMGSVLISALRLVDVFSDDSNFRSFFLTNTVPFLIQILAAPHDEFVSSWCAVNLPTIEEDASLDYDPFGASEVALLASDNMLTEAKANYSCPFRPSVPSMAYAQTRTSCVVKIIANLHVFIPNICEEQERDLFLQNFQKHLASGSPKLSADLPASSDFKATKVCRNLGFLSDYAKTLVPNLLNGEDLVLLSDFADKLQSWCKSQVAVKVVQNDIPPESMDAMCPVQQLLPTRTSTPASKMNNLPKDAQNMEVSTPVPPINPEGNDEDETPKNTVSRNGGFLQNAVGQDLVHLGVARTTSGGPSAVASGVSTGHQHNRMDLDPASSSVDNFKTPELTKENGLEEDGKGESSMYDERQPKRRKRTLMNNEQIDELEKALVDEPEMHKNPVLLQSWSEKLSLQGPEITASQLKNWLNNRKAKLARIAKERAENADKPSTSHPGESSESAGEDNYLPPAGVMTVLSKGGSLLSPDCTEQTSQAELSPNTTMMVRPFTRSFSLEPGRLVSLVDSDGKEVGRGKIFQAPGKSTTESRVCVVDVTELRTEKWRELPHPSEAFGWTFQEAEARNGGIIRVSWDAVRLFPVA

SEQ ID NO: 45407 - protein, 317 aa, Zea Mays
MRRQSLATVLLLLVAAAALAAPAAGHFESSCPFYDHGGHGEPHERHDHGHSCGGGADHEHHHHHHHGHGHGEIQRLLPEEMAEEADLELESFGYEDHDHGHHHHHHHHHSHGDMETSPMGVWLSAMGCSLLVSMASLVCLVLLPVIFFKGKPSKAIVDSLAVFGAGAMLGDSFLHQLPHAFGGGHSHSHDHEGHDHAHAHEHAHAHSLQDLSVGLSVLFGIVLFFIVEKIVRYVEDNSQNGAHSMGHGHHHHNHKRHDSSDKAKLNYQKSDTDGKDIDHAEEEPSVNDTTGKISDGHESEATIRKVYVTELCFGCKT

SEQ ID NO: 45408 - protein, 72 aa, Zea Mays
MACRALALRFLLLPDPLHRLPATPPSVGRASGSRGGRRPHLRCSSGGGGGEPGQPPQEAVLEAISSKFLPHR

SEQ ID NO: 45409 - protein, 397 aa, Zea Mays
MRLQYAWNAIPFILLFCAISTNKIFSNNKPFSFTIASARSLLQIDPNSGLVQDKVKVGQILEEDTQNIVNMTMNVSSGWSIVKEELILPARGAPFNSCHASTIVQIEEDNFLVAYFGGSREGAPDVKIWLQRYSDGHWHPPVVADEQDGVPMWNPVLFQLPSRELLLFYKIGQEVQKWSGAMKRSLDGGVTWSPREQLPPGILGPIKNKPFLLEDGRLLCGSSVESWNSWGAWLEVTKDAGWTWRKYGPICIKGQPLGVIQPVPYRTDDGTIRVLLRSFETIGHVCMADSIDEGVTWSYVRETELPNPNSGIDGVKMKDGRVLLAYNTFSRGTLKLAVSLNDGDSWDEVMTLEDTKGMEFSYPAVIQSMDELIHVTYTYNRTQVKHVVLRPSSMVKL

SEQ ID NO: 45410 - protein, 188 aa, Zea Mays
MGRPLRIDMATERGAYTPSSGKDNGSFKKFAPRSGNTVFIKGFDTSGGEDQIRTALEEHFGSCGDITRISIPKDYDTGVSKGMAYMDFKDPDSLNKAYELNGTDLGGYSLYVDEAKPRPDNSGGFSGDRGGGRGRSGGFSGGRGGRSDRGRGGSRGRGFGGRGGRGTPFRQTAGTASTGKKTTFGDDD

SEQ ID NO: 45411 - protein, 1840 aa, Zea Mays
MRTIAEEDAIAAESMRDAALKDGALLRHLLNAFFFPAGERRDVSRQLVALWADSYQPALDLLSRILPPGLVAYLHTRSDEDSRSQYDEAPLSRRQRRILQQRRVHGTKTMAVQEQGIPPNGVEDGEPFRHISAGTYGGADVHQRHVGLYSSTHSPSPGINIDPSHTVSVPHGSVPEALSENNQQIEAPQLDSHVYSVDSNANGNLVSSLHSDFSVPAQVVVENTPVGSGRLLCNWYGFWRAFSLDHNRADLIWNERTRGELRAALQAEVHNLDVEKERTDDIVLGSSVTEDAAGSDNLPRISWNYAEFSVSYPSLFKEVCVGQYYLRLLLESGSNYRAQDFPLRDPVAFFRALYHRFLCDADIGLTVDGAVPDELGSSDDWCDMGRLDGFGGGGGSSVRELCSRAMAIVYEQHYKVIGPFDGTAHITVLLDRTDDRVLRHRLLLLLKALMNDLSNVEACVLVGGCVLAVDLLTVAHETSERTAIPLQSNLIAATAFMEPSKEWMYIDKDGTQVGPLEKDAIRRLWSKKSIDWTIKCWASGMSDWKRLRDIRELRWALSVRVPVLTPTQIGDTALSILHSMASARSDLDDAGEIVTPTPRVKHILSSPRCLPHVAQAMLTGEPSIVEAAASLLKAIVTRNPKAMIRLYSTGAFYFALAYPGSNLLSIAQLFSATHTHQAFHGGEEAALSSSLPLAKRSVLGGLLPESLLYVLERSGPSAFAGAMVSDSDTPEIIWTHKMRAENLIRQVLQHLGDFPQKLAQHCHSLYDYAPMPPVTYPNLKDEMWCHRYYLRNLCDEIRFPNWPIVEHVEFLQSLLVMWREELTRRPMDLSEEEACKILEISLDDLVLVENGSSKRPSDLSSANSGNKTENIDEEKLKRQYRKLAIKYHPDKNPEGREKFVAVQKAYERLQASMQGLQGPQVWRLLLLLKAQCILYKRYGDVLEPFKYAGYPMLLNAVTVDKDDSNFLSSDRAPLLIAASELIWLTCASSSLNGEELIRDGGIPLLATLLSRCMCIVQPTTPANEPAARIVTNIMHTFSVLSQFESGRVEVLKFGGLVEDIVHCTELEFVPSAVDAALLTAANVSVSSELQNALLRAGFLWYVLPLLLQYDSTAEENEICEAHGVGARVQIAKNLHAVHATQALSKLSGLSSDDILYPDNKPAYNALKALLTPKLADMLRNHPPKELLSNLNSNLESPEIIWNSSTRGELLKFVDQQRASQGPDGSYDLTESQSFTYEALSKELIVGNVYLRVYNNQPDFEISDQEEFCIALLKFIAELVQQWNSVNLEETIHQHGSVIEASISENDQVSDSTIEGKMDNSSGKQSTDGDSEVIINLQCGLTSLQCEAHLLNCMSSFRLKLQNLLTSNPGLAAVFATKERLVPLFECLALHVSPESSIPQICLSILSLLTKHAPCLEAMVAERMSLILLFQILHCNPPCRDGALAVLYSLASTPELAWAAAKHGGVVYILELMLPLQEEISMQQRAAAASLLGKLVGQPMHGPRVAITLARFLPDGLVSAIKDGPGEAVVSSLEQTTETPELVWTPAMAASLSAQLATMASDLYQEQMKGRVVDWDVPEQASGQHVMKDEPQVGGIYVRLFLKDPKFPLRNPKRFLEGLLDQYVSSVAATHYEAIATDPELPLLLSAALVSLLRVHPALADHVGYLGYVPKLVAAMAYEGRRETMASGQATSASKAEPSEHDNSAHSEATVQTPQERVRLSCLRVLHQLASSTTCAEAMAATSAGTPQVVPLLMKAIGWQGGSILALETLKRVVGAGNRARDALVAQGLKVGLVEVLLGILDWRVGGRQGLCNQMKWNESEASIGRVLAVEPYRPSTLIYK

SEQ ID NO: 45412 - protein, 1352 aa, Zea Mays
MGTFCKSTCFDSYPGEIVTPTPRVKHILSSPRCLPHVAQAMLTGEPSIVEAAASLLKAIVTRNPKAMIRLYSTGAFYFALAYPGSNLLSIAQLFSATHTHQAFHGGEEAALSSSLPLAKRSVLGGLLPESLLYVLERSGPSAFAGAMVSDSDTPEIIWTHKMRAENLIRQVLQHLGDFPQKLAQHCHSLYDYAPMPPVTYPNLKDEMWCHRYYLRNLCDEIRFPNWPIVEHVEFLQSLLVMWREELTRRPMDLSEEEACKILEISLDDLVLVENGSSKRPSDLSSANSGNKTENIDEEKLKRQYRKLAIKYHPDKNPEGREKFVAVQKAYERLQASMQGLQGPQVWRLLLLLKAQCILYKRYGDVLEPFKYAGYPMLLNAVTVDKDDSNFLSSDRAPLLIAASELIWLTCASSSLNGEELIRDGGIPLLATLLSRCMCIVQPTTPANEPAARIVTNIMHTFSVLSQFESGRVEVLKFGGLVEDIVHCTELEFVPSAVDAALLTAANVSVSSELQNALLRAGFLWYVLPLLLQYDSTAEENEICEAHGVGARVQIAKNLHAVHATQALSKLSGLSSDDILYPDNKPAYNALKALLTPKLADMLRNHPPKELLSNLNSNLESPEIIWNSSTRGELLKFVDQQRASQGPDGSYDLTESQSFTYEALSKELIVGNVYLRVYNNQPDFEISDQEEFCIALLKFIAELVQQWNSVNLEETIHQHGSVIEASISENDQVSDSTIEGKMDNSSGKQSTDGDSEVIINLQCGLTSLQCEAHLLNCMSSFRLKLQNLLTSNPGLAAVFATKERLVPLFECLALHVSPESSIPQICLSILSLLTKHAPCLEAMVAERMSLILLFQILHCNPPCRDGALAVLYSLASTPELAWAAAKHGGVVYILELMLPLQEEISMQQRAAAASLLGKLVGQPMHGPRVAITLARFLPDGLVSAIKDGPGEAVVSSLEQTTETPELVWTPAMAASLSAQLATMASDLYQEQMKGRVVDWDVPEQASGQHVMKDEPQVGGIYVRLFLKDPKFPLRNPKRFLEGLLDQYVSSVAATHYEAIATDPELPLLLSAALVSLLRVHPALADHVGYLGYVPKLVAAMAYEGRRETMASGQATSASKAEPSEHDNSAHSEATVQTPQERVRLSCLRVLHQLASSTTCAEAMAATSAGTPQVVPLLMKAIGWQGGSILALETLKRVVGAGNRARDALVAQGLKVGLVEVLLGILDWRVGGRQGLCNQMKWNESEASIGRVLAVEVLHAFATEGAHCARVREVLNSSDVWSAYKDQKHDLFLPSNAQSSAAGIAGLIESSSSRLTYALTAPPPQPSLVRLPSSSPSPPSAPANPSGRHSYQRL

SEQ ID NO: 45413 - protein, 1938 aa, Zea Mays
MRTIAEEDAIAAESMRDAALKDGALLRHLLNAFFFPAGERRDVSRQLVALWADSYQPALDLLSRILPPGLVAYLHTRSDEDSRSQYDEAPLSRRQRRILQQRRVHGTKTMAVQEQGIPPNGVEDGEPFRHISAGTYGGADVHQRHVGLYSSTHSPSPGINIDPSHTVSVPHGSVPEALSENNQQIEAPQLDSHVYSVDSNANGNLVSSLHSDFSVPAQVVVENTPVGSGRLLCNWYGFWRAFSLDHNRADLIWNERTRGELRAALQAEVHNLDVEKERTDDIVLGSSVTEDAAGSDNLPRISWNYAEFSVSYPSLFKEVCVGQYYLRLLLESGSNYRAQDFPLRDPVAFFRALYHRFLCDADIGLTVDGAVPDELGSSDDWCDMGRLDGFGGGGGSSVRELCSRAMAIVYEQHYKVIGPFDGTAHITVLLDRTDDRVLRHRLLLLLKALMNDLSNVEACVLVGGCVLAVDLLTVAHETSERTAIPLQSNLIAATAFMEPSKEWMYIDKDGTQVGPLEKDAIRRLWSKKSIDWTIKCWASGMSDWKRLRDIRELRWALSVRVPVLTPTQIGDTALSILHSMASARSDLDDAGEIVTPTPRVKHILSSPRCLPHVAQAMLTGEPSIVEAAASLLKAIVTRNPKAMIRLYSTGAFYFALAYPGSNLLSIAQLFSATHTHQAFHGGEEAALSSSLPLAKRSVLGGLLPESLLYVLERSGPSAFAGAMVSDSDTPEIIWTHKMRAENLIRQVLQHLGDFPQKLAQHCHSLYDYAPMPPVTYPNLKDEMWCHRYYLRNLCDEIRFPNWPIVEHVEFLQSLLVMWREELTRRPMDLSEEEACKILEISLDDLVLVENGSSKRPSDLSSANSGNKTENIDEEKLKRQYRKLAIKYHPDKNPEGREKFVAVQKAYERLQVPPVCMTSCPASMQGLQGPQVWRLLLLLKAQCILYKRYGDVLEPFKYAGYPMLLNAVTVDKDDSNFLSSDRAPLLIAASELIWLTCASSSLNGEELIRDGGIPLLATLLSRCMCIVQPTTPANEPAARIVTNIMHTFSVLSQFESGRVEVLKFGGLVEDIVHCTELEFVPSAVDAALLTAANVSVSSELQNALLRAGFLWYVLPLLLQYDSTAEENEICEAHGVGARVQIAKNLHAVHATQALSKLSGLSSDDILYPDNKPAYNALKALLTPKLADMLRNHPPKELLSNLNSNLESPEIIWNSSTRGELLKFVDQQRASQGPDGSYDLTESQSFTYEALSKELIVGNVYLRVYNNQPDFEISDQEEFCIALLKFIAELVQQWNSVNLEETIHQHGSVIEASISENDQVSDSTIEGKMDNSSGKQSTDGDSEVIINLQCGLTSLQCEAHLLNCMSSFRLKLQNLLTSNPGLAAVFATKERLVPLFECLALHVSPESSIPQICLSILSLLTKHAPCLEAMVAERMSLILLFQILHCNPPCRDGALAVLYSLASTPELAWAAAKHGGVVYILELMLPLQEEISMQQRAAAASLLGKLVGQPMHGPRVAITLARFLPDGLVSAIKDGPGEAVVSSLEQTTETPELVWTPAMAASLSAQLATMASDLYQEQMKGRVVDWDVPEQASGQHVMKDEPQVGGIYVRLFLKDPKFPLRNPKRFLEGLLDQYVSSVAATHYEAIATDPELPLLLSAALVSLLRVHPALADHVGYLGYVPKLVAAMAYEGRRETMASGQATSASKAEPSEHDNSAHSEATVQTPQERVRLSCLRVLHQLASSTTCAEAMAATSAGTPQVVPLLMKAIGWQGGSILALETLKRVVGAGNRARDALVAQGLKVGLVEVLLGILDWRVGGRQGLCNQMKWNESEASIGRVLAVEVLHAFATEGAHCARVREVLNSSDVWSAYKDQKHDLFLPSNAQSSAAGIAGLIESSSSRLTYALTAPPPQPSLVRLPSSSPSPPSAPANPSGRHSYQRL

SEQ ID NO: 45414 - protein, 334 aa, Zea Mays
MPLLFPATPPLPLCRAARVSRRATASVASAARSSSSSSASFDAAAFEAERLRLDAAARAGMESTAAAAEAGPRAWKWAIRKRVWDALEAEGIARDPRPVHHRIPNFDGAPAAADALGRLDIFQKSHCVKVNPDTPQKQVRFLTLSGDKKLLTPQPRLRTGFFSVMDSQMIPVGCIPEACTSVGAAKYGRPIGLDESLKVDLIVIGSVAVDPSSGARLGKGEGFAELEYGMLRYMGAIDDSTMIVTTVHDKQLVDDIPVEKLLVHDVPVDIICTPTQVIFTKTTIPKPQEKLGQIRILRELKQRIEQETGTMLPCGPSEKLPPTAQRKQRWQRRR

SEQ ID NO: 45415 - protein, 170 aa, Zea Mays
MDSQMIPVGCIPEACTSVGAAKYGRPIGLDESLKVDLIVIGSVAVDPSSGARLGKGEGFAELEYGMLRYMGAIDDSTMIVTTVHDKQLVDDIPVEKLLVHDVPVDIICTPTQVIFTKTTIPKPQEKLGQIRILRELKQRIEQETGTMLPCGPSEKLPPTAQRKQRWQRRR

SEQ ID NO: 45416 - protein, 169 aa, Zea Mays
MVQGVPGMATYRGPFDVINKVVRTQGIQGLYRGFGITMLTQSPASALWWSAYGGAQHAIWRSLGYGNDSSTKPSQSELVAVQATAGTIAGACSSIITTPIDTIKTRLQVMDNYGNGRPSVMKTTRLLLDEDGWRGLYRGFGPRFLNMSLWGTSMIVTYELIKRLSVKSE

SEQ ID NO: 45417 - protein, 300 aa, Zea Mays
MMTSHSSVLVAGLVCLSAAVVVPMPWLAAGESSIGGAECKRSCGGVEILSISPEQGEAKVLLPISSYCYDSASRTMVADEWHWSLGANYRFSSTANKFTVVGCRALAYIGDTRKKRNNVAENNYLTGCVSTCFNRTISLNTCSGMGCCQTVIPNGPPYFHVWFDAGFMDISGIDGGADLFGRCSFAVLMDSSNFTSWTSSSSNISSPEFVNNVSSLLQFFNSSRGGKAPVVLDWSIGEDDCKNPAGYACRSVNSFCSSAASGRGYICKCNQGFDGNPYLPNGCQGGEVADFCCFCTKVVP

SEQ ID NO: 45418 - protein, 275 aa, Zea Mays
MAFSYSNGRTLPSKWEDAERWIFSPNSSDMRGRTTVAHGRRPKSKSGPLGPPGRLGGQYSSVSSVSLLDSERVGPITSNSHFSAGVLMPGHVCGGKNTNGAYSGRPIGDEINIGEGVRICPLNGGSHPIRTPRVRKRLDSAVESSASLPSTQESIQDEQVEITEDSASTIACIISRKDVATQTSPELSRSSSPNNRPTFNRSLSTEQMKERGSCFSDLDIRDVQMDDRVTLTRWSKQNVTRLPNKNSTNIIEWKEKAVESKSLSWGFAEAKCISK

SEQ ID NO: 45419 - protein, 194 aa, Zea Mays
MARGRGGPAGAPPSARPAPWSPAAAEARTVCVTGGTSFLGFAVVDRLLRHGYTVRLALETQEDLDKLREMEMFGENGRDGVWTVIANVMDPESLHEAFDGCVGVFHTSSHVDPAGISGYTKHMAGLEAKAAELVVEACVRTESVRKCVLTSSLLACVWRQNYPHDRRRFPTTIDENCWSDESLCRDNKSLKPGA

SEQ ID NO: 45420 - protein, 304 aa, Zea Mays
MALRALDNTKPAAVEERPKKVAKVGVPAAAAKAAASPGSGGKKKKGNDENSAPRATAAAAEQAVEYISSEELEAAASPKAKAAGLVADLDSKDWVRTCEALNDARRLAIHHPALLNPILEKVVLAVVKTMKSPRSAVLKTSIMACADIFSSFGNLLASVSDDAFDKLLLQLLLKASQDKRFVCEEAEKATRAMAASMPPLPLLKKLKAYVHHANLRDIGAMKEFGMSALLQLAVELLNDRLPEAREAARGVVASTHAAFVKEAAASGQEDDAAASWESLCALSLPPISAQAVAKIAAAAAASSQ

SEQ ID NO: 45421 - protein, 81 aa, Zea Mays
MFLTRSSSLMPLEFANGFIQSSKEKHSTPKYGLIYHASSIGKASQKHNGKTLGLYLQKLLLLSDRMPLVLMRTTPLALRVD

SEQ ID NO: 45422 - protein, 71 aa, Zea Mays
MTDLKLIIKRAYISSDDEWFMNGYILIECGYMFAIAPDQLQMNLVDIVIIHGIVLLDVLDKELITYAIRVR

SEQ ID NO: 45423 - protein, 323 aa, Zea Mays
MVAAEDPEHFFAASPPLRDAAVVAASLQEFVARNSHASSDGVGRRRIVCVTSGGTTVPLEQRCVRYIDNFSSGHRGAASTEYFLKAGYAVIFVHRRGSCQPFSRFLPDDSFLHFFDVTTDSKVQVAESQATVVKRAIGDYRKATEGGSLLKLPFTTIFEYLQLLKMVATSMSCVGLHGMFYLAAAVSDFYVPWDSMAKHKIQSAGGPLDMKLSQVPKMLPVLRNHWAPLAFCVSFKLETDPDILVQKAETALSKYRMDVVVANLLATYKEEVVIISNGKSNTIRRCSKGEDLEEHIIKLLEKSHSKFIYSSTLVVFGWMDEEG

SEQ ID NO: 45424 - protein, 174 aa, Zea Mays
MVAAEDPEHFFAASPPLRDAAVVAASLQEFVARNSHASSGSRGAALHGGQRADRAWAISSNEPLTARSSLTRAAFFVFCFLRCARRRRRAAAHRLRHVGRDHGAAGAAMRALHRQLQLRPPRRRVHRVFLKGWLCGHFRPSAVIHKATSAASLQKQSHNFYFSSFSFINCSVST

SEQ ID NO: 45425 - protein, 289 aa, Zea Mays
MEEDKRAEEARRAKEAGNDAYRKSFLETAVEHYTRGALLDPRDISFLTNRAAAYFHMGKYKECVRDCEGAVERGRDLSAANKLIAKALLRKASALLELATCSGDYAPAIRALQQSLTEHYSEETHEKLNKAVVVKKELEEQERLDQETADQHRERGNELFKQKQYHEAATHYTRAMKMNPKDPRAFSNRAQCHIYLGAFPQGLEDAEKCVELDPTFIKGYVRKAKVQFLMENYENAMATYLEGLTYDPNNLEVLDGLRREISNQKITFLNFEKQQNKLQYSRRKLLMSV

SEQ ID NO: 45426 - protein, 479 aa, Zea Mays
MNGAEEEEPPHVSSMPKTQDGVTKPSLGKEPIPGSELWTDGLICAFELVKSHRKPVQHKSWLATEQIQEKGPTMCTRKHSRRNGHQITEPKVDESIVLENPQQTDFSNDPSVLKDRPLYAGEILDHKWVPIGWNRIAELVLRVQSDSSWENELMEMSDSEDDYTVADLAAPYWQRPVGPTWWCHVTAGHPSIDAWLNSAHWMHPAIRIALRDESKLISDRMKYLLYEVPVRVAGGLLFELLGQSIGDPNHEEEDIPIVLRSWQAQNFLVTTMHVKGPSSNINVLGVTEVQELLLAGGSQTPRSVHEVIAHLVSRLSRWDDRLFRKYVFGEADEIELKFVNRRNHEDLNLVSIILNQEIRRLATQVIRVKWSLHAREEILIELLRHLRGNATRAILESIRKCTRDMLEEQEAVRGRLFTIQDVMQSTVRAWLQDRSLRVTHNLAIFGGGGMVLSIITGLFGINVDGIPGAQNTPYAFESS

SEQ ID NO: 45427 - protein, 94 aa, Zea Mays
MRSHVVAGLGFFEERGLGSREDGTGERERGACVRGRCRCVRGVVAAAVRDPSTPSPLPTPATAGGTPGEEWPWQGLRSARLLRWRWPLSSSPYS

SEQ ID NO: 45428 - protein, 261 aa, Zea Mays
MFLGTYSGEEVAVKVLNPQNLNKNVWSEFKQEINMLREVDHPNIVRFIGSCTKPPQFYIITECMSRGSLFDFLHNEHNVLDLPTLLKFALDVCQGMSYLHQKGIIHRDLKSGNLLLDKNDVVKVADFGLARFQDGGGDMTAETGTYRWMAPEVINHQPYDSKADVYSFALVLWELMTSKIPYNTMTPLQAAVGVRQGLRPQIPENTHPRLINLMQRCWEATPTDRPSFEEIIPELEDIQAQAQRTSGETSQTEEDHSCSKD

SEQ ID NO: 45429 - protein, 537 aa, Zea Mays
MRAAMAAAVLRPTAATLRFLSTPPHQRRRVLVGHLPFARRRRHSSTATAPALEDSSPRSGEGKAVRRRRARESPQGLLRHQLDMCSRNADLTTALRLYDDALSPDNPIPLSLHHYNCLLYLCSNAAATDSDSHISATAAQRGFDIFARMEADGVQPNEATLTSVARLAAATRDPAMAFSVVRRMAAAGTPPRLRTYGPALFAYCDAKDADGAKQVEAHMDASGVVPEEPELAALLRVNADTGKADEVYRLLHRTRVLVRQVCDTTAQVVEAWFRSDAASQAGVDSWDPTKVKEGVVKGGGGWHGQGWLGKGAWSVGWTEMGKDGTCQRCGERLVCIDIDPAETDNFANSLTELAIKLEAREDFLSFQSWLRRHGPFDAVIDAANVGLYKSKDFCFSQLPLIVLHRSRVNVGPAKAPYNQKILDSWRNAGALYATPPGSNDDWYWLYAAVSCRSLLVTNDEMRDHLFQLLGTSFFPRWKEKHQVRLTFSGHGPTLHLPPPYSIVIQESEDGSWHVPTTTGDDIEKPRQWLCTTRKSLR

SEQ ID NO: 45430 - protein, 1907 aa, Zea Mays
MSRYPKLVEIFKELLYELDKTEYKDVISTPMEIDELINLVHEFLNKKRYLIAVDDIWDTDAWAMIRYAFAENKLGSRIIVTTRRIDVAEYVGGCCYMMKPLTREKSKILFYGRTFGSEGKCPPELSHASEKILNKCGGVPLAIITISSLLASKSKNIKEWFYLADSIGSGILERSAEMEIMWKILLRSYSDLPARLKTCLLYLSIFPEDCEIGMHRLIWRWIAEGFFNGELAHGGLFKIGESCFHELIRRSMVQPVTLEGTGLVYACRVHNMFHDLILSMSHEEQFVSVVNEKFGPLDVLSRRLAFQNIKKSQYRLVEHPRLAQSRSLNAIGCPIYAIPPIESYKSLRVLDFENCAGIEDHDLVHLGKLHHLKFLGLRNTFIGKLPEGIGNLKFLQTLDLDGTGVEELPQALHNLTELMCLIADWRTRVPNWIGNLTSLQHLVIYPGGHDDEDSASRFVNELGKLRQLRVLRFLIKAQDEGQLRDLLESLSNLPEIEAIHFDYYGVQLNRVILTSSTSVTLPHVLYICYPSPERDYNLPQSGRRWRLAVPSAAGASSLASSLSRSLRWKRRLPGLPSLTLRSGSAAAVVDAVAFRVMYVVEAVVLGLALSCFFLCAMGGSCMFRLCIANTEEDWRPGTEQYKFIDRSSPGSALLRALSQVGTFLSFIELSSIPQTRPRSAKQSMVGNPGDVRAVVLDPAAGALAGLRRGGVLVDCTSSSPSLAREVAAAAAAAGCHAVDAPVSGGVLRTARAPPRPSPLQSSLQAIVQITALGEEVESVGRAQVALRDAIRTHLNRPTLEINLFGQTIPPELPKQDDDGAKIVEISPAESSRQAQEREKRSIDVATKKATRVPSFYTKSSIDEPMDQLINMLSVVDDEAYTKNIKILSIVRSEGLGKTTLAQKAFEELHSQFDRGAFVLLGQNPDLRRVFADILRGLDKQRYIDFPVAILDLVDLIWLVRKSLINKRFFIVFDDICDVKAWEIIKCALIENNNHSVVLTTSRNTGITEIIGGSKQLQPLSATISKNLLCKRLFGSAGKCPSELVNICDNLVEECGGILSVIDETVTLLASIPPTVENWEAVYARRMLDRSYPGLTDSLKNCLLYFTMFRRGHEISGEHLICAWIAEGFVHGQEVAETYLSDLVKKKLIDAVEVDAGGKVLTCRMYDLVHDFIVSKSIEERFVYILNDSEGRDLSEAVHVHQRLYIQGHNNKELDLQIPWLPQVKSLVSCGTAPSILKFKGLHVMDLGACESLQASHLKGINNVSSLRYLVIGGKCISGIPKEIAKLEHLRTLDLSASGLNELPEYVFMIRKLERLIVNSQMKISYGIAKMSALQELGDINVTDPELLKSLCKLTKLRVLRISIWSWDDSLKNYFKQLCDNLRSLVQCTENIQSLSIMTCCSLVFMDDLGENWTPQCLQKLEVGCSAFDILPSWFGSLSSISTLTIEVYKLSQDIIDTLGRLAGLGSLSLTSKQVPKGYFVIGSDRFNKLQSLKFVSNAMVEMFPRQQSNGTEQLKRLMIVFHASRTQDVNKDFCFGLENLSSLEHVRVEIICFDASHNMVKNAEAAVQKAISGTSIANLEIRRLQENSMTQDEADLCDAVQEQNNQKHQKMKSSMESQDGYLTSLPNQESADVVGSDSIVEPLVNEMNSQTIKRDQSTNFSEDEDLMLVSSYLNVSKDSITGRDKKEGTFWERVWEYYNKNRTFESDHSWSSLKHRWLAIQKEVNIFQGYYDAIERKNQSGQTSDDKHAEAEVEFREKQGKAFSVFHVWMILRHEPKWAFRESKIKDQHEANNANTDAPANIYRPQGRKAEKEKARARKHGGSDVDGDPFIEEVKNMREAREETERDRKTHDDKFYELEKSKLELERDRHDKEIMQTDTSTMDEESKQYFKLMKQEILARRFGSSQP

SEQ ID NO: 45431 - protein, 1095 aa, Zea Mays
MEFATGALGALLPKLSMLLHGEYNLEKGVRGDIQRVMSKLERVHAALRHVGEVPVPLEQIIRPGIVNMWARDVGELSYDMEDFVDTFLVRVQGPERTSKRRLFIKMIDMVMNNRHDEIAPDIKHFEKRVQEMDDRRQRYGVGTIVPTVKTLFYPRIIALNYTKATDLVGIDEAREELITRLTKEYDTSTEQRQVSIVGFGGLGKTALAKAVYNKLKAKGEFHCAAFVSMSRYPKLVEIFKELLYELDKTEYKDVISTPMEIDELINLVHEFLNKKRYLIAVDDIWDTDAWAMIRYAFAENKLGSRIIVTTRRIDVAEYVGGCCYMMKPLTREKSKILFYGRTFGSEGKCPPELSHASEKILNKCGGVPLAIITISSLLASKSKNIKEWFYLADSIGSGILERSAEMEIMWKILLRSYSDLPARLKTCLLYLSIFPEDCEIGMHRLIWRWIAEGFFNGELAHGGLFKIGESCFHELIRRSMVQPVTLEGTGLVYACRVHNMFHDLILSMSHEEQFVSVVNEKFGPLDVLSRRLAFQNIKKSQYRLVEHPRLAQSRSLNAIGCPIYAIPPIESYKSLRVLDFENCAGIEDHDLVHLGKLHHLKFLGLRNTFIGKLPEGIGNLKFLQTLDLDGTGVEELPQALHNLTELMCLIADWRTRVPNWIGNLTSLQHLVIYPGGHDDEDSASRFVNELGKLRQLRVLRFLIKAQDEGQLRDLLESLSNLPEIEAIHFDYYGVQLNRVILTSSTSVTLPHVLYICYPSPERDYNLPQSGRRWRLAVPSAAGASSLASSLSRSLRWKRRLPGLPSLTLRSGSAAAVVDAVAFRVMYVVEAVVLGLALSCFFLCAMGGSCMFRLCIANTEEDWRPGTEQYKFIDRSSPGSALLRALSQVGTFLSFIELSSIPQTRPRSAKQSMVGNPGDVRAVVLDPAAGALAGLRRGGVLVDCTSSSPSLAREVAAAAAAAGCHAVDAPVSGGVLRTARAPPRPSPLQSSLQAIVQITALGEEVESVGRAQVALRDAIRTHLNRPTLEINLFGQTIPPELPKTTMERKLWRYHRPRVVVKLKSGRKEASMWRRRKQHGCRLFTQSHQLMSQWISS

SEQ ID NO: 45432 - protein, 2135 aa, Zea Mays
MEFATGALGALLPKLSMLLHGEYNLEKGVRGDIQRVMSKLERVHAALRHVGEVPVPLEQIIRPGIVNMWARDVGELSYDMEDFVDTFLVRVQGPERTSKRRLFIKMIDMVMNNRHDEIAPDIKHFEKRVQEMDDRRQRYGVGTIVPTVKTLFYPRIIALNYTKATDLVGIDEAREELITRLTKEYDTSTEQRQVSIVGFGGLGKTALAKAVYNKLKAKGEFHCAAFVSMSRYPKLVEIFKELLYELDKTEYKDVISTPMEIDELINLVHEFLNKKRYLIAVDDIWDTDAWAMIRYAFAENKLGSRIIVTTRRIDVAEYVGGCCYMMKPLTREKSKILFYGRTFGSEGKCPPELSHASEKILNKCGGVPLAIITISSLLASKSKNIKEWFYLADSIGSGILERSAEMEIMWKILLRSYSDLPARLKTCLLYLSIFPEDCEIGMHRLIWRWIAEGFFNGELAHGGLFKIGESCFHELIRRSMVQPVTLEGTGLVYACRVHNMFHDLILSMSHEEQFVSVVNEKFGPLDVLSRRLAFQNIKKSQYRLVEHPRLAQSRSLNAIGCPIYAIPPIESYKSLRVLDFENCAGIEDHDLVHLGKLHHLKFLGLRNTFIGKLPEGIGNLKFLQTLDLDGTGVEELPQALHNLTELMCLIADWRTRVPNWIGNLTSLQHLVIYPGGHDDEDSASRFVNELGKLRQLRVLRFLIKAQDEGQLRDLLESLSNLPEIEAIHFDYYGVQLNRVILTSSTSVTLPHVLYICYPSPERDYNLPQSGRRWRLAVPSAAGASSLASSLSRSLRWKRRLPGLPSLTLRSGSAAAVVDAVAFRVMYVVEAVVLGLALSCFFLCAMGGSCMFRLCIANTEEDWRPGTEQYKFIDRSSPGSALLRALSQVGTFLSFIELSSIPQTRPRSAKQSMVGNPGDVRAVVLDPAAGALAGLRRGGVLVDCTSSSPSLAREVAAAAAAAGCHAVDAPVSGGVLRTARAPPRPSPLQSSLQAIVQITALGEEVESVGRAQVALRDAIRTHLNRPTLEINLFGQTIPPELPKQDDDGAKIVEISPAESSRQAQEREKRSIDVATKKATRVPSFYTKSSIDEPMDQLINMLSVVDDEAYTKNIKILSIVRSEGLGKTTLAQKAFEELHSQFDRGAFVLLGQNPDLRRVFADILRGLDKQRYIDFPVAILDLVDLIWLVRKSLINKRFFIVFDDICDVKAWEIIKCALIENNNHSVVLTTSRNTGITEIIGGSKQLQPLSATISKNLLCKRLFGSAGKCPSELVNICDNLVEECGGILSVIDETVTLLASIPPTVENWEAVYARRMLDRSYPGLTDSLKNCLLYFTMFRRGHEISGEHLICAWIAEGFVHGQEVAETYLSDLVKKKLIDAVEVDAGGKVLTCRMYDLVHDFIVSKSIEERFVYILNDSEGRDLSEAVHVHQRLYIQGHNNKELDLQIPWLPQVKSLVSCGTAPSILKFKGLHVMDLGACESLQASHLKGINNVSSLRYLVIGGKCISGIPKEIAKLEHLRTLDLSASGLNELPEYVFMIRKLERLIVNSQMKISYGIAKMSALQELGDINVTDPELLKSLCKLTKLRVLRISIWSWDDSLKNYFKQLCDNLRSLVQCTENIQSLSIMTCCSLVFMDDLGENWTPQCLQKLEVGCSAFDILPSWFGSLSSISTLTIEVYKLSQDIIDTLGRLAGLGSLSLTSKQVPKGYFVIGSDRFNKLQSLKFVSNAMVEMFPRQQSNGTEQLKRLMIVFHASRTQDVNKDFCFGLENLSSLEHVRVEIICFDASHNMVKNAEAAVQKAISGTSIANLEIRRLQENSMTQDEADLCDAVQEQNNQKHQKMKSSMESQDGYLTSLPNQESADVVGSDSIVEPLVNEMNSQTIKRDQSTNFSEDEDLMLVSSYLNVSKDSITGRDKKEGTFWERVWEYYNKNRTFESDHSWSSLKHRWLAIQKEVNIFQGYYDAIERKNQSGQTSDDKHAEAEVEFREKQGKAFSVFHVWMILRHEPKWAFRESKIKDQHEANNANTDAPANIYRPQGRKAEKEKARARKHGGSDVDGDPFIEEVKNMREAREETERDRKTHDDKFYELEKSKLELERDRHDKEIMQTDTSTMDEESKQYFKLMKQEILARRFGSSQP

SEQ ID NO: 45433 - protein, 189 aa, Zea Mays
MRIALARICLPLRVLVVRDPCAVCRADARLSSQHFHHCNVPKHRSHIIHDHLWLRRCHQHKGVQRAGSPEHRQRQEGAHCVAGAVPDAGGGVPAAPGPRPRPLGVLCGVARGYGWQHLAAWTNLVAFYVIGLPLAILLGFTLAFQTKGLWMGQICSLLCQNCVLFFITLRTNWQELDLTIFNKDNDFVC

SEQ ID NO: 45434 - protein, 253 aa, Zea Mays
MPTRGVGSDPNNSFNPAAEQSSCVRPLPPPSPCLRFWICPCRNPQAPGISLLPPKFTFADCRRGPPRWRCGRLVPPPSHSPLTPPSAASQYAPQQPAPFPRHLLSLRCDHRGPPERDAAELVGHVLAVAHADDEAVALPGALGAELARVLRARGAAEAPGAPAEEQVEVGPEQRTGRDLKFKPKGPKPEVSFLPRKERRQEFSASRKSRQRKRRSCGEDAEQQHEEGDQRGPRHHSLRHQRRRQSGPRPAAPE

SEQ ID NO: 45435 - protein, 288 aa, Zea Mays
MPSTRQEKKEFKDLIRAHMLNVDEENYKEAVDSSYKVSVTPGISNEIHQIIDDDSAEVNSSSEDFWILVAALKEFISKEGNGELPLEGTIPDMTSLTEYYVSLQKIYQAKAEFDCLALEHHVKEILKQIGRDPDSISRAYIKTFCKNSRKLRICRYRSFKEEFSSPIVSEIQRYFSDEDCSYAMNFYILLRAVDRLAANYSRLPGIFDRLKTVAASVLSEMGLNGASLSQDLVTEMCRFGGAEIHPVAAFIGGVASQEVIKLVTKQFVPLGGTFIFNGIDLKSQVLVL

SEQ ID NO: 45436 - protein, 425 aa, Zea Mays
MRPWSIFAWIGLCVCSIWMTLILFLNLLPESSLLKLDDICRKADIVLVAARSYGLTGLVRVSVKEHCVIESKPDHFLDDLRLHNPWTELKQFAKSIDINDKDPVVHKHTPYIVVLVRLAEKWADAHDGNMPSTRQEKKEFKDLIRAHMLNVDEENYKEAVDSSYKVSVTPGISNEIHQIIDDDSAEVNSSSEDFWILVAALKEFISKEGNGELPLEGTIPDMTSLTEYYVSLQKIYQAKAEFDCLALEHHVKEILKQIGRDPDSISRAYIKTFCKNSRKLRICRYRSFKEEFSSPIVSEIQRYFSDEDCSYAMNFYILLRAVDRLAANYSRLPGIFDSEIDEDIPRLKTVAASVLSEMGLNGASLSQDLVTEMCRFGGAEIHPVAAFIGGVASQEVIKLVTKQFVPLGGTFIFNGIDLKSQVLVL

SEQ ID NO: 45437 - protein, 516 aa, Zea Mays
MAAAAAAARRAAGLLPLLLSSRSGARIPLHRAVSQIPPPCSYRLLSQQAKPFSASASASASASASNGATAERTRELHLYNTKSRKKEQFRPRDPGGEVGMYVCGITPYDDSHIGHARAYVAFDVVYRYLRYLDYEVRYVRNFTDIDDKIIARANQLGEDPFNLSKRFSDDFLLDMANLQCLPPSVEPRVSDHIDEIINMIKQAAKDGEPWWDSPWGPGRPGWHIECSAMSAHYLGHSFDIHGGGEDLIFPHHENEIAQSRAACCDSTINYWIHNGFVNVNSQKMSKSLGNFVTIRKVIEMYHPLALRMFLLGTHYRSPINYTIEQLNVTSDRLYYTYQTLLDCEEICQQQQSNTGNSLPANTLNYIQKLHEEFETSMSDDLHTSVALAAISEPLKVMNDLLHTRKGKKQDKRLESLSALEEKIRVVLSVLGLLPSSYHEALQQLRDKALRRASITEELVVQKIEERTAARKAKQYEKSDEIRKELAAIGIALMDGPDGTTWRPSLPILEEAVVAKT

SEQ ID NO: 45438 - protein, 341 aa, Zea Mays
MNMENDQPLLPAPPVNLESAILEQNANMVALKEGCSVGSELPPGLQGNFGGNKANTCTSALHSIDEGEEITCGFIKHERSYDLQNLTMDKSIQVSNETKYKFLAHKPRVGCETAIQNCELASALPDTEFHGPVATISTTGQSEGSDTEINVPNYSDLEALILDLDLIPWDQESDFIQPEVSRFQYPESRKDLIRLEKGVCSYMNRSIMSKGAFAILYGQRTKYYIREPEVSLGRETEEVHVDIDLSKEGKANKISRRQAVIKMDDGGSFYINNTGKFSIFVNSKEVPCSKRINLMSDSLIEIRNLKFIFHVNHEAARQYIVRKRRGSSQGGITAFDWSQNP

SEQ ID NO: 45439 - protein, 531 aa, Zea Mays
MAATQLLLLAALLLLPLAAILLGKRHGPRKGKNGARLPPGPPGLPFLGNLLLLRRYSSDVEALLRRLVARYGPVVSLRAGPSLSVFIADRRVAHAALVESGAALADRPAVTRALLGESGNTISRSSYGPVWRLLRRNLVSETLHPSRVKLFAPARAWVRRVLAEKLGREAEEAQARAQAPPPAMEAFRYAMFCLLVLMCFGERLDEPAVRAIASAQYGWLMFVAKNTSLLAFWPALARILLRGRLQEGLTARQRQKELFVPLIHARRVLKQRVKNQGGAAAAVAPGEETTTFEHSYVDTLLDIRLPEEGDRALTDDEVSNLCSEFLTAGTDTTSTALQWIMAELVKNPDAQEKLYSEIRATCSDDQPEVGEEDTHRMPYLKAVVLEGLRRHPPAHFVLSHKAAEDTEVGGYLIPKGATVNFTVAEMGWDEREWDRPMEFVPERFLSGGDGEGVDVTGSREIKMMPFGAGRRICAGLGIAMLHLEYFVANLVREFEWKEVPGDEVDLSETREFTTVMKKPLRAQLVRRTTCV

SEQ ID NO: 45440 - protein, 341 aa, Zea Mays
MGSLGGSAGAGDGGKVGLPALDVTLAFPQATPASLFPPAVSDYYQFDDLLTDEEKALRKKVRGIMEKEIAPIMTEALTEPDYGSDASSLRTAATKVPGGWHLDGQKRWIGNSTFADVLIILARNADTNQLNGFIVKKGAPGLKATKIENKIGLRMVQNGDIILNKVFVPEEDRLTGINSFQDINKVLAMSRIMVAWQPIGISMGVYDICHRYLKERKQFGAPLAAFQLNQEKLVRMLGNIQAMLLVGWRLCKLYESGKMTPGRSSLGKAWTSKKAREVVSLGRELLGGNGILVDFLVAKAFCDVEPIFSYEGTYDINSLVAGREITGIASFKPAVSAKSRL

SEQ ID NO: 45441 - protein, 369 aa, Zea Mays
MEKEIAPIMTEYWEKAEFPFHAIPSLASLGLAGGTIKGYGCPGLSLTASAISIAEVARVDASCSTFILVHSSLAMSTIALCGSEAQKQKYLPSLTQFKTIGCWALTEPDYGSDASSLRTAATKVPGGWHLDGQKRWIGNSTFADVLIILARNADTNQLNGFIVKKGAPGLKATKIENKIGLRMVQNGDIILNKVFVPEEDRLTGINSFQDINKVLAMSRIMVAWQPIGISMGVYDICHRYLKERKQFGAPLAAFQLNQEKLVRMLGNIQAMLLVGWRLCKLYESGKMTPGRSSLGKAWTSKKAREVVSLGRELLGGNGILVDFLVAKAFCDVEPIFSYEGTYDINSLVAGREITGIASFKPAVSAKSRL

SEQ ID NO: 45442 - protein, 167 aa, Zea Mays
MAAAASPATAAAVREAAPAHRQIGIRPGHGPAPFRIGFLAKPSSRWAAISVPPGPRRAAPAASAARERVTEEEERPVSVELEPIASEQQLDWVLGEARQLQLPIVLLWMASWCRKCIYLKPKLEKLAAEYHPRIRFYCIDVNCVPQKLVNRAGVTQLRAYTSDKADP

SEQ ID NO: 45443 - protein, 341 aa, Zea Mays
MLRYLNADSEGSISYGHFRNFMLLLPSERLEDDPRNIWFEAATVVAVPPPIEISAGSVLKSALAGGLASALSTSLLHPIDSMKTRVQASTLSFPELISKLPQIGLRGLYRGSIPAILGQFSSHGLRTGIFEASKLVLINVAPTLPEIQVQSIASFCSTVLGTAVRIPCEVLKQRLQAGIFNNVGEAIVGTMRQDGPKGFFRGTGATLCREVPFYVAGMCLYAEAKKAAQHVLRRDLEAWEIVAVGALSGGLAAIVTTPFDVMKTRMMTAPPGTPVSMQMIIFSILRNEGPLGLFKGAIPRFFWIAPLGAMNFAGYELAKKAMIKDENSSSESTKENLPRNQ

SEQ ID NO: 45444 - protein, 615 aa, Zea Mays
MPMAPDHPFDAFVAAARGAVAHLHLPVIHIPGSNSSPHPNSKQHKGLEVDCLLHLHVLVTNFLHKPLKSFARCFRPKRRADTHSPPLHQEPSNGTTPQKQLEFLLCIAFDAFAHNLHALDDACKHKGEEFAAATRQLEQFVVLRKVIDGKRADFDGFLSNLGFAKVGAPPPPASIVGGASPVPASAPVSNQEDGAVIGNGEGVDSASGTQQQAQKLPARLLNIPLSNVERLRSTLSAVSLTELIELVPLLVSRSSTSADAHPDKKKLFSVQDFFRYAEIEGKRFFEELDRDGDGQVTLEDLEIATRKRRLPRRYARELFRRTRSNFFSKSIGWKQFLSLMEQKEATILRAYTTLCLSKSGTLHKSQILTSLKGAGLPANEDNAAAMLRYLNADSEGSISYGHFRNFMLLLPSERLEDDPRNIWFEAATVVAVPPPIEISAGSVLKSALAGGLASALSTSLLHPIDSMKTRVQASTLSFPELISKLPQIGLRGLYRGSIPAILGQFSSHGLRTGIFEASKLVLINVAPTLPEIQVQSIASFCSTVLGTAVRIPCEVLKQRLQAGIFNNVGEAIVGTMRQDGPKGFFRGTGATLCREVPFYVAGMCLYAEAKKHSMF

SEQ ID NO: 45445 - protein, 191 aa, Zea Mays
MLDRFAVKFQHSSLGSLCPLEYATEIAKEADQYNGFNLILADVNSGTMVYISNRPGGDPVIQTVAPGLHVLSNAAINSPWPKAMRLGQSFKRYLTIHDDAEASLKQMVEELMMDTARPDRSMVPDTGDDPEWEYKLSSIFIDTAKEQARYGTRSMVALAAKLEGEVTFYERYLENSLWKENLIQFQMEKAQ

SEQ ID NO: 45446 - protein, 145 aa, Zea Mays
MVYISNRPGGDPVIQTVAPGLHVLSNAAINSPWPKAMRLGQSFKRYLTIHDDAEASLKQMVEELMMDTARPDRSMVPDTGDDPEWEYKLSSIFIDTAKEQAKTMVFSISVATIILFGNKLYPFFFLISGTIWNTKHGGTSSEIGR

SEQ ID NO: 45447 - protein, 276 aa, Zea Mays
MLSLPIAMLAEYLPLQMVSRVILLSTDRWAEKNVNPALFSRELMRNSSNFLNDEAVSHDPQILLMKAHAATSSIGSATVIIAMLEKTGTLKIASVGDCGLKVIRKGQVMFSISPQEHYFDCPYQISSEAEGQTYKDALVCSVNLMEGDIIVSGSDGLFDNIFDQEIVSIISESPSVDEAAKALAELARKHSVDVRFDSPYSMEARSRGFDVPWWKKLLGGKLIGGKMDDITVVVAQVKTVVVPEDEVQGGDTEEQKGNEQGAAAVVAYKMNDEEVA

SEQ ID NO: 45448 - protein, 244 aa, Zea Mays
MDLAMKGSLNDVGSVDVFSWIRCLDLRTLAVLTNSTLSSSSDPHNISFHYLIPEGGNDKLSYFKLKVLLPDSDLTVTSQKQIKDKLNVATPKGNFLWLFHIELSPFLIAKSQLSKKRFVYIAADSIIKGKVEDLGRMELGGYAIGAVEDCSKRLSDYISMDVLSAIQRAGATFSWVPKEPYNEDACLLDFDVLLMEPRKLEKTLITSIMWWATGCLQQCRVMGSYKEICSRNFTKSRSVRNFKP

SEQ ID NO: 45449 - protein, 117 aa, Zea Mays
MHVQMSLYASADEFQDLIKQALSWDIRSISQRNRPHQVSVEADANGHCGEDTDDDHHHRDTGRYGVVYHLHLEGIDVSYRIDQGSNIFVEDATLLPDAVQKRHGYLAWRDKLGSSVL

SEQ ID NO: 45450 - protein, 174 aa, Zea Mays
MDGKKLGNRIIRVNEVRTRGPRDFGRDGFRRDPRRYGRDPYWDRRDREQSYDRERDPYHDRDSDRSREHDRERDYEHGGFNREVDYPMDRDHEVDDIHPREHDRAAETHNMDSDNDKYKEHGSRKSHPKGRDSKDLSSSSDLQNDGKHQLDKTIQMREDLENEARHFLKGLVLC

SEQ ID NO: 45451 - protein, 176 aa, Zea Mays
MDGKKLGNRIIRVNEVRTRGPRDFGRDGFRRDPRRYGRDPYWDRRDREQSYDRERDPYHDRDSDRSREHDRERDYEHGGFNREVDYPMDRDHEVDDIHPREHDRAAETHNMDSDNDKYKEHGSRKRFSHPKGRDSKDLSSSSDLQNDGKHQLDKTIQMREDLENEARHFLKGLVLC

SEQ ID NO: 45452 - protein, 353 aa, Zea Mays
MKSKKSVHGSSCKKAKLFDGLIGRHGSEIDPCYKLFLEHLSKDRNTYVLDVPKGDHGLPFSVRYEEDYTSYGNTKSRSSPNFPNHSRRTSWGIPDGKQPDVKAVKAASRNMCCSFSPKRSYVKKKTTTSLVDESYELFLSLVKFKDGFMVIEPEPGVTIVYEREEDMPAGYDEWRTGSSTNELSLVSPLENTEGDYTMQRYDYGLAPANKISSEHEMAAPSSENIAGQDIICTDEHGLVLYAEPSDLNACEDEQATPLAISYGGSSTFDEKLNAVLSQPYDQNEYEELWRKATDRKPVSRQRHLRSASKRYVTEAIGLSYLDYYPDLAVQIKSSDRDKRLSLLRRFFFWLEVI

SEQ ID NO: 45453 - protein, 90 aa, Zea Mays
MQQPAAPRPTGDSSVRVRRQSCWLLSNSLDILPLLAVWRQNSKGLSFMLKLRGVADKTSVSRIQMRQAIFHRISPKNLCSFHLQGNCDST

SEQ ID NO: 45454 - protein, 371 aa, Zea Mays
MDPFHGIVKEEFDLDFDFTCASAAAAAAASWAVALPEMPRPMEGLGEVGPTPFLTKTYDVVDDPNTDTIVSWGFAGTSFVVWDANAFALVILPRYFKHSNFSSFVRQLNTYGFRKVDPDRWEFANEGFQRGQRELLRTIKRRRPPSSPSAQQGQAPSACLEVGQFGLDGEVHRLQRDRGILLAEVVKLRQEQQATRAQMQAMEKRITTAEQKQQQMTVFLARAMKNPSFIRMLVDREGLGGCRRELEDALSRKRRRPIEYLPRDGERSGTATESAVSDYISGLPVGVNGVAEADDDERRWERRGGGGGGEDTESFWAKLLNLGLEEKHREGRCDGEEGNGADVDNDVDDDVDVLVQSIYHLNPNPGSPGGK

SEQ ID NO: 45455 - protein, 61 aa, Zea Mays
MSGMASDDSPAQVNVEGDVSEKKVEVQDQNEVGGMPSRQEEEAAIKKKYGGFIPRKTPFIS

SEQ ID NO: 45456 - protein, 92 aa, Zea Mays
MFNFQEMSCCFTCATGMERNNENEGGSKVRIFSYSEMRKATHDFSGANKIGEGGFGSVFRGKLKDGTIVAVKVLSANSRVPEDSCVQLSREQ

SEQ ID NO: 45457 - protein, 357 aa, Zea Mays
MLLLLFFSVLAAVAAFLLFKFATVVDGDLTLVSRGPPLRERVDGKVVWITGASRGIGEVINFLTAVLFFSEPYAFVSSLRNGEVLAMHFANLGAKLILSARNKDALARVKKNILSKNPDSRVEMLPMDLSAGEESLKEVVHVAESFFSNAGVDYMVHNAAFERPKRRALEESEEGLKATLNVNVFGTITLTRLLAPYMLDREMGHFVVMSSAAGKVPAPGQAIYSASKHALNGYFASLRSELCTKGIKVTVICPGPIETLQSSAAASSSQTHSAEQKREKRVSVERCVELTIVAATHGLKEAWISYQPVLTVMYLVQYMPTIGYWLMDKVGAKRLDAAAKKGNTYSWSLIFSSKKSA

SEQ ID NO: 45458 - protein, 451 aa, Zea Mays
MIFVNDSFSLSHKILASTVGITCFCYASLAGFHFEEELMKLIKITDSTRRPYIAIIGGSNFLRKAPALQTLTCLCDGLFFVGKLSFQIMNGFGMTVPSQFIERNAVKEVLQIIQVARDRNIPIYYPTDLWCLKNGDSEISGVINSTGQLAGWTPADIGPSTLEKISSIITSYKKILWIGPTNYGLTEKNSVGGTQLGEILESASSDGCDVILVGDAACKAVKRKTDSSPQYTEFQKSTVVWEFLKGRILPGIAALDKCYPYRIPWSTVFCEPTLPLVVDIGSGNGLFLFQMAKSCESSNFLGFEMNEKLVIRCLQGMASDEKRNLYFVSTNATSTFRSIVSSYPGRLTLVTIQCPNPDFNKEQNRWRMVRRMLIEAIVDLLHTNGQVYLQSDVESVLLVMKEQFLSYSKGQLVTDGDGGNCIDNPFGVVSDWERHVLARGAPMYRAMLKKM

SEQ ID NO: 45459 - protein, 587 aa, Zea Mays
MGKRKPMPSAAAARGPKNRPKRPKSVKQGAELREQNLQLPEHDYENIDTESGAAETVHRDKKANGIFQDTSQSDEEEIEDEYDAPSNDTPGDATNNGNGCFDETEISCSFHRHVSHVITNEEVKMLMKKNYKFKWEMPAVGIPRSKWVGTGEKVQEACDDHLHDVKGKLRDHWQHTLSDHLNSRMSFYSLCNSYRDIMHCNKKPFYLKSNGPDSSTMDAYLMHALNHVHRTRDVVIRNDAKLRNDTDRDITDDKTYLDQGFTRPKVLFLLPLKSFARRIVKRLIQLSPLPQKDSAMGQFKKEFGESDDEGIPEHSTKPADFDLLFAGDIDDHFVFGVKLTKKSIKLYSNFYSSDIIVASPLALKRKIDGGGHDKKDFDFLSSIEIVVVDHADVMSMQNWDHLEAVFEQLNQLPSKEHGTNVMRIRPWYLDQHAQYYRQTILLSSYLTPEINALFNGLCLNYEGKIKMVTEYAGVLPKIQLEVRQVYERFDASSIAEADGARFDYFCNKVYPKIQDLDEGGLLLFVSSYFEYIRISNFLKSKEASFCRIGEIYPVQGSGFLRARKRSCFTAKDLTSTTDTRSGERSIY

SEQ ID NO: 45460 - protein, 457 aa, Zea Mays
MHCNKKPFYLKSNGPDSSTMDAYLMHALNHVHRTRDVVIRNDAKLRNDTDRDITDDKTYLDQGFTRPKVLFLLPLKSFARRIVKRLIQLSPLPQKDSAMGQFKKEFGESDDEGIPEHSTKPADFDLLFAGDIDDHFVFGVKLTKKSIKLYSNFYSSDIIVASPLALKRKIDGGGHDKKDFDFLSSIEIVVVDHADVMSMQNWDHLEAVFEQLNQLPSKEHGTNVMRIRPWYLDQHAQYYRQTILLSSYLTPEINALFNGLCLNYEGKIKMVTEYAGVLPKIQLEVRQVYERFDASSIAEADGARFDYFCNKVYPKIQDLDEGGLLLFVSSYFEYIRISNFLKSKEASFCRIGEATSQQDISRARLWFFEGKKKILLYSERSHFYHRYKIRGTKHLLVYSLPGRKEFYPELVNMLGESENRKCNVLFSRLDLLKLERIVGKSSARRLISSEKGMFVFC

SEQ ID NO: 45461 - protein, 156 aa, Zea Mays
MPGSEEAKNKLKQLGADEVFTETQLDMKNVKSLLGALPEPALGFNCVGGNAASLILKLLKQGGTMVTYGGMSKRPVTVPTSYFIFKDLSLRGFWLQKWLNSDKTEDCRRMIDYLLGLVHEGKLKYEMESISFGEFSLALEKALGKHGSQPKQVIKF

SEQ ID NO: 45462 - protein, 200 aa, Zea Mays
MAAAASMGHPYAPAELDLPGFVPLKLSQVEILVSYLGASVFVFLAVWLVSGRCVRLSKTDRLLMCWWAFTGLTHIMIEGPFVFTPDFFKKENPNFFDEGKSIVRETLGMLLGTLQLLRSKGSPLYWKALHHYLLSTLLHPGSPSATFSSSPSVWASSTDAWFTSSPRTWTASTSGSARSTSGRISLAQTASGSGYRCSSP

SEQ ID NO: 45463 - protein, 564 aa, Zea Mays
MRALIDSKKPYQAHSVFKHLMDEGHKPSLVTYTILLTALTNQRMFESIPSLLAEVELAGVRPDSIFFNALINAFVEAKRMGEAINTFWKMKHSGCHPTTSTFNTLIKGYGIVGKPEESQRVFDMMGVEGSVRPNLTTYNILVKAWCDHRNLEEAWGVVGKMQAGGFEPDIVTYNTIASAYANNDETWRAEELIVEIQTRVRTSERTWGIIIGGYCREGRLEEALRCVQQMKDAGSVPNVVIFNTLLKGFLDANDMAAVNKILGLMEKFGIKPDIVTYSHQLNTFSSLGHMAKCMHVFDKMIEAGIEPDPQVYSILAKGFVRAQQPEKAEDLLLQMSHLGLCPNVVTFTTVISGWCSVADMESAMRVYDKMCKSGVYPNLRTFETLIWGYSEQKQPWKAEEVLQMMRETGVKPKQSTYCLIADAWKAVGLTENINNSNGSPNGPYAIEKLDHSNDNCNVRISEDNNNKLQFFDESNGRAMNGRSRSSFLQITNALGSSGIVSAKVMKAGEFPSERLKAIKNTSFPQGFQLLHLEFCRKQLRKNGGFCSQSINSFKMGFSSRGCIY

SEQ ID NO: 45464 - protein, 647 aa, Zea Mays
MGENGVQLTLTSTLKSTGKPRINADGLNNGSHTTKVSIGKRRDIEEKHEHGGTFQPSKGQKQQLCTTCAKGHTCQSVINRTRQMRALIDSKKPYQAHSVFKHLMDEGHKPSLVTYTILLTALTNQRMFESIPSLLAEVELAGVRPDSIFFNALINAFVEAKRMGEAINTFWKMKHSGCHPTTSTFNTLIKGYGIVGKPEESQRVFDMMGVEGSVRPNLTTYNILVKAWCDHRNLEEAWGVVGKMQAGGFEPDIVTYNTIASAYANNDETWRAEELIVEIQTRVRTSERTWGIIIGGYCREGRLEEALRCVQQMKDAGSVPNVVIFNTLLKGFLDANDMAAVNKILGLMEKFGIKPDIVTYSHQLNTFSSLGHMAKCMHVFDKMIEAGIEPDPQVYSILAKGFVRAQQPEKAEDLLLQMSHLGLCPNVVTFTTVISGWCSVADMESAMRVYDKMCKSGVYPNLRTFETLIWGYSEQKQPWKAEEVLQMMRETGVKPKQSTYCLIADAWKAVGLTENINNSNGSPNGPYAIEKLDHSNDNCNVRISEDNNNKLQFFDESNGRAMNGRSRSSFLQITNALGSSGIVSAKVMKAGEFPSERLKAIKNTSFPQGFQLLHLEFCRKQLRKNGGFCSQSINSFKMGFSSRGCIY

SEQ ID NO: 45465 - protein, 235 aa, Zea Mays
MGDHLALIVDRLLTESTLEAAIGGGKHMVDLRQETVDVEYCHRGLGGGSATKVVECRICQEEDWDTCMEAPCACCGSLKYAHRKCIQRWCNEKGDTMCEICLQQFRPGYTSPQQLFHYGSIPMNFRGNWEIARQDLNDSQIITMMPTERDFMDNYDDYFPIRTRSSTLCCRTIAIIFMSLLVLRHTLPLVIGDNGEYSLALFSLLVLRTAGILFPILVMVRALASFHHRRRQQII

SEQ ID NO: 45466 - protein, 299 aa, Zea Mays
MVFVLVGVIFVSIGIVSLRASRQVVEIVDRYDDACVPAGVTDKLAYIRNDSIPKSCTRNLTITKDMKQPIFVYYQLDDFYQNHRRYVKSRNDAQLRDKSKASDFTNCDPEAKTVDGKPIVPCGLIAWSLFNDTYKLIHNNVTLRVEKKDISWKSDRDHKFGSDVFPTNFQKGPLKGGKTLDPSIPLSKQEDLIVWMRTAALPTFRKLYGRIYVDLKENDTITVQLDNNYNTYSFGGKKKLVLSTATWLGGKNDFLGLAYLTVGGLCFFLAFAFTLLYLIKPRKMGDNSYLSWNRPPSGR

SEQ ID NO: 45467 - protein, 273 aa, Zea Mays
MPLATTAPTPAPPCPPPSPAAAPVRTQLLSSVAKLALTAALVCGSGGPAAVVVVPAAAQAVPFVRPPPPPLQGRPFASSTPYAQSQKLQLGLDKLGKIRPCPSTNPGCVSTNPLGSSGSFASPLLIPESSAGEKTVAKRNSSSSPFQIKHSVNRVMLCFCVSQLISCYFVVAGGVRTCCKSLRQAIEKTQRNVEFKVDEDTPYGHYIEAEMDGGVGRDVMEFLVKKDAGVVAYRCMATKVTFVYPFTTAVGDSKGQKQRIAAISQELGWTLWR

SEQ ID NO: 45468 - protein, 243 aa, Zea Mays
MFTLHLGHIQQNRTEQLAAITQHSVDLTIVGLLLPFFCTVRFLLLLLKYHYRDRTENPCMVRVSVPPQNSIPQNSAVFWWREEGGSFGDAERLHRYDWPFAPRSQSCSASASQLQKCRRACRFLRIGRCPAGWQLELRTDAAAGAAALVQGVEILKPEGRNRKLSGTGLGASDRRAAAPQHRRRRYARMNARRCVARRGVRNGSAMEMELQLLGGCNASTNKAQHKTKQATHDTCIVAYGCDR

SEQ ID NO: 45469 - protein, 291 aa, Zea Mays
MAGSSGGAASSSSSRGVPENRFYNPPHVRRQQQQQGQRPLRPASPSPSPRPVRQKPPPPAAAVAASADVDIRVDSDDSSSTTSSKPSVASTAATAAAGEVNVAVAEAEAGNLERFLASTTPSVTAQFLPMSSLRMRRGGDAMDSRPYFCLGDLWESFREWSAYGAGVPLVLNGSDSVIQYYVPYLSAIQLFADPSRPASRNSESSIENDVERLRVSSSLEGKHRLENGGIRSDDGEGDASSSFPIFQYMERDPPYGREPLTDKVSTLAHRFPALKTFKSCDLLPSSWMSVA

SEQ ID NO: 45470 - protein, 169 aa, Zea Mays
MEEHAVQVLVLAHAYQVPWLKRACEGAIGARLTADSVVDVLQLAGLCDAPRLHLRCARLLAKEFAAVERTEAWRFLQENDPWQELHVLQRLHEADMETVDMVGPPCRVRARTAYERHDASVLFYVVGASVWAGPSTPNGRANVRISPTSYLSDSVLILHVFIWLGVDKS

SEQ ID NO: 45471 - protein, 244 aa, Zea Mays
MEEHAVQVLVLAHAYQVPWLKRACEGAIGARLTADSVVDVLQLAGLCDAPRLHLRCARLLAKEFAAVERTEAWRFLQENDPWQELHVLQRLHEADMVRTLFFLLPWIATGPDRTGPRSVDVNLTDTCLHAPHRMEVRVRRNYHACMHDGARRRGGVGTGEHAFFTVKLLFQETVDMVGPPCRVRARTAYERHDASVLFYVVGASVWAGPSTPNGRANVRISPTSYLSDSVLILHVFIWLGVDKS

SEQ ID NO: 45472 - protein, 224 aa, Zea Mays
MAGAQSWRTYLCCVGGSAAVEDDGSTLRRRRRRGCGGGSSKDSPRSSSSRMSLTSLGSSSETLSPEDLSLTLSGSNLHAFTYAELRSATASFSRANFLGCGGFGPVYRGAVGEALRPGLRAQDVAVKYLDLEGGAQGHKEWLAEVFFLGQLRHKNLVKLIGYCYEAEHRMLVYEFMSFGSLENHLFKSELFFSCFWSPRVLAWSIFFLSPTSKASGFRCFCLKS

SEQ ID NO: 45473 - protein, 446 aa, Zea Mays
MSRHCVTLLVIIFGLLQMAVALYSNPSSTHPNCTERCGNVSIQYPFGFGSGCFRQPDFSLTCDGGGGGNQPPKTFLHDGITEVLPDSGVTVGLSRLIDVAISHTIFMAPGIPSYNFSWNLSSFTMLDGSFNVTGCDFDIYRQEPGKNGSIPRCTNSCPQNITETVARQNCNGTGCCRLYVGEVVPDFQLKFVLHNNDTRGDHDALSNGSTLWNTINITSNWAQILWDIDDQPTCSRAKDKNINYACVSNYSHCFDAELFDIGYRCGCNSGYVGNPYVVDGCKRDEGYSPNQLKENCSRSCGNISVPYPFGLEEGCSARKLFKLNCRNATASMLQFDDDRVVAFINVAESLVGIRFTSHFEDDQLGIYVPGEPDLFMGLGESVVSMHWAAANLTCDEALKNKSQYACVSSNSKCLGVNSKDGYIGYRCKCLDGFQGNPYTISDGCEG

SEQ ID NO: 45474 - protein, 449 aa, Zea Mays
MSRHCVTLLVIIFGLLQMAVALYSNPSSTHPNCTERCGNVSIQYPFGFGSGCFRQPDFSLTCDGGGGGNQPPKTFLHDGITEVLPDSGVTVGLSRLIDVAISHTIFMAPGIPSYNFSWNLSSFTMLDGSFNVTGCDFDIYRQEPGKNGSIPRCTNSCPQNITETVARQNCNGTGCCRLYVGEVVPDFQLKFVLHNNDTRGDHDALSNGSTLWNTINITSNWAQILWDIDDQPTCSRAKDKNINYACVSNYSHCFDAELFDIGYRCGCNSGYVGNPYVVDGCKRDEGYSPNQLKENCSRSCGNISVPYPFGLEEGCSARKLFKLNCRNATASMLQFDDDRVVAFINVAESLVGIRFTSHFEDDQLGIYVPGEPDLFMGLGESVVSMHWAAANLTCDEALKNKSQYACVSSNSKCLGVNSKDGYIGYRCKCLDGFQGNPYTISDGCEGREV

SEQ ID NO: 45475 - protein, 233 aa, Zea Mays
MDGDLMFPQPRLDRRFSVCDPVNLGGRPSDFDGSLRCPGSPDEDTIDMEMGDSVQVSPFPHSYSASAPSEQNDDQSNSSRYCLVASKQMVGIFLTVWVRNEIRDDVRNLKVSCVGRGLMGYLGNKGSISVSMCLHQTSFCFVCCHLTSGEKEGDELRRNSDVLEILRKTRFPRVRGAGDVRSPETILEHDRVIWLGDLNYRIALSYCSAKALVEMHSWKQLLEKDQLFQKWRA

SEQ ID NO: 45476 - protein, 573 aa, Zea Mays
MTEESAKKSKLSWSKSLVRKWLNIRPRAQDFHADFDAGHQARDGGGGGGGSWRPSCSSSEASASTAKKSRADRPSSKRSAERARRGRNNFDLARLTEVQDYRIFAATWNVGGKSPPRGLNLDEWLHTSPSADIYVLGFQEIVPLNAGNVLGTEDNLPAKKWVSLIRRTLNKNPGSSGCGGGYHTPSPVLDPVVELDADFEGSARRQDNFSFFHRRSFHNLSRSLRMDGDLMFPQPRLDRRFSVCDPVNLGGRPSDFDGSLRCPGSPDEDTIDMEMGDSVQVSPFPHSYSASAPSEQNDDQSNSSRYCLVASKQMVGIFLTVWVRNEIRDDVRNLKVSCVGRGLMGYLGNKGSISVSMCLHQTSFCFVCCHLTSGEKEGDELRRNSDVLEILRKTRFPRVRGAGDVRSPETILEHDRVIWLGDLNYRIALSYCSAKALVEMHSWKQLLEKDQRYGRVFQGWKEGRIYFPPTYKYSFNSDRYAGEGRHPKEKRRTPAWCDRILWHGNGLSQLCYVRGESRFSDHRPVYGIFLAEVGVVRQRRRNNAGYFGSRVEVEELLPRSRSYRLRDDEVLLS

SEQ ID NO: 45477 - protein, 263 aa, Zea Mays
MSPERIRNENYSYAADIWSLGLTILECATGKFPYDVNEGPANLMLQILDDPSPTPPVDTCSLEFCSFINDCLQKDADARPTCEQRYAGTEVDLAAYVKSVVDPTERLKQIAEMLAIHYYLLFNGPDGIWHHMKTFYMEQSTFSFSENVYVGQNEIFDILSNIRKKLKGDRPREKIVHVVEKLHCRANGETGVAIRVSGSFIVGNQFLVCGEGIKAEGMPSLDELSIDIPSKRVGQFREQFIMQPGNLMSCYYISKQDLYIIQS

SEQ ID NO: 45478 - protein, 404 aa, Zea Mays
MAMEKGWKARDAAGAFMMDLELVAEETDDAVPSIPPPQTPLEPMEYLSRSWSVSASEISKILLGGGKKSSVAAASRLPEVTIPEQSALATTSSVVPLPCHQQNYCKTYKQRAARRSSTSSGHHHQSIGKWFQVHHRETRRAKQSSKEKQRAEKAHVHAMVSVARVAAAVAAVASATSSNAQATTTKMATAMASATELLASHCVEAAQHAGARHDQVAAAVQAAVGVRSPGDLMTLTAAAATALRGAATLRQRAQRETRSNASILLPYEKAANSWSPDIWCKEGALLKRARKGGLHKIRVCIYINKRSEVILKLKSKHIGGALTKKNKSVVYGVYSELPTWAEPGKDCIEETCCCFGLSTAQGLVEFECEGNASKQEWIDDVQNLLRQAALHDRVGDKLGLVKLS

SEQ ID NO: 45479 - protein, 243 aa, Zea Mays
MEERRLDTPAMRRISEWILSLEFPSDITIQVGEATFNLHKLPLASRCGYIREQVSGINGSRVTHIDITGLPGGAAAFELVTKFCYGENFELTEDNVAMLRCAAEHLQMTDDDSRGGNLAGRTEAYLEAVALMSLAGAVTVLRRSEDLLPVSEEVDLVGRCVDAIAYFTCNDSQFSMSNGNGMDVSSSKVIIDDWLADELTSLRIDTFQRVVIAMKARGFKGIALGTLIMLYAQKSLRTLLIIC

SEQ ID NO: 45480 - protein, 687 aa, Zea Mays
METPPRGRWPPGFRFSPTDEELVLYFLKRRIASGRPSPYVADVEVYKSHPSHLPERSALQTGDRQWFFFSRMDRKYPNGSRASRTTGDGYWKATGKDRFICGGGRAVGNKKTLVYHHGRAPRGERTDWVMHEYTLLADALPPAAQGREFYALYKLFQKSGAGPKNGEQYGAPFREEDWLDDDDERVIAGAAANPVPNTNSPPSTMEEHAITDRELPIEGLDQPLSDFGNDPELFSEAQPVSSHGQGQGWLSEGGDKAEVVDASISNDVVVVAENTCTDISLGDIEQFLMQISDDQQNDELFSDLSTPLPKLQFQCDDRQVWLDAEMGHEVYAADPTASSGAVVTAECTVTELPLGDLEGLLLQIANDQHMVESQSDLSAPTPHHNFNQESTFCEPRTEPSDQFPQSNVTNLPFSGEANSSEGTSVAHSVSGLISYHSQDADEEFLEINDFFDLEDVGQNANCMTTEYMMSATNGMFDNLEYSDASSFLPGSFDTVGLVAENQYFDTDYSGIQNQGYQNTTEVRTYNQAALTVRSHMKHDHVVLSSHASGTLNIHAANELHNQSSTSSQSWFNAALSALLDSVPSSPALAAEIENTVINRTLQRISSFRPHQTAGEENTFINRTLQHISSFRSQQATGEEPGTPSIQVTRGGRLMFISLLVILASVIWTFTSGSALNFCKGLWKSSST

SEQ ID NO: 45481 - protein, 191 aa, Zea Mays
MYCLDCMDGALCSLCLARHRDHHSIQIRRSSYHDVIRVSEIHKVLDIAGVQTYIINSARVVFLNERPQPRPGKGVTNTCEVCERSLLDCFRFCSLGCKIVGTARGYRPKKKHGGGGGGGNKRKRAALKDVRSDSEESCTSTSGASSDKSSVVQSFSPSTPPPASASYRRPGNKRRKGVPHRSPFGSLIVEF

SEQ ID NO: 45482 - protein, 264 aa, Zea Mays
MPVRRRQPRRPETGAAERYREMGIGAALSRPWDYPTACGELAALLRLGYADLPKAAQALVASDVLLAFRLLPDVQTGYAVSTANVLLQAVEVALPKQKKAQAVSEFKHSIIAHKRRARVQQISGSPHIPQDILVHIFSFLDMHSLVAAGLVCWSWNSAANDNKLWKMNYSIFFGLSHLSCNNIPVSGVQYSTNSVPNYPNFSWKESFHTKYAECASWKFVSNRALCAHCRSVIWLSNLTCASPHHCPKNRHHEVLIIPHGRKGL

SEQ ID NO: 45483 - protein, 363 aa, Zea Mays
MDNVGSCSPLPQSEPAVSVSEHEQSLTECVDVRSPGVVGGTNETISSKVTHSQPRLQHQEAAQNFKAYEPDSGYGMSFITKVDGEAAQGIAYSSEAMVLHSVNGYQLPASTATQQPVPQMFSQQFQAPQYPNFLPYRHVFSPQFGSLMVVPNYSSNHAFPQLPHASSYLVMPNGASQLAANGMKYGSNHQYKQVFQGAPAGYGYGNHNGYPNGVIGGTGAIEDMNMSKYKDNCLYAPNPQVETADVWIQSQKESPNMPSAPFYNMVGQPVSPHAAYLPPQSGHTAFSPAPSHPGHLQYPGFVHALQPTSMTMVQNPQTMIHQPAAPPLAGNLGLDMSAMVPGNQVGAFQHNQLAHLGWTTQSF

SEQ ID NO: 45484 - protein, 439 aa, Zea Mays
MEQYEGTQASLVGSHAVLGKGNQNTVDTAASGKNNFGGELCCSSSDPIHVPSPGSKSAGTFGAIKREVGVVGARQRPADSAAIYTSTSNGLVKVVSAPKVSPHLEWKPKSVSPSTAAPPGAPSPVDDGSKTEVSALSKKLSHANVSHEHVIIPEHIRIPDSERTHFIFGSFESEIYPKASLAAYYDAVAKEDLNDHSPSSPLPQSEPAVSVSEHEQSLTECVDVRSPGVVGGTNETISSKVTHSQPRLQHQEAAQNFKAYEPDSGYGMSFITKVDGEAAQGIAYSSEAMVLHSVNGYQLPASTATQQPVPQMFSQQFQAPQYPNFLPYRHVFSPQFGSLMVVPNYSSNHAFPQLPHASSYLVMPNGASQLAANGMKYGSNHQYKQVFQGAPAGYGYGNHNGYPNGVIGGTGAIEDMNMSKYKDNCLYAPNPQPFIFRDC

SEQ ID NO: 45485 - protein, 463 aa, Zea Mays
MEQYEGTQASLVGSHAVLGKGNQNTVDTAASGKNNFGGELCCSSSDPIHVPSPGSKSAGTFGAIKREVGVVGARQRPADSAAIYTSTSNGLVKVVSAPKVSPHLEWKPKSVSPSTAAPPGAPSPVDDGSKTEVSALSKKLSHANVSHEHVIIPEHIRIPDSERTHFIFGSFESEIYPKASLAAYYDAVAKEDLNDHSPSSVAALGFTSTDGTLNDRMDNVGSCSPLPQSEPAVSVSEHEQSLTECVDVRSPGVVGGTNETISSKVTHSQPRLQHQEAAQNFKAYEPDSGYGMSFITKVDGEAAQGIAYSSEAMVLHSVNGYQLPASTATQQPVPQMFSQQFQAPQYPNFLPYRHVFSPQFGSLMVVPNYSSNHAFPQLPHASSYLVMPNGASQLAANGMKYGSNHQYKQVFQGAPAGYGYGNHNGYPNGVIGGTGAIEDMNMSKYKDNCLYAPNPQPFIFRDC

SEQ ID NO: 45486 - protein, 579 aa, Zea Mays
MEQYEGTQASLVGSHAVLGKGNQNTVDTAASGKNNFGGELCCSSSDPIHVPSPGSKSAGTFGAIKREVGVVGARQRPADSAAIYTSTSNGLVKVVSAPKVSPHLEWKPKSVSPSTAAPPGAPSPVDDGSKTEVSALSKKLSHANVSHEHVIIPEHIRIPDSERTHFIFGSFESEIYPKASLAAYYDAVAKEDLNDHSPSSVAALGFTSTDGTLNDRMDNVGSCSPLPQSEPAVSVSEHEQSLTECVDVRSPGVVGGTNETISSKVTHSQPRLQHQEAAQNFKAYEPDSGYGMSFITKVDGEAAQGIAYSSEAMVLHSVNGYQLPASTATQQPVPQMFSQQFQAPQYPNFLPYRHVFSPQFGSLMVVPNYSSNHAFPQLPHASSYLVMPNGASQLAANGMKYGSNHQYKQVFQGAPAGYGYGNHNGYPNGVIGGTGAIEDMNMSKYKDNCLYAPNPQVETADVWIQSQKESPNMPSAPFYNMVGQPVSPHAAYLPPQSGHTAFSPAPSHPGHLQYPGFVHALQPTSMTMVQNPQTMIHQPAAPPLAGNLGLDMSAMVPGNQVGAFQHNQLAHLGWTTQSF

SEQ ID NO: 45487 - protein, 572 aa, Zea Mays
MASDPPGDGTSGEETAPGPAPAVEAPPAPAVPARSRWAAEIKVYTRKHPRKNPKPPPESAADPVSVPSPAPNPLSETLSSIRRSIHRTEAVDAAALSDPAAPASVPTRAPSGERGAASGDPSSGLNRVGGGIPNGHGDDRAAAAAVKAEKARKRRLRSELRRCLAGELDQVRVLSRRLKEAAEALAQQEASEPVPLPLMVLPTQQQVVDAGYVQHQFLAGDMAVPMPTQIAAAVTPARSLLHRRPLTVSVVHNEAFEKEKRTPKANQLYQNSEFLLAKDRIPPSDSHVRKKPKHHKKKHRSLESRGADFDAERRLYSHAFKKSSSLLSRLMKHKFGWVFNKPVDPVTLGLHDYFTIIKHPMDLGTIRGRLSRGQYRNPKEFAEDVRLTFHNAMTYNPKGQDVHFMAEQLLGIFEAQWPEIEAEVNYLASCPPLPKKFPPPPIDLRFLERSDSMRHHVALDTNSRPISHTPTYTRTPSMKKPRAKDPNKRDMTIDEKRKLSENLQNLPPVKLDAVVQVIKNKNLSVCVELQEEPEQAKEKGRASDACPTRCRVACTAPYTTTTTNPSPPRTFW

SEQ ID NO: 45488 - protein, 54 aa, Zea Mays
MHFVCFILTFSLSHSSLQCCYCALSVMGTMLSVISSTTTRTKPFRSKQVRVCYI

SEQ ID NO: 45489 - protein, 932 aa, Zea Mays
MVFLIKWSKPAMAHCRLLHRYVSSAAARAAAPIPARHVPRSPGTSAQSARIRELGRLGRLHEAREVFDSMPFRDIIAWNSMIFAYCNNGMPDAGRSLADAISGGNLRTGTILLSGYARAGRVRDARRVFDGMGVRNTVAWNAMVTCYVQNGDITLARKLFDAMPSRDVSSWNTMLTGYCHSQLMEEARNLFERMPERNGVSWTVMISGYVLIEQHGRAWDMFRTMLCEGMTPEQPNLVSVLSAVRHLGKPGILESIHVLVHKTGFERDVVVGTAILNGYTKDVNMLDSAVKFFEGMAARNEYTWSTIIAALSQAGRIDDAFAVYQRDPLKSVPSRTSMLTGLARYGRIDDAKILFDQIHEPNVVSWNAMITGYMQNEMVDEAEDLFNRMPFRNTISWAGMIAGYARNGRSEQALVSLQALHRKGMLPSLSSLTSSFFACSNIEALETGKQVHSLAVKAGCQFNSYVCNALITLYGKYRSIGSVRQIFDRMTVKDTVSYNSFMSALVQNNLFDEARDVFNNMPSPDVVSWTTIISACAQADQGNEAVEIFRSMLHERELPNPPILTILLGLSGNLGAPQLGQQIHTIAIKLGMDSGLVVANALVSMYFKCSSADSLKVFDSMEERDIFTWNTIITGYAQHGLGREAIRMYQLMVSAGVLPNEVTFVGLLHACSHSGLVDEGHQFFKSMSSDYGLTPLLEHYACMVDLLGRAGDVQGAEHFIYDMPIEPDSVIWSALLGACKIHKNVEIGRRAAEKLFSIEPSNAGNYVMLSNIYSSQGMWDEVAKVRKLMKERGVNKDPGCSWMQIKNKMHSFVTGDEEHEQIQNIYATLWELYTLLKATGYVPDTDFVLHDIDEEQKESSLLYHSEKLAVAYGLLVTPKGMPIQIMKNLRICGDCHTFIKFVSSVTKREIDVRDGNRFHHFRNGSCSCGDFW

SEQ ID NO: 45490 - protein, 1084 aa, Zea Mays
MVFLIKWSKPAMAHCRLLHRYVSSAAARAAAPIPARHVPRSPGTSAQSARIRELGRLGRLHEAREVFDSMPFRDIIAWNSMIFAYCNNGMPDAGRSLADAISGGNLRTGTILLSGYARAGRVRDARRVFDGMGVRNTVAWNAMVTCYVQNGDITLARKLFDAMPSRDVSSWNTMLTGYCHSQLMEEARNLFERMPERNGVSWTVMISGYVLIEQHGRAWDMFRTMLCEGMTPEQPNLVSVLSAVRHLGKPGILESIHVLVHKTGFERDVVVGTAILNGYTKDVNMLDSAVKFFEGMAARNEYTWSTIIAALSQAGRIDDAFAVYQRDPLKSVPSRTSMLTGLARYGRIDDAKILFDQIHEPNVVSWNAMITGYMQNEMVDEAEDLFNRMPFRNTISWAGMIAGYARNGRSEQALVSLQALHRKGMLPSLSSLTSSFFACSNIEALETGKQVHSLAVKAGCQFNSYVCNALITLYGKYRSIGSVRQIFDRMTVKDTVSYNSFMSALVQNNLFDEARDVFNNMPSPDVVSWTTIISACAQADQGNEAVEIFRSMLHERELPNPPILTILLGLSGNLGAPQLGQQIHTIAIKLGMDSGLVVANALVSMYFKCSSADSLKVFDSMEERDIFTWNTIITGYAQHGLGREAIRMYQLMVSAGVLPNEVTFVGLLHACSHSGLVDEGHQFFKSMSSDYGLTPLLEHYACMVDLLGRAGDVQGAEHFIYDMPIEPDSVIWSALLGACKIHKNVEIGRRAAEKLFSIEPSNAGNYVMLSNIYSSQGMWDEVAKVRKLMKERGVNKDPGCSWMQIKNKMHSFVTGDEEHEQIQNIYATLWELYTLLKATGYVPDTDFVLHDIDEEQKESSLLYHSEKLAVAYGLLVTPKGMPIQIMKNLRICGDCHTFIKFVSSVTKREIDVRDGNRFHHFRNGSCSCEFLKLDPVWSAVRATRVRHKSLADVCMFYAFIRYEKLLEEDTSRHVVALLEGMGAAIQRRTRLGPASTLLSFLSSLACCPTLLLFPPPSLSSTPSCPPTLDARHPHPRARGRVQGRQDEPDRDRLAVSSKEEARAPVDVRVPSWWPARSRFNKKGL

SEQ ID NO: 45491 - protein, 765 aa, Zea Mays
MLQNMMDGHHQLAMMQQQHQNHGQQQAATSESDARGPRHDELLMESKSGSDNMEGGARSGGSGGEELQEEDLGLRQPARKKRYHRHTQHQIQELEAFFKEYPHPDDKQRKELSRELGLEPLQVKFWFQNKRTQMKTQQERHENMQLRAENEKLRAENARYKDALANASCPSCGGPAATAVIGEMSFDEHHLRVENARLRDEVDRISTIAAKYVGKPAGSLLLLPPNNLSNNVSGPALSSHHHLLPGGTDVFGGLHRHAGGGFDFDKGLVVELAVAAMEELVRMALLGEPLWIPALAVDGATTETLNEEEYARGFFPRGVGPKLPELRSEASREAVVVIMNHVSLIEMLMDVNQWSTLFSSIVSRAATLEVLSTGVAGNYNGALQLFQMPSPLVPTRECQFLRYCKQHTDGSWAVVDVSVEGQLLRTGSRQGRGRGRRRPSGCLIQEMPNGYSRVTWVEHAEADDMMVHDLYRPLVCSGLAFGARRWASTLERQCERLASAMASGVVVPAAAAGPAAGVVTSPEGRRSMMRLAERMVASFCGGVTASTTHQWTTLSGSGAEDVRVMTRKSVDDPGRPPGIILNAATSFWLPVAPARVFGFLRDDATRSEWDMLSNGGDVQEMAHIANGRDHGNAVSLLRVDNANSNQGNMLILQECCTDATGSYVIYAPVDVVAMNVVLNGGDPDYVALLPSGFAILPDGGGGGGGGSLLTVAFQILVDSVPTAKLSLGSVATVNSLIACTVERIKAAVAADNAGVAAAAAATSHH

SEQ ID NO: 45492 - protein, 179 aa, Zea Mays
MANGGEQSAITAAVERGRVSGVSRRLAGEESSDNDDEGSQRFSDAEDRSWHSHSRQGSALELEDCISTSAPISRDAGAASAGGGDTATATATAERARKSGVSECSLDGVVDLEAGLAEIVKASPDKAERNCRICHLGLDSASAESGAGIVLGCSCKDDLSRAHKQCAETWFKIRGNKFL

SEQ ID NO: 45493 - protein, 390 aa, Zea Mays
MPDINWILLVLCIAVTAGFKNQSQIGNAYGTAVVIVMLVTTFLMVPIMLLVWKSHWILVVTFIVLSLMVEVPYFVACILKIDQGGWVPLVVATAFFLIMYVWHFCTVKRYEFEMHSKVSMAWILGLGPSLGLVRVPGIGFVYTELASGVPHIFSHFITNLPAIHSVVVFVCVKYLPVYTVPTEERFLVRRIGPRSFHMFRCVARYGYKDLHKRDEDFEKVLFDCVLFFVRLESMMEGYSDSDEFSVPEQAPGIGRAAFLSVGERTCATVCSSGDLSFSSQDSVVPAAAQSSRAPTGLRVLHYSASASAAGQGSSGGTVGDELEFLNRCKDAGVVHILGNTIVRARRDSGVVKKLAVDYMYAFMRRVCRENSVIFNVPHESLLNVGQIFYI

SEQ ID NO: 45494 - protein, 322 aa, Zea Mays
MQALRTAPPDMQLKDKFLVQTTIVPYGTSDEELVPAFFSKETGRYIEESKLRVVLVSAYQSLEEQPTNKIHDTEPVVEVPVLKEVPNIENEVPDAAKEVPAPLVQAPAIVTGIPSPVEETPGLREFRVPLNEAPAVLAESPSAQKDPSVITVEHASTVIIEHSPAISIESPPLKQSVTVFKESPPSKQSIAAFKEYPPPSKQSIAVFKESPPLEETSPKEAVVLSDRGLFSVQNHQLSHVTEDVQNLKSKLNNLESKLEEAGKMIIRLKEESRSTTQERDKLQQEMVFLRKKGTPRSQVGFPLLFVVYVALLGTLLGYLLRL

SEQ ID NO: 45495 - protein, 348 aa, Zea Mays
MAAACLRRLHRIPHPVLKLAAATHWPLPFPGAKLAPVTQSCPSADRVEVQLSARCPGFASNGNFKHRWHHKLGSSVGAVLIGHAAFFLGLSNGSAFAQEDSVSPAAASEHAEGNAPGLQPIEDGSVVSNEHTVKWRIYTDNAREFFQKRQLDEAEKLFQAALLEAKEGFGLRDPHVASALNNLAEFYRLKKEHVKAEPLYLEAIEILEESFGPDDIRVGRTVHSLGICYHLQLKLAQAQTCYERALKIEGRVLGVGHPEYSSTMYSLAKVLSLQGKRKNAECLIEESIRILEEAGLGDSLTCLRRMVSLSRELIKSRRFAEAEIWQRKILHVLELSEGLVARGVRSSE

SEQ ID NO: 45496 - protein, 221 aa, Zea Mays
MNRKEPLCARQTPTQLTSAMASAAAVEWEAAARKVLVARKPCFGLPTACPTCLPVLLYLRMAQVPFDIHVDTSFPDADHIPYVEFGDCVAFNNEKGGVIEYLKDEKIADLNSNHPNISSTTVLDTKAMVSSWLANALLYELWVVSAGSIANDIYFSDLPWPIGKILHWNKTRHVKQLLGITKLNAAEKEEEIYLKASAAYDSLSFRLGDQVFLFDNRIHLC

SEQ ID NO: 45497 - protein, 177 aa, Zea Mays
MSPPSVMGQFGDTTYTKVFVGGLAWETQKETMRKYFEQFGEILEAVVITDKNTGRSKGYGFVTFRDSDAAMRACVDPAPVIDGRRANCNLASLGVQRSRPPTPQHGGARNFKVMKSFSQQAGIQGGLGAAFPSHATFPHYAIPQGLPYHIYGYSPYTLDYGYPTPRNHLPCFNHGGG

SEQ ID NO: 45498 - protein, 122 aa, Zea Mays
MGGGLTVILLPLGFKDLGLLLPSMNFYNIYGGPQYTFYGGGAGMVTGTSPFYPYFQFGQSGNTTTNYTSGQGYNLQYPQMFHFSTVSSTAAAVNGFAQQYGGPLSLAASPQAQAVCIPIKQA

SEQ ID NO: 45499 - protein, 243 aa, Zea Mays
MRGLTRAAKRAGEMAFNAGGGAVNWFPGHMAAASRAIRDRLKLADLVIEVRDARIPLSSANEDLQPVLSAKRRILALNKKDLANPNIMNRWLNHFESCKQDCISINAHSSSSVNQLLGFAELKLKEAISKEPTLLIMLVGVPNVGKSALINSIHRIATSRFPAKDKNKRATVGPLPGVTQDIAGYKIATQPSIYVLDTPGVLVPSIPDMETGLKLALTGFSDGGAEGTMPYVPELHWQHRGRK

SEQ ID NO: 45500 - protein, 770 aa, Zea Mays
MASFFNLRSGSLVPPSHSSVGDRNNCPVPGTLINTNNMRGFENLDREQLLKAEAKKAASMYTSLQKWRTSSETTVIPFFLVSISSDSSASIRQLKEWKACQGNYQKLLFGFYDHGCRSDCPGWVLRNYVAFLSIRWKIEKAQIFCYREYKGNPDLEQSLIGEASFPSPYGWDNPEFLPDAIGWEGVKPGKGTKEMKPKEIDLQSMNPASQDEEKQLMHLKLMGWRHFPVNIDRLSHVRVLLLGAGTLGCEVARLLMTWGVRKLTVVDSGSVVMSDLAKQSLYIDKDCGVPRVSAIAPHLKERCPAVEVESIQLEIPMPGHPVSSSKMASVLDDCKHLQTLVAANDAIFLLTDTWESRWLPTLLCSSENKIAISALLGHDSYLVMRHGAGPGTSGGTDEVTTQKLSTENALGHQRLGCCFCNDTASLINPISYETLPGLTSVASGKAVELFARMLHHPDEIRAPGDTAGTETEHQLGLLPHQLRGSLPKCDLFVELNNSSVNCTACSVAVLSEYRRRGLDFVMQAINYPAYLKDFTGISDSKRPDTCPKIPPNISVNSDKISDVRCLLLGAGTLGCDVARILMDCGVRKITVVDSGHVVVSNLARQSLYTSDDRGAPKATAILRHLVERCPSVDAQGIKMEIPMPGHPVSPGEAAGVLQDCERLKELVLSHDAIFLLTDTRESRWLPTLLCTNENKIAITAALGYDSYLVMRHGAGPGISCEASSVVTAIDKMSTEDALGRQRLGCYFCNDVIAPVDVMFHAFGNCTCFCF

SEQ ID NO: 45501 - protein, 576 aa, Zea Mays
MPERTATLLDLYSGCGGMSTGLCLGAALSGLKLETRWAVDLNSFACQSLKYNHPQTEVRNEKADEFLALLKEWAVLCEKYVHQDVDSNLAGSEDQEDADTLDKDEFVVQKLIGIRYDGTGRKKGVYFKVQWEGYGPEEDTWEPIDNLSDCPLKIREFVQEGRKRKILPLPGDVDVICGGPPCQGISGFNRFRNRDEPLKDEKNKQMVTFMDIVAYLKPKYVLMENVVDILKFADGYLGKYALSCLVAMKYQARLGMMVAGCYGLPQFRMRVFLWGALSSMVLPKYPLPTYDVVVRGGAPNAFSQCMVAYDETQRPSLKKALLLGDAFSDLPKVENHQPNDVMEYGGSPKTEFQRYIRLGRKDMLDWSFGEEAGPDEGKLLDHQPLRLNNDDYERVKQIPVKKGANFRDLKGVKVGANNVVEWDPEVERVYLSSGKPLVPDYAMSFIKGKSLKPFGRLWWDETVPTVVTRAEPHNQVILHPTQARVLTIRENARLQGFPDYYRLFGPIKEKYIQVGNAVAVPVARALGYCLGQAYLGESDGSQPLYQLPASFTSVGRTAVQANAVSVGTPAGEVVEQ

SEQ ID NO: 45502 - protein, 879 aa, Zea Mays
MAPSSPSSARPTRASGRKRSAMAEEIHQNQEEEEEVVAASTAKRRRKAASSGKKPKPTPKQAKPAVAGMKKKGETEKTEPVVDDVCAEEPDEEELAMGEEEAEAEEQAMQEVVAAVAAGSPGKKRVGRRSAAASGDHVPEFIGSPVAAAEAHSNWPKRYERSTAANKPEEDDELKARCHYRSAKVDNIVYCLGDDVYVKVINSLVSINVDGHKHDPRRVFLSEEKNDNVLDCIISKVKIVHVDPNMDPKAKAQLIEHCDLYYDMSYSVAYSTFANISSENGQSGSETASGISSDDAGLETSSNMPERTATLLDLYSGCGGMSTGLCLGAALSGLKLETRWAVDLNSFACQSLKYNHPQTEVRNEKADEFLALLKEWAVLCEKYVHQDVDSNLAGSEDQEDADTLDKDEFVVQKLIGIRYDGTGRKKGVYFKVQWEGYGPEEDTWEPIDNLSDCPLKIREFVQEGRKRKILPLPGDVDVICGGPPCQGISGFNRFRNRDEPLKDEKNKQMVTFMDIVAYLKPKYVLMENVVDILKFADGYLGKYALSCLVAMKYQARLGMMVAGCYGLPQFRMRVFLWGALSSMVLPKYPLPTYDVVVRGGAPNAFSQCMVAYDETQRPSLKKALLLGDAFSDLPKVENHQPNDVMEYGGSPKTEFQRYIRLGRKDMLDWSFGEEAGPDEGKLLDHQPLRLNNDDYERVKQIPVKKGANFRDLKGVKVGANNVVEWDPEVERVYLSSGKPLVPDYAMSFIKGKSLKPFGRLWWDETVPTVVTRAEPHNQVILHPTQARVLTIRENARLQGFPDYYRLFGPIKEKYIQVGNAVAVPVARALGYCLGQAYLGESDGSQPLYQLPASFTSVGRTAVQANAVSVGTPAGEVVEQ

SEQ ID NO: 45503 - protein, 197 aa, Zea Mays
MLCCSMLLGSHNQHLKILQEFWNTMDEIDKVLWIVDPTKPSYAMSHRRIALVDARKPNSLPECRFLGTDGKLDQLIINWRKNRKKWDTKKKFHENLAAVLDFALPSPPSVGDKAKDDEQADCGICYAKHLPVDDELGAHSGCATDYMCENPSCSRAFHSVCLRDWLRSITTTRQSFDVLFGNCPYCSDPVAVKITGH

SEQ ID NO: 45504 - protein, 105 aa, Zea Mays
MTQTQITQHHQQRCGSSGKTEEEEDFNLELTLATGAGRTRQEKPSTSDSEATMSSSTSAESEQAQRFMPSSNVTNLRFQGESNRHDDHQVMQSAWRYQCLSLKMA

SEQ ID NO: 45505 - protein, 569 aa, Zea Mays
MSEAVAAGESPVELLLRAAAMVPAERYALAAIIVVSVFLYRFLELHVIGDILRGFRGGRVELTFHPASEIYHRVASKCRLLHGRYLATPWLASPHLQTLFLGIYGTPPSFTYKRQLYTVRDGGTIALDWLFASDLEDGFISKDASTPLVVVVPGLTSDSAAAYVKHLVYSMASKGWNVVVSNHRGLGGVSITSDCFYNGGWTEDVREVITHLHHRYPKTTLFCIGTSIGANIVVKYLGEEGENTPIAGAVSICSPWDLLIGDRFISRKLVQRIYDKALAIGLKGYAKLHQPVLARLANWEGIKKSRSIREFDHHATCVVSRYETVDTYYRRCSSASYVGNVSVPLLCINALDDPLCTREAIPWDECRANKNIVLATTPNGGHLAFFQGLTARRLWWVGATSEFLSALHDSSYMHRQKANDHVLLSSLESSIDKSPYVNLMEDGMVAAVTKDGPSNDGSPLNHAADEQLSNEAGGGQQNVVSALNHNENSIGVGNDSPAEPVKQQGDDIHSNKLHEIIAPVKRSMSQLTRYQGRSVWLLAYIAFVTSWPLLGSLAFITFRKKSRNPLRAK

SEQ ID NO: 45506 - protein, 723 aa, Zea Mays
MFPPKGPNHYGQQLPYGVQQPYGQIPSSTGFAAPAAAGGTDGGRFGARAGQGAAAQYGGPYASVYGTQQVGGLGGKGPASSSLPSFPTRPTSLPESSNFSSAPVGSGLARPNDDYMAVRGYAQKLDQYSTDYPLERRMYGEHSANLGRRDGLSDLDRRYTDQTATGHQVHDHMEQSSSMRHQQLLKGQLQPGSDTRQADYFAGRSAPAHQASQEIGVYGRVEADNRNISILGNAPYGRQQSASLLEGAPRTNIDSLYGQGSSGTGFGAGLPPGRDYASVKGLPHPSSDPDHRDSILPRVHPAVSMVDDRRVDRIGYRRELDLRDEERRRDLILEREKELERERERERERELRDFRDRERERERERERDHERLLRERERERERERERERERERERLRERREKERERDRKHRTDPRREHTPPRGPGDRRRSSSVRSEKPVRRISPRRDAVHRHRSPVKEIKREYICKVFPFRFVDDERDYLCLTKRYPRLAVTPEFSKIVLNWAKENLNLPLDTPVSLEHDIHDSDDNADEGAIISTEKTPSFNTPATIWNAKVLLMSGMSKGAFADITSLRSTEERVVHLNNILKFALFKKDRSLFAIGGPWNAAIDGGDPSVDCSCLIQTAIRCVKEMVQVDLSSCTHWNRFVEVHYNRIGKDGLFSHKEITVLFVPNLSECLPSVDIWKNNWILYKKSKAEREELTVKKEKSPGDSKEQMQGELNKGKSLDA

SEQ ID NO: 45507 - protein, 190 aa, Zea Mays
MHPKPEGGGDDDGAAAEVGSPRSGYFRQRSMHAAAAAADPEAARRPFHVENPPCSAGGGLRPSESVTKLESLERAALAPAVVLRTGFYILVWYAFSTCLTLYNKTLLGDKLGKFPAPLLMNTVHFALQAGLSKLIIWFQPKGPEAAVDMGWKDYFMRVVPTALGTALDINLSNASLVFISVTFATMVGES

SEQ ID NO: 45508 - protein, 100 aa, Zea Mays
MGYFLQKIQRQGGLSRRFSNVSYYGLTTPPYKLDALEPYMSKRTVELHWGKHHQDYMDGLNNQLATSPLYGYTLEDLIKKAYNNDNPLPEYNNTAQVTRL

SEQ ID NO: 45509 - protein, 704 aa, Zea Mays
MSSFSHIKLAEEDALRDEYEAALRKALDAYNTTAVGTGTSRAHYEKVLNNFCRKAFQDYKKNAFLEADKQCSNAKHNMEKKIRAACTAPGVKVSAVIQVLETALAEYETSCTGPAKWRMLAAFLRQCLEGPILDLCLKLINEVESEKTSFTLRCRSNEDQLELLKKQLEANESHKSEYLKRYKAAINEKQKASVDLSSNLANLRTKCSTLEERCVSISKELDHVRHECTDWRVKYEQSVSQHKAEQDRFVAQLASLESRHSSAEGKLGAAREHAASAQDEAAEWKKKYEMAAVQAKTALERLASVQEQINKIAQERESSIRAEFASHLEGKEEEIRKLVAKIREAESEESVLTERLLVVESKTQGHNKETTGLRDEIKELTSKLEYLRDRAVSYEKQARMLEQEKNHLQEKFLSECKKYDEAEQRYKSAERDAKKAVELADAARTEAIAYQKEKDKAQQLSIEKVAVIERVQRQVDRLEQEKVNLLGEVQRMHNSESDAWSKVTLLESRVAEREKEMDDLLSRSNEQRSSTVRVLESLLATERAARAEANKRAEALSLQLQSAQGKLDILHQELTSIRLVETALDSKLRTTTYGKRLRDNEVRLYSIQDMDIDPPERSRKRTKSNTSPLKPVQTEDGGSVHMREDSVTVSTDVKDDNPDGYKKFTIAKLKEELTKHGFGTQLLELKNPNKKDILALYKKHVLCE

SEQ ID NO: 45510 - protein, 148 aa, Zea Mays
MLLPPPRRRRILSGAPARPRAPPRPATATAVSPAAPRRPLPRRRSQAPPIAPPPPPPPRALAPPPIRLRLRFLVPVLPVPRRVRVGPARHSRGVIPRPLRARGRWRLQVPLRDAFHRGVRRHGGGRWGSVGLRQFCREQPHCGGGGGG

SEQ ID NO: 45511 - protein, 183 aa, Zea Mays
MGDPLQAAVAAAHALSLLWRKPLMEVNHCVARTSRCQAVASVKYPIYDQTVYLNDYHKKMLKDQYEGLKTIEQITMDSASVETNMFKLCKVMSVQFGQKGIPYLNTYDGRTIRYPDPLIKANDTIKIDLETNKIMDFINFDVGNVVMVTGGRNTGRVGAIKNREKHKGSFETIHVLLGAFCYV

SEQ ID NO: 45512 - protein, 101 aa, Zea Mays
MVSPTPGGKDAREGGGKAEWMIYAFVARGTAVLAEYTEFTGNFPAIAAQCLQRLPAGSSSAGTGPDGRGDAPARFSYACDRHTFNFLLYRGYDTGPWREIE

SEQ ID NO: 45513 - protein, 718 aa, Zea Mays
MVMVMEGGRTEGDELIADYVDCLMSLDTNTRPVHSDGLILGAPGGGGGTVDAGTEPDAMRDIPSSEDPNEPVLGMTFESDEAAKAFYNDYARRLGFPFRVGRSRRSKGTEEVVVMKRFVCSREGVYKKKQTSPDEAARKRERMSMREGCNAMMEVVREADHWVVSKLEKAHNHELGTCSAKVGYLRARSSLGGSDKATMVGPDEMAFLRQNVLGEGGDAQGLLDYLKKMQANDPAFCHAIQVDKNGCVVNVFWADARAKAAYRHFGDAITFDTTYKKNKHMMPFVTFSGVNHHLQTVIFGCALLMEETEFSFIWLFETWLAAMGGKAPCSLVTDQNRAMKAAIGKVFPNSCHRFCKWSILSRTKQKLTHTYSEHPTLRDELESCVLETETISTFETTWMSIIDRYDLRKNSWLQAIYNIRQKWVPLYLMDTFFAETFPTWKLETMNDFYKKYFNTKTTLEVFLNQFDLSLAGRYEDEAKADMDAYLNKATTKTASLIEKQAAGTYTKAVFSRFQEEFTESLGFIIQKTEDGCISKYSITKYEDPSDTFCVTYNASNKMANCSCKYFEFSGILCRHILGVYIIVDPRTLPTEYFMKRWTRKARDDDALLEDNNNNTHDEDASQSTTSRYNTLCADAIRCAEKGAGSEAVYKAAKDILQKAYEEIIAYERNTGQGSQRDVININEDVTIDDAMNDKSMPDSGRKVTNLLGQFVNSTWSPV

SEQ ID NO: 45514 - protein, 133 aa, Zea Mays
MAIKRKIEQAATSDFQARSLPAKLRIEPSDPEDVKAAKRKKIHAFKSKSRFEQLEFAQNKRQNAWQQFQTKGKAKKVGFFSGRKKESIFKSPDDHRGKVGVTGSGKGLTDFQRREKHLHLKGGSGDAADDDEE

SEQ ID NO: 45515 - protein, 362 aa, Zea Mays
MVCQHDPTQPNPTKSLTAGHCLLLRQLQCLCSGPSSVESKAGVTHVQPRHHRCVSRDRIRASIMQQQQPGAEGAVMKPSEPAEDEQHQQKPGLEGAVMKPSKPAEDEQHQQKPGLEGAVMKPSEPAEDEQQQEEAERRRLYQAWKGNNIFLCGGRLMFGPDAASLLLTTFLIVAPTIVFCYQIKSTFYGSGGRQQQQMHQAAALVVTVTTIMDLVFLSMTSTRDPGIVPRNSRAPPEADEFLGCNTPSMDWSGGRTPRMRLRRTKDVIINGFTVKVKFCETCLRYRPPRSSHCSICNNCVHKFDHHCPWVGQCIGLPNGRKWRLYLEGLAQGSVLVCANHIYFHCCLVCRRPHSVSSLSNRY

SEQ ID NO: 45516 - protein, 201 aa, Zea Mays
MAAPSAFGFLVAKQSLQLNKIVGFGCERPGGGGGGGNGTTVLPPCTRVRRKNRARSYFEPETELKKMMMAEVANHSKRNHTDSYFSGKAVAVPAAAATSSEEFGSMSSKKPRNASPRLAPVSPKEKKDKIGERVAALQQLVSPFGKTDTASVLQEASGYIKFLHQQLEVLSSPYMRAPPAAGAAPEVSFRRPSSSSPLMSS

SEQ ID NO: 45517 - protein, 486 aa, Zea Mays
MPGNLVDGQCDSNDDPCQELLSWLLPLDRTLPPRSLAPPTLNPSVSHKQSYSASGSQIFNFRSYSMPSASSVQTPNNIRPPPISESQEFMPEKPAKTPDIINDGQLSFRGVPLEPERYSVRCGLEGVYLPGKRWRRKVEIIQPIEVQSFAAKCTVENLLCVTVKNIAPTHAKDIVVFIDAITIVFEEASKGGAPLSLPIASIEVGHGHSLPNLALRRGEEHSFILKPATMSSRERKTNSHAPLALSLPTMTGATLNTHTPKAGEPYADLSDQYAVLVSYRCNYTESKLFFKQATSWRPSAASDLMISVSSELSLRNPSLGARVPQLPVQILTLEATNMTSENLTLTVLAPEASGSSSVVSLNSSPTTPNGSFDGVNESAKRSGVGKDGIGFRRLNSVLATPKEGDNGGNRMSNASGCTHLWLQSAVPLGCVPARSSTTVKLELLPLSDGIITLDTLQITAREKGLAYIPEHSLEIHATSGMSSGRS

SEQ ID NO: 45518 - protein, 280 aa, Zea Mays
MVYDRHEEYQYLNLVEDIIRSGAQKNDRTGTGTLSKFGCQMRFNLRKNFPLLTTKRVFWRGVVEELLWFISGSTNAKVLQEKGIHIWDGNASREYLNSVGLAHREEGDLGPIYGFQWRHFGAEYTDMHADYTGKGFDQLMDVIDKIKNDPDDRRIILSAWNPSDLKKMALPPCHMFAQFYVENGELSCQMYQRSADMGLGVPFNIASYSLLTYMIAQVCGDAHVYRNHVRALEEQIQKMPKPFPILKINPSKKDIDSFMASDFKLVGYDPHQKIEMKMAV

SEQ ID NO: 45519 - protein, 345 aa, Zea Mays
MAQKFISFWFIVFQSFGQHGRELITSEVALRLLYVLTEKPKIAGVDISSFEKLLENLVIKVVPMENMNGRKRVEEGELCDRRNGRGVDLNRNWSVDWGKKEKDYDPYEENPGIAPFSEPEAQIMRELSRSFKPHIWVNVHSGMEALFMPYDHKNTTPNGASAHSMRSVLENLNRRHFQDSCLVGSGGGSVGYLAHGTTTDYMYDIAKVPMPFTFEIYGDEKASSDDCFKMFNPVDKKTFDRVVNKWCMAFLILFEEGLRNLRDAQIVSQGTLENWVPIGGDIVEINVERKSSIRERRKLEGLDLGMQELRTYFRLFLLSTFLLMFMFCARISKNRNRDSGNLFDP

SEQ ID NO: 45520 - protein, 216 aa, Zea Mays
MKTGIVESDLVLTVSPHYVKELTYGPDKGVELDGVLRTKPLEIGIVNGMDVYEWDPSTDKYTSVKYDATTVTEAKALNKERLQAEVGLPVDSSIPVIVFVGRLEEQKGSDILIAAIPEFVGENVQIIVLVCFNLEVISILSHDTVHNLIVAERKKIVLQGTGKKKMEEELMQLEVKYPNIARGIAKFNVPLAHMMFAGSDFIIVPNSHLFITWRTC

SEQ ID NO: 45521 - protein, 326 aa, Zea Mays
MKAPSLLVRCFPGLLPSKDTSCVPIVSEKDLQLPSLAVEIIPSKSAHPYKYAGEKVDVQGFDIFKGKVSVADMISFSPSEVASSKYDGALKSWENSITLVNIIRNEIRDGQLSFRGKRVLELGCGSGVSGIFSCLKGASTVHFQDMNAETIRCRTIPNVLANLEQARDRQNRPSEESPVTPSRQLLDPNVHFYAGEWDELPTVLSAVPPPAAPADLSFSEDDFMDGGSSSHDGSSVVVGQDYCPRRSRKLSGSRRAWERANNETDQADGGYDVILVSDVPYAANSLKKLHALISKVSSKIPLFSFLFLPHLLFFYTFLYAWCTKLK

SEQ ID NO: 45522 - protein, 220 aa, Zea Mays
MSTESGELLGIDPVELRFPFELNKQISCTLQLTNKTDKQVAFKVKTTSPKKYCVRPNNGMVAPRSKADVVVTMQAQRDVPPDMQCKDKFLVQSATVAKEVVPKEVTGDMFTKDSGNVVEEVKLKVVYVAPSSSQSERFEDGNLGSLSYQEETKEPKESEKIITEPFALISKLMEEKNSAIELNNKDFLRRDISRRHGGFSLVLVLVVAILGILLGFLMKR

SEQ ID NO: 45523 - protein, 415 aa, Zea Mays
MRPLGAYATRKWSNECTHVLVDGSCSLTPELLDAVMAKKQIMLGDWFEAMAEKNIHTEIPSCTQYIPNLTLDGMVIKMVDINLIQNFLEGYTFILGSSDKYQFGEKLHGLLESTGAKYVHIDDFCANSQDSAAGDTDHQILVVPARYPLEFSKIRVLFTLSKISDIKLFAAILSGRLEATSIEPPAFIVTSSNSTDATIVADSDVEMETATSNPTGAANKSQHHTENISDDEKQTTNITNEVARKGNVIHPKHPESVEDLKPMEEDVKVIEKTATYRSTGRDEDARILSKAPKDEKLDTSRDGASDVIFSQNLVVRRSLPQSAPAAPAEIGGVNFKRFRKREMVSGNSFKDLIPFAREPYRESDHERGSTMTDFMREEKRQKQMEAIAEDLFNNAKSKKRAAAGSSIHTLLTGHR

SEQ ID NO: 45524 - protein, 371 aa, Zea Mays
MAGCSSVQAKQAQVQVLQIWMEGREGIAVGRESGHGSMFRAADIAMAEAQEAAAKGYQSSPSSPSTSPTPSPPAAAAGHAGDAAATPLAWSLGGETPSGAVVVDNGTQTAGQSEHASLSSGRRRGRPRGSGRRQILATLGEWYALSAGGSFTPHVIIVGTGEDVAARIMSFSQKGPRSVCILSANGSISNVTLRQPDASGSTFTYEGRFEILQLMGSFTMAEEGRRRTGGLSVSLAGPDGRVVGGVVAGMLRAASPIQVIVGSFLPNSLKQHQRRRMSMQQPSPVPALPAPVAPPPPVLTAATPISQAGPGNGFHAPPPPHSAAPPQPHANAMNLNATTTGFTMVGWPASSPQPMAYRASPDINVSLTPQE

SEQ ID NO: 45525 - protein, 341 aa, Zea Mays
MTTSPKKCGAAAAAKWHGESLAGLRGVMYHMARDQHGCRLLQQRLDDGKREVDYIFAGVSRHAAQLMVDPFGNYLMQKLLAVCDDGQRMTLVLTLTADPFALVRISLNVHGTRAVQKLIERLSAREEIGLVMDALRPGFLELIKDTNGNHVVQKCLHSFASNDNKAIFAAAALHCVDIGMQIHGCCVLQRCIARSRGEHRDKLVAAIAHNGFKLAEDAYGNYVVQVVLDLKIPTANSSLAQQFGGKYIHLSMQKFSSNVVEKCLKVFKEVDKAKIILELLATPHLEQLLPHCYANYVVYSALKNSKGSLHSALINAILPHEELLRTSPYCKRIYSKFFLKN

SEQ ID NO: 45526 - protein, 331 aa, Zea Mays
MEATKEIEAALKVSMRAALGLGTNNSNDGQLDDLTIMKETLRVKDEELQHLAKDIRSRDATINEIADKLTETAEAAEAAASAALTMDEQRRLLCLEIERLKQALERQVEQSMLKLRQSEEKVISLSKEKEQLMKERDAAFQEAHMWRVELGKAREQAVIQEATIARTEEKARVSEADAAARIKEAAEKLRTVEKEKEELLALVGVLQSQVQREQSSTKQVCGERSESCSGADSPPPLTKHVDASDDDVDKACVSDSRSVLVSSDSTEVQLAVDGVDIRPVGDAEWGGFQQSDALIADVREVSPEADGGSLDIPVVNPPPISDHVQGGATHP

SEQ ID NO: 45527 - protein, 482 aa, Zea Mays
MNDGSYWIRHLGRWNTSMEPCLFNNRECQVKLQLIPDQKPLMYWCRLRRNETVIKGTILFDASSTITLSPVNFQGMPKYDGCCFYIGTPQKKEYFLCAETPGAAKAWVSTLHATQLVLRAHKEAVNSLAGNGSPATLGTVATAVANANATAMEATKEIEAALKVSMRAALGLGTNNSNDGQLDDLTIMKETLRVKDEELQHLAKDIRSRDATINEIADKLTETAEAAEAAASAALTMDEQRRLLCLEIERLKQALERQVEQSMLKLRQSEEKVISLSKEKEQLMKERDAAFQEAHMWRVELGKAREQAVIQEATIARTEEKARVSEADAAARIKEAAEKLRTVEKEKEELLALVGVLQSQVQREQSSTKQVCGERSESCSGADSPPPLTKHVDASDDDVDKACVSDSRSVLVSSDSTEVQLAVDGVDIRPVGDAEWGGFQQSDALIADVREVSPEADGGSLDIPVVNPPPISDHVQGGATHP

SEQ ID NO: 45528 - protein, 72 aa, Zea Mays
MGVYLSTPKTDKLSADGENSRVRFGLSSMQGWRTTMEDAVSCFRLPRGFRLGGNGIAPDCSVPCSHDWFGVI

SEQ ID NO: 45529 - protein, 1246 aa, Zea Mays
MLDASISATRLLSTHGRVTSDAPLHRFHFETFRIPQPPKGRKPQRLQKFPARAPRTLVPSPTGDASPAAGEMHIKEVTLEGFKSYAGRTVVPGFDPLFNAITGLNGSGKSNILDSICFVLGITDLRQVRAASLQELVYKQGQAGVTKATVSIVFDNSDRSRSPLGYEDSPEITVTRQIVVGGRNKYLINGHLAQPSRVQTLFHSVQLNVNNPHFLIMQGRITKVLNMKPPEILSMLEEAAGTRMYEMKKESALKTLEKKQNKVDEINKLLDVEILPALEKLRKERCQYMKWANGNAELDRLKRFCIAYDFVQAERVRDGALNDVKQIKTKIVELDETTENIKAAIQEMDNNISTLAAEKEAKVGGEMKVLSDKVDKLSHVLIKETSVMNNQEETLKSEEKGAEKILTNIEDIKRSILERDAAVKNVENEASDMKRRAEDLTKELDEKEKEYQGVLAGKSSANEKKCLEDQLRDAKAAVGDAESGLKQLATKIKHSEKELKEKKTLLVSKRDEAIAAENELKTRTKDLEGIKASMGSINYDEGQMEALQKDRSAELEIIQKLKDRVRNLSGELANVHFSYRDPERNFDRSKVKGVVARLIRIKDSSTATALEVAAGGRLFNVVVDTEETGKQLLKNGDLRSRVTIIPLNKIQTYMIPDRVQQTARRLVGPDNVTLALELVGYGEEVKNAVAFVFGSTFVCRNMDAAKEVAFNRQISSTSVTLEGDTYQPSGLLTGGSKGGRGNLLRKLDELAKAEADLSDHEKKLFVIEQQIGALLPLQKRHTELKSQFELKSYDLSLFQNRVEQNEHHKLGELVKKIEQELQESKQELTEKQVQHEKCVSTVSELEKTIKTYGTEREGKLKALEKRIKSIKSEMQSMSKQLKAYESDRERLIMEKDAVVGELATLEEQLTTSKAQITSLSETLEKQKDKVTSIKQDYDQAESELNVGRSKLKECDSQINRMAKEQQKLQQKLSDSNVERKKMENEVKRMEIEQKDCSSIVDKLVEKYNWIATEKQLFGKSGTDYDFESCEPHKAREELENLQAQQSSLEKRVNKKVMAMFEKAEDEYNDLMSKKNIIENDKAKIKKVIEELDEKKKETLKVTWLKVNKDFGSIFSTLLPGTMAKLDPPEGGTFLDGLEVRVAFGTVWKQSLSELSGGQRSLLALSLILALLLFKPAPLYILDEVDAALDLSHTQNIGRMIKAHFPHSQFIVVSLKEGMFNNANVIFRTKFVDGVSTVTRTVPSKQR

SEQ ID NO: 45530 - protein, 338 aa, Zea Mays
MAPTAHHQAARDDELEKSRRKPGGGGKAAAVRCHPVLAEERKASIRGVVGDLLAMAGGGRRSLISLGVGDASSHACFRRGGEFAAEAVAHAALSGAFDCYAPSFGFPDARRCCAVCRAEPTDQTNSAVAAHLSTGAVHRTHEADVFMTAGGTGAITAIATVLGGAPGANVLLPRPGFAPYEAACEVAGAEPRFYDLLPRRGWEADLAGVRALADAATAALVVINPNNPCGAVYSAHHLRQLAETARELGIPIVADEVYAHMVFGGSRFVPMASLAHIAPVVSIGALSKRFMLPGWRLGWLAFCDPNGALKHGCDRDAAQRDFWPCLHSPGGGSQDPFS

SEQ ID NO: 45531 - protein, 501 aa, Zea Mays
MADADAKSQPPDAAASPDASISSPSSLGGGGGDAADADAIEKQLAGLGIAVAGGFPEPSGWDDGPVPVPIPADVLVGGDEGAGEKPRAPAPAPTGAVDVKVRFPRRPGEPDCSYYLKFGTCRFGMKCKFNHPARKKKTSRVRGVGSNGSGSNSSSNKASSPDDDQAPKEEYEGLVPDISDSMVIDMKRGKLEPKEKGSKDKRKETFAEGNTQEECKYYSTPGGCKFGKTCKYLHREGNGGKTEVEKAELNFLGLPLRPGEKECPYYMRTGSCKFATNCKFHHPDPTNASSKEPGLEHENGDVPLQNVQGSSQPSLQMWPDQRALNEQHVPFLAPAPSYSGGMVPPQGMYPSSDWSGYHQVPLNPYYPPGVPFPHFPAAHMNHPMYKAADIPGHQPPPSDEYPERPGQPECQHFVKSGFCKYRMKCRYHHPRSRQSAPPPAGLSPIGLPIKPDQPVCTYYGRYGFCKYGPACMFNHPFNFGPPVPAAGPPLPGQYPTHGNFA

SEQ ID NO: 45532 - protein, 237 aa, Zea Mays
MLFHYDGRTTEWDEFEWSKRAIHVSVRKQTKWWYAKRFLHPDVVARYDYIFIWDEDLGVEHFNAEKYIELVRKHGLEISQPGLQPDKGLTWQMTKRRGDQEVHKVTEERPGWCTDPHLPPCAAFVEIMATVFSRNAWRCVWHMIQNDLVHGWGLDFALRKCVEPAHEKIGVVDAQWIVHQAVPSLGNQGKSDNGRAPWEGVRARCRKEWGIFQTRLADAEKAYYLERGITPPNSTVV

SEQ ID NO: 45533 - protein, 374 aa, Zea Mays
MALEAVVFSQPQAGHFGCGRGDSPYAVPWSDLLQGGGGGGFGDVCAAGEWVDQHDLDTCWAAPTVGDDWDWGEALSRDHSSSDAASTDHGSRKAAPEPAAGRRKRRRTRVVKNKEEIESQRITHIAVERNRRRQMNEYLAVLRSLMPPSHAHRGDQASIVGGAINYVRELEQLLQSLEVQKSLKQSRGRRPAGGGASCSPPFAGFFSFPQYSTAPSTTSSSGGEKCCGHDAAAADIEVTMVEGHASLKVLARRRPKQLLKLVAGLHQLRVPPLHLNVTAAVDAMVLYTFSLKRSRWRAIIMVAWLSRLDGRWRMTPRWALSRTLPPPCTRFSAAYSGSSRRRRRRRPPPCETLHHLHVRQAHCHPANGIHCLCM

SEQ ID NO: 45534 - protein, 249 aa, Zea Mays
MARRRVLLFLKPFDVYPPRPYVGAAASSPTSAPSSLPQPRAANPKVEELSDEFDARRSTGYLCAATAGNFEQILDVTLDGSRRPLELSRISVKLNGIQLPTYALNDILVSHPCPASVSRFSFRKRNNTGENSRLINCRSSGLRVSTAAGSTAAMLSAGGFTMPLSSRELQYMIREPISPMDADKAMLHDVLKQEQHMHVVWYNQEGAVYVDGSHVVHSIQHGDSLEISSGAPTLKVVLPEHLLKMGPEW

SEQ ID NO: 45535 - protein, 510 aa, Zea Mays
MVVNAEQICDPLAPGHMTPTVLMEFGQQRPMKRGYEEMVFRAASSRGYAETVGESGVAAGSPLRVDSEDSSVPKRKCISLNSVGFDVKREILVPSKMSSSERRYLRKRFRAELDSVRDLLKKPEFAAPVPLNRAPALSSSAAPRAKKPQKSQRGGTNVIRGAKGRFLPTKPRPETSTVLSEAAAFKQCEAILKKLMTQKYSHIFNVPVDIVKLQIPDYFDIVKTPMDLGTVKKKLESGSYTSPSDFAADVRLTFNNAMAYNPRGHAVHDMAIQLNKMFESRWRPIEKKLASAATEKHVEVDRADSKRRKTPPVDRSDVSMECARQTEPETPKMTAEEREAFGNCLASISDELPPHIFELLQQCIDSNADLSGDGEIEIDIHAVSDDLLFELKKHVDKYLQEKEQSQQVKSEPSENEAVNVSGLSHSSTNPCKGGEPIEEDVDICGNASPIMLDKDAQIRNSKCGSPSSSSSDSESSSSGLCLMVFICISLYHYRQFLCKESDAFLPSFVL

SEQ ID NO: 45536 - protein, 425 aa, Zea Mays
MDLKRTLDVEEEVVDGDEDELACCPDAKRRRTFVDSSMQEAIGAQYMQRHLPKLEPFLRRVVQEEVHNVLIRHIDSAHRLPLQLKTSSKRYKLQFQGNLPQTLFTGNRVEAESKQPLRLVLTDATTGQTVASGPMSSMKVELLVLDGDFNADERLVEHSEKEFSESVVFEREGKRPLLSGEVVVVLEKGAASIRDISFTDNSSWIRSRKFRLGARMSRASSIEERVLEAVSNPFLVKDHRGEVYKKHHPPALADDVWRLEKIGKDGVFHKKLADFGIHTVQDFLRNLVMDQYGLRSRHVEQDVGVHGGARPGVRAGRQALLLLQRARDRPPVQLRLRSRRRARRGPLLHLERSHPDTEGAGWAAAAGRVQVPGPHSRVQGAVAERRRGAATRRGRVPAVRARGAGARPPARCRPGPALSRRAECP

SEQ ID NO: 45537 - protein, 452 aa, Zea Mays
MAHFVVGIAAALLLLQQLMASSSSYPSSAVLADSVLGRKAGIVVDEASSATESSPPGARTGRYAVIFDAGSTGTRVHVFRFDRKLELLEIGDDGIEVFAKVKPGLSSYAGHPQEAANSMLPLLDKAKSAVPKQLTKRTPLRLGVRNLIHTKSKFQYKPEWINVIEGSQEGSYLWVALNYLLDKLGGDYSQTVAVLDMGGGSVQMAYAVSANAAASAPAPTHGEDPYVTREYLKGKDYNIYTHSYLHYGAFASRAEILKAKDGPFSSCMLRGFIGQYTYNEEQYDATAAPEGAVYGKCREEIGRALNLNAPCEMKNCTFNGIWNGGGGAGQGSIYVASSFYFVASEVGIVDGNAPSGNTTPGAFGASAEKACQMSVEEAKIEYPNVNDVDVPYLCMDLAYQYTLLVDGFGVERTKEITVVDKVKHGEYYVEAAWPLGSAIEAVSSTKEWRQDK

SEQ ID NO: 45538 - protein, 170 aa, Zea Mays
MYHIKPNHALYICTMSPFGAVITPETLKYMSKYQGREITQVDCAREAMRLIHAEDKNLQAENSAWELKKKFGNGVSTMVLVYNATGATLSLADDGQDWTGSVYSSPISDTFHNGQWIAFLHVKPAALALGSQAARVFRGRDVDGRTRDFVVAWLTLKLAVKTTSRHGGVV

SEQ ID NO: 45539 - protein, 613 aa, Zea Mays
MWRLTVAEGGGPWLRSTNGFVGRAVWEFDPDLGTPEERDEVERVRQEFSDHRFQRRESADLLMRMQCAKQNRSQRRDLPRIKLGEDEHVTEEIVLSSLRSALDQFSSLQASDGHWPGDFSGIMFIMPGLIFALYVTGSLNVVISPEHRHEICRYIYNHQNEDGGWGTLILGSSTMFGTCSNYITLRLLGEEPYANNSVLAKGRAWILSHGGATLIPQWGKIWLSVLGLFDWSGNNPIFPELWSIPQFLPFHPGKFWCFARMVYLPMAYLYGKKFVGPITPTILALREEIYDTPYGKIDWSDARSKCAKEDLICPRTLLQNVIWTSLYRCVEPVLSSWPINKLRERALGNIMEHIHYEDENTQYLCICPVNKALNMVCCWVEDPNSDAFKRHLARIPDFLWISEDGMKAQVYDGCQSWETSFIIQAFCATDLVNDYGSTLQRAYEFMKNSQVMRNHPGDQRYWHRHRSKGSWTLSSADNGWAVSDTTGEALKAVLLLSKISNKNNLVGDPIERERLHDAIDCLLSFANKDGTFSTYECKRTYSWLEILSPCETFPNIVVDYPYPECTSSVLQALILFKDLYPGYRTEEIEALVRSAATFIETKQQEDGSCCFAG

SEQ ID NO: 45540 - protein, 429 aa, Zea Mays
MMTTWTKQQGYPVINAKLQGNYLELEQAQFLLDGSSGPRMWIVPITADCGSYYTQKKILLKGKSDRLDIRDIASQCGNQEKGGNFWIKLNINQTGFYRVQYDDKLAAALQNALQAKKLSVMDKIGIVEDSLALSMACKQTLTSLLRLLYAYREEADYSVLSHINTASLSIAKISVDATPGLVGDIKQLLIKLLLPPAVKLGWDLKNGESHLDSLLRPVLLVALVKLGHDKSINEGARRFSIFVHDRNTSLLRPDTRKAAYLAAMQNVTASYRSAYNDLLKVYRESDEAEERGRVLSTLCFCKDENIVLESLNLLFTNEFRKQDAYYVLQGLDVETRDTAWVWLKDNWDRVTRKYGDTQAGGFIRYVVTLFTSNEKAAEFSRFFATRKKPEFERTLKQSLENVRISARWIQGIKSEPRLAQTVQELLRRP

SEQ ID NO: 45541 - protein, 573 aa, Zea Mays
MQNRFQKRRETGGTSYDPLVLDDFDWDNEWVHSSVVHAGRDDDEHNLTWEQVDEAIRASESLRGRNFQDKLMSNLAVNSFFPQWNIWTQFLDDTTAGLKLDSLEESHPIEKALASYIRKFAYSNAKTEDLWAVLEENSGEPIKNMMTTWTKQQGYPVINAKLQGNYLELEQAQFLLDGSSGPRMWIVPITADCGSYYTQKKILLKGKSDRLDIRDIASQCGNQEKGGNFWIKLNINQTGFYRVQYDDKLAAALQNALQAKKLSVMDKIGIVEDSLALSMACKQTLTSLLRLLYAYREEADYSVLSHINTASLSIAKISVDATPGLVGDIKQLLIKLLLPPAVKLGWDLKNGESHLDSLLRPVLLVALVKLGHDKSINEGARRFSIFVHDRNTSLLRPDTRKAAYLAAMQNVTASYRSAYNDLLKVYRESDEAEERGRVLSTLCFCKDENIVLESLNLLFTNEFRKQDAYYVLQGLDVETRDTAWVWLKDNWDRVTRKYGDTQAGGFIRYVVTLFTSNEKAAEFSRFFATRKKPEFERTLKQSLENVRISARWIQGIKSEPRLAQTVQELLRRP

SEQ ID NO: 45542 - protein, 578 aa, Zea Mays
MGDVPVPSPAPPVSGIDMTPRRRREPSEPRSDSDWDAGSSREGSPDLLRRAPAVQISRASSSSSSWLREIERDRVRLVREWVHMAARDRDDDTGPPPSPVHEHARRDAPRIRGRQARLELVMRMAADRQAELHRLSQHRAVSDFPHRNRIHALLRGRFLRNSGLPEERRPPSVAARELGQLRQRHPVSGLREEFRFRLENLVRGQADSQVDASSVHDVELSTNDRSELRPPETTQERHERTSEIVSLQQIDSTAMTSGFESGSPNIAEVFCGSHSQAESQDDLEHERRDWQRFSHAVIGEESERTWRENADNMSSHEGTAVEDDNNDHLPEANEESTSVDHLPEGLEGSITDGSLPEAQEDQHDSDHLPAVLEELHGNNHFQESHGEWRRDDRPVEVYDEWQSDDHLPEVNEEWHNDDESNDTADNWHDNNSDQPIDHDAALIRRANTFIPGDDDNVYSTELRELLSRRSVSNLLHSAFRENLDRLIRSYVERQGRGPLPWDLEGTTPAPPSPVQIQEEQRDDEDQELQRTVNRPPLVIPPPPMPPRQPLWHSELHRTNWIRQNIHRSSSDIAVFIVG

SEQ ID NO: 45543 - protein, 447 aa, Zea Mays
MGNALGCAGLGERLAAGARDGDAAEVRRLLDANPGLARCAAFGSLSSPLHLAAAKGHHEIAALLLENGADVNGRNIYGQTALMQACRFGHWEVVQTLLLFRCNVSKADSLSGRTALHVAAAGGHVRCARLLLAGAGSGRSKLVNRAASGGGGGVTALHLAALHGHADCVHLLVDERADVAARTLPCAAPPMASVGAGSAPLHYAAAGGEVKCCQILVSRGADRAAVNCNGQVAPGGRGQDVGVPLAGARPVAQVSAAHPQVPALRIPLVAARQRHHPREGLRPGSEHVVAANGHHGRRRRRRRRMRSLPRKTLQRRCRSVRARAVRQVRAGPVLGDQVLRRAGDRRHHPVPALPERHRLVQETGRGGRGRAWRQCRRPAGVVQPTQEAEHGVRPGRPPPRLRSSRRHVVLISAADIEIEAAVLHRLFVGRNLQGTAAAWVDHRMHRS

SEQ ID NO: 45544 - protein, 790 aa, Zea Mays
MESYLKENFGGVQAKHSSDEALRRWRKVVGLVKNPKRRFRFTANLDKRNEATAMKRNNHEKLRVAVLVSKAALQFIHSVAPSSEYKVPADVKAAGFGICAEELSSIVEGHDVKKLKSHGGVQGLASKLSTSESDGLTTSADKLATRRDVFGVNKFAEAESRGFLVFVWEALQDMTLMILAACAFFSLIVGIATEGWPKGAHDGLGIVASILLVVFVTASSDYRQSLQFKDLDKEKKKITVQVTRSGYRQKLSIYELLVGDIVHLSIGDQVPADGLFMSGFSLLINESSLTGESEPVAVNVEYPFLLSGTKVQDGSCKMLVTTVGMRTQWGKLMATLSEGGDDETPLQVKLNGVATIIGKIGLIFAVVTFAVLTQSLFRRKIIDGTYLSWTGDDALELLEFFAIAVTIVVVAVPEGLPLAVTLSLAFAMKKMMNDKALVRHLAACETMGSATSICSDKTGTLTTNHMTVVKACICGKIKEVDGVSDIKNLFSELPDSVMAILSQSIFNNTGGDVVLNQDGKREILGTPTETAILEFGLSLGGDFLAVRKASTLVKVEPFNSAKKRMGVVIQLPEGALRAHCKGASEIILASCSKYLNEDGNVIPLDAGTIDHLKATIDSFANEALRTLCLAYIEVEDGFSVNDQIPTDGYTCIGIVGIKDPVRPGVKESVAICRSAGITVRMVTGDNINTAKAIARECGILTEGGIAIEGPDFRTKSEEELTQLIPKIQVMARSSPLDKHTLVKHLRTKLYEVVAVTGDGTNDAPALHEADIGLAMGIAGTEVISRFSLCF

SEQ ID NO: 45545 - protein, 246 aa, Zea Mays
MEDSVGADERREQSETMPHKKARQEVAEAGGVGGGGGGKPAEEGGFLSAVASKIGATMSGANGGSGGEVGAAMASDGEEGKRDGDGEPGAMETEEEVKDQDVAGGEQAGILSAMATKIAMAMPGANGDDSHGGSGDDAKSSNGEAARGGSNGGEKQGSESNGGGILSAVASRIGVAVSGANGDRSGSAEDGAKTSAGDAGHGSKGEEKGRGVNGGRLVEQIISNLPSDDQAPDADEASLLIAIIED

SEQ ID NO: 45546 - protein, 307 aa, Zea Mays
MEDSVGADERREQSETMPHKKARQEVAEAGGVGGGGGGKPAEEGGFLSAVASKIGATMSGANGGSGGEVGAAMASDGEEGKRDGDGEPGEEGGFLSAVASKIGAAMSGANGGSGGGGNAAAASGGEDKEADGFTGGVIFRKLLHSSPPAPPHVSEEEVKDQDVAGGEQAGILSAMATKIAMAMPGANGDDSHGGSGDDAKSSNGEAARGGSNGGEKQGSESNGGGILSAVASRIGVAVSGANGDRSGSAEDGAKTSAGDAGHGSKGEEKGRGVNGGRLVEQIISNLPSDDQAPDADEASLLIAIIED

SEQ ID NO: 45547 - protein, 969 aa, Zea Mays
MASPASVTNLGSNGRSGPLPAAAARRAQLVTRIRFTGFDGIRRWQYEPGRLCRCMVVTNLIEEKVVQFSSRGSVSVKADDDNDLLLKPPQKPVRSNGPPESMKTASLPDQKPAGATLDDREKVRESLDAVLEKAEKLEASSFGNADGGNLGSRQSNVSMSNGPGPTAVEEGGNSRKTKTLKSVWRKGNPVPTVRKVIREQPRTETRSQSIPVAKPSVSSASKPSPLLLSKPSVAQPPRRPIKSDTSNEKKGPILIDKFASKRAAVDPIVPEELLDPLKPVRGPPAKVRVDRRKKPDTQAGSRRRMSNDDGLVDEDTTDVPISGVPVRKGRRWSKAKRRAARLEAMQAEEPVRVEILEVGEEGMLIEDLAYELAIGESEILRFLSVRGVMLDNVQTLDKDLVKMVCMEYDVEVLESGPVKVEEMAKKKEFLDDEDLDKLEVRPPIVTIMGHVDHGKTTLLDYIRKSKLVASEAGGITQGIGAYQVLLPVDGNHQACVFLDTPGHEAFGAMRARGARVTDICIVVVAADDGVRPQTSEAIAHARAAGVPIIIAINKIDKEGANAERVMQELSQIGIMPEMWGGDTPMVEISALTGDNVDELLETVMLVAELQELKANPHRNAKGTVIEACLDKAKGPLATLVVQNGTLNKADIIVCGEAYGKIRALYDDCGKLVDKAGPSNAVQVIGLNNVPLAGDEFEVVDNLDVARERANGRAEALRIERISAKAGEGKVTLSAIAASVSSAKQVGIDTHELNVILKVDFQGSIEAIRQAIQTLPQENVSLRFLLQGPGDVSVSDVDLAVASEGIIFGFNVRAPGSVKNYAKKKGVEIRMYKVIYDLIDDLRKAMEGLLEPAEEEVPIGSAKVRAVFSSGSGKVAGCMITTGKVVQDCNVRVLRKGKEVYVGSLDSLRRVKETVKEVGAGLECGIGVDDFDEWEEGDIIEAFNTVNKARTLEEASATVTAALKDAGVQL

SEQ ID NO: 45548 - protein, 716 aa, Zea Mays
MASPASVTNLGSNGRSGPLPAAAARRAQLVTRIRFTGFDGIRRWQYEPGRLCRCMVVTNLIEEKVVQFSSRGSVSVKADDDNDLLLKPPQKPVRSNGPPESMKTASLPDQKPAGATLDDREKVRESLDAVLEKAEKLEASSFGNADGGNLGSRQSNVSMSNGPGPTAVEEGGNSRKTKTLKSVWRKGNPVPTVRKVIREQPRTETRSQSIPVAKPSVSSASKPSPLLLSKPSVAQPPRRPIKSDTSNEKKGPILIDKFASKRAAVDPIVPEELLDPLKPVRGPPAKVRVDRRKKPDTQAGSRRRMSNDDGLVDEDTTDVPISGVPVRKGRRWSKAKRRAARLEAMQAEEPVRVEILEVGEEGMLIEDLAYELAIGESEILRFLSVRGVMLDNVQTLDKDLVKMVCMEYDVEVLESGPVKVEEMAKKKEFLDDEDLDKLEVRPPIVTIMGHVDHGKTTLLDYIRKSKLVASEAGGITQGIGAYQVLLPVDGNHQACVFLDTPGHEAFGAMRARGARVTDICIVVVAADDGVRPQTSEAIAHARAAGVPIIIAINKIDKEGANAERVMQELSQIGIMPEMWGGDTPMVEISALTGDNVDELLETVMLVAELQELKANPHRNAKGTVIEACLDKAKGPLATLVVQNGTLNKADIIVCGEAYGKIRALYDDCGKLVDKAGPSNAVLLASITFPLPVMNLRLLTTLMLHVKGRMGVLKHCA

SEQ ID NO: 45549 - protein, 95 aa, Zea Mays
MGSEINKNGNRAALISLHLLKQSKGERERNLNQLPRPATPSPRFPHMAALRLRESLERNGPRFYLSGPCPCADPRCPSPDLAAPFSSLRVHRTRS

SEQ ID NO: 45550 - protein, 165 aa, Zea Mays
MELSLVGLQNAGKTSLVNSIATGGFSEDMIPTVGFNMRKVTKGNVTIKLWDIGGQPRFRSMWERYCRAVSAIVYVVDAADRENMAIAKGELHDLLSKPSLTGIPLLVIGNKIDKPEAFPKQTFTEIMGLKTITDREVACFMTSCKNSTNIDSVIDWLVKNSKKKN

SEQ ID NO: 45551 - protein, 289 aa, Zea Mays
MECAAKGLAAEPCAGGVADRRCGGCGAVAYCSRVHQIIHWRVHKEECERFAEQMRHINALSQFPFTFLEPPALNHEFPSARCLFLQSIKLHQKGLWKSECICGRDVAPLKGLSVEAEWNLQSSLCPCAEPKNPVSSALASWEAYYQWRSLPLHSPVAVLLHWPLTLYHCVQLSRTQTPRYDGQDTLCIHYLGPEKELLQLAAFGELRALFPSVQIHIELVGPEVPKSRDGEVVNISRYACCSDKSCCCKSSIGSKDLSCTAVTLKLWKGFYHERCSDILKVLSTITPIF

SEQ ID NO: 45552 - protein, 231 aa, Zea Mays
MASELTYRGGGTSTAAGAGAGGYSPKPSKPLAWLPRAARYAVAEHRPLFALAGMLIAAAVISIASPSASSSSSTSTSTGGAASSYSNNNNPLARFPVEPAHHRDVATRHFVGGKVPLGLKRKALRVLVTGGAGFVGSHLVDRLLERGDSVIVVDNFFTGRKDNVLHHLNDPNFEMIRHDVVEPILLEVDQIYHLACPASPVHYKYNPIKTIISFLYEFLQFSSVAFISFPP

SEQ ID NO: 45553 - protein, 452 aa, Zea Mays
MEPRVPCGDGGPEPRAARTHRREGERNHVLDARILEPQRQRSNPIRNIFHLLTQREVSPRLKHHAKRMWNESPKYDPDSIELRSADAKLDIFSWAESQSLHSWSAKYCPLLPPPRSTIAAAFSPDGKTLASTHGDHTVKIIDCQTGKCLKVLTGHRRTPWVVRYHPLHSDILASGSLDHEVRLWDANTSDCIGSQDFHRPIASIAFHGSGEILAVASGHKLYIWNYNKRDGTSVPAIILKTRRSLRAVHFHPRGAPYLLTAEVNNIESADSPLTLARSSGYLNYPSALLVTNTNSRFCTLPESNVVSPCLLWPAYLRDGGILHVLGNDSSSTIVQQRSSLVQPSTSDTANVQLEQFATPMDVCPGEPTSSNDIPDAVTVPTSNGNEMHGAGGQSNSRLQGSSSTSNLERAFRIRFTPCYATKYAPHWRIRCSNVPKKCRKWTAGSFSLRRLT

SEQ ID NO: 45554 - protein, 280 aa, Zea Mays
MKRVSSHVSLASEAEINLDLSRLIIDKPRFTLERKRSFDEQSWSELSHRQNDGFDSVLQSPAFPSGVFDSPFSVGTHFGGPHPLVNEAWEALRKSVVYFREQPVGTIAAVDHASEEVLNYDQVFVRDFVPSALAFLMNNETDIVKNFLLKTLHLQSSEKMVDRFKLGAGAMPASFKVDRNKNRNTETLVADFGESAIGRVAPVDSGFWWIILLRAYTKYTGDVSLSESPECQKCMRLILNLCLSEGFDTFPTLLCTDGCSMIDRRMIQNRRVFPHSCEQV

SEQ ID NO: 45555 - protein, 99 aa, Zea Mays
MAWAWACRGCYQRAWMEVRLRVRRRSVPSAESDGAGCARTRADEGDRRRQRLGVTGQDPSSTRSLGRHRQRRRPAPPEPAMGADHHKQKSSAFGYGCLI

SEQ ID NO: 45556 - protein, 425 aa, Zea Mays
MAMALRRLLLPLLLLVLLGLRPQSCVASGGGGGEPAEFEIPRDGSVLELDESNFEAAVRAAEFLFVDFYAPWCGHCKRLAPQLDEAAAVLAGLSTPVLVAKVNADKYKKLGSKYGVDGFPTLMFFDHGVPSEYTGSRKADVLVENLKKLVAPDVSVLESDSSINGFVQAAGINFPLFIGFGMDESLIVEYGAKYKKKAWFSTAKDFSEDVMVVYDFDKVPALVSVNPKYNEQSVFYGPFEVVLDAGTFLEDFIRQSLLPATVPINRETVKLLKDDGRKVVLTILEDESDESSLQLIKVLRSAANANHDLVFGYVGVKQWEEFTETFDVKVSQLPKIVVWDTKEEYEVVEGSESFIEGDYGSQVSRFLEGYREGRTTKKKVGRGSPTLLGLNAVYILVLLVAVLVVLMYFSAQGEEDHQPRRAHED

SEQ ID NO: 45557 - protein, 101 aa, Zea Mays
MFAAMIFRVDPFFSGQDNYDQLVKIAEVLGTGDLYNYLEKYGLQLDPQLERLIGRHNRKPWPKFVNARNRHLATPEINSSGMITRKGLQPRKPWLTRISIQ

SEQ ID NO: 45558 - protein, 488 aa, Zea Mays
MDAAAKKMTRSISRQLSSGAARLWRQLSLDPHTPRRGGPGPVPAAGAGQTRFAIARQSSLDPTPRGGPDGSSAHQQLAVPENLDATMRLLFAACQGDAAGVEELLRSGVDVDSIDLDGRTALHIAACEGQGEVVRLLLDWKANINARDRWGSTPAADAKHYGHFEVYNTLRARGAKVPKTRKTPMAVSNPKQVPEYELNPLELEFRRGEEVTKGTYLAKWYGSKVFVKILDKDSFSDAESINAFKHELTLLEKARHPNLVQFVGAVTQNVPMMIVSEYHQKGDLASYIEMKGRLKPHKAIRFALDIARGLNYLHECKPEPIIHGNLSPKNIIRDDEGQLKVAGFGSLSLSKVSEDKVQMAQPVTKFDNVYIAPEVYKNEPFDRSVDVFAFGLILYEMIEGAPAFHPKPQEEAAKMICLEGLRPPFKNKPKYYPSDVKELIQECWDPMPSVRPTFAEIIVRLNKIHANCAKQGSWRDTFKLPWKQTGER

SEQ ID NO: 45559 - protein, 115 aa, Zea Mays
MYFSIWRLEREQQRETDVEENHRSNWLGLRLGIWQTGCVSTKIQNSLDQKLQLPIVVKGLVLRTLDKVSCCYKVLCIPGECLINLGADLLVFFKRELPSFLNNSDRGRRQPDCGC

SEQ ID NO: 45560 - protein, 811 aa, Zea Mays
MRGLSVSLSDLYMFSDHYSRRKLAEGVKLALYEAEEAFRVKKILLDPINIPVLKCHDETEDVTYRQSDCIQSNPSVIRSSIMAFKDVFRDLLKMVQQHVSNDNSMMVMINAGSKGSMLKYAQQTACIGLQLPASKFPFRIPSQLSCISWNGQKSLNYEAESTSERVGGQNLYAVIKNSFIEGLNPLECLLHAISGRANFFSENADVPGTLTRKLMYHLRDIHVAYDGTVRSSYGQQIVQFSYDSVDDLVDKLGAPVGCRAACSISEAAYGALEHPVNGLEDSPLMNLQEVFKCHKATNSGDHIGLLFLSRHLKKYRYGLEYASLEVKNHLERVNFSDLVETIMIIYDGHDKIRNEGMWTTHFHINKAMMKKKRLGLRFVVDELAKEYDTTRDQLNNAIPSIRISRRKCLVGDEGVKSSSCCIAVVAHAERNSISQLDTIKTRVIPSILDTLLKGFLEFKDVEIQCPHDGELLVKVCMSEHCKGGRFWPTLQNACIPVMELIDWELSQPSNVSDIFCSYGIDSAWKYFVESLKSATTDTGRNIRREHLLVIADSLSVTGQFHALSSQGLKQQRTRLSISSPFSEACFSRPAQSFINAAKQCSVDNLCGSLDAVAWGKEPFNGTSGPFEIMHSGKPHEPEQNESIYDFLCSSKVRNFEKNHLDTRRQSTENASICRLACKSSKGSTTVNGVAITIDQDFLHAKVSIWDNIIDMRTSLQNMLREYPLNGYVAEPDKSQLIEALKFHSRGAEKIGVGVREIKIGLNPSHPGTRCFILLRNDDTTEDFSYHKCVQGAADSISPQLGSYLKKLYYRA

SEQ ID NO: 45561 - protein, 354 aa, Zea Mays
MAGAAASPAAGHVVERFRSRLREEAGGGEPGAAAVVHVYAEALRELTFNCKPVITELTIIAGQHATLAAGGIADAICARVAEVHQPAARDTRQMTDVQEDLINGLASNSSCERPSIFQKSSLQYADDPDQQETFRPLAGTRAASPHLLSTHASDMNLDGPLVNSRRNLSISPPLDVFSRNVSPKRALERLPPSHSVLGPDPRKFTDRNGRLRWGLDDGAQRPTISMLDEEYRKQSARELIDAYGNCQGRDADERLPKVQRLDPNGMASRSSARNWLTSEEEEYSWEDMSPTLTDRVSSSMPSFPPGTMRTGFPGANAGLLESDVGRHNFPSQATRLSVDGSPFNLEDRFSTASV

SEQ ID NO: 45562 - protein, 245 aa, Zea Mays
MVSRMIQFGDADVMVAGGTESNIDALSIAGFSRLRALSTKYNSSPLLASRPFDCGRDGFVIGEGCGVMVLEALDHAKERGAKIYAEVRGYGMSGDAHHITQPQSGGRGAILAMKRALDQSGLHVNEIGYVNAHATSTPLGDAVEANAIKSVFGDHAASGDLAISSTKGAIGHLLGAAGSVEAIFTVLAIHHGLAPPTLNLERPDPLFEGAFTPLAAPKKMSIRAAISNSFGFGGTNTSLLFSCPP

SEQ ID NO: 45563 - protein, 241 aa, Zea Mays
MIQFGDADVMVAGGTESNIDALSIAGFSRLRALSTKYNSSPLLASRPFDCGRDGFVIGEGCGVMVLEALDHAKERGAKIYAEVRGYGMSGDAHHITQPQSGGRGAILAMKRALDQSGLHVNEIGYVNAHATSTPLGDAVEANAIKSVFGDHAASGDLAISSTKGAIGHLLGAAGSVEAIFTVLAIHHGLAPPTLNLERPDPLFEGAFTPLAAPKKMSIRAAISNSFGFGGTNTSLLFSCPP

SEQ ID NO: 45564 - protein, 202 aa, Zea Mays
MQESFCLNQECDEERDRGLLGVGNCNLSQTKDVIVVVESVKDPLIDKRLHKGKMDETKRRKIASLSIGSVCVGVLILASSASATWLPFLPICIGCTIGVVLLLAGLSLLSWIDQDAGRHSFGHSGGFTCPFVPVLPVLCILINTYLLINLSGDTWMRVGIWLLLGVLVYAFYGRTHSSLIDVVYVPAAQADEIYRSSSGYVS

SEQ ID NO: 45565 - protein, 179 aa, Zea Mays
MREVADLILSFPDETPVVVLSAMGKTTNNLLLAGENAVSCGAPKASEIPKLAVIKDLHLRTVDELGLDKSIVSEKFLKYFWWCWNKLKEKTDDDIPMPAYFRFLALLAFKIFSAEQVDVAVLEVGLGGKFDATNVVKAPVVCGISSLGYDHMEILGDQILFLVINLVSINGLILLAKLG

SEQ ID NO: 45566 - protein, 219 aa, Zea Mays
MPKEMAHSHLGMASDGRYIYAVSGQYGPQCRASINRNFVFDTETREWHGLPPLPLPRYAPATQLWRGRLHVMGGGKEDRHEPGLEHWSLAVKDGKALENEWRAEVPIPRGGPHRACIVANDKLFVIGGQEGDFMAKPGSPIFKCVRRHEVVYGDVYMLDDGAKWKELSPMPKPDSHIEFAWVVVNNSIVIVGGTTEKHPITKKMILVGEVFRFDLEALS

SEQ ID NO: 45567 - protein, 544 aa, Zea Mays
MGSCVSVSSTRHRRRRSRKLSVAARKFRRKLSTAIAADAPIVRGAGSAATCLARHGVVHVEAPDSNVTLRLTKLQWQHSQMDAGSVVCEEAWYDSVSILESPDSDDDLDNDFASVSGDPLPDVTGGSDAPQCKEAACFLDTMQLLRSIANAEAYDQSEQPADKSDDDDSNVAATATNNSGSCNNDEGCCSSTLKELQAAMSPRPFPASVPSNKVQPMPVVGVSPVPPPHQQQQQQKKKTAVVRLSFRRRSYEGDEMTEMSGSANYLYRPRAGFTVPCSTGEKLPQGCWSVLEPSTFRVRGESFFKDKRKYPAPGCSPYTPIGVDMFAYTRKIHHIAQHLSLPSLKTHETFPTLLIVNIQLPTYPATVFGDNDGDGISLVLYFKLSDSFDKEISPQLQDSIKRLMNEETEKVKGFPVDSIVPYTERLKILAGLANPEDLQLSTAERKLVQTYNMKPVLSRPQHKFYKGSNYFEIDLDVHRFSFISRKGLETFQERLKHGVLDLGLTIQAQKAEELPEHVLCCMRLNKIDFANNGQIPTLITAADE

SEQ ID NO: 45568 - protein, 613 aa, Zea Mays
MTNENNGNGTNPASASGWLGFSLSPHMASAMDEHQHQHQHHNGLFFPSVTAAYGLGGGDGVVAASASPYYTPQLASMPLKSDGSLCIMEALRRSDQQDHHGPKLEDFLGAAAQSQAMALSLDNPAAAASSFYYYGGGGGPGHQHGFLQPCGDLYGGTSAASLVSADDEAAAATAMASWVAAARAESGVLSAAAAAGHHHALALSMSSGSLSSCVTAHPAAPEYGAAAALDGGRKRGGAAGQKQPVHHRKSIDTFGQRTSQYRGVTRHRWTGRYEAHLWDNSCKKEGQTRKGRQGGYDVEEKAARAYDLAALKYWGPSTHINFPLEDYQDELEEMKNMTRQEYVAHLRRKSSGFSRGASMYRGVTRHHQHGRWQARIGRVSGNKDLYLGTFSTQEEAAEAYDVAAIKFRGLNAVTNFDITRYDVDKIMASNTLLPGDLARRRKDDASDDNPAPAAAAAIAIAEPAAHQPAAGVNDASETWKHVVASAALAAAPRDNHHHRHHDVLSGEAFSVLHDLVATAADGGAGHHHHHAHSAAHHVPMSSATSSLVTSLGNSREGSPDRGGGLSMLFSKPPQAAKPMSPLMPLGSWASATASARAAVSIAHMPVFAAWTDA

SEQ ID NO: 45569 - protein, 616 aa, Zea Mays
MTNENNGNGTNPASASGWLGFSLSPHMASAMDEHQHQHQHHNGLFFPSVTAAYGLGGGDGVVAASASPYYTPQLASMPLKSDGSLCIMEALRRSDQQDHHGPKLEDFLGAAAQSQAMALSLDNPAAAASSFYYYGGGGGPGHQHGFLQPCGDLYGGTSAASLVSADDEAAAATAMASWVAAARAESGVLSAAAAAGHHHALALSMSSGSLSSCVTAHPAAPEYGAAAALDGGRKRGGAAGQKQPVHHRKSIDTFGQRTSQYRGVTRHRWTGRYEAHLWDNSCKKEGQTRKGRQVYLGGYDVEEKAARAYDLAALKYWGPSTHINFPLEDYQDELEEMKNMTRQEYVAHLRRKSSGFSRGASMYRGVTRHHQHGRWQARIGRVSGNKDLYLGTFSTQEEAAEAYDVAAIKFRGLNAVTNFDITRYDVDKIMASNTLLPGDLARRRKDDASDDNPAPAAAAAIAIAEPAAHQPAAGVNDASETWKHVVASAALAAAPRDNHHHRHHDVLSGEAFSVLHDLVATAADGGAGHHHHHAHSAAHHVPMSSATSSLVTSLGNSREGSPDRGGGLSMLFSKPPQAAKPMSPLMPLGSWASATASARAAVSIAHMPVFAAWTDA

SEQ ID NO: 45570 - protein, 306 aa, Zea Mays
MPASSRFYTSATCSLASASASSRSPPRRRRVSLTGQSPSTPLTRHSRNQSSSRWPHPDLGLDMGFLLVRKPRPRDEKPDLVNWMRCFLSQRLSQPAAAAEETANAEGKAAGRREEEEGGGDDADHLVVMVNGLYGSSADWKFAAEQFVKRLPGKVYVHRSQSNYSKLTYDGVDLMGERLAEEVRQVVQRRRNLRKISFVAHSLGGLVTRYAIGKLYEPAMDETSSCDIDKPSDEQNVRDVGKIAGLEPINFITSATPHLGSRLNKQLPFLFGVPLLEKTAAGTAHFIVGRTGLLCAVSSVVLPMLM

SEQ ID NO: 45571 - protein, 263 aa, Zea Mays
MLPSHLNGHSALGRRRPRLSAAAGESPAAAGVEAAAPLEEHDRIYFQAYSHLGIHETMIKDRVRTDAYHAAIMRHQKFIEGKVVLDVGCGTGILSVFCARAGAKRVYAVEACEIVVQAREIVKANNLTDQIVVIHGRVEDVDLEEKVDVIISEWMGYMLLYESMLPSVLFARDKWLKPGGLILPSHATLFMAPVTNRERYEDSVDFWRDVYGINMSALVPLAKKFTSEEPSIETIGGENVISWPSVLPFMALVSGLRWSSTSL

SEQ ID NO: 45572 - protein, 461 aa, Zea Mays
MPLKRTSTPSGTLLLPLLNGTTNETTRKKAGRGNPLAARARAADTSTSTAATSQPVRGQQLGSSPTLAPPSAITALVRAHPPPRPAHHPPGPAAYLTPPPPGHSALSVSERPSLPPRTPRRPAPSVTAPRPATETGRRDRQRPAAMGEDKKAGNKDAAGGDKKKDAGAGAAPQPIVLKVDLHCAGCANKVRKAIKHAPGVESVTPDMAAGKVVVTGPADAVELKERIEARAKKPVQIVSAGAGPPKKEKDKEKEKDKKADGGEKKADKEKGADKPKEEKKKPKEETVTLKIRLHCDGCIERIKRRISKIKGVKDVAFDAAKDLVKVTGTMDGAALPAYLREKLSRDVEVVAPGKKDGGGGGDKKDKGAGDGGDKKKDGGGGGGGSRRLLRCRPTAQPPRRLLPQRRRRPLPARASLRVRPHPPPRAPDVQRREPQRLLRHVNSLASPVCRRRRALAPPSSV

SEQ ID NO: 45573 - protein, 294 aa, Zea Mays
MEQYEKVEKIGEGTYGVVYKALDKATNETIALKKIRLEQEDEGVPSTAIREISLLKEMNHGNIVRLHDVVHSEKRIYLVFEYLDLDLKKFMDSCPEFAKNPTLIKSYLYQILHGVAYCHSHRVLHRDLKPQNLLIDRRTNALKLADFGLARAFGIPVRTFTHEVVTLWYRAPEILLGARQYSTPVDVWSVGCIFAEMVNQKPLFPGDSEIDELFKIFRILGTPNEQSWPGVSCLPDFKTAFPRWQAQDLATVVPNLDPAGLDLLSKMLRYEPSKRITARQALEHEYFKDLEVDC

SEQ ID NO: 45574 - protein, 253 aa, Zea Mays
MVSGLFDEVMKAMELILEKLLAEGEEFNEAEARPKVRLVVPNSSCGGIIGKGGATIKSFIEESHAGIKISPQDNNYVGLHDRLVTITGTFDNQMNAIDLILKKLSEDVHYPPNLSSPFPYAGLTFPSYPGVPVGYMIPQVPYSNAVNYGPNNGYGGRYQNNKPTTPMRSPASNEAQESLTIGIADEHIGAVVGRAGRNITEIIQASGARIKISDRGDYISGTSDRKVTITGTPEAIRTAESMIMQRVSASSER

SEQ ID NO: 45575 - protein, 319 aa, Zea Mays
MVAAVASPSSAAPSAGRPHPTYKEMIMQALTELRDPSGSSRSAIATYIADHFSGLHSRHDALLSVHLRSLKSHGQLRLVSGNYFVSTAAQRQGRGSNIPPNPNPAPGQKRGRGRPRKYADSAPSASIPAFQDAKRGRGRPRKRKSAQDPVASSPSPSPLQGASVPPPPSGVKRGRGRPRKDALVPPPSSSSPLLGGIDPPPPSGIKTGRARPRKALVPVRSSFSELLGAVVLPPPSGVKRGRGRPRKSAYPAVAPLVGAEKGPAGGQPQRNTTPLSPTPATMSHSVWLVRSGEEGAHLRLWLLGKRRCNLNLCSPWMLH

SEQ ID NO: 45576 - protein, 329 aa, Zea Mays
MLVRHVFPEFSSRVGHLRAKAAWVAGQYAHINFSDPNNFRQAMHCIVSGMHDPDLPVRVDSVFALRSFVEACKDLNEIRPILPQLLDEFFKLMNEVENEDLVFTLETIVDKFGEEMAPYALGLCQNLAAAFWRCMASSEADDEADDSGALAAVGCLRAISTILESISSLPHLFTQIEPTLLPIMRRMLTSDGQDILVPLDNYISRGTDHFLACKDPDYQQSLWKALQSIMMDENMEDSDIEPAPKLIEVVFQNCKGNVDHWVEHYLRITIERLRRAHKPYLKCLLVQVKLRSKMKRLLMIWMVLMLMKKMMTKLTLIRRWVLMMKTGMK

SEQ ID NO: 45577 - protein, 476 aa, Zea Mays
MEREMADAPAAAIPAAEPLAAVAEEGEGEAAAEAVGSTLTMERVAAAKKFIESHYRSQMKNIQERKERRFRLERQLASSQVPKEQQINLMKDLERKETEYMRLKRHKICVDDFELLTIIGRGAFGEVRLCRERTSGNIYAMKKLKKSDMVVRGQVEHVRAERNLLAEVASHHCIVKLYYSFQDTEYLYLIMEYLPGGDIMTLLMREDTLTEHVARFYVAETILAIESIHKHNYIHRDIKPDNLLLDKNGHMKLSDFGLCKPIDCSKLSTLNEDEPMSDDNLRESMDIDSSLSDTANGRRWRSQHEQLQHWQMNRRKLAFSTVGTPDYIAPEVLLKKGYGMECDWWSLGAIMYEMLVGYPPFYADDPITTCRKIVHWRNHLKFPEDAKLSNEARDLISRLLCDVDHRIGSAGADQIKAHPWFRGVAWDKLYEMEAAFKPQVNDELDTQNFMKFEELENPPAKTGSGPSRKKYKAVEH

SEQ ID NO: 45578 - protein, 593 aa, Zea Mays
MTDGGEDGNVALPRGPARRRGPVRASFDADEFIALMHGSDPVRVELTRLENELRDKERELGEAQTEIRALRLSERAREKAVEELTDELEKMAEKLKLTESLLESKNLEVKKINDEKKAALAAQFAAEATLRRVHAAQKDDDMPPIEAILAPLEAELKLSRQENAKLQDDNRALDRLTKQKEAALLEAERTVQIAMAKAAMVDDLQNKNQELIKQIEICHIAEVEKLSQTVRELEEAVLQGGATANVVRDYQRRFQEINEEKRTLDRELARAKVTANRVASVVANEWKDSNDKVMPVKQWLEERRFFQGEMQQLRDKLAITERTARSEAQLKEKYQLRLKVLEDGLRGPPSGSIRPPTEGKSFSNVPSRRLSLGGADNISRLSPNGLLSRRSPSFNSRSSLTSNSSLVLKHAKGTSKSFDGGTRSLDRRKVHGNGAHLLNRSTDAVRDKETNDSWKGDMDEKTNESADSNTDGKSNETMNNNSAETVSGFLYDMLQKEVISLRKTCHEKDQILKDKDDAIEMLAKKVDTLTKAMEVEAKKVRREVASMEKEVAAMRASKEQEIRAKRLGTKGSGSSQLLPGRNAPRSGSMRNFQ

SEQ ID NO: 45579 - protein, 220 aa, Zea Mays
MKQAAAAAAAAQQALLLQQQSQPPLFPVHHPHPGLLAAPQIEPIVSGNLPPGFDSSTCRSVYVCNIHLQVTDAVLQEVFQSIGPVEGCKLIRKEKSSFGFIDYHDRRYAALAILSLNGRQLYGQPIKVNWAYTSTPREGTSGHFNIFVGDLCPEVTDATLFAFFSGYSTCSDASVMWDQKTGRSRGFGFVSFRNQQDAQSEINDLNGVFSSSMFLTYVPF

SEQ ID NO: 45580 - protein, 144 aa, Zea Mays
MSSAQDPFYIVREEIQESIDKLQSTFHRWEQTASNTGEYVHLTKELLISCESIEWQVDELEKTISVASRDPAYYGLDEVELSRRRNWTGSSHKQVGTVKRAIEKGKSNAATSKYQDTSRTNHYSAQDNDDFLSSESDRQLLLMR

SEQ ID NO: 45581 - protein, 255 aa, Zea Mays
MWLLNLHPKPRLSLKQYAKLLPLALIHMLGNVFTNMSLGKVSVSFTHTIKAMEPFFSVLLSILFLGETPSLPVLGSLVPIVGGVVLASMTEVSFNWIGFWSAMTSNLMNQSRNVYSKKILADKEDSLDDINLFSIITVMAFLLSAPLMLCVEGIKFSPSYLQNAGVNVKELFIRAALAGTSFYFYQQVSYSLLARVSPVTHSVANSLKRVVVIVSSVLFFRTLISPINALGTGVALAGVFLYSQFKKSKPKATAA

SEQ ID NO: 45582 - protein, 906 aa, Zea Mays
MSSKIYKEICYFEASIKRPFFNVKTLDDDQLENWHQYLDFVEKNGDFDWAVKLYERCLIPCANYSEFWIRYSEYVDAKGGREIANHALGRASSCFAKEVPAFCMYYALFKEQIGDALVARSVFTKTRSYFTSGFYANINRLANMEKRMGNTKAASEIYETAIEDAMQKNNIELLPDLYSNFAQFIYVASHSIIQAKQVFVDGINRAPCKPLIKGFIQFMSTHGGPKDIPLLDSVISNAVTPGSDVSTALSREDREDISLLFLEFVDLYGGIKELRKAWARHSILFPHSTGNISRHYSTMGNSLQETKKRRNTEPLMIARDHSLEDTMKLKQTLKTDDFSLIVDKESEPQVDKDIVDSGKRHGDAGAQKALDLVNSHKETITTAQECTDMVYSEHILDKNRIEKQMNSHAKEDINQDLILHEQNDEKTNSHEAETPVAESGDCDSPSKAIASSENINFQGKVIEVSASSHLETVCSKYDSPSGPNMHKEGSSSGPARISPELEERHHVEVQVKVDTEHHFSVSNANLEISFDGPNPTECDKEISAIGHGSQDYIQSSQSHQLSACAKPWSLDSAKTKSDTVSIQAQLRNQLENAQTYQSNNLSQNMQQQELTMPHNVQTSAQIQDQLLAQPNHRNQQYLQMMQGYATQMGEYYQQQLYYLQAQHNQQMQSLQQQQLPTEHLQQTFMQQVQQLNQQLVLWQQQVQQQPQVVLQQALPVQQLPDEKQGQCPSGDSKHGQNKQQQQAPQMDQQSQQLQQQQLLYLQQQQQMYLIQQQQMYQQQQAQQQQLLQQQLMQQQQYVLQMPQHQQDSVRQQQQQLFEQQQQQMMLLQRQQQHIMQQQIQPYVQQQQNQQGPKDQTYKSNHQDGRNRQMEHGQLSEASQSDGSKLRSGEQSELSYPSTPQSERSNH

SEQ ID NO: 45583 - protein, 297 aa, Zea Mays
MSNGHADGTHGARVKPRSSNADDRRLLGSASQNGRVSCSSVDGALEYSMVVAAPSTPPQAAEGGGDMEETKKIDCMVQLHDSPQAVMRSVCLRDMGTEMTPIASKEPSRTPTPRRACTPVALSPMASRSSTPVRRRQEGPVGVTTAIVAGTLTEQVAAADEVACVGDERPVAGHVPSVNSLESRAAAWDEAERAKFMARYKREEVKIQAWENHEKRKAETKMKKMQMKADQMKARGQEELSNRLATTRRMAEEKRASAEAKLNERAARTSEKANYIRRTGHLPSSFKISCLCGSSFE

SEQ ID NO: 45584 - protein, 654 aa, Zea Mays
MATAPLAFRLPFPFSFPSASRPPPSRILAPPTPRRLPLRLAAAAARRFRPPTADDEPPEAAEDSSHGLTRYDQLARSVERARIRQPEITPDNPLFSSPSTAGGGGGGSYDPDDEFFDEIDRAIAEKREEFTRRGLIKPSPASPPPSQSQPEDEDLTDELSPEEVIDLDEIRKLQGLSVVSVADEEDEEVEGGEDEDDGLPLDEDGEGFDVAEELGLEGARMRQPAFRMTLAELLDESKLVPVAVTGDQDVALAGVQRDASLVAAGDLFVCVGEDGLAGLTEADKRGAVAVVADQDLNIEGTLACRALVIVDDILTALRVLPACLYSRPSMNMAIIGVTGTDGVTTTTHLVKAMYEAMGVRTGLVGVLGTYAFSSNKLDARPDASSDPIAAQKLMATMLHNGTEAVVLEKGTDGMPPSGVDSEIDYDIAVLTNVRHTDEENGMTYEEYMSRMASLFSRMVDPERHRKVVNIDDPSAPFFAAQGGHDVPVVTYSFENKKADVHTLKYQLSLFETEVLVQTPHGILEISSGLLGRDNIYSILATVAVGIAVGAPLEDIVRGIEEVDAIPGRCELIDEEQAFGVIVDHARTPEALSRLLDGVRELGPRRIVTVVGCCGEKERGKRPVMTKIAADKSDVVMLTSDNPANEDPCYHWQRE

SEQ ID NO: 45585 - protein, 81 aa, Zea Mays
MGHGVRGDAAFCSEDCRDEQKDMDEALHAAARRHRLLRSPSASSSSQAAAEAAASTRPPPVMRRRPTIANLAARNPPVAAS

SEQ ID NO: 45586 - protein, 121 aa, Zea Mays
MGVGYPLDIVVCSALGADMYDCVYPTRTARFGTALVPEGVLKLKHNSMATDERPIDHTCSCMVCKKYTRAYLHCLVTKDAMGSQLLSYHNLSFMMRLSRDLHMSILEGRFPEYALIKPKFV

SEQ ID NO: 45587 - protein, 261 aa, Zea Mays
MYHEELSHRISSELSGNHKKAMSLWILDPAGRDATVLREALNGDTMDLRAATEIICSRTPSQLQIMKQTYYARFGTYLEHDIAHHTSGDHQKLLLAYMGIPRYEGPEVDPTIVTHDAKDLYKAGEKRLGTDEKIFIRVFTERSWAHLASVSSAYHHMYDRKLEKVIKSETSGNFEFALLTILRCAENPAKYFAKLLRKAMKGLGTDDMTLIRVVVTRTEIDMQYIKAEYLKKYKKPLAEAINSETSGNYRTFLLSLVGHGH

SEQ ID NO: 45588 - protein, 101 aa, Zea Mays
MRRNISPVSTSPACFFCSVAWLCSRWIVPAASRMMSTCEPWRGYVVVCSGSVLLSSRSLFICTNSSICVGCRNTKTLQMVRIGIWKVQSIDRWISCFYCLA

SEQ ID NO: 45589 - protein, 118 aa, Zea Mays
MAIYRSNGDAGSVAFVVVSYLDLVALFACLRYYEQLDQQHSQKRARVKAGVWSLTTLLTIMFSYKVAEIMPLPVKLVVWSMAAATTCGGFYAFFVHSEKPVMPAVAPRPAAAKDAASN

SEQ ID NO: 45590 - protein, 476 aa, Zea Mays
MDGVRCMESPAAGDAPHSSFRTLGPTLLVSMGYLDFGKWLVAVEAGSRFGYDLVLLVLLFNLSAILCQYLSSCIGIVTKKNLAEICHQEYDQKICVVLGLQAGLSLLTSEFTMIAGIVVGFNLVFESNNPITVVCFTSVVVNLLPYTLSLLDKRKAGMFNAYASGFTLVCFVLGLLVSHPKTPVNTNVMFPKLSGESAYSLMVLLGTNIIVHNFYTHSSVVQVQRRFQGHTLGTLFHDHLFSVLFAFSGIFLVNYILMSSAVDESKNTMAINFQDARQLMNQVFTSPVAPIVLLVVLLFSGHIVSMTCIIGSDVISEDLFGIKLPLFVHHLLPKVFAMITTIYHAKVVGFEGLYQLLMVCPIIQAMLLPSSVIPVFRISSSRSLMGRYRISRCVEILCFLAFLLTLFTNIIFVAEVLFGDSTWTNDLKGNTENPILLPYIVVVLISCGSIGFALFLAVTPLKSACNEAERALSVHS

SEQ ID NO: 45591 - protein, 265 aa, Zea Mays
MGISQDTHESMATDAANYLCHQLQHLLGPISSATSQSGPWEERSVMVRLTQKLQKSKRNKWWRQRRRKHVAELFQKERADYDRVDQEADEWRAKQIAKDIAKRRVESMQQIARKKTNEERKRLESETGNALGDSDTEPRNTKYMSLGDDRSLCMECLGSAVMDTGECQPLYHSIRDYYEGMKMKLDQQIPMLLVEQQALNEAMEGESRGPHHMPETRGLCLSEEQTVSSILRRPRIGGNRLLDMRTQPQKLTRRCELRCPSGSRL

SEQ ID NO: 45592 - protein, 192 aa, Zea Mays
MEPRNTKYMSLGDDRSLCMECLGSAVMDTGECQPLYHSIRDYYEGMKMKLDQQIPMLLVEQQALNEAMEGESRGPHHMPETRGLCLSEEQTVSSILRRPRIGGNRLLDMRTQPQKLTRRCELRVIPLVSVPVGQGYDLTETCAGAAFTEWDDTTCCYVKDSGSHQVTPSPHVDFADRCLNSSGRATNNNLMS

SEQ ID NO: 45593 - protein, 214 aa, Zea Mays
MEFGTARQYDTTDLDEALQRESFEALNPRAVAVVIDPIQKRTIDFRFWLLNPYGLWSPRHSQSDVSSSEMEFGTARQYDTTDLDEALQREQTHLIDVLCGYHALFAWVPPPLRGLYIEPPTCPTPCRHRVVSGASVASNPNKEELRPDMGGRVVSGSAEHPPVVSSFPINQWLSKVLCVISSTHELPGTEIVGRIDAFIAVMAHTHVIANGPIS

SEQ ID NO: 45594 - protein, 159 aa, Zea Mays
MDSELEKNKTMDGDVGNSRSYGDPVASALNSTNFNIEEEKDNDFKRTSRPKNRFVITFLHNLVGFYYNLDACFALDAVTRCPYLGCKDATKMMLDVKEIFTCQIQVELPKTNPVYLMLRTSFGFSAKGTGLKALEFALSICDSFDMYGFTVDPGYKECW

SEQ ID NO: 45595 - protein, 184 aa, Zea Mays
MVQSLKGILADRSEGEIYATLCDCGMDPDIAVERLISQTPAQLRWSLTKQEWLLATGLTGLLNPYGLWSPRHSQSDVSSSEMEFGTARQYDTTDLDEALQRESFEALNPRAVAVVIDPIQKRTIDFRFWLLNPYGLWSPRHSQSDVSSSEMEFGTARQYDTTDLDEALQRESRPPAPHHVVTEL

SEQ ID NO: 45596 - protein, 203 aa, Zea Mays
MLRNKKKEALIVKTTIHDIMNQMIRELPKTNPVYLMLRTSFGFSAKGTGLKALEFALSICDSFDMYGFTVDPGYKECSVLTAEVIFQDKVLLRENHVQLVKIHSPMQGDPGRTVRWLPTKATIEAARVASEKLLKRPGAGSDDPLGTCTMIKKRRKGKAPNRSGLRDAAMKHLEDMKGATRYPLERNAGGGYLCMINDRYDRG

SEQ ID NO: 45597 - protein, 488 aa, Zea Mays
MGIQGNKAATHEHDFLSLYAAAAAAAAAKDAPLLLHDSKTPPPSQGNFLLKTHDFLQPFDQKPGAPPEPSPLPAPAAEIRHRQQVAVAKQRALPLPLPGGVGTFSISPAPVSVALPSAVVKSEPPPFVLWGQPAATLQPGARGHQQQWALPFAGSLQVSPPPQQAQPDRKGRGGGGVMDSGSRSSGGAGFDDEDGLTTRREVSSSLQADLAVRVDWKGGSCSDGGTNQGPNTPRSKHSATEQRRRSKINDRFQILRELLPHNDQKRDKATFLLEVIEYIRFLQEKAQKYEATFPEWNQENPTMLPWSNMYFRSFWKNAQSKGQIPGDSPPDPSHFVRNGSSPGSNFTGKLDDNHTSAAASGALDQAETNHVASGCYRSSETPANITNNAISQSQPQWTGPSPVDDSAVKSEMLNSQELAIDEGMISVSSTYSQELLISLSHALQSSGVDLSQTSISVQINLGKRAGKRSASAGGVSSNSKPIQHLVTN

SEQ ID NO: 45598 - protein, 251 aa, Zea Mays
MATSTEPEGAPPAAKGPKGEANTKGSNEHREVGAGSGGGSQKRKRKEVFIYGNYRNYYGYRIDRNVGEDPRLEAFKKQWFEKKDCLDIGCNQGLVTIGLAMKFKCQSILGVDIDSGLIETAKWNLRRIMRQDKVATNNVKAQKSSDSPQSSPEELASELSNGNKHQDLFKIVSFRRENFVASMDGCSEQYDTILCLSVTKWIHLNWGDDGLVTLFVKIWRLLRPGGVFIMEPQPWSSYKRNRLVSEARGNS

SEQ ID NO: 45599 - protein, 507 aa, Zea Mays
MYTDISPENAIIQGQRKMSKGVDYLVEASAAEAEAISATLAAVKARQVNGEMEHSPDREQSPDAAPSTKQNSSLIKPDVALVNNSTAPPGVRLHHRAVVVAAETGGALGGMVRQLSIDQFENEGRRVIYGTPENATAARKLLDRQMSINSVPKKVIASLLKPRGWKPPVRRQFFLDCNEIADLCDSAERIFSSEPSVLQLKAPIKIFGDLHGQFGDLMRLFDEYGAPSTAGDIAYIDYLFLGDYVDRGQHSLETISLLLALKVEYPHNVHLIRGNHEAADINALFGFRIECIERMGERDGIWTWHRVNRLFNWLPLAALIEKKIICMHGGIGRSINHIEQIENLQRPITMEAGSVVLMDLLWSDPTENDSVEGLRPNARGPGLVTFGPDRVMEFCNNNDLQLIVRAHECVMDGFERFAQGHLITLFSATNYCGTANNAGAILVLGRDLVVVPKLIHPLPPAITSPETSPEHHIEDTWMQELNANRPPTPTRGRPQAPNNDRGSLAWI

SEQ ID NO: 45600 - protein, 298 aa, Zea Mays
MYPHEQSSGMETWVPQQQPAVLQGTEEEPTSYESDATAGQEPETLTAADYLRELDQLREKSSDVDKMSFQDEHASCLATCSTGDIEDDPYPASYSDDMEGIGEDSGAFTSCVGTRWFRAPELLYGSTNYGLEIDLWSLGCILAELMKLEALFPGISDIDQISRIINVLGDITEETFPGCSNLPDYNKISFNKVEKPTGLEACLPNRSPTEVSIIKQLICYDTAKRTSAVDLLNDRYFTEEPLPAPIEGLHVPASKDEDDDSSTEEWGNYRDGVSRVDFDEFGSMDATKTEKGFSIQFS

SEQ ID NO: 45601 - protein, 336 aa, Zea Mays
MARTDSLPSKRLAVGGYEWEVHYTPSLLVDGSYMIAFRLVLLGAPRRNDVKAAFRCRLLYPSTNYGHQRGACVSDSMGNVEGQMSHAFKRAKESSGWIPLRKRNVVEAARVIENDSLTAECTITVVTELPEPDTAKTNAVLPRIRRLTGVHSLHHDLGELLGKGTGSDVVLVVCGESFAAHKAILASRSPVFMAQFFGPMKETHSQSQRVEIMDMEAAVFGAMLRFMYTDVVPELERQENGDVIAQHLLAAADRYGLDKLKSMCEDKLCGGTTVETAATTLALAEQHGCPKLKAWCVEFIAANLDAVMVTEGYKHLMTSSPLVLNDLLRAVRGTKN

SEQ ID NO: 45602 - protein, 121 aa, Zea Mays
MGCFGCFAPEADEDLRPSKHDDSSGADARRKVAPDVASGYAHSFTFKDLLVATGYFNEANFIGEGGFGKVYKGKINGQQLARDARDGVLGRGAHADGAQPSQPCQLGRVLRVDERLLPAGL

SEQ ID NO: 45603 - protein, 157 aa, Zea Mays
MLAGKPMASGGVTDQVTSPGGNTVHTLKGKSGDKFEFKAPKGGMYKFCFHNPYGAPETVSFYIHVGHIPNEHNLAKDEHLDPINVKIAELKEVLESVTAEQKYLKAREARHRHTNESTRKRVMFYTMAEYIAFVAASTLQVLYIRRMFSKNVGYNRV

SEQ ID NO: 45604 - protein, 514 aa, Zea Mays
MVETHRSSTAAAGKRTSPSPSSSSVPPPKRPKAESLGSPTASAPGRAEEDSVAGAAPARSAGSVDDAAAVAQKGGATFGHFGGPMVKESISRLPLLQRVQSGGRSRSNSNPQCHGRSCSRSAHRFVDEVGAATELTQATSISRRERELLLEDNPSGLTTILKGPLKADYCFSHNHLHLMVTLSRTSPDAQIYGTEAGLIMLLSHVCENLIRNLKTGKVDQTLSLSGGKTTCIACQPTLPILVTALDDRIVCFWDASIYRLEEKVKIMGSYALELVFIADINGSASSRVPLLSVVTRRCHGILGLGKVYKTVVRPPVFHKQPHTAAKVLQQLAIEDGVTLVLEFMKGTMYDIWDEFRDQIDHVTTLMGGSMSFSLPVIQIENTSQFSPWIYKQLFPRSRFENQIKQHIDNRAAMAKEIKSTEDEGYDDYSYEVFFRRRLFDFIVMWNATSIRNVETRALDPSAAIEETSSFLELIAIRYHQARRGEQGPPLRLLLRQAAAAEGVGEEGQGRGGGT

SEQ ID NO: 45605 - protein, 568 aa, Zea Mays
MARRHGWQLPAHTLQVVAITVYSVLCIAFYAFFSPFLGKDLYQYIAVGIYSFLALSVLILYVRCTAIDPADSGILISMDDILIYKSEAHVDTQDEAGKPGLRNDEDIRKHKSCFGRVCFCCAIFTTGDCRGGDEANHQEDYGEEALFCTLCNAEVRKHSKHCRSCDKCVDGFDHHCRWLNNCVGRKNYITFLCLMAVSLAWLAAECGVGIAVFVRCFTDKTVIEDQIGEKLGYGLSRAPFATIVALATALSMLASVPLGELFFFHMILIRKGITTYEYVVAMRAQSEPPGPSVNDDQQSLASSPMSSAPTAFSGSSFARHYKGAWCTPPRIFIDQDEIIPHLEPGRVPSTVDPDTTDPMERTKTHPKRPVRISAWKLAKLDSNEAMKAAAKARASSSVLKPINTRNQYEADSDSLSSRNSVISADTGHHRYPRSCGNSQYKPSYPPSRASADDIELYPQTPSSFQSNSRTSTPIAEHHPSKHFNPIYQTSANRSPFSAKASVSEAPVSEITNAGRSYPPPQADRSSRSSVYWDQEAGRSRSKKLQRSWWLEPKVCRASVAPAPGVRSQ

SEQ ID NO: 45606 - protein, 611 aa, Zea Mays
MARRHGWQLPAHTLQVVAITVYSVLCIAFYAFFSPFLGKDLYQYIAVGIYSFLALSVLILYVRCTAIDPADSGILISMDDILIYKSEDTQDEAGKPGLRNDEDIRKHKSCFGRVCFCCAIFTTGDCRGGDEANHQEDYGEEALFCTLCNAEVRKHSKHCRSCDKCVDGFDHHCRWLNNCVGRKNYITFLCLMAVSLAWLAAECGVGIAVFVRCFTDKTVIEDQIGEKLGYGLSRAPFATIVALATALSMLASVPLGELFFFHMILIRKGITTYEYVVAMRAQSEPPGPSVNDDQQSLASSPMSSAPTAFSGSSFARHYKGAWCTPPRIFIDQDEIIPHLEPGRVPSTVDPDTTDPMERTKTHPKRPVRISAWKLAKLDSNEAMKAAAKARASSSVLKPINTRNQYEADSDSLSSRNSVISADTGHHRYPRSCGNSQYKPSYPPSRASADDIELYPQTPSSFQSNSRTSTPIAEHHPSKHFNPIYQTSANRSPFSAKASVSEAPVSEITNAGRSYPPPQADRSSRSSVYWDQEAGRFVSAQANQGSSSRPAYPDLLYTGQNIFFGGPLIADPAARSFRDPGGSSQRSAGPRSHQLPVFVPSDPQKDQLSRLP

SEQ ID NO: 45607 - protein, 498 aa, Zea Mays
MASSVSAAAKAAAAFAHKVQKELAAPAQRRAGLTRRTKPCSVRAVASPARALSSTGSVKSAMTMTEKILARASERAALEPGENVWVDVDVLMTHDVCGPGAFDIFKKEFGEDARVWDREKLVVIPDHYIFTSDGRAKRNVDILRDFCAEQNIKYFYDIKDLSDFRANPDYKGVCHIALAQEGHCRPGEVLLGTDSHTCNAGAFGQFATGIGNTDAGFVLGTGKALLKVPPTIRFILDGEMPPYLLAKDLILQIIGEISVSGATYKSMEFVGSTVESLTMEERMTLCNMVIEAGGKNGVVPADETTFKYLEGKTSVDYEPVYSDAQARFFSDYRFDVSKLEPVVAKPHSPDNRAPARECKDVKIDRVYIGSCTGGKTEDFLAAAKVFLASGKKVKVPTFLVPATQKVWLDIYSLPVPGSGGKTCSQIFEEAGCDTPASPNCGACLGGPRDTYARMNEPTVCVSTTNRNFPGRMGHKEGQIYLASPYTAAASALTGHVLR

SEQ ID NO: 45608 - protein, 668 aa, Zea Mays
MKYCLPNGDSGIIKTLDVPIYITRVVGNNIFCLDRDGKNKLIAVDASEYIFKLALLRKRYDHVMSMIKNSQLCGQAVISYLQQKGFPEVALHFVKDEKTRFNLALESGNIQIAVASAKEIDDKDHWYKLGIEALRQGNVGIVEYAYQRTKNFERLAFLYLITGYLDKVGFMCKIAGQNNNLMGQFHNALYLGDAKKRVEILENAGQLPLAYVTAVTHGLTEIAERIASELGENVPSLPEGKSHSLLIPPAPLTACGDWPLLRVVRGIFEGGLDATGRADLEEDDEAAGADWGDEDLDIVDVSEVVANGGDGVDVEEGEPNEEDGEEGGWDLEDLELPPETETPKAVGNARSALFVAPTPGIPVSQIWTQRSSLAGEQAAAGNFDTAMRLLSRQLGIKNFVPLKPLFIDLHMGSHTYMCAFAAAPVISVAVEKGWNESASPNVRGPPALVFSFSQMEDRLKAAYKATTEGKFPEALRQFLSILHTIPVIVVDSRREVDEVKELIEIVREYVLGLRMELKRKELRDDVTRQQELAAYFTNCKLQRVHMRLVLASAMALCFKQKNYATAAHFARMLLENSPQEAQAKKARQVLQACQDKDDSHQLNYDFRNPFVVCGATYVPIYRGQKDVSCPYCGSRFVPSIEGQLCTICELGAVGADASGLLCSPTQSR

SEQ ID NO: 45609 - protein, 122 aa, Zea Mays
MSDEGGTGEPLSDSQKREIAVWFLSNAPAGEIHYVAKDVRALLGDDAVYEAAAAEAFPEYNKARLVSLELPDRSGDIIITAYGEIDKNNYLDPRTAQVASIDHMKQALLLLLPSHDKRLVRN

SEQ ID NO: 45610 - protein, 457 aa, Zea Mays
MYLRRHHLPSSCRQYAPNSLPHVCPVLRSDRERSCSHLGVVEGPRLSPSSRLTVITPGFHALFIEAMVRTFTRCSERTISKLEELTESEGREQNSTIVDLEAEFSNLALDIIGLGVFNFDFDSVTKESPVIKAVYGTLFEAEHRSTFYIPYWNLPLTKWIVPRQRKFHSDLKVINNCLDNLIKNAKETRQEADVEKLQQRDYSSLKDASLLRFLVDMRGADADDRQLRDDLMTMLIAGHETTAAVLTWSVFLLAQSPTRMRKAQAEVDSVLSNGAITVESLKKLEYIKLIILEALRLYPQPPLLIRRSLRPDKLPGGCNGAKEGYEIPAGTDIFVSVYNLHRSPYFWDRPNEFEPERFSVPKKDESIEGWSGFDPDRSPGAMYPNEIIADFAFLPFGGGPRKCVGDQFALLESTVALALLLRKFDVELRGSPDEVEMVTGATIHTKNGLWCRLRRRT

SEQ ID NO: 45611 - protein, 536 aa, Zea Mays
MAAATLLQGPAAASPRLGAAASAPSASHGRRRLTFSFRCQSTSVDKQQERPPKPKQRNLLDNASNLLTNFLSGGNLGAMPVAEGAVTDLFGKPLFFSLYDWFLEGVLAEILKPIMGKGLIPADLDTWKQRRKVITPGFHALFIEAMVRTFTRCSERTISKLEELTESEGREQNSTIVDLEAEFSNLALDIIGLGVFNFDFDSVTKESPVIKAVYGTLFEAEHRSTFYIPYWNLPLTKWIVPRQRKFHSDLKVINNCLDNLIKNAKETRQEADVEKLQQRDYSSLKDASLLRFLVDMRGADADDRQLRDDLMTMLIAGHETTAAVLTWSVFLLAQSPTRMRKAQAEVDSVLSNGAITVESLKKLEYIKLIILEALRLYPQPPLLIRRSLRPDKLPGGCNGAKEGYEIPAGTDIFVSVYNLHRSPYFWDRPNEFEPERFSVPKKDESIEGWSGFDPDRSPGAMYPNEIIADFAFLPFGGGPRKCVGDQFALLESTVALALLLRKFDVELRGSPDEVEMVTGATIHTKNGLWCRLRRRT

SEQ ID NO: 45612 - protein, 362 aa, Zea Mays
MAAATLLQGPAAASPRLGAAASAPSASHGRRRLTFSFRCQSTSVDKQQERPPKPKQRNLLDNASNLLTNFLSGGNLGAMPVAEGAVTDLFGKPLFFSLYDWFLEHGSVYKLAFGPKSFVVVSDPIVARHILRENAFYYDKGVLAEILKPIMGKGLIPADLDTWKQRRKVITPGFHALFIEAMVRTFTRCSERTISKLEELTESEGREQNSTIVDLEAEFSNLALDIIGLGVFNFDFDSVTKESPVIKAVYGTLFEAEHRSTFYIPYWNLPLTKWIVPRQRKFHSDLKVINNCLDNLIKNAKETRQEADVEKLQQRDYSSLKDASLLRFLVDMRGADADDRQLRDDLMTMLIAGHETTAAVLT

SEQ ID NO: 45613 - protein, 80 aa, Zea Mays
MGTLSTGKDEPVNVDPSVDETKVSTMNSRSRVAVFKDTEKDRSDPDYDRNYKSLCSMTLVMCNLLACPQTSILCTLASLI

SEQ ID NO: 45614 - protein, 146 aa, Zea Mays
MGTLSTGKDEPVNVDPSVDETKVSTMNSRSRVAVFKDTEKDRSDPDYDRNYKRYVRSSVPGFNLSPGVFNFVVPQFMQYDIGYVQSPGMSTNQHTMYFGQPDLTIGSSGAAVYRHWPTPTMMYPHCYDNVSPMMSQVPLYQSFNHD

SEQ ID NO: 45615 - protein, 609 aa, Zea Mays
MSCRGRATAALILDYGFDRLGVDSEVGHPILMTECECNPSFSRARMSELLFETYGVPSIAFGIDNAFSYKYNQKLGNCNEDGLAISCEHGTCHVVPDRPGAVVRSLPTEPKYHFTLNRASISWEKAEELKKEHCYIAPDYMAELQIFKNNKEEADEKMRYWQLPWVPPPKEEPPSEEELARKAALKEKAGQRLRDMAAAKRSQKIVELEKQLSYLEELMEQLDEAEEEEATAILGSSGYLSQQEIRSAILKASQSLRKAKGESNGNDEKTDASAVDKYPLVSVPDETLTPEQLKEKKKQILLKTTTEGKLRAKQKRAEEEALREKQEEKRRAENPELYLEELRARYSELSDKFEQRKRQKVNGSQTNGNHSSSAGVGRGERLNAAQKERMRLLASAAFDRGKGEDTFGMRDEDWLVYNKMSKDNDDDSNDDDESELVRISSKLQEIDPTFVSKSEAVQLTPEPPKVRPLTAEDYRIAIGIERFRCPEVLFQPGMIGIDQAGIDEMVSISLRRLMEDESVKERLCQSILVTGGSSLFPGMIPRLESGIRQYRPYLAPLKLVGAADPILDAWRGAAAFAASSKFGKQTFSLADYGEHGENLFHRYNIVYSL

SEQ ID NO: 45616 - protein, 469 aa, Zea Mays
MAELQIFKNNKEEADEKMRYWQLPWVPPPKEEPPSEEELARKAALKEKAGQRLRDMAAAKRSQKIVELEKQLSYLEELMEQLDEAEEEEATAILGSSGYLSQQEIRSAILKASQSLRKAKGESNGNDEKTDASAVDKYPLVSVPDETLTPEQLKEKKKQILLKTTTEGKLRAKQKRAEEEALREKQEEKRRAENPELYLEELRARYSELSDKFEQRKRQKVNGSQTNGNHSSSAGVGRGERLNAAQKERMRLLASAAFDRGKGEDTFGMRDEDWLVYNKMSKDNDDDSNDDDESELVRISSKLQEIDPTFVSKSEAVQLTPEPPKVRPLTAEDYRIAIGIERFRCPEVLFQPGMIGIDQAGIDEMVSISLRRLMEDESVKERLCQSILVTGGSSLFPGMIPRLESGIRQYRPYLAPLKLVGAADPILDAWRGAAAFAASSKFGKQTFSLADYGEHGENLFHRYNIVYSL

SEQ ID NO: 45617 - protein, 804 aa, Zea Mays
MELDLIKQYSQVERIFADRVSKADGDDLVPEYLVKWQGLPYAESTWEKDTDIDFAQDAIDEYKAREAATSILGKTVDFQRKKSKASLRRLDDQPEWLKAGKLRDYQLEGLNFLVNGWRNDTNVILADEMGLGKTIQSVSMLGFLHNAQEINGPFLVVVPLSTLSNWAKEFRKWLPNMNVVIYVGNRASREMCQKHEFFSDKKGGRHVKFHTLITTYEVILKDKAVLSKIKWNYLMVDEAHRLKNCEASLYTTLLEFSTKNKLLITGTPLQNSVEELWALLHFLDPVKFNSKDSFVERYKNLSSFNETELANLHKELRPHILRRVIKDVEKSLPPKIERILRVEMSPLQKQYYKWILERNFQNLNKGVRGNQVSLLNIVVELKKCCNHPFLFESADHGYGGDSIGDRNKVERIVMSSGKLVLLDKLLVRLRETNHRVLIFSQMVKMLDILAEYLSLRGFQFQRLDGSTRADLRHQAMEHFNAPGSDDFCFLLSTRAGGLGINLATADTVIIFDSDWNPQNDLQAMSRAHRIGQQETVNIYRFVTCKSVEEDILERAKKKMVLDHLVIQKLNAEGRLEKKESKKGGSIFDKNELSAILRFGAEELFKEDKTDEEAKRNLESLDIDEILERAEKVETKGGEGEEGNELLSAFKACDVANFSSGEDDATFWSRLIQPDPADIIQETLAPRAARNKKSYVEDPQFDKNNNRKRRAVEAQEKPRRRSGRTVETVNSVPLVDGAVAQVREWSFGNIPKKDASRFVRAVKKFGNATQIDLIVDDVGGVLEKAPHEAQIELFDLLIDGCQKSC

SEQ ID NO: 45618 - protein, 1624 aa, Zea Mays
MAFFSNSGSKADSGGYNLNEKAEDEGIYESVQDGNVDLSSRQWNLNEKADDAYHCEAEQYEAGQSGLYSSEKASGQHIQKGGRSSGGPWGTNFLKDSRSKQMAEDVPSNSGRGMNAASLHDGLDDSGEDDELNRANGEVPAEEMLSDDYYEQDGEEQIESLHRGGTKQSSCSTSEDDPADVDFEPDSETDKATDKDKFMDSENSDGDDDDGLELSDDDDDFVENRRQPKRLKIVATKTSKGRKLPMPAQRKRGVSHSDEEYSSGKDSDLPSDADFKHRSKRPDRLHQKSVGRSDVAPINSHNELRTSGRRTVKKISYVESEESDDSEEKSTKQQKEELEEEDGETIEKVLWHQPKGVAEEAIKNHQSAQPTVVSLTSDFDQQWDELEFYIKWKGQSYLHCQWKTLSELQSVSGFKKVINYTKRVAEEQRYKRALSREEVEVHDVGKEMELDLIKQYSQVERIFADRVSKADGDDLVPEYLVKWQGLPYAESTWEKDTDIDFAQDAIDEYKAREAATSILGKTVDFQRKKSKASLRRLDDQPEWLKAGKLRDYQLEGLNFLVNGWRNDTNVILADEMGLGKTIQSVSMLGFLHNAQEINGPFLVVVPLSTLSNWAKEFRKWLPNMNVVIYVGNRASREMCQKHEFFSDKKGGRHVKFHTLITTYEVILKDKAVLSKIKWNYLMVDEAHRLKNCEASLYTTLLEFSTKNKLLITGTPLQNSVEELWALLHFLDPVKFNSKDSFVERYKNLSSFNETELANLHKELRPHILRRVIKDVEKSLPPKIERILRVEMSPLQKQYYKWILERNFQNLNKGVRGNQVSLLNIVVELKKCCNHPFLFESADHGYGGDSIGDRNKVERIVMSSGKLVLLDKLLMVKMLDILAEYLSLRGFQFQRLDGSTRADLRHQAMEHFNAPGSDDFCFLLSTRAGGLGINLATADTVIIFDSDWNPQNDLQAMSRAHRIGQQETVNIYRFVTCKSVEEDILERAKKKMVLDHLVIQKLNAEGRLEKKESKKGGSIFDKNELSAILRFGAEELFKEDKTDEEAKRNLESLDIDEILERAEKVETKGGEGEEGNELLSAFKVANFSSGEDDATFWSRLIQPDPADIIQETLAPRAARNKKSYVEDPQFDKNNNRKRRAVEAQEKPRRRSGRTVETVNSVPLVDGAVAQVREWSFGNIPKKDASRFVRAGTVLDFFGVAVKAYELLARVEELQLLSKRIARYKDPIKQYRIQLPYKKPQWSASCGWTETDDARLMVGIHWYGYGNWEKIRLDPKLGLTTKIAPATLGERETFLPRAPNLDNRASALLQKEYAKFSGNSSKVKGNARQTVNNDSNSGARSMRGRQKDAPDKEDNKPNKDDIQKRKVMMEAEAREEGEISESEAETKYRLDKEEKWLEWCSEVLNEEQETLKRLDRLQNTSVNLPKEKVLSRIRKYLLIIGDKIGEVVRQHSESYRQSRKCSRTSRMTMRLWNYVATFSNMSGEQLHDLYLKLSQDQLEGGVGPSHGANFTSIPSSKGGNSNQLHPTRNHRPTRSLQYNSESLHNNESSGSSEAWKRRRRADPDNQFDTQPLYQPPIMTNGNRLQESSSSAGILGWGPVEMRRYGNERPKRGVHPSHFPTGHGPLL

SEQ ID NO: 45619 - protein, 733 aa, Zea Mays
MPHSVLARLPPGSVRLVAAFGLLLLVSLLVLHRRPGRPHVAAAAASDRLTDPSRSRLFLSQSPGANASIAADLRALTAGPHLAGTPASAGAAAHVLARLRAAGLQTLTREYEPLLSYPGHASLALLRPDGSLLARLSLEEPADEGRRVVPPYHAYAPSGGAVAEAVFVNLGREEDYVVLERLGVGVRGRVAVARRGGGYRGGVVARAADKGAVAVLIAGNADGGVERGVVLLGGPGDPLTPGWAATSGAERLKFDDKAVKQRFPSIPSMPVSAKTAAAIIRSLGGPAIPAEWKDGLGVDTGGLGPGPTLVNFTYQEDRKFYKIRDIFGIIKGQEEPDRYVILGNHRDAWTYGAVDPNSGTAALLDIARRLGIMLQSGWKPRRSIILCSWDGEEFGMIGSTEWVEDNLEDLHSKAVAYLNVDCAVQGVGFFAGSTPQLDKLLVDITRQVRDPDVTGKMVHDTWNEMSGGIKIERLARTDSDFAPFLHHAGIPSVDLYYGEEFPGYHTALDTYNWMEKHGDPFFLRHLAITEIWGLLALRLANDPVLPFDYQAYTSQLQEHIKTLSALTSNGHAVNLMNGCVNDLSGAAMEVLKEMKKWCLKLADDVLLCMFGFKIQKLQQMDLYDEHARMRRRLLNDRLLLAERSFLQPEGLQGRGWFKHLLYSPPEDYESKLSFFPGIADAISRSANLSDKEQEVAMQHEVWKVCRAIQRAASVLRGEFSEQKPTNFSSLVTP

SEQ ID NO: 45620 - protein, 538 aa, Zea Mays
MPHSVLARLPPGSVRLVAAFGLLLLVSLLVLHRRPGRPHVAAAAASDRLTDPSRSRLFLSQSPGANASIAADLRALTAGPHLAGTPASAGAAAHVLARLRAAGLQTLTREYEPLLSYPGHASLALLRPDGSLLARLSLEEPADEGRRVVPPYHAYAPSGGAVAEAVFVNLGREEDYVVLERLGVGVRGRVAVARRGGGYRGGVVARAADKGAVAVLIAGNADGGVERGVVLLGGPGDPLTPGWAATSGAERLKFDDKAVKQRFPSIPSMPVSAKTAAAIIRSLGGPAIPAEWKDGLGVDTGGLGPGPTLVNFTYQEDRKFYKIRDIFGIIKGQEEPDRYVILGNHRDAWTYGAVDPNSGTAALLDIARRLGIMLQSGWKPRRSIILCSWDGEEFGMIGSTEWVEDNLEDLHSKAVAYLNVDCAVQGVGFFAGSTPQLDKLLVDITRQVRDPDVTGKMVHDTWNEMSGGIKIERLARTDSDFAPFLHHAGIPSVDLYYGEVLMQNFLVTILLLTLIIGWKSMAIHSFFVIWLSQKFGDY

SEQ ID NO: 45621 - protein, 339 aa, Zea Mays
MSGPLNSNISGGPSNLRDSTGRPFTSSFSGQSGSLPGFHHSGSHNIHGNLNLANISGSLAPRNNSMAGIPSAGVQQPSGGISSGRFPPNNLQASLSQIPHGHSGISNRGGMNVGGNPGFGSSMNAIGGSIQGLSSNLANVGNRNSAPGLAASPVLGNLGPRIASSGNILGGSNIGRSISSGGLSMPGIASRMNLSGNSGSGAINIQGSNRIGMLQQASPQFMNLLGSSYPTPGGSLSQNQVQSGSGSLGSSGMLYEGSSGDNAPFDINDFPQLTGRPNSAGGGQGQYGSLRKHGVSVNAIVQQNQEFSIQNEDFPALPGNKVPQIILWIFITRTTFKRI

SEQ ID NO: 45622 - protein, 144 aa, Zea Mays
MEALNVPLADTPVVTFWEGEIVDAKNYTFFTGKWEASPEDDIRHWSKFPSFTPLLGQIETDGGKSLDFSNYPYIFMRWKEQYFVNVGVDCGLTIAGFYYVCFSCSDGSISGFYYDPNSSPFQKLELKCTNEKKSGFTFSSYELQ

SEQ ID NO: 45623 - protein, 218 aa, Zea Mays
MPVRVVDTATPSSQPSPGQEANTGHPSPPSCSLLSAGRSFAGTQNVSSLQKDEAWKVNVRIHGCDLDQGYLCGTMEALNVPLADTPVVTFWEGEIVDAKNYTFFTGKWEASPEDDIRHWSKFPSFTPLLGQIETDGGKSLDFSNYPYIFMRWKEQYFVNVGVDCGLTIAGFYYVCFSCSDGSISGFYYDPNSSPFQKLELKCTNEKKSGFTFSSYELQ

SEQ ID NO: 45624 - protein, 149 aa, Zea Mays
MPGARGTSHSPQFPHFICVVAEDWEGPTQPFFFVCVKDRERRSTNRAVSLPCVFPLSCGLRWPQLRRAVMEFTSKKTASLALLCLKLSCLLLLLLLPRSSSAAPLSRSLSLTRNRLQPADDPAPEVPAPAQQVGRARSLARSLSRPAAW

SEQ ID NO: 45625 - protein, 789 aa, Zea Mays
MMHCLEGSELTGLTLFFPVGAKVHHSTVNPQRVNEYRKKVRAEVEEKLDEYVLVCRRQKVSCQKVVIEMDDAVRGLEQLITLHGVAKLVMGAAADKHYSKKMKSLKSKTALRLTEVAAPSCKIWFTCKGRLICTREANTTVPAMPPPSPALTSASRSSVSSVASQLRSMLLSRSESDGSSSNGSPRHDLTRSRTEAGLLLYPSHETVNIGTPSRLYESYGRRPPTTASVSSSDSWNEFGRRSQNSWHDDLSRNDGAATTTVVVSGSAMQEPDDENFSSPSHELENPGVDANIYRRLTEALSEAERCRKEAYQESAKRLRAELDMASALENVNELYQHEVRQRKAIEETLARQAQEMEEMKRQHGVASKELHDVKEQRLVLERQVTEMASAVQGYEEKVAAAETLNTAEFSYSELEQATQGFDEGLKIGEGGFGSVYRGFLRNTAVAVKLLDPESMQGPSEFNQEVAVLGRVRHPNLVTLIGACREALGLVYEYLPNGSLEDRLACTNDTPPLTWQVRTRIICEMCSALIFLHSNRPHPVVHGDLKPGNILLDANLVSKLGDFGICRLLMMSQSTTTTTMPVATTKLHRTTTPKGTFAYMDPEFLSTGELTPRSDVYSLGIIILRLLTGRPPKSIAEVVEDALERGQLHAVLDAAAGDWPFVQANQLAHIGLRCAEMSRRRRPDLAGEVWKVVAPLTMAAAGRPLPFAPSPLDDARAPSYFVCPIFQEVMSDPRIAADGFTYEAEAITGWFDSGRDTSPMTNLKLEHCELTPNRALRSAILEWRQQQQRR

SEQ ID NO: 45626 - protein, 334 aa, Zea Mays
MAVASTSPLSAKPATAPSPPAPGSGLLALGVRRAPATAAWRRLRVEAIRTQRTEVPVEESAPARDAAAAAPLDGNGAGADGSVVPSSDDSWVVKLEQSFNIFATDSVIMVLKGVYGDRYYARFFALETIARVPYFAFISVLHLYATFGWWRRADYIKVHFAQSWNEFHHLLIMEELGGDSLWFDCFLARFMAFFYYFMTVAMYMLSPRMAYHFSECVERHAYSTYDEFLKLHEEELKRLPAPEAALNYYMNEDLYLFDEFQASRTPGSRRPKIDNLYDVFVNIREDEAEHCKTMKTCQTHGNLRSPHSTPNCLEDDTECVIPENDCEGVVVYKV

SEQ ID NO: 45627 - protein, 1317 aa, Zea Mays
MAAAEQLKELGEKLQAVAPAPADELAKLLEKAVECLRGIEQSPGSSVMEAIQPSLKAVTREELLKHEDDNVKVLLATCFCEITRITAPDAPYNDDILRDIFYLIVGTFGGLSDVNSQSFGRRVAILETVARYRACVVMLDLECDDLITNMFQTFLGVVSDSHEENIVKSMQAIMILIIDESEDVQESLLRVLLSALGQKKTGAAMSARKLARSVIEHSATKLEPYIKKFLTSSWAGNGSSSNDQIDHQGVVFDLYQCAPKVLKAIVPYITGELLADEVDNRSKSVELLGEIFSLPGASIVECFKTLFTEFLKRLTDRVVEIRISVVEYLKRCLISNPSRAEAPEIIKALCDRLLDYEENVRKGVVAALCDVATHSPYAIPIDTIKVVAERVRDKSQAVKCYTMERLADIYKLYCQRDSDSSTNSDDFEWIPGKILRCLYDKEFRPESIDSILSGSLFSPEYQMKGRVKHWITAATYFDKVEMKALEQILLHKQRLQQEMLKYISLREPSQEDAPDLQKRIFGCFRNISRLFSDSAKCEENLNMLHQLKDADFWKIFTSLLNCSTTFEKAWSLRAELLKILGENHVLYNFVGTLTMRCSYLLVNKEYAKEILAEASAQKTSGNTKLISSCMNLLTAISSFFPSLLAGLEEDIVELLKEDNEVLKEGIAHVLSKAGVNIREQLASTSSLDLLLERLCLEGTRRQAKYSVHALAAITKDDGLMSLSVLYKRLVDLLEEKKVNIPSILQSLGCIAQIAMPIFETRKEEILSFIIKKILDCNDDMVQNSSNKSEWGDSTHNCLLKIYGIKTLVKSYIPCKDAHAQPGIEKLIDILKNILTYGDISPNMVSSAADKAHLRLAAAKAVLRLSKQWDHKVPVDVFYLTLRISQDDFPQVRKLFLCKVLQYIKERALDAKYACAFMFGVNDYHGPQLEEFKYNLTEVVQICQQVKMRQLSVQADMNLLTAYPEYIISFLVHALAHDPSSPDIEEHENVKAFGPTYWRLYLILSILLGEEGLQHSVPGMKKDSFTTIISIFKSIKSSQDVVDGNKNKTLWAICDLGTLIAKRLCQDQTSLSEAQTVPLPPQLYAPLQDNQNENSVESYGQIWPGCEKVLAHFEAVMTANMDKVESPKHKMLIDMTDEFGNEVPLGKIVKLLKLRGEKKAEKKQKAPSSSSVNAENDDDVLGLVREINLSNQEDLEELQKGKPKKRQTDTKNSNKKPLDFSSPKRKRSISKSRPHSAKGSKNSDDRLIHTPNTERTSISLETKLKEKNRDDSIDTELLVSPSIRTPVSKGNKGAKRSHIDILSSVPKRVLRELLSREV

SEQ ID NO: 45628 - protein, 670 aa, Zea Mays
MEPAVATAGEGQRFKRIPRQAWSGNLELGPLLNESLDHWPHLNELVQCYKADFVKDDCKYGHYESVASPSFQNQIFEGPDTDIETELQLCNARHSKSEDATEDDTPSTSGRQIYETESSGSSSKVHCSLSPLPAYEAAFDWENERSLIFGQRVPESIPAISNSGLKITVKVLSLSFQAGLVEPFSGTICLYNRDRRERLSEDFYFHMLPTDMQVDQGSLDRRGVFSLDAPSPSVCLLIQLEKAATEEGGVTPSVYSRKEPVHLAEKEKQKLQVWSRIMPYKESFAWAMIPLFESNRAGGLSDAASPSSPLAPSLSGSSSQDSIVDPISKLALDGKVNHYSSGSSVIVEISNLNKVKESYIEDSLQDPKRKVHKPVKGVLRLEVEKLHDDHNDVDNASEGGSMANDLNDAGDINNGRSNRSSFDGIHSSVNSIAIAKKDAHHNGHTSNAENVDNFQAFDFRVLTRSEPFSQLFHCLYVYPLTVSLSRKRNLFVRVELRKDDSDIRKPPLEVIIGYSVLPLSTHIQLLSDVSLPILRELVPHYLQESGKERMDYLEDGKTVFRLRLRLCSSLFPINERIRDFFVEYDRHTLHTSPPWGSELLEVAAFRAMVNILTRVQQESSDGAERNRFLINYVDFAFDDFGDRQAPVYPGLTTVWGSLARSKVKMSHHCN

SEQ ID NO: 45629 - protein, 369 aa, Zea Mays
MLLWWRHRRNQQIFFDVNDQYDPEVCLGHLKRYAFKELRAATNNFNSKNILGEGGYGIVYKGYLRDGSVVAVKRLKDYNAVGGEVQFQTEVEVISLAVHRNLLRLIGFCTTESERLLVYPYMPNGSVASQLREHINGKPALDWPRRKRIALGTARGLLYLHEQCDPKIIHRDVKASNVLLDEYFEAIVGDFGLAKLLDHRESHVTTAVRGTVGHIAPEYLSTGQSSEKTDVFGFGVLLVELITGQKALDFGRVANQKGGVLDWVKKLHQEKQLGTMVDKDLGSSYDRVELEEMVQVSLLCTQYHPSHRPRMSEVIRMLEGDGLAERWEASQNVDTPESVSSELLLQKYMDFAADECSLGLEAMELSGPR

SEQ ID NO: 45630 - protein, 157 aa, Zea Mays
MLFFEKGRPIVPPLLPPAGLDLALQNMISFANKATRPNTVKFFRTQSPRHFEGGDWNEGGSCQCNQPLSSKEVEEIFSLDNNSTNVEARLVNQHLVKALQQTSFRVLDITRMSEFRADAHPSTTGGKKHDDCMHWCLPGPTDTWNDLLALSLEALES

SEQ ID NO: 45631 - protein, 248 aa, Zea Mays
MLIQNIFFHGRTLLPFYWSFFYQTPCHSFCRWSRNPNGGPLESLGYKQGYRVDVDIPDQTWVEACSFHDVLIFNTGHWWWAPSKFDPIRSPMLFFEKGRPIVPPLLPPAGLDLALQNMISFANKATRPNTVKFFRTQSPRHFEGGDWNEGGSCQCNQPLSSKEVEEIFSLDNNSTNVEARLVNQHLVKALQQTSFRVLDITRMSEFRADAHPSTTGGKKHDDCMHWCLPGPTDTWNDLLALSLEALES

SEQ ID NO: 45632 - protein, 144 aa, Zea Mays
MELFCLQGFLWLWLWWNPNHSMLVTSKLFIAGLSFFTALGFLIYGGRLFIMLKYFPIESKGRQQKLREVGRVATICFCCFSARCIMMCFNAFDEEADLDVLDHPVLNLFYYLLVEILPSSLVLYILRRIPAKLRLSQYHPVSSS

SEQ ID NO: 45633 - protein, 159 aa, Zea Mays
MLGALVWTCKSRGKRQKKRVQKRRMLEYLSSTDDAGDKNINFPFISFENIVTATDNFSESNLLGKGGFGKVYKGMLEGTKEVAVKRLSTGSGQGKEEFKNEVVLIAKLQHKNLVKLLGCCIHEDEKLLVYEYLPNKSLDYFLFGILKFQFLILLMMSNK

SEQ ID NO: 45634 - protein, 327 aa, Zea Mays
MIKWGLSSGTPADSYYEVRSDCTDGVPKSKFKIKAGKTLSARKWQAAFSPDGCLDIASVLSRIQRGGVHPTVRGEVWEFLLGCFDPRSTFDEREEIRQIRRIQYARWKEDCRQMDSHVGSGKVITAPLITEDGRPIKDPLVLLEATSDTNTSGDAPTTSINGNEVDESAERITDKQIIEWKLTLHQIGLDVLRTDRTMVFYENKENLSKLWDILAVYAWIDKDVGYCQGMSDLCSPMIVLLNDEADAFWCFEKLMRRLRGNFRCTDQSVGVANQLQHLASIIQVLDPKLHDHLETLGGGDYLFAFRMFMVLFRREVSFGDSLYLWEV

SEQ ID NO: 45635 - protein, 301 aa, Zea Mays
MPLLCLHMYNPRGACSNSSRHMGSSSHRSPQGPHAVRQEGVQRTPVILNDDAHVKGPKRIGALYVTCQLFKIYFRLGTVNLCRSVIRSIETARNFDFEDFPVKDKVTYMYYTGRLEVFNENFLVADQKLTYALMHCNPQSESNLRRILKFLIPVKLSIGVLPKRTLLERYSLLEYADVVTALKRGDLRLLRQALDRHEDQFLKSGVYLVLEKLELQVYQRLVKKIHIIQRQKEPAKAHQIKLDVVVKALKWLEIDMDVDEVECIMACLIYKNLIKGYFAHKSKVLVLSKQDPFPKLNGKPV

SEQ ID NO: 45636 - protein, 120 aa, Zea Mays
MTCLPGIKKAEGRPHTRPPIGHTRVHPTPTISQIVYRAVAMSVPLPPPPPPSRRNITANTLAVLEAMAAHNVRTLIYSSTCATYGEPDKMPSLKELPRSIISVGIRRKNNPLICTDSAAS

SEQ ID NO: 45637 - protein, 69 aa, Zea Mays
MQKWEKSTGISGLLRYAPEIFEQSGVASLFSDIGLSPHSTSILMSTLNALLILPCITAAMLLMDVCGRR

SEQ ID NO: 45638 - protein, 262 aa, Zea Mays
MPKQFWKRKQHSVRESGASSHSDKKTNMRNDNNLCLTPLQSSPIAKTRDAKRRRQYHAYSKQASHAPLSFWPRWVYEMYDSYTLARSAAELWRQIIANPSMDDHVRKPDILSFHIGSKLPVSESVRQKLLEIDGVSYRLQKEIQLLKAFNHIKCRNCQSHIAKRSDMVVMSTDGPLGAYVNPHGCVHETITVSNATGLALIGNPSKVHSWFPGYSWTIAACMACESHIGWLFRATKKNLRPRSFWGIRSSQIADDTQVDQGD

SEQ ID NO: 45639 - protein, 593 aa, Zea Mays
MSNYLPGGPPNSVPRQPHQMNMPSFNEFQMHMSAQSETPFSQFPRGGTPPEPLFGGNRGHMISTGFSTNSSGQRDHLLNNGQFHGETASIMPNLLPNHLQRPNTFMPPQLLTVRQQHGMLPIQQSSKQSSRTQTHMFGPQHPPQMMNRFDNFGMPEFSDPRARSSMHHGRQGQHFPLHGSEFGIMKMGNGRSRFRSKYMSTEELENILRIQHAATHINDPYIDDYYHQACLASRYVDARSKHRFCPTLIRDPSSCTRSKDEPHAYLKVDALGRLPFSSVRRPRPLLDVEPASATDDDTVISKPLDQEPLLAARITIEDGLSLLLDIDDIDRLLQFSQQQDGGFELKNRRQSLLGQLAESLQLVDPLGANKNTHLSANDDLVFLRIVSLPKGRKLLSRYINLMVPGSDLARIVCMAVFRHLRFVFGNLPSDDGAAETVTKLASAVASCIRGMDLSGLSACLAAIVCSSEHPPLRPLGHAAGDGATVVIKAVLDRATELLTEQPAAPDYGAPNRALWQASFNAFFGLLTKYCMSKFDSMVHTMHKLGAAAATAIRKELPVELLRASLPHTDEQQRRLLLEFAQRTVPVSGHGSDG

SEQ ID NO: 45640 - protein, 246 aa, Zea Mays
MASSVAVSLRALAAAPLPKSSPATSCPFFVLLAPALPRRLLRLRSARRLPLAPLAASDSAFESSVGVNYAEPDDSEKDKEVELFGSGDDEGAGELVDDHSVEVSAAVEDEVEEEVGEYVEPPEEAKVYVGNLPYDVDSERLAQLFDQAGVVEVAEVIYNRETDQSRGFGFVTMSTVEEAEKAVEMFHRYDVNGRLLTVNKAAPRGSRVDRPPRQSGPSLRIYVGNLPWQVDDSRLVELFSEHGRIG

SEQ ID NO: 45641 - protein, 903 aa, Zea Mays
MGASRLEQTDALFRKNLVIQRRACKTNCCLILFPLALCSVIGGLQIAINHASSQGGGGGGGGGGATPAIRLDCSCSNVSVDENALGGIQCPDECPLPRAPKWPPVVRTPSPEYRAVQDGLFPFADLPDASCRAEGSCPATFLVTGDNHSFVGSVIDNILPTHSSSVNLSADVSALSDFVLADDGEFHQSFLQNKCSPNLTLSYPVQYGNNVVSQVYDFLSSDQSNFNLIISYNSTNDYGVYDESEQSIPVINQAGPVQKPNLVQVPRLANMASNAYLHLKGNGLKMPFEFVKEMPRAAIPIHDGQFDLAPYIGQLPFVWTMELLFPVILTNLVYERQNKLRIMMKMHGLGDLPYWTISYCYFLLLSLLYVLSFVLFGSALGLTFFRQNNYGMQFIFYFAYMNLQISFAFLMTTYFSSVRTATVTGYLYIFVSGLLSQFMFRPYVEDSNISRIWITLMELLPAFSLYRIVYEFSRFAQAQPENYMASSGIQWADMTNPESGLAGVLTIMAVEWLLFLLFAFYLDHFRSYKDGIRKAAALVRSRIHGNHSEAAQQQNVQLQEFRASIQLERTDVLKEREIVELISKESDRSYSVICDNLGKVYRGKDGNADKIAVRGISISMSRGQCFGVLGPNGAGKTTLINMLTGFCKPTSGTAYVQGMDIRFDMDRIYTGIGVCPQDDLLWESLTGREHLLFYGRLKKLKAAALFEQRIRKTLTVSRYRLPSPAVGPHTPHPKIPNRTTEGNPSQKSLCRRPRFPSPLVVAVAVEARGAAPAVAPDALGHAAAPRPEPGRHRRRWWSPWRRAALPLPWLQTLSATRLLLARSPVDITAAGGRRGGARRCPCRGSRRPGPRGRRPLPWLQSGIAALLTLACEARGAAAPVVALGTSRCSPWSARRAAQLLSRS

SEQ ID NO: 45642 - protein, 955 aa, Zea Mays
MGASRLEQTDALFRKNLVIQRRACKTNCCLILFPLALCSVIGGLQIAINHASSQGGGGGGGGGGATPAIRLDCSCSNVSVDENALGGIQCPDECPLPRAPKWPPVVRTPSPEYRAVQDGLFPFADLPDASCRAEGSCPATFLVTGDNHSFVGSVIDNILPTHSSSVNLSADVSALSDFVLADDGEFHQSFLQNKCSPNLTLSYPVQYGNNVVSQDVRCTEGLVLWRDSSRLINDELYGGYYQGNRNHKIDEIAAVYDFLSSDQSNFNLIISYNSTNDYGVYDESEQSIPVINQAGPVQKPNLVQVPRLANMASNAYLHLKGNGLKMPFEFVKEMPRAAIPIHDGQFDLAPYIGQLPFVWTMELLFPVILTNLVYERQNKLRIMMKMHGLGDLPYWTISYCYFLLLSLLYVLSFVLFGSALGLTFFRQNNYGMQFIFYFAYMNLQISFAFLMTTYFSSVRTATVTGYLYIFVSGLLSQFMFRPYVEDSNISRIWITLMELLPAFSLYRIVYEFSRFAQAQPENYMASSGIQWADMTNPESGLAGVLTIMAVEWLLFLLFAFYLDHFRSYKDGIRKAAALVRSRIHGNHSEAAQQQNVQLQEFRASIQLERTDVLKEREIVELISKESDRSYSVICDNLGKVYRGKDGNADKIAVRGISISMSRGQCFGVLGPNGAGKTTLINMLTGFCKPTSGTAYVQGMDIRFDMDRIYTGIGVCPQDDLLWESLTGREHLLFYGRLKKLKAAALFEAIEQSLRSMHLLAGGVADKLVGKYSGGMKRRLSVAISLIGDPKVVYMDEPSSGLDPASRKNLWKAVKSAKQDRTIVLTTHSMEEADVLCDRIGIIANGSLQCIGSSKELKDRYGGSCLLTVTTPAGGQEEEEVERLVQSISPAANRVYRVSGTQKFEMPKRGMKISAVFQAMEQAKSSLDIVAWGLADTTLEDVFVRVAKQTDMSTVT

SEQ ID NO: 45643 - protein, 548 aa, Zea Mays
MKAAVSSAGESAGELLLRAAALVPWTRYFLAALALAAVLLYRYLTTPWLASPHLQTLFLSISGRPPSFTYRRQLYTVRDGGTIALDWLLASDLEDGDIGTSDGTISKDDSTPLLVVIPGLTSDSSAAYVKHLVFSMAIKGWNVVVSNHRGLGGISITSDCFYNAGWTADMREVVSFLHQEYPKAPLFTVGTSIGANIVVKYLGEEGENTPVAGAASICSPWDLLVTSKFISRKLVQRCYDRALAIGLKGYAKLHQSVLARLANWEAITSSHSIREFDRHATCVVAKYETVDTFYRKCSSANYIGNVSVPLLCISALDDPLCTREAIPWDECRANKNIVLATTPNGGHLAFFEGLTAGKLWWVRPVSEFLCALHDGPYMHRQKAQGHDLHSSLESSIDKSPYVNFMEDGMVAALTDDGPNNGDSLLNEVLGEIEPNDSVVVQHVKQNQNTRAIQNESDSWLDDKNSSEGNVQAHGGTQEQREVPYANKISDAIGPVKKSINQLSRSQGKSIWLLAYIALVTSWPLLGALGFFFRKRLSNSLLSRKLKKS

SEQ ID NO: 45644 - protein, 413 aa, Zea Mays
MAIKGWNVVVSNHRGLGGISITSDCFYNAGWTADMREVVSFLHQEYPKAPLFTVGTSIGANIVVKYLGEEGENTPVAGAASICSPWDLLVTSKFISRKLVQRCYDRALAIGLKGYAKLHQSVLARLANWEAITSSHSIREFDRHATCVVAKYETVDTFYRKCSSANYIGNVSVPLLCISALDDPLCTREAIPWDECRANKNIVLATTPNGGHLAFFEGLTAGKLWWVRPVSEFLCALHDGPYMHRQKAQGHDLHSSLESSIDKSPYVNFMEDGMVAALTDDGPNNGDSLLNEVLGEIEPNDSVVVQHVKQNQNTRAIQNESDSWLDDKNSSEGNVQAHGGTQEQREVPYANKISDAIGPVKKSINQLSRSQGKSIWLLAYIALVTSWPLLGALGFFFRKRLSNSLLSRKLKKS

SEQ ID NO: 45645 - protein, 333 aa, Zea Mays
MELKKELQERPTQKLVDDLKKKVQILQAVGYNSIEAEDWELATNGEEMSKLEALLLDKNRKMEHELTQLKVKISEKTSVLEEAEKRIVELTSKVEEQQKLILKLEDDILKGYSSTDRRGSLLNDWDIQEIGSSEASEGSDPRHASADQDQSSMLKVICNQRDRFRARLRETEEELRRLKEKHEMLTVELEKTKADNVQLYGKIRYVQDYSHDKIVSRGPKKYAEDIESGSSDVEAKYKKMYEDDINPFAAFSKKEKDQRYKELGLRDKITLSSGRFVLGNKYARTFIFFYSIGLHLLVFTLLYRMSALSYLNTTTQQDEIILDAGNQRLTHML

SEQ ID NO: 45646 - protein, 196 aa, Zea Mays
MEALYLLASLAATLVTSAFHSLLLLLRLLLRYPRRAAPTDDGPAAAARLYEGRVRHARRRPAAHTFEYPARYALVDLDRLPLPGHLSADDARRVASTSGPVHLLTVPESVGYEQNPLSIYYCYDSAGQGQDGELRTCIAEVTNTPWAERVMFTFQPGSDLIAKPLHVSPFMFSIRHLGTTSLQFWMPNWMDRQVIL

SEQ ID NO: 45647 - protein, 118 aa, Zea Mays
MMGPPRRRGSTRAGSGTRDGARRRTPSSTPRATPSSTSTDCRSPATSPPTMPAASPPPPAPAPLDGTRERGVRAEPAEHLLLLRFCRTGARWRAQNVHCRGHKHPLGRESDVYLPTGL

SEQ ID NO: 45648 - protein, 478 aa, Zea Mays
MPPPPPPPLGLRLRLSLLPPHPIAPSIRHAFCSPSVVSCHLSVRPLAQRRGGRPRPLCAARGEAEAEGFAWPDGSEEELRRLLELLPRELSRRVETHPELPALVEVVMDLGRPPLARFPSGDFLLSQRPISFDDLRHATSHSQVGDFGADNRAGISRTLHRISAIRNRKGVIVGLTCRVGRAVPGSANLLQDLVKDGGSLLLIGPPGVGKTTVIREIARMLADDYKKRVMIVDTSNEIGGDGDIPHPGIGNARRLQVPNQDMQHKVLIEAVENHMPQAIVIDEIGTKLEAMAASTIAQRGIQLVATAHGVTIENLIMNPSLEMLVGGIQSVTLGDEEANRRGVQKTVLERKGPSTFTCAAEIVSKKELRVHRSLEATVDALLAGKLPNFEIRKLGSKGSMQEVSVQKEQSHLGIYDATEFGSDSLRNARRSLDSAFSLDSAEGHIVSLYVTYWIGCSRSPSRLPCKPFISWSWTTVLL

SEQ ID NO: 45649 - protein, 258 aa, Zea Mays
MDLERSPPASSAEAPGDGGGGGAAACSICLDAVLARSAGRSVAKLQCGHEFHLDCIGSAFNAKGAMQCPNCRKIEKGRWLYASGHRASVDIDMGGWVTSDNYDITSELPFGFQWCPFSGFTRLASMFEEREAELTYHTTGDRSSAASSSLVCPYLALRGFLHPVHVPSTSNPGAESTSFRRHATGLEGHATLDLNNAQLFHAIESINHDSEHRHLSNLPVSGIPEYSMTPFGIGLPRYDSGSQQRFRSYAHHHPLIHR

SEQ ID NO: 45650 - protein, 365 aa, Zea Mays
MQCPNCRKIEKGRWLYASGHRASVDIDMGGWVTSDNYDITSELPFGFQWCPFSGFTRLASMFEEREAELTYHTTGDRSSAASSSLVCPYLALRGFLHPVHVPSTSNPGAESTSFRRHATGLEGHATLDLNNAQLFHAIESINHDSEHRHLSNLPVSGIPEYSMTPFGIGLPRYDSGSQQRFRSYAHHHPLIHRPAPRSGSNLVAPPLGSVPAVVAAAETARGSHMYQRSSVHGSPFPPTTTRRVRPRALTITSFIAATSSGEIGGPHGFSAPGAAMNRSVSDAEGISRPIDRPYNAWGREGFAPFPWIPAEGESHWWGTFNPVQNHAHGGFSRRPAGERMPPQSQSHPENSYQAVPPSQRMPPFL

SEQ ID NO: 45651 - protein, 726 aa, Zea Mays
MGFLSAKLLPSCESVCVCCPALRPSSRRPVKRYKKLLAEIFPKTPDGAPNERKIVKLCEYAAKNPLRIPKIAKFLEQRSHKELRSAHVNFVRIITEAYSKLLFICKEQMAYFAISLVNVLTELLESKQENVHILGCQTLANFINSQVDNTYARNIESLVHKVCALSRRQGEDHRLLRAASLQCLSAMIWFMKEHSYIFADFDEIVHSVLENYRTEESNGGGDDRHALQHNWVDEIARSEGRPGVGGGNDVNINTTTIRLRPARNSSALTRDERDSPEVWSHICVQKLAELARESTTMRRILDPMLSYFDMKKQWAPRHGLALLVLSDMAYLEKSSGNEQLILTTIIRHLDHKNVLHDPQTKSDIIQTATSLARQLRSRGFAVELVVAGDLCKHLRKTLEAVESGNVEDQNLNEPLQIVLEDCLMEVVRGINDVRPLYDMMAITLENLPSMPTVARATLGSLLIISHIISLTSVSSNNLMVFPEALLQQILKSMLHTDIDTRVGAHHMFSAIIVRGPSHLRSESEYLYETKKQSRNTSVFASATALLEKLRREKESLSSDKPRNIMHDDVKEMNMHEEDKRKNPAYFSKLVSSFIERCATRSSVEETNIAMLTEDQTNQLLSSFWIQANQTDNTPFNYEAIGHSYSLTVLSSRLKNSSNGNIIQFFQLPLSLRSVALTPSEVLPAYCQRSIFTLAMSMLAFAGKVCHVAELSDLLRCFSSSKDKSRD

SEQ ID NO: 45652 - protein, 760 aa, Zea Mays
MRHALQHNWVDEIARSEGRPGVGGGNDVNINTTTIRLRPARNSSALTRDERDSPEVWSHICVQKLAELARESTTMRRILDPMLSYFDMKKQWAPRHGLALLVLSDMAYLEKSSGNEQLILTTIIRHLDHKNVLHDPQTKSDIIQTATSLARQLRSRGFAVELVVAGDLCKHLRKTLEAVESGNVEDQNLNEPLQIVLEDCLMEVVRGINDVRPLYDMMAITLENLPSMPTVARATLGSLLIISHIISLTSVSSNNLMVFPEALLQQILKSMLHTDIDTRVGAHHMFSAIIVRGPSHLRSESEYLYETKKQSRNTSVFASATALLEKLRREKESLSSDKPRNIMHDDVKEMNMHEEDKRKNPAYFSKLVSSFIERCATRSSVEETNIAMLTEDQTNQLLSSFWIQANQTDNTPFNYEAIGHSYSLTVLSSRLKNSSNGNIIQFFQLPLSLRSVALTPSEVLPAYCQRSIFTLAMSMLAFAGKVCHVAELSDLLRCFSSSKIDPYLRIGEDLQLYVRLQSDLGSYGSESDQEIAKSMLSDCRTKVGINDHRVLDVIASALSNFIEMGKDVIVKELTELFTPEEMPLFGSNSALDWANFNAQAFSDESLSFDEECSRTSSVDCGLHESPITNTASSISKITLPQSVPHVLGVGQLLESALHVAGQVAGASVSTSPLPYGTMTSQCEALGLGTRKKLSSWLVNGHESTPDNPMPSLPTAHHSIIPKVNPATFRTSSESCSAVKLPPASPFDNFLKAAYRTQPEL

SEQ ID NO: 45653 - protein, 725 aa, Zea Mays
MGFLSAKLLPSCESVCVCCPALRPSSRRPVKRYKKLLAEIFPKTPDGAPNERKIVKLCEYAAKNPLRIPKIAKFLEQRSHKELRSAHVNFVRIITEAYSKLLFICKEQMAYFAISLVNVLTELLESKQENVHILGCQTLANFINSQVDNTYARNIESLVHKVCALSRRQGEDHRLLRAASLQCLSAMIWFMKEHSYIFADFDEIVHSVLENYRTEESNGGGDDRHALQHNWVDEIARSEGRPGVGGGNDVNINTTTIRLRPARNSSALTRDERDSPEVWSHICVQKLAELARESTTMRRILDPMLSYFDMKKQWAPRHGLALLVLSDMAYLEKSSGNEQLILTTIIRHLDHKNVLHDPQTKSDIIQTATSLARQLRSRGFAVELVVAGDLCKHLRKTLEAVESGNVEDQNLNEPLQIVLEDCLMEVVRGINDVRPLYDMMAITLENLPSMPTVARATLGSLLIISHIISLTSVSSNNLMVFPEALLQQILKSMLHTDIDTRVGAHHMFSAIIVRGPSHLRSESEYLYETKKQSRNTSVFASATALLEKLRREKESLSSDKPRNIMHDDVKEMNMHEEDKRKNPAYFSKLVSSFIERCATRSSVEETNIAMLTEDQTNQLLSSFWIQANQTDNTPFNYEAIGHSYSLTVLSSRLKNSSNGNIIQFFQLPLSLRSVALTPSEVLPAYCQRSIFTLAMSMLAFAGKVCHVAELSDLLRCFSSSKLTLT

SEQ ID NO: 45654 - protein, 323 aa, Zea Mays
MQELRCSNHEEMKAHDVKLKGETYICLLNALASTGQTDQVYAIVSDMSAAGLGLNKFCYAGLITAFKNKTPTAEETMAKILDFVGQSKGWQYVERVSKDIAENIMMNVSEEELYNLPTAEYVNRRGGFVFKQHTVYHVALQACAELRSKETLEALLEMFNKDNRDGSTYDAYMVMQAMRCYLRCGDIDSAVKMFEEYSSSRSPPAELYATLAEGAMIGYTPRGMQLAQETIEKMTSRNFFLNAKMGTDLLLAAAGETAGGYTTANYVWDLLQSRKITPTLPAVEAYHKGLTAREIPSDDPRLLNVTRVLDNLKLRFGPRRNTQ

SEQ ID NO: 45655 - protein, 737 aa, Zea Mays
MTYMNKLVLRNCSISGSIPPYIGTWTSLKHLDLSFNKLSGEIPPSFASMGAVDYIYLSGNSLTGNIPGWLLRRNKIADISFNNFTMGSSGPSQCLQGSVNLVESYSAEVNRLNSIHPCLKRNFPCVASNGQYHSSLHINCGDKEATINGTKYEADTTPKGASLLYVSPGLNWAFSSTGNFMDDNINDDNYIATSASKLAVPNSDLYNKARLSPLSLTYYGLCMLSGSYTVNLHFAEIVFTNDSTYYSLGKRRFNVFIQGRMVLEDFDIEQSSGAAAKPVTKTFQTYVTNHTLEIQFYWAGRGTTGIPYRGSYGPLISAISVTPNFQIPLAVDPPKAGSREKRSSRASIALGIGIPIVAIFTALILGIYCIKKQRKSSMHEELRALDLQIGSFTLRQIKAATRNFDAANKIGEGGFGSVYKGLLSDGTIIAVKQLSSRSKQGNREFVNEIGMISALQHPNLVKLYGCCTEGNQLSLVYEYMENNCLARALFVEQYRLRMDWGTRHKICLGIAKGLAYLHEESAIRIVHRDIKASNILLDKDLNAKISDFGLAKLNEDDHTHISTKVAGTIGYMAPEYAMRGYLTDKADVYSFGVVVLEIVSGKSNTNYRPKEDFVYLLDWACVLHERGTLLELVDPDLGSNYSTEEALLMLNVALLCTTAAPTLRPKMSKVVSLLEGSAPLQPLLSDLSLAANSLSSSGVRRNFWQNPGESQSLTAQASCSDTNESSTIDIDGILLVS

SEQ ID NO: 45656 - protein, 2129 aa, Zea Mays
MSGRRGPAATGGGRGGGGGGGGNWRRSGSAKAKEQRLRLGAEELLESRLGFAPYTDGERRLGWLLTFSPSSWEDEDTGKIYSCVDLYFVSQDGSTFKVKYKFRPYFYAATKDKMELEVEAYIRRRYEGEISDIEIIEKEDLDLKNHLSGLKRKYLKLQFDTVQQLMRVRNDLLHVVEKNEEKIDAVEAFESIHGVKRVERPQDYINYIIDLREYDVPYHVRFAIDNDVRSGQWYNVNVSGSDVLLQRREDLLQRAEVHVCAFDIETTKLPLKFPDAEYDNVMMISYMIDGQGYLIINRECVGEDIDDLEYTPKPEFEGYFRLDLLKAWFSHMQEVKPGIYVTYNGDFFDWPFLEKRAAHHGIKMNEEIGFQCDNNQGECRAKFSCHLDCFAWVKRDSYLPQGSQGLKAVTKAKLGYDPLEVNPEDMVRFAMEQPQTMASYSVSDAVATYYLYMTYVHPFIFSLATIIPMSPDEVLRKGSGTLCEMLLMVQAFKASVICPNKHQADLEKFYNNRLLESETYIGGHVECLETGVFRSDLPTKFQLEPLAYEQLIGNLDRDLHYVIAVEGKLDIDSVTNYDEVKDAIEQKLVALRDHPIREERPLIYHLDVAAMYPNIILTNRLQPPSIVTDVDCTACDFNRPGKNCLRKLEWVWRGETYMAKKNDYYHIKRQIESELIQSGGIASSKPFLDLSKPEHLLKLKDRLKKYCQKAHKRVVDKPITEVREAGICMRENSFYVDTVRSFRDRRYEYKGLNKTWKGKLAEAKASGNSMKIQEAQDMVVLYDSLQLAHKAGKKLTISYPCVMLNADVARNNTNDQYQTLKDPVNKTYTTHSECSIEFEVDGPYKAMILPASKEEGILIKKRYAVFNEDGTLAELKGFEIKRRGELKLIKVFQAEVFDKFLHGSTLEECYSAVASVANRWLDLLDNQGIDIADSELLDFISESSTMSKSLVDYGEQKSCAVTTAKRLAEFLGDSMVKDKGLHCQYIVAREPQGTPVSERAVPVAIFETDPEIAKHYLRKWFRFSSDANIRSIVDWSYYKQRLSSAIQKIITIPAAMQKISNPVPRVLHPDWLHKKVREKDDRFRQRKLRDIFSPLAKEEGLHNLNRTGDMEDLLISNKDLRKNPSHGLDIDKENNPNGASVGSGLNISKKQQNCMTGLNVPCTSQIQNAASYETVDKGTDYQGWLDAKKRKWKYVREQKKRRRLGAAATFDDPNALLSARHANQLPVNSRNRSTFFQKQELALFRSHWQIIQLASSTVPGHFFAWVVAEGIMFKIPINVPRTFYLNSKAPVTEEFPGRRVKKILPHGRPCFNLIEVVTTEEQFRAEGKKLAAHLAEPDVEGIYETKIPPELNAVLQIGCVCKVDKSAKRRSIQDGWDLAELQMKTTAECSYLEQTFSFFYLYHSLSEGRAVYVFYFPTSFRIHAVIVNPFRNKEISPSFLEKQFGDACQALGSVPENLSFHVDYQTSIDAGSKYAQRMLLEYRQQHSGPVVGIIECPKLQAIKVAIRALDDLPCVTIPSNARDNNYQALGWQATAGRTSMQRCAASTQWFNERISLAKYAHVPLGNFELDWLLFTADVFFSRALRDQQQVLWISDDGIPDLGGTYEGETCFADEVIQPALTYPGAYRRVSVELKIHHLAVNALLKSSQVDEMEGGSIGSFGNDVPPGSNATETDFDDASLCIPAFQVLKQLIQRCISDAVSSGNVFADAILQHLYRWLCSPRSKLHDPALHRLLHNVMKKVFALLLAELRKLGANVIFANFSKIIIDTGKVDLSSAHAYCDSLLRTLQTRDLFEWIELEPLHFWHSLLFMDQYNYGGIQAKTQNVDSSDGDNDIDIVSSWNMAEDLPKDTQDHFVLIVSEFLYIPWKFMKEQVAAQATIRDDTSCTPSVTIMAAENLEGQVIEHLRDKISNYFADKLLRTVSDILHHFKGKSKHESDEPAKSDPHTHKGDAALEFIKHICAVLALDQNVQHDILRMRKNLLKLVRVKEFAPEAQFQDPCASFTLPNVICSYCNDCRDLDLCRDSALQGQEWRCAVPQCGQPYHREQMENALLQVVRQRERLYHLQDLVCVRCRQVKAAHLSEQCSCGGSFRCKEEPSYFLSKMRVFLKVAVSQKFPLLQDCVQWILEAR

SEQ ID NO: 45657 - protein, 213 aa, Zea Mays
MSMGRFVNSMDPTSGLEVIRDWNGVAQVVLRSPKGASARVSLCGGQVVSWRNDRGEELLFTSSKATFKPPNAMRGGIQMCFPQFGYSGTLERHGFARNRIWSLDDEQPPLNHNDNGSKVSVDLILKPSEDDLKCWPHCFEFRLRASLSKDGDLSLISRIRNVNGKPFSFSFAYHTYLSVSDIRSVRSGLKVWRHLIILTTLATKNGLRNKEMP

SEQ ID NO: 45658 - protein, 202 aa, Zea Mays
MSTGTVRCVDGTGTSLDAVAAAIQVLEDDPVTNAGRGSNLTESGHVECDASIMDGSTGSFGAVGAIRDVKNPIQVALHLAKEQMAGPSLLGRIPPMFLVGEGAYQWAKSKGMDLVESTSEANSWLVTENARAQWVKYTSLLVNTKKSLYHSTGSGSEHHSVQLEAQGTESENIADAKNIFTESFMGDNTDHITDTVGVILCR

SEQ ID NO: 45659 - protein, 134 aa, Zea Mays
MQRISLRLLRSSYTAASASLSTTSSSLRGLAVSHGGWTTRPSLQPPVRTAAPVDLTRWPPRRGYSQFASGFTPLKPKPLGSILDIERAKGLSPDHLVAAWDDVSPRPLISHFIRFFCGLCVIRIEEIPSDGRRR

SEQ ID NO: 45660 - protein, 370 aa, Zea Mays
MAAWCSAESTKPVFVGIYGAVLGGFAVSALFFLLSSFSSLSAPTLPLPAAAIAGANLSAPTLAQAETMYNRPIWKPPPRRARMPSPRAFRLTRDMVAARARDGVIVVTFGNYAFLDFILTWVRHLTDLGVDNLLVGAMDTKLLRELYFRGVPVFDMGSRMVTEDAGWGSPTFHKMGREKVLLINALLPFGYELLMCDTDMVWLKNPLPYLARYPDADLLTSSDQVIPTVTDDSLENWREVTGAFNIGIFHWRPTEPAKRLAKDWKDLVISDDKLWDQNAFNDLVRKKFGQPVQGDDLVYSYDGKLKLGVLPASIFCSGHTYFVQGMYKQLHLEPYAVHTTFQYAGTEGKRHRLREEVSCHLNLTFQKVCY

SEQ ID NO: 45661 - protein, 284 aa, Zea Mays
MSTPMSVEPAKSTNSKEKNSNKKLKEIDRTAVSAGSGNSKRTVSSIEDYSAEGSSDVNDQNVNETSRKRSSDGGPGAETTTGGNTECVLAPNHTLGNATILPQHCFSAPVIKPSATNVANSRAIGTALSPPPGVMVPVHNAVPSDLSVKDERELKREKRKQSNRESARRSRLRKQAETEELATQVESLAAENTSLRSEIGQLTESSEKLRLENSALMVKLKDTAEPSPIKASASPSSPRASAENFLSMIDSANAPSVSRHTEHGGPRLRQLLDSSPATDVAAVS

SEQ ID NO: 45662 - protein, 1110 aa, Zea Mays
MPMDPSAFQIIECAEAPNTGVVSSKFALNVACDSPMDLNLTNVGTSDNILYTSEFAVPGRTEDRSMQVDFHDAKAALHKPNLPLEVVDTDTHDLQSSRNTESTILPSFGDDPMKDSSGALNNGLGRSTSSQVTELTHLHRSHPPADYNPFSLHSHDSPSVSGNSEHSVPTALTLGNNIYFSSAESEGQPEENHNLLDVNLGFDVTTTEFGNVVKRKGESGNDLMNAGSQNWLTLPLTVSCLDNASAVSNGRIGLEQIVDEGVPVICQDHDIMLDIDQRGSIDVLSGQDHNLKLCGISIPQAVLLATEERNKDVDDEIVRPGRDLASQISVDSDHTYHGSTEDPVGMSSTTPDSVSSWIEAIVPEANKEHQSCKSSLLPICSSEKVSAPKEDSKKALSDSVVNSVVKSPPRINIASSTVLKTSGLPPKLPLKKNSKSQNSYIRKGNALIRNPANGNHLHSSSSLDSQNKLSKPVMRRSMNFVRNVDSKDAAHSHISVERPKTPPLPLHTKSISCAVNVLEPLSQNLQQQVLETEKEDSSGQVNSGADNLSIISLHKSEALDAGKAIYVRPKLNQLVAQGRHLGESSNISLDKVTLLQPSATSDLYFKKRKNQIILGPSTSDAPSSKDTFQAENIKSGESKVLMSSSSNNNITVAKDRLHKALQTTNTVRSFSHVWTLNGQNPRKKSYVGASHMKVLPRILPWKRKIFCQNFRGSYSSLLNTSSIGIMRKLLQTRKRSTIYTVSTDGFSLRKSGVLSIGGSSLKWSRSLEKHSRKVNEEATQAVAEVERKKREKRKRQSLRSKGRNDRYSASVAANQLTNRSRASSDSRVSSTCNEYVRVNKGNQLVRNPKKVIRMLASEKVRWSLHTVRTRLAKKRQYCQFFTRFGECKKSGGKCPYIHDRAKVVICTKFLKGLCSSTSCKLTHKVLPERMPDCSYFLQGLCTNTACPYRHVKVNSNAPVCEDFLKGYCADGDECRKKHSYVCLVFEATGECPQGSRCKLHHPKKKSKSKRSKVDTVQNNSWGRYFETNVGHGSGARIVYLEEDERQKPEQVSGEEFADFIELGAGIEVPEDADTSDDIQLMELDLGNLEVQADNNDAIIKPLRIMRTARV

SEQ ID NO: 45663 - protein, 723 aa, Zea Mays
MIKVHKTARSRIEVAHQEAVALKRQEELIREEEAAGLAEIELKAKRSAAEKEKRAKKKQAKQKKNSRRSNKGKSGKSDINKEILMYSSPSGDRILDDFSGQTEEMSSNADNPEEVSDISDSRDDNSDALHVDIEDRESSPVNWETDASETQATVPGSSEVQNDHAGKRTSTVDDSSSTCSSDSVPSVIVNGSYTGGAWTSVRSLSNRGNNRRNKDTEARAALAQGGSSSAHNGFIGSGGSASGHSKERYEPEDDKVVMQRKQHARHIDVISPSKSRMAVSSFSSVSPVKKQPNLSHQPKFLLESTNSSNHRASEVSGAVTATTTAGASSTLAAQLVSNKGPVSSAATRNEKPVLVTNKPLQVLVPSKSEAQKQASLTGSASTQVVSVSRPLSAPQVPAAKQSVPATTAQNAPLLSRSVSAVGRLGNEPSANAPSFIPRSRTYRNAMMEKSSGGVSSLTHQQGSSEQAVAPSQSMFTSQPSILSSETLSMKEETSLRPGFTFGTVKPESLNPYQGREENSLQASSSSSSDCTPSSSNIRSEIAKLSLNGRSRSKQLLSEISTRFTPYQPQGLVADEFPHLDIINDLLDEEQSDRRRVLQPGFVQQFSVHNGVSAPDYGLFSEPYLFDRSEQYFDEEPPRFYSPLSSAPRRMRDRSYSHFDLPSYSRSSQLDGLLMSQWPPYSRADLAMPGFGSDTGGYSYQPQGFPSPASAASRYPSYRPANGH

SEQ ID NO: 45664 - protein, 466 aa, Zea Mays
MQRKQHARHIDVISPSKSRMAVSSFSSVSPVKKQPNLSHQPKFLLESTNSSNHRASEVSGAVTATTTAGASSTLAAQLVSNKGPVSSAATRNEKPVLVTNKPLQVLVPSKSEAQKQASLTGSASTQVVSVSRPLSAPQVPAAKQSVPATTAQNAPLLSRSVSAVGRLGNEPSANAPSFIPRSRTYRNAMMEKSSGGVSSLTHQQGSSEQAVAPSQSMFTSQPSILSSETLSMKEETSLRPGFTFGTVKPESLNPYQGREENSLQASSSSSSDCTPSSSNIRSEIAKLSLNGRSRSKQLLSEISTRFTPYQPQGLVADEFPHLDIINDLLDEEQSDRRRVLQPGFVQQFSVHNGVSAPDYGLFSEPYLFDRSEQYFDEEPPRFYSPLSSAPRRMRDRSYSHFDLPSYSRSSQLDGLLMSQWPPYSRADLAMPGFGSDTGGYSYQPQGFPSPASAASRYPSYRPANGH

SEQ ID NO: 45665 - protein, 639 aa, Zea Mays
MYSSPSGDRILDDFSGQTEEMSSNADNPEEVSDISDSRDDNSDALHVDIEDRESSPVNWETDASETQATVPGSSEVQNDHAGKRTSTVDDSSSTCSSDSVPSVIVNGSYTGGAWTSVRSLSNRGNNRRNKDTEARAALAQGGSSSAHNGFIGSGGSASGHSKERYEPEDDKVVMQRKQHARHIDVISPSKSRMAVSSFSSVSPVKKQPNLSHQPKFLLESTNSSNHRASEVSGAVTATTTAGASSTLAAQLVSNKGPVSSAATRNEKPVLVTNKPLQVLVPSKSEAQKQASLTGSASTQVVSVSRPLSAPQVPAAKQSVPATTAQNAPLLSRSVSAVGRLGNEPSANAPSFIPRSRTYRNAMMEKSSGGVSSLTHQQGSSEQAVAPSQSMFTSQPSILSSETLSMKEETSLRPGFTFGTVKPESLNPYQGREENSLQASSSSSSDCTPSSSNIRSEIAKLSLNGRSRSKQLLSEISTRFTPYQPQGLVADEFPHLDIINDLLDEEQSDRRRVLQPGFVQQFSVHNGVSAPDYGLFSEPYLFDRSEQYFDEEPPRFYSPLSSAPRRMRDRSYSHFDLPSYSRSSQLDGLLMSQWPPYSRADLAMPGFGSDTGGYSYQPQGFPSPASAASRYPSYRPANGH

SEQ ID NO: 45666 - protein, 333 aa, Zea Mays
MAISISQEAFDSMVRENMEDLGMDPDEALADAVEALTLQGADLSGIVKRVPGEATAAEVSPVVRVLDELKASLSASGGSEQDLDGLVSLLDELRNLCCSGEGSENAAIAVRNGVVEALVALCASARVEQERLLASALKSLSSVLRDVASTEKFRRSEGPRIVMDLLQGGSENSDLLDAGFSVVAAGSAGNEVVKESFMDLKVDELILRVMKDKSKSNVQSLYDAIRVLLKPDDNRVVASQVYGYSRRFAEIGVAEVLVNALREQVAPSSLPSACAALKSIAVNDEICRSISENGGIDVLLQCIDGAGEQKNKAVARSCCSLLSKVPKVDIQIF

SEQ ID NO: 45667 - protein, 111 aa, Zea Mays
MPQLGTCSLPGAAIYGTSTRRFGGLEFQQHKVNHISFGRKASVKATLKTVRCNATQTQSVQKKSSSATIQRDKKGNVQGPKLDDGSGGFPPFRFGKGIREVPACSEAPSWR

SEQ ID NO: 45668 - protein, 372 aa, Zea Mays
MAGSGNLQTFRLLRYLRGRISAEGQVNYGLQMAVSLAIGFLFLGGGTHTFSTQNSAIAALLISLYPRLPTGPNDNRCHLQAFRHLYVIATEPRWIQTVDIDTELPVYCPLEVTVAETDYYDETNYCEVTPCLLPERSVVCDAPSASCSNQPNSTNGSYFRVDQLVSTFSANPSLIAFAKLCSVSWKSRCNSNFQEFCSQVLYECMSKDRPSLLQAYISFYTTIELMWEHLKTGNFPFYNSLFLPNLKVALAYNEALVDSRITNGGIIHSTFLESLMKRVGDIFAELPNLKDNLHRYLSTGTWPDTQNDVVVLSWYLQWYNIPPAHVVASAVEKVRPRVPAGVSMLPLLRLLLPTTHLVGLMEIEKVQIVMEC

SEQ ID NO: 45669 - protein, 134 aa, Zea Mays
MELKSLANPFPCRRPPDPKKKIRPARRSRAPYLKSTCALSRRRAVSDMAVVGAVALSTPTPALAEQPDVTSFQVPEGGEWSHTRRCRRGGGARGAGGRPGAVQLRVPPRERLLRAQHGGPVQRREQAGDARARR

SEQ ID NO: 45670 - protein, 909 aa, Zea Mays
MCNWTGVTCDSTGRVTRLLLKNSNLSGVISPSIGNLSALRKLDLRFNHLSGTIPRELGMLSQLLELRLGHNSLTGTIPEAVVCNCTSLTSIILSNNSLTGEIPFSARCRLPRLQQLSLYENRLEGGIPSPMSNFTSLSWVLLQYNRLGGVLPSQMFSKMPSLRYLYLSGNSFSSDGGNTDLEPFLASLANCTGLQELGVGSNGIGGEIPAVIGNLSSANLSLLYLDDNEITGAIPRAIGNLASLTDLELQDNMLEGPIPSELFHPRGLTKIVLSNNQINAEIPKSIGLLAQQLATISISNSGLRGEIPETLSNLTNLDYVLLDHNQLSGAIPPGGLSCQMILDLSYNKLTGQIPSGMPGLLGSFNMYLNLSNNLLEGPVSSLEFGSMEMIQALDLSGNKLSGGLPSSMGALKNLRFLDVSSNGLTGVIPRSLQGLPLQFANFSHNNFTGEVCGGGSFANLTGDSFLGNPGLCGSVPGMAPCGGRKRGRFLYIAIGVVVAVAVGLLAMVCAVVDHYLMRSSRSRLAMAAPSSLLPRFSTTGLVKATGDGEKESGEHPRISYWELADATDGFSEVNLIGKGGYGHVYRGVLHGESETVIAVKVLRQDQAAGGEVVAGSFERECRVLRSIRHRNLIRVVTACSTPEFKAVVLPFMPNGSLDSLIHGPPAAAAGGPRHLGLDLDLLLGVASNVAEGMAYLHHHAPVKVVHCDLKPSNVLLDGDMTAVVSDFGISKLVATDDGARGPEVTGEASTSSVCNSITRLLQGSVGYIAPEYGLGGRPSTQGDVYSFGVMLLEMISGKRPTDVISEEGHGLHDWAKKLLQHKRDLGAVVEERSLLPFGPPPRGEMEEVAVVLELLEIGVACSQLAPSMRPSMDDVAHEIAYLRDGTWRKYGVTDLKTTIFDQQTPRCTD

SEQ ID NO: 45671 - protein, 295 aa, Zea Mays
MAGLSLRCGDCGAQLRSVEEAQAHAESTNHANFVESTEAVLNLVCSNCGKPCRSHTEVDLHTKRTGHTEFADKTAEAAKPIDLEAPLKPASDDATDVDASASATEETQETVVPEVNKEVLTDLEGMGFSTARATRALHFSGNSTIECAINWLSEHQEDADIDEMPLVPANSKTEVNKPSLTPEEMKIKAQELRERARKKKEEEERRMEREREKERVRIGKELLEAKRIEEQNERKRMIELRRLEKEEEKRAREKIRQKLEEDKAERRRKLGLPPEDPAAAKPSAPPPVEEKKVKT

SEQ ID NO: 45672 - protein, 456 aa, Zea Mays
MLLLKLRKIGGEAGEAAAPPDEVSHRRRGGRCTAHHQLRDADAAEGAVGGHVPGLPCAGRPEIPARRRVLAPAAKGEGKAQAALENLETAMANSAEFVALLCGCERLSRRPYDAYLYLGSIMFGRHAEKQRLLNFLLQQQPGDDGAPPPVLPIVGALAAGKKTLVAHVCADDRVRSKFASVLHLRGDDFLLNTVHHEKAMLLGVSSLVVVELVSDVGDEEWDAFYSFVARAASAGSKVIVIAKHARSVARFGGSARPPIFLGALSYEEFWYLFKNLAFQAADPGEHPRLVHIAEGFAKELHQGGSLVAANALADVLRRNLNAQVWLSILNRCRRVVEKNLCAYGQQPKLLLEQGREVDITEFVVPSPAGIGHLRMIPCTSRGSSKAYSRVVNDLPKVAFGELLLDPSVRPKGEFSLLTWKSRLPPYTSFINFVPDCTADMPQGHSLSGRKRQAVPF

SEQ ID NO: 45673 - protein, 864 aa, Zea Mays
MVTEMAARGGEAAAFGAEADRGDFEVFRSGSAPPTVEGALGAAAAAADLLVDDDLRADPAYQSYYYSNAHLNPRLPPPLLSKEDWRSSHHRLRSAAFGGIGDGRRQQQPAAQGTVGLPGIDLARQRSFSTVFQEDSYQRDMDRQTASHNSSESLCSSGIQYGLNRGPGTIGGLHSSNSLRSLDEIPNNDLPSNTFASLLGSSLSRSASPDPELVRRAPSPSLPPIGVKVGNTDKMNGGSSSFRRSSSAIGGSDDLVAALSGMNLSSRAMSGQTMDQSQLYQDVDNVQKFLFDRQGDQPNGNQQHYMRRPEHGQSKLSDGYSANLANSSTMRNQINSGSFTSFDSLSLGSGFPSPRIGSRSPGGTVSSRQNLAGMSNMLNYNGIGSPTASPSLQTSIDPAYIQYLAQIAATWDDPLMDRSHLGSSYMDLLGTQKANLGPLLQSQKQYGYCGNLGFNLGGYAGSPLTSPVLPSSPIAPGSPLRHGDRNMRFPPGMRNFGNSFGSWNSGMSGKMDANLMPSLLEEFKSNKSKSYELSEIAGHVVEFSADQYGSRFIQQKLETASTEEKDMVFSEIMPQALTLMTDVFGNYVVQKFFEHGSTAQIKELAGQLIGRVLALSLQMYGCRVIQKAIEVVDLDLQTKMVAELEGHVMRCVRDQNGNHVIQKCIECIPQHAIEFIVSTFYGQVVMLSTHPYGCRVIQRVLEHCDDPKTQQIMMDEILQSVCLLAQDQYGNYVVQPHERSAIIEKLIGQVVQMSQQKFASNVIEKCLAFGNPVERQVLIGEMLGSTSESEPLEVMMKDQFANYVVQKVLETCDDQQREMILTRIKTHLNTLKKYTYGKHIVARVEKLVAAGEKRLGLQPACTAA

SEQ ID NO: 45674 - protein, 232 aa, Zea Mays
MAKIAVTPTIVVAEFILFKKKVSLRKVSTLVVVSFGVAVATVTDLEFNFFGACVALAWIIPSAVNKILWSNLQQSGNWTALALMWKTTPITIFFFIVLMPLLDPPGLLSFSWDFKNSSTIIISALFGFLLQWSGALALGATSALAHVVLGQFKTIVIMLSGYLVFKSDPGFTSLCGAVIALAGMSVYTYLGMKESAANARRNSLNSRQNSHLKKAKAIVDGENPETKPMDSV

SEQ ID NO: 45675 - protein, 226 aa, Zea Mays
MDASSATSDSILDKAIDSEDAQHHDFLRLDHVEGYHELSAKTKIFFSTALGIWDADFYVKVDDDVHVNLGMLATTLARHKLKPRTYIGCMKSGPVLADKNVKYHEPEYWKFGEEGNKYFRHATGQIYAISKDLATYISINQPILHKYANEDVSLGSWFIGLEVNHIDERNMCCGTPPDCEWKGQAGNVCVASFDWSCSGICKSVERIKDVHARCGEGDSAVWSALF

SEQ ID NO: 45676 - protein, 300 aa, Zea Mays
MELAAKRSTLELLRSSGSPVTFETSQPRKKAFVVIGVNTAFSSRKRRDSVRETWMPQGEKLQQLEEQKGIVIRFTIGHSATSDSILDKAIDSEDAQHHDFLRLDHVEGYHELSAKTKIFFSTALGIWDADFYVKVDDDVHVNLGMLATTLARHKLKPRTYIGCMKSGPVLADKNVKYHEPEYWKFGEEGNKYFRHATGQIYAISKDLATYISINQPILHKYANEDVSLGSWFIGLEVNHIDERNMCCGTPPDCEWKGQAGNVCVASFDWSCSGICKSVERIKDVHARCGEGDSAVWSALF

SEQ ID NO: 45677 - protein, 153 aa, Zea Mays
MTSRSWWWRRWERTPRRFASRGGDPTSVLNRHLVPRLRRRRLLPPLARLRGPRWRQAPPSRRHLPLQHRPPRPRSAAPMSMMATRRTAPRAPPRSAAATPTQLLLVRSVCRLMSSWRHADLTATKRATHVLTDLAKNYKNRCSHCRGVHPIEF

SEQ ID NO: 45678 - protein, 228 aa, Zea Mays
MHMIRDMRLQFGTLLADIGLIDLPKDTLRHKVGSRKNNLESWFSNMSLPFNAYARCTSVIKSVMCAGLYPNVAASLEGVDPGALGGRKPSDVLFSKDRPRWYDGRREVHIHPSSVNHSLKAVQYPFLVFLEKVETTKVFLRDTSVVSPYSLLLFGGSMVIQHQTGVVVIDGWLRLSAAAQTAVLFKQLRMTLDAVLKELTRKPEMATFVDNEVVRSIIHLLLEEDKAR

SEQ ID NO: 45679 - protein, 268 aa, Zea Mays
MSTLSDPSKEDTSPEGSGTTQRNGAWSNTLNTLLQQASVYGVAAGYCLSASLLSIINKWAIMKFPYPGALTALQYFTSVAGVLLCGQLKLIEHDGLNLRTMWKFLPAAVMFYISIFTNSELLLHANVDTFIVFRSAVPIFVAIGETLYLHQPWPSLKTWLSLSTILGGSVIYVFTDNQFTVTAYTWAVAYLASMSIDFVYIKHVVMTIGLNTWGLVLYNNLEALMLFPLELLIMGEFDQMKVDSSKTGYFCYRVHSAWHSEQAPDCCY

SEQ ID NO: 45680 - protein, 305 aa, Zea Mays
MGALCDFCGEHRSMVYCRSDAASLCLSCDRNVHSANALSRRHTRTLLCDRCASQPAMVRCLAENASLCQNCDWNGHIAGSSSAGHKRQTINCYSGCPSSAELSRIWSFVSDIPNVAPEPNCEQGISMMSISDSGVSNQDNAAGDSILLDIASATLVSDIGTCDKLLVGSSSGAGVNLLPLATGQTETAGSVDSTPDKVPYTPDKDMFSKDSIYEDFCVDDADLAFENYEELFGTSHIQTEQLFDDAGIDIYFEMKEAPAGNSTEVCSLLMNIFFLIRYNHSHPCAHALLIVLVFSLLCQLTEPIL

SEQ ID NO: 45681 - protein, 247 aa, Zea Mays
MLSWLGIAAVAGSINVLLTNPIWVLVTRMQTHTQAKRKILESKRELLLKEMSRANSLEVAVLKDRLVKLESEKARPYGTLQAIQEVYHESGVRGFWKGLIPTLIMVCNPSIQFMIYETLAKRLQSKRSGKQLPKRHLTAMEVFLLGALAKLGATVVTYPLLVVKSRLQAKQEIGSNVMSRYTGTIDAIIKMVRYEGLHGFYKGMGTKIVQSVFAASVLFMVKEELVKLAVLLVASSRTMLITTSKKQ

SEQ ID NO: 45682 - protein, 158 aa, Zea Mays
MNFTTDKLRSLVKKWQTLIEAHVDVKTTDNYMLRLFCIGFTKRRPNQVKRTCYAQASQIRQIHRKMDEIMINQASTCDLKELVSKFIPEVIGKKIEKSTSSIFPLQNVFIRKVKILMAPKFDLGKLMEVHGDYKEDVGVKLERPVEGDEAMQEVAAAE

SEQ ID NO: 45683 - protein, 175 aa, Zea Mays
METMSALARTAPPLAGTIRRPSCALRPTASLSFAAASTTPRGRLGLGLSTAPAGSGRAARARAVPRRIVASSEHYKDLKDKPFFPKLIDYITSGPVVCMAWEGDGVVASARKLIGATNPLQAEPGTIRGDLAVQTGRNVVHGSDSPDNGKREIELWFKEGEVCQWESVQAPWLIE

SEQ ID NO: 45684 - protein, 204 aa, Zea Mays
METMSALARTAPPLAGTIRRPSCALRPTASLSFAAASTTPRGRLGLGLSTAPAGSGRAARARAVPRRIVASSVGEIISRFEKKGFLLKGLKLFQCPKDLAQEHYKDLKDKPFFPKLIDYITSGPVVCMAWEGDGVVASARKLIGATNPLQAEPGTIRGDLAVQTGRNVVHGSDSPDNGKREIELWFKEGEVCQWESVQAPWLIE

SEQ ID NO: 45685 - protein, 736 aa, Zea Mays
MLFKTQEVCAYNFCMLTEQRGQSQEAGSLSSPSEMAHCHNFAMLGIIEVFIDFSASKLEKASGKSKEMIEKEIVELVDAHSGFEKKISSGRERIARRRANAGDATDKHTNEPRENSNASLQKHHGNRGKFADSSLYELSVMCVKQCHADNYNNVSQHSSQTKLNQSSNLTSFVLKAFLELLKSLASKHSRDFTIKLHGDFKKLSQPIMQLVWCFLLDPIQENGGSKKNMTQGKKNTECKKDQLYLALTCLKKFLEPSVSGEHSSDIIDFLISLAPPNIEDTMGTGDLDNNDTTMVEDRSTRNVHVILNILKTLYARLLTQSVLRESEAVIELILGISRKLQLERRHLVGKWATDLCRKKTMQSPRMAREMLKLAIHLTPAPDDMILVYEVSTELMNLMTSGDDGDSSDTFHIINCKTKSSLAALSLQMVESSLTELDWGFGKLKAMLTLGYDCANIDEDQPADEIMLRLALEKALYSRSTLVVQVLSSFAHMSPMDTQAEHFLKLTVKFYKLLTRMSKSQIVPKGYRQSIPSLKFQKLAEVTCKMLTAPLYDFVFQQNQQIPIKGNLAKIRRETKCIPDLIFQIEDYEKYLIQLSKLTKVNLLRHAKRSVARDFQIKDKSGGQQEDDHIPDNAAASDNEADKDAMGPNAPVESCADDAQKSYADENASCESGHDEDAGGPNTPAEADADEIIRSSIPYGSPVQESESDREEEELLARTKRAKTKQVVQDSDEDADE

SEQ ID NO: 45686 - protein, 1045 aa, Zea Mays
MSATMASASQPSSQQPPPPPLTAEIVLRLASRDPSTAVPLLPELPPDDLADIVASLTATSPAGHLSLLPAILALLPSPSSASSAFAALLSAPSWPSSTLLAVATLLRDLPPAYRTRIPAFLGKIISLLPSADAQDLPALSYQLLLLASKPLYPRVVLAGLLRFFGGRRGARVRAPPSIARQVESTALMNVSFAVKQDPALAREVLAAIKADAAGALSGFAVAVMLFVARVPRFNEGAVSVLRDAVVVSRRDYRMSRRCKWLPDCMEGEYARATQCVEKGILKSVDESIVGREHVVPSIVQVAFRLLEVSEGDQGEEAGLGEGVMSTEEIGINMLKSLFEVHEMARTEIIEQCKFRILSAKPQQSVPVLRLIGCLILSHPFPMLEFIAHLKELLDYFSFMNDKISTALISCILPLTKFSRDLKDYVILVVRKAMFKREDMVRIAATNAIIELIIAENKKNEANPFEDSTSQPSSSQQPETHLEFGRCLFQELSGLLRRCLSHQASVKEVLYEGLIRTAISDPAVSDNILDFLWPHFQNYYSEDAECPLKIGSCFKVEHAKLCIVEPLDCLLSCISRILQIKQHSKCERPRDAYWKCFGFAASQDNEVGRASSSDLFVKALSSIQKYLRISLTEQRGQSQEAGSLSSPSEMAHCHNFAMLGIIEVFIDFSASKLEKASGKSKEMIEKEIVELVDAHSGFEKKISSGRERIARRRANAGDATDKHTNEPRENSNASLQKHHGNRGKFADSSLYELSVMCVKQCHADNYNNVSQHSSQTKLNQSSNLTSFVLKAFLELLKSLASKHSRDFTIKLHGDFKKLSQPIMQLVWCFLLDPIQENGGSKKNMTQGKKNTECKKDQLYLALTCLKKFLEPSVSGEHSSDIIDFLISLAPPNIEDTMGTGDLDNNDTTMVEDRSTRNVHVILNILKTLYARLLTQSVLRESEAVIELILGISRKLQLERRHLVGKWATDLCRKKTMQSPRMAREMLKLAIHLTPAPDDMILVYEVSTELMNLMTSGDDGDSSDTFHIINCKTKSSLAALSLQMQMK

SEQ ID NO: 45687 - protein, 126 aa, Zea Mays
MFPRISRLGARLLRESRAETRAGNLLNSQRIFFQDHVNRHSIPVVTPAVLSMRNALLSTATSGDQDESSQAKDKISVTFVNKDGSEKTICVPVGMSMLEAAHENDIELEAVVHDNLPCYCGYCRSM

SEQ ID NO: 45688 - protein, 401 aa, Zea Mays
MAIHHPHLLDFSPPPNTVAMEEAPPPPHFDHGLLGLHVDGMPHRVLADDAPVAAWAPQAVVSHSLYGYDNTAAGASSLFGHHEASEAQFSVLPPAASSFALLPNHHHQQQLPTTTAASSMQQPFQLRSSKYLGPAQELLAEFCSLEGDLLHATNKQGASGAAAGNSRWDDVETSSSSSAGLWGHLSLSSMDLLELERRKARLLSMVEEVDRRYRRYREQMRSVEVSFEAVAGAGASQVYTRLALRAMSRHFRCLRDALVAQVRALRKAMGERDGGPAGAAAGATKGDTPRLKVLDQCLRQQRAFQHPGTIDNYPWRPQRGLPERAVAVLRAWLFEHFLHPYPNDVDKHILARQTGLSRSQVNHSVHPQLYVSANSVIIMHVLNSPNHHPYLSLLCYEERVD

SEQ ID NO: 45689 - protein, 200 aa, Zea Mays
MGSRRYDIDTRRCGIHSRPTKSMYLDAQQIVSCQTRVGDHDVGSCAVKHHFPSPIVSWIEDLSSFGNASFNPVSEYVDEQARASVGQSSASSNLHDMQISVRLTAEFMELAKENTSNNLETCGILGASFRDGTYFVTMLIIPKQEGTAHSCQAVSEEEIHAVLSEQSLYPAGWIHVYILAFPYFMKFLLNARTSYMLRII

SEQ ID NO: 45690 - protein, 263 aa, Zea Mays
MALALLSPSTPSHRILLRPIPFPSLPVARATSAGSFGLAFFCPLSRGSSSLQRTGAAGGVIDSAGEGSSEEPVAGWLSADLLRRISGAADADRVLDIVAESVEGAGAALGAPECNAIVSAAFDRGNIALALSVFEAMRSGFAGVGGWRWARPDVRTYALLVQRLAAAPRVADAIMIIDYVSRAGASSMDEVPFGIIVRCPTCMIAVAVVQPQDGTQVVSCSKCRYQYELFSGDITSIESEEVRISSCRTQHGYFSPGESLEIY

SEQ ID NO: 45691 - protein, 571 aa, Zea Mays
MALALLSPSTPSHRILLRPIPFPSLPVARATSAGSFGLAFFCPLSRGSSSLQRTGAAGGVIDSAGEGSSEEPVAGWLSADLLRRISGAADADRVLDIVAESVEGAGAALGAPECNAIVSAAFDRGNIALALSVFEAMRSGFAGVGGWRWARPDVRTYALLVQRLAAAPRVADAIMIIDYVSRAGASSMDEVPFGIIVRCPTCMIAVAVVQPQDGTQVVSCSKCRYQYELFSGDITSIESEEVSMDISALEKALRFINMRKDGIPAAVHSIVIRSPSGTARTYRFATQNVTLPAQEGERVTISLAAPVNVYRDMGPLKVAARSQGFKPGEPMCLTNHINGQVSKLLRAPSKNKGTFFLSPYLLVGALAFLASTDAASAFIDPSLPRLVTATAIASAAIGTTLNGVVLPKIQKLPEKAVDIVAVQQKLLSQYDILQSRLKELKQFAQKEVWMLARMCQLDNKIVAVGEPSYRTRRDRVKRVRESLESTLLARIELMESYAKLCSMIEIEVEMDSDVIAAEAASSAERISEQIQQLMEIDSLEEQWRIQAEANDEAERLLSSDSSETYPAGRVI

SEQ ID NO: 45692 - protein, 160 aa, Zea Mays
MPHSIYRALIIAFSAWYLRISNANDIARILHQSEARGFLGMLGSINCMHWEWRNCLIVWRGQFCCRNLSPSMILEAIAFYDLWIRHAFFKMYGTNNDINILQISSVFNPLWRGIMPLVEYTLNDTSYNMGYDLVDGIYPDWLIFVKAIRHPWEEKKVYFT

SEQ ID NO: 45693 - protein, 679 aa, Zea Mays
MKGGRLHRPEPPQTHLAMAAAAAAPPIPAPNPTDDWVDGSWTVDCSCGVTFDDGEEMVSCDECSVWVHTRCARYVRGVHTSFSCHKCRRSKRVPSSADEAEVAELLAELPTHRPPPLYRRWAEVPLPARVHVHGLPGGGDGALFRGAPAFSAALWRCTGYVPKRFGFRYCEFPSWADDNDGADALFALAREKPREMTDDVLISTEPKKEKHYVRSLSCRGKKIDSNQQAMTPLTKAKKREPDSWKNECQQSEGCGIQDSICDDGHAETNMVSSDLLTAKTKKKMEESLEPSGENNNCEQVEISSKDGKKVPMKLEVSSGVQTTSSIVEQEVHSGFVGVEVTMYKQQPEEDHIVCSRPDITSSGPIKVQDIQGLPKQPNQASNLQVVAGVPDLLIGQPKPQTIKTEPSSQENKAAHCVDLVSDDHESNKQGLGDAAVLSIVQKDSSNLKYGSVSHEHLKSEAQNPRHTVAENPNSTLGSAKVCTSFSGSVSTPPELSHSLASKEPSSGNSDCSKKEELLSPTVSKHDPVKFSEDSSQEVTRYSEKVQLKDSQPSAPKSSQASRIHLSTVKHRLPVSKEQSQKIALTGGTSARSFHGEVPSLQSRNKAAACSSSQKKDKIYQRIINVTQDSSNNSAPTELRASDSAAPLSDEQLPQSTEGATLPSSSWCTDASFNWIICFF

SEQ ID NO: 45694 - protein, 454 aa, Zea Mays
MDEEYEDNLFLQCDKCRMMVHARCYGELKQLDGGLWLCNLCRPGAPRVSPKCCLCPVTGGAMKPTTDGRWAHLACAIWIPETCLKDVKRMEPIDGLSRINKDRWKLVCSICGVSYGVCIQCSHPTCRVAYHPLCARAADLCIELENDDKIHHMYLDEDEDPCIRLLSYCKKHRQPSAAERPSLESDPPEPIQVVQTDMASSSGCARTEPYNLHRRRGQKQPQVVATASLKRLYVENRPHIVSGYCQNRVGNTCGESIQPFGLSDAVQQEAIGNVSSMVEKYTIVKATFRKRLTFGKSKIHGYGVFAKVAHKAGDMMVEYIGEIVRPPISDTRERRIYNSLVGAGTYMFRIDDERVIDATRVGSIARLINHSCEPNCYSRAITILGDEHIIIFAKRDIDPWEELTYDYRFFSSDQRLPCFCGFPKCRGVVNDVEAEEQSAKIRVKRSELFEKSEK

SEQ ID NO: 45695 - protein, 117 aa, Zea Mays
MVCSGLFSSVKIFRCQLPRNNAFYSAQPPKHDGSDKPLCPGAPVCHWCGTWKGDKICSSCKKARYCYEKHQALHWRTGHKNDCLQIISSVASNSVLPAVGIGKLNRDLFGFQMVCWS

SEQ ID NO: 45696 - protein, 106 aa, Zea Mays
MWLAMACLLRDQHEQWKHKYGNPCRSGLFSSVKIFRCQLPRNNAFYSAQPPKHDGSDKPLCPGAPVCHWCGTWKGDKICSSCKKARYCYEKHQGFVWLPNGLLVLK

SEQ ID NO: 45697 - protein, 399 aa, Zea Mays
MVLARVLPLPAPSSAPHRRLLLPTQAAPAPARVLTVRAVACRAANAMAAVALDPPAVAPSPAEVAAVGVGEELPEGYDQMMPTVEPSRRRRAGLLLHPTSLRGPHGIGDLGDEALAFLHWLRDAGCTLWQVLPLVPPGRTAGEDGSPYSGQDANCGNTLLLSLEELVKDGLLMSDELPDPVDTEYVEFDTVANLKEPLIAKAAERLLLSHGELRTQYDCFKKNPNISGWLEDAALFAAIDKSINAFSWYEWPEPLKNRHLGALEDIYEKQKDFIETFMAQQFLFQRQWQRIRKYAQKLGISIMGDMPIYVGYHSADVWANRKSFLLDKNGFPTFVSGVPPDAFSETGQLWNSPLYDWKAMEADCFSWWIKRIKRALDLYDEFRIDHFRGLAGFWAVPSV

SEQ ID NO: 45698 - protein, 235 aa, Zea Mays
MLGHGLVTDPSRTLRCPVNSRVSSAPLGLVSSLNFNRGCKGKNKIFNVDRHTKYSTSFCYAPRNARITPLATASFGDMADSSTPIFPRIHVKDPYQRLGISREASEEEIRAARNYLISKYAGHKPSVDAIESAHDRIIMQSFFDRKKPKMNLKKKFRELSQSRAVKAIQGRFQTPRSKVIWQTAIAFVLLGVLTLAFPTEEGPTLQVAISCAANIYFIYQRVKSGWRAFFYGGQW

SEQ ID NO: 45699 - protein, 235 aa, Zea Mays
MLGHGLVTDPSRTLRCPVNSRVSSAPLGLVSSLNFNRGCKGKNKIFNVDRHTKYSTSFCYAPRNARITPLATASFGDMADSSTPIFPRIHVKDPYQRLGISREASEEEIRAARNYLISKYAGHKPSVDAIESAHDRIIMQSFFDRKKPKMNLKKKFRELSQSRAVKAIQGRFQTPRSKVIWQTAIAFVLLGVLTLAFPTEEGPTLQVAISCAANIYFIYQRVKSGWRAFFYGVQM

SEQ ID NO: 45700 - protein, 204 aa, Zea Mays
MADSSTPIFPRIHVKDPYQRLGISREASEEEIRAARNYLISKYAGHKPSVDAIESAHDRIIMQSFFDRKKPKMNLKKKFRELSQSRAVKAIQGRFQTPRSKVIWQTAIAFVLLGVLTLAFPTEEGPTLQVAISCAANIYFIYQRVKSGWRAFFYGFGSFFASWFLGTFLMVSVIPPILPGPRNLEVSTACVTYVLLFISSTFLK

SEQ ID NO: 45701 - protein, 244 aa, Zea Mays
MEDLHKIGGTPAVIHYLLEQGLLDGDCMTVTAKTLAENAKIFPPLSEGQQIIRPLDNPIKPTGHIQILYGNLAPEGSVAKITGKEGLYFSGPALVFEGEESMITAISENPANFKGKVVVIRGEGPKGGPGMPEMLTPTSAIMGAGLGKECALLTDGRFSGGSHGFVVGHICPEAQEGGPIGLVQSGDIITIDVSKRVIDVDLTEQQLEERRRKWTPPPYKSTSGALWKYIKLVAPASRGCVTDE

SEQ ID NO: 45702 - protein, 566 aa, Zea Mays
MDLTSPSPAARRAAAIARHLAAAAAPIPASSPLEPSCCLSYVPPESTERPAAFAPADLRLLLDGHDLPTRDWLFRAMEESPLFRSRSSRTGSRVFVAPDFNDGKEGQREATMRRIAYLNRRGVFRGWLTEDGAAAELRKLALLDCIAIYDHSLAIKIGVHFFLWGSAIKFLGTKRHHDKWLVATENYDIKGCFAMTELGHGSNVRGIETIATYDSETREFIINTPCESAQKYWIGGAANHATHTIVFCQLHINGRNEGVHAFVAQIRDEDGTVLPNIHIADCGHKIGLNGVDNGRIWFQNIRVPRENLLNLVADVLPDGRYVSMIDNPDQRFAAFLSPLTLGRVNIAVNSVYISKVSLAIAVRYSLSRRAFSIAPDAPEMLLLDYPSHQRRLLPLLAKVCLMSSAGNFMKNMYVKRTPEMSKDIHIYSSALKATLTWQNMITIQECREACGGQGLKTENRIGIFKSEFDVQSTFEGDNNVLMQQVSKALYAEFLGAQKKQQPFKGLGLEHLNGSSPVIPDKLTSSILRSSKFQGERFTEAVCRGGFSPSCTRRKQRKGFDAELSSC

SEQ ID NO: 45703 - protein, 361 aa, Zea Mays
MIDNPDQRFAAFLSPLTLGRVNIAVNSVYISKVSLAIAVRYSLSRRAFSIAPDAPEMLLLDYPSHQRRLLPLLAKVCLMSSAGNFMKNMYVKRTPEMSKDIHIYSSALKATLTWQNMITIQECREACGGQGLKTENRIGIFKSEFDVQSTFEGDNNVLMQQVSKALYAEFLGAQKKQQPFKGLGLEHLNGSSPVIPDKLTSSILRSSKFQMDLFCLRERDLLKQFVEEVSLHLAQGESREKALMLSYQVAEDLARAFTERTILQIFLEDEMNVPSGSLKEVLGLLRSLYVMVNIDESTSFLRYGHLSRDNVALVRKEVLKLCSELRPHALAVVSSFGIPDAFLSPLAFDWIEANALSTGSH

SEQ ID NO: 45704 - protein, 445 aa, Zea Mays
MSPIEGCPTVFQAICSLSPGIHEYKFFVDGEWRHDERQPTISGEFGIVNTLYLTREYNQINTLSSPSTPGSRMNMDVDNENFQRTVTLSDGTVSEGTLRVSEAAIQISRCRVSEYLSLHTCYDLLPDSGKVIALDINLPVKQSFHILHEQGIPVAPLWDSFRGQFVGLLSPLDFILILRELETHGSNLTEEQLETHTISAWKEAKRQTNGRNDGQWRPQQHLVHATPYESLRDIAVKLLQNGISTVPVIYSSSSDGSFPQLLHLASLSGILKCICRYFKNSTGNLPILNQPVCSIPLGSWVPKIGDLNSRPLAMLRPNASLSSALNMLVQAGVSSIPIVDDNDSLLDTYSRSDITALAKDKVYTHVRLDEMTIHQALQLGQDANTPFGFFNGQRCQMCLRSDPLLKVMERLANPGVRRVFIVEAGSKRVEGIISLSDIFKFLLSL

SEQ ID NO: 45705 - protein, 137 aa, Zea Mays
MTSSGDRTIKIWSVADGSCLKTFEGHTSSVLRASFLSRGTQVVSCGSDGLVKLWTIKTNECIATYDKHDGKVWALAVGRKTEMVATGGTDAVLNLWHDCTMEDKQEDFRKKGSIHAYVTVRHLQHSKTHQCCRSKKF

SEQ ID NO: 45706 - protein, 564 aa, Zea Mays
MLPNEQGLLCVTADQQFLFYCPKRTDDGTFELSLYRRLIGYNDEILDLKFIGEEEQYLAVATNLEQVRVYDVASMSCSYVLAGHTEIIVCIDTCVSASGKTLVVTGSKDNTVRLWDAERKSCIGIGKGHLGAVGSVAFSKKTKDFFVSGSSDRTIKVWTWDNTLGDAEDEVPLKAKAVVAAHDKDINYLTVSPNDGLVCSGSEDRTACIWKLPNLVFSVALKGHKRGIWSVEFSPVEQCVMTSSGDRTIKIWSVADGSCLKTFEGHTSSVLRASFLSRGTQVVSCGSDGLVKLWTIKTNECIATYDKHDGKVWALAVGRKTEMVATGGTDAVLNLWHDCTMEDKQEDFRKKEQEVLRGQELENAVSDSDYAKAIQLAFELRRPHKLLDLFSQLARRADAEDPIEKALLGLPKDGLRVLLEYAREWNTKPKFCHVAQFVLFRVLRSFSPTDILEIKGISELLEGLIPYSQRHFSRVDRLVRSTFLLDYTLTRMSVVDPDVDAGSIKDEMNGSSVENGELAEPRPASPVPEKSSKKRKSGKSSKKGKEKVMKLASSGLGKGVSVEA

SEQ ID NO: 45707 - protein, 529 aa, Zea Mays
MASSSTCVLKKNYRCDRSLQQFYTGGPFAVGLAPGGDGEGGAEAEAFLACACGGEVRVVSSADASAIGEPVDGDSEAITALALSPDSRLLFAAGHSRLIRAWDLASRACIRSWKGHDGPIMAMACHVSGGLLATAGADKKVCVWDVDGGFCTHFLRGHTGVVTSVMFHKDPKRLLLFSGSEDGTVRVWNLETKKCVAVLKEHFSAVTSLALSDDGQTLLSAGRDKIVTAWDIRKYSSKKTIPTYEMIEAVSFIGPGSEFLACLGIELANKKEKDTAYFLTVGERGVVRIWCLESCLCVFEQQTSDVTVNSENKETRRGFTSAVMLPNEQGLLCVTADQQFLFYCPKRTDDGTFELSLYRRLIGYNDEILDLKFIGEEEQYLAVATNLEQVRVYDVASMSCSYVLAGHTEIIVCIDTCVSASGKTLVVTGSKDNTVRLWDAERKSCIGIGKGHLGAVGSVAFSKKTKDFFVSGSSDRTIKVWTWDNTLGDAEDEVPLKAKAVVAAHDKDINYLTVSPNDGLVCSGSEVRF

SEQ ID NO: 45708 - protein, 1394 aa, Zea Mays
MRIAIAMDHRQDAGDGEEERQQQLGDLETDKEPVQKQGQLSPSSSWRAAAAASIRESLSRSLSSLSHQQEEKDDDEVELRWAAVGRLPTMDRLHTSLQLHAGQRQVVDVRRLGAAERRMVVDALVANIHRDNLRLLRKQRQRMDRVGVRPPTVEVRWRDVRVEAECQVVHGKPLPTIWNAVVSGLSSVSTMVGLNRQREARVRILHGVSGVAKPSRLTLLLGPPGCGKTTLLKALAGKLRATGLKVTGEIEYNGVELNNGFVPEKTAAYIDQYDLHVPEMTVRETIDFSARFQGVGNRAEIMKEVIRREKEAGITPDPDVDTYMKAISVEGLERSMQTDYIMKIMGLDICADIMVGDAMRRGISGGEKKRLTTGEMIVGPSKALFMDEISTGLDSSTTFQIVSCLQQLAHISESTILVSLLQPTPETYELFDDIILMDEGKIVYHGPKSCIMGFFESCGFKCPDRKGAADFLQEVLSKKDQQQYWSHSEETYNFVTIDQLCDKFRVSQIGQNLAKEISKPCDKSEGLKNALSCSIYSLSKWELLKACSARELLLMKRNAFIYIGKSVQLALVAAITGTVFLRTHMGVDIVLANYYMGSLFYALLLLMVNGFPELSMAVIRLPVFYKQRDYYFYPAWAYAVPAFILKVPISLVESIVWTSLSYFLIGYTPEASRFFRHLLILFLIHTGALSMFRCVASYCQTMVASIVGGTMALLLILLFGGFIIPRSSMPNWLEWGFWLSPLSYAEIGLAETEFLAPRWLKLTASGVTLGRRVLLDRGLNFSVNFYWISIGALIGFIFLCNIGFAIGLTIKKPPGTSRAIISYDKLSRLNRRDQCVLVDTKDGINKQQENSSARSGTGRVVLPFVPLAVSFKDVNYYVDTPAEMREKGYMEKKLQLLHNITGAFQPGVLSALMGVTGAGKTTLLDVLAGRKTGGVIEGDIRVGGYPKVQETFARISGYCEQTDIHSPQITVGESVAYSAWLRLPTEIDSKTRDEFVNQVLETIELTEIRDALVGMPGINGLSTEQRKRLTIAVELVSNPSVIFMDEPTSGLDARAAAIVMRAVKNVANTGRTVVCTIHQPSIEIFEAFDELMLMKRGGQLIYAGPLGYRSSILIKYFQAIPGVPKIKDNYNPSTWMLEVTSTSLEAQLGLDFAQVYMDSSMYKHEQQSLFNILGCMYGTTIFSGINNCQSVMPFVSIERSVVYRERFAGMYSPWAYSLAQVTMEIPYVLVQIVLFMLIAYPMIGYAWEAAKFFWLLYTMFCTLLYFLYLGMLMVSVTPNIQVASILTSLFYTIQNLMSGFIVPGPQIPKWWLWLYYTSPMSWTLNVFFTTQFGYEDQKKIDVFGETKSVAAFLKDYFGFKRELLPLSAIVLAAFPIFFAALFGYSISKLNFQRR

SEQ ID NO: 45709 - protein, 95 aa, Zea Mays
MHSPQAQGGQSISVLTFEHTKVWNSLESHNPAICCTLQIVCWKEKSCLVFLFVSDDFVSEAAPVTFGFPTATNATLFLVPSLRLQVLASTEGVRH

SEQ ID NO: 45710 - protein, 538 aa, Zea Mays
MATAMSVSAVSPPAAAVTRPRTMVCVPATARAPREMAAELAAAAALGADVAELRLDCLAGFAPRRDLPVILAKPRPLPALVTYRPKWEGGEYEGDDESRFEALLLAMELGAEYVDVELKVADKFMKLISGRKPDNCKLIVSSHNYETTPSSEELANLVAQIQATGADIVKIATTATEIVDVAKMFQILVHCQVPIIGLVMNDRGFISRVLCPKYGGFLTFGSLKKGKESAPAQPTAADLINLYNIRQIGPDTKVFGIIGKPVGHSKSPILHNEAFRSVGFNAVYVPFLVDDLAKFLDTYSSPDFAGFSCTIPHKEAAVRCCDEVDPVARDIGAVNTIVRRPDGKLVGYNTDYVGAISAIEDGIKESEPTDPDKSPLAGRLFVVIGAGGAGKALAYGAKEKGARVVIANRTFARAQELANLIGGPALTLADLENYHPEEGMILANTTAIGMHPNVNETPLSKQALRSYAVVFDAVYTPKETRLLREAAECGATVVSGLEMFIRQAMGQFEHFTGMPVDDYKFRAIASSLDNPNTMKPRL

SEQ ID NO: 45711 - protein, 94 aa, Zea Mays
MEIYNLDDVVTPSQLRSTIAKEIRKNQNVTNPKVIDMLLFNATEELNNIVEHAKQRHHVIGQYVIGQEGLVHELGSKDLGNSDFLKKFYTSNYF

SEQ ID NO: 45712 - protein, 538 aa, Zea Mays
MVDSVHDNIVLNKCIKDILALIKPVEDDRSKRLSTIQELENCIHSLASLSGAAVKPFGSFVSDLYSKSGDLDLSVQFGNGSNHPINKKKKQNALRDVRKALLSRGVTGYMQMQFIPHARVPVLQYVSKQFGISCDISIGNFAGRIKSKIFYWVNTVDERFGDMVLLIKEWAKAQNINDPKSGTLNSYSLCLLVLYHFQTSEPPILPPLNEIYEGNIAGDVTEAALFDEQHLDEVCAANIERFRLQNKGRRNETSTCRLLGTFFQKVEDPVERPDNAARAVSMKGLDLIAIAFNDACHKFKSLEHIDRNELLALLCTPVVRLKLGVRVRENSYPKSPRNNVHSRIRGQMWRDRGQAPSARGFTGTRSVHENPLANTTAHETAVQYHNHVQPTTVRQTAIRNQVTNTAVHQTAPYQNHTARQVYPTWSQTAEPYQNHNQQVYATGFQTGPYQSHNQVHAYRAGLPPGGIYEIHNQQVYNAGFQTDGPHQNQQRRKGYPSNHQNNRLSATAARYEPVRGQFNNGSTWDSRSQAPGSAALRR

SEQ ID NO: 45713 - protein, 379 aa, Zea Mays
MAAAANGGDGEELLLLSAVEAGRGGGVPTEVEDSWRLNFEGFRPPEAHQERPPNGPLHHCLGVLAQGPEDVVAEYYQQQVEMLEGFSEMDTLTDRGFLPGMSKEEREKVARSETLAIRLSNFANMVLFAAKVYASVRSGSLAIIASTLDSLLDLLSGFILWFTAFSMQTPNPYRYPIGKKRMQPLGDEFSLTSDQEKWLVDIMLSVTLVKLALVIYCRSFTNEIVKAYAQDHFFDVITNVIGLVAALLANYIEGWIDPLGAIVLAIYTIRTWSMTVLENVHSLVGQSASPEYLQKLTYLCWNHHKAVRHIDTVRAYTFGSHYFVEVDIVLPSNMPLREAHDIGEALQEKLERLPEIERAFVHLDYEFTHRPEHALSHEK

SEQ ID NO: 45714 - protein, 404 aa, Zea Mays
MAADADAAEVERLYELGERLSSAKDKSELAADYEAIIAAVKGQSVKAKQLAAQLIPRFFRSFPALATRAMSAMFDLVDMEELAIRIQAIRGFPLLGKDTEFVSKIADVLGQLLTSEENVERDAVHKALMSLIREDVKNSLQPLFKHVEQGSEIREKIICFLRDKVFPLKAELLKPQAEMERFITDLVKKSVQDVTGSEFELFMGFLRSLSIFGDSAPRESFQELIEIIQAQADLNSQFNVSDIDHIERWISCMYMALPIFMRGASASKFLNYFVKQIVPAFEKIPEEKKLDLLKTIASSSPYATAQDSRQLLPSVVQLLNKYMPGKKVDDINHNYVECLLYTYHHLAHKTPNTTNSLCGYKIVTGQPSDRLGEDFTEHYKDFTERNNKTRQFLHLQQHGFEKPE

SEQ ID NO: 45715 - protein, 470 aa, Zea Mays
MAADADAAEVERLYELGERLSSAKDKSELAADYEAIIAAVKGQSVKAKQLAAQLIPRFFRSFPALATRAMSAMFDLVDMEELAIRIQAIRGFPLLGKDTEFVSKIADVLGQLLTSEENVERDAVHKALMSLIREDVKNSLQPLFKHVEQGSEIREKIICFLRDKVFPLKAELLKPQAEMERFITDLVKKSVQDVTGSEFELFMGFLRSLSIFGDSAPRESFQELIEIIQAQADLNSQFNVSDIDHIERWISCMYMALPIFMRGASASKFLNYFVKQIVPAFEKIPEEKKLDLLKTIASSSPYATAQDSRQLLPSVVQLLNKYMPGKKVDDINHNYVECLLYTYHHLAHKTPNTTNSLCGYKIVTGQPSDRLGEDFTEHYKDFTERLTGTEETVRAASKRLTQGMADFSKAISSAKTEEEKTKIKGDQQTSTRTMRSYNNILAMAQKGSTGTVVRAAVSLSHQIPGLKRPP

SEQ ID NO: 45716 - protein, 507 aa, Zea Mays
MAADADAAEVERLYELGERLSSAKDKSELAADYEAIIAAVKGQSVKAKQLAAQLIPRFFRSFPALATRAMSAMFDLVDMEELAIRIQAIRGFPLLGKDTEFVSKIADVLGQLLTSEENVERDAVHKALMSLIREDVKNSLQPLFKHVEQGSEIREKIICFLRDKVFPLKAELLKPQAEMERFITDLSVQDVTGSEFELFMGFLRSLSIFGDSAPRESFQELIEIIQAQADLNSQFNVSDIDHIERWISCMYMALPIFMRGASASKFLNYFVKQIVPAFEKIPEEKKLDLLKTIASSSPYATAQDSRQLLPSVVQLLNKYMPGKKVDDINHNYVECLLYTYHHLAHKTPNTTNSLCGYKIVTGQPSDRLGEDFTEHYKDFTERLTGTEETVRAASKRLTQGMADFSKAISSAKTEEEKTKIKGDQQTSTRTMRSYNNILAMAQPLHSKSPLFIGDKKIALSWMEHPKKPTATTAGLQIIQGGRGHNLLLQMGMALQTRKGEEECTTSL

SEQ ID NO: 45717 - protein, 160 aa, Zea Mays
MLCLLPLQAGEEGREEGRKEGRKEAGAGQNGVQVCALPVPAAEPRDVPELAVAVPASAAVPVLPEASASAAQVAAEAAAVHLFEPRRLCLRQDTAGGLATDAAAGLAAPVGHLQRRHRGEPVLRHVTLRACFVMYSSLLACCCAAIGTGPRCYLGRCHSF

SEQ ID NO: 45718 - protein, 139 aa, Zea Mays
MDESMMKACAAVARVRVEVDKLSAKVCDLEKNVLGGRKVEDKEFVVLTELLMMQLLKLDGIEAEGEARAQRKAEVRRVQSLVETLDKLKARNANPFSDHNKAVSVTTQWETFENGMGSLSAPPPRVSSTQANTDWEQFD

SEQ ID NO: 45719 - protein, 1133 aa, Zea Mays
MDPRRLPILLSLLLAFFSAVVASDEIHGCGGVVEASSGLAKSRKASDSKLDYSDITVELCTVDGLVKESTQCAPNGYYFIPVYDKGSFMVRVKGPKGWSWKPETVPVIIDHNGCNGNADINFQFTGFMISGKVVGAVGGKSCSKRGGPAGVKIELMTDSDELIASALTSSSGEYSFTNIIPGRYILRASHPDYEIELRGSPEIDLRFGNAVADDVFFVSGYDIYGTVVAQGNPIVGVHLYLYSNDVTKVPCPQGFSDAPKEGALCHAISGADGKFTFRSLPCGSYELLPYYKGENTVFDISPSSLSVSVEHSHLTIPQKFQVTGFSVGGRVIDGYGAGVESANVIVDGQLRAITDSLGYYRLDQVTSKKYTITAEKDHYKFNRLEDFMVTLTHGPENVKPQRKLVGENGHFCFEVPAGEYQLSALPVDSERSSSLMFSPGSISVNVNSPLLDLEFSQSQVNVHGKVSCKQQCSQNILVSLVRLAGGVEQEKKTTTLEQDNVNFVFKKVFPGKYRVEVKNSLPEGLAKDDWCWDQSILNIDVGTDDVRDIVFVQKGYWIELVSTHDTNAYIQQPDSSRLDLLIKKGSQRICVETSGQHEIHLTNPCISFGTSSVLFDTANLMPIHINAKKYLVKGEIHVDMSSIQENIDSKDIVVDILKSDGSFIEKISTSLVLGKDNQNDFTAFEYSIWADLGEDFIFVPHDSSIGRNKVLFYPARQQYSVSMNGCQDTVPLITARTGLYLEGSVLPATSDVDIKILAAGKSNYAHLNKGDVATEAKTDSEGSFFAGPLYDDIVYKVEASKDGYHLKQTGPYTFSCQKLGQILVRIYGENSELLPSVLLSLSGEKGYRNNSISSSGGTFTFDNLFPGSFYLRPLLKEYKFNPSAVAIDLNSGESREAEFRATRVAYSAMGSVTLLTGQPKEGVFVEARSESTGFYEEATTDSFGRFRLRGLVPGSTYSIRVAAKDNLQFAAVERASPEYLSVNVGHEDMTGIDFVVFERPEVTILSGHVEGDGIDTLHPHLSVEIRSATDSSRVEAVLPLPLSYYFEVRDLPKGKHLVQLRSGLPSHTHRFESELVEVDLEKDPQIHVGPLKYKTEERHQKQELTPAPVFPLIVGVSVVALVISMPRFAAISQ

SEQ ID NO: 45720 - protein, 643 aa, Zea Mays
MLLKSKFKLATAIGIVLSMLSLLVHLFLANYSAGGITKYSMHMDDVLPFGPRPRPRRLWGPLVPLDHLHPFVKPSKSYAVPSKHNGFIYAKIYGGFEKIQSSICDLVAVARLLNATLVIPEIQATTRTKGISSKFKSFSYLYDEDHFIHSLSSDVVIVHGLPKDLREARKKIKFPTVSPRNSATPEYYIKEREVRAFPCGFLQSILPASLEEFQQLRCRVAFHALRLRPQIRALGSQVVGRLRASGRPYVAYHPGLLRDTLAFHGCAELFQDIHTELIQYRRNQMIKRGTVKEQLTVDSVSRKMAGLCPLMPEEAGLLLQALGYPPTTIIFLAGSETFGGQRMLIPLRAMFANLVDRTSLCSQRELFDLVGSEDPLTSDLPQPPPPKSEKQLIEEWKRAGPRPRPLPPPPARPFYAHEKEGWYGWIGENDTEPEASLIEFRRQAHRLLWDALDYFVSVEADAFFPGFHNDGSGWPDYSSLVMGHRLYQTPSGITYRPDRKIIAALFEEVNDHRYHPPRNWTIAAREHLNRSASVEGIVSSAMLSKPVSFLAHPLPECSCRTPKSPAVQPVKDSNGRSLFGGEVECPDWMARSLAMASARNSEPQNEDYEDELREDGSSQDTQESNTSDSNKSSEQDEEMDPDD

SEQ ID NO: 45721 - protein, 74 aa, Zea Mays
MEGVPSSRNYSGGFTSKLMAKDLDLAMASASGVGFKCPMGSNALEIYRKLCEDGCELKDFSCAFRHYYSGKNEE

SEQ ID NO: 45722 - protein, 646 aa, Zea Mays
MEVNSSGEETVVKVRKPYTITKQRERWTEAEHKRFLEALKLYGRAWQRIEEHVGTKTAVQIRSHAQKFFTKNFQRKELSEKGSRSEVLNLFRDAPSASFSSVNKSSSNHGAPRRTEASKTESRDMSIMENNSFNPNTQEDVKVISDQEMERLNGIQIRSKCEHSHEGYLDISTQQMKLMPKSVETTYVDEQTARASHTLAESDGTASIPVTVPEGTHPDQTSDQVGINGSMNPCIHPMVSADPKFGSSATPQTFPHNYAAFAPMMQCNCNQDTYRSFTNMSSTFSSMLVSTLLSNPAIHAAARLAASYWPAAEGNTPIDPNQENPADGVQGRNIGSPPSMVSIVAATVAAASAWWATQGLLPFFAPPVAFPFVPAPSAAFPTVDVPRPSEKDRDCPAENAQIECQEARKQVQFEGLRIAASSESDGSGKGEVSLHTELKLSPAQNADATPTTGAGTNDAFRNKKKQDRSSCGSNTPSSSDVDAGNVPEEDNANEKAKQASCSNSSAGDTNHRRFRSNGSTSDSWKEVSEEGRLAFDALFSREKLPQSFSPPQAVDSKEVAKEEEDEVTTVAVDLNKNATSIDHDDLDTMDEPRASFPNELSHLKLKSRRTGFKPYKRCSVEAKENRVPASDMVGTKRIRLDSEAST

SEQ ID NO: 45723 - protein, 286 aa, Zea Mays
MHWDVETGKCEKYIWPSENVLVSHHAKPPISAKRSKQVLALAASSDGRYLASGGLDRHIHLWDVRSREHIQAFSGHRGPISCLAFAPDSSELFSGSFDRSIMQWNAEDRTYMNCLYGHQNEILTMDALSKDRILTVARDRTMHLWKIPEESQLVFRAPAAASLECCCFIDDKEFLSGSDDGSIELWSIMRKKPILIIKNAHPVLCTNLNSVDNDDESPKENGMHKPENVPSAAQSWVGTVAARRGSDLVASGAGNGLVRLWAIKPDSKGAEPLFDLKLNLLIGAVG

SEQ ID NO: 45724 - protein, 229 aa, Zea Mays
MILLGLKFLYYYLCFIQGLNIFRFANRIPLLFEQGADVITRTAAKRISYKINQQQDKIGVFVSIVSTKIPFKGTGKEYIGDDITEISSAVKSALKQCCLQLKSKIVKKLQARERQDRKRNLNRYIPDVARAVMETLVEIADQSPPKRPRYDKEDEELLEKVNSQEVTEMTFRDCLTQHVEQVDYEMALDYAMQSGVSEEPREAIYLNSLEGSYKFVDLQSPVFVFRFVH

SEQ ID NO: 45725 - protein, 270 aa, Zea Mays
MVPLHCSASVHLHFLSPSLPLSSSFSLLCHRVRRPTAIRAEAEVRPPLPVSAAESEPPDAGAVEAEGQGPVELRAPTLFSTDDNPTPLQTATSLLLTGAISVFLFRALRRRARRAKELRVRSSGLKKPNNLTEEALERLRLMSASPIETEKATSPIQALLGGIAAGVIALILYKFSTTVEAALNRQTISDSFSVRQITITIRTIVTGLCYLATSVFGINAGRLVNNLIHWHHLIAPQVAGNQTVVTCKSLTKVKTQQRSRARHVIQTAKI

SEQ ID NO: 45726 - protein, 374 aa, Zea Mays
MFVSWTMLTELNLARYSKESTYSHPRNNLLSSIPADIGTLSKLGILDLHSNQLKEYPVGACNLKLSFLDLSNNSLSGLPAELGKMTTLRKLLLTGNPMRTLRSSLVSGPTTTLLKYLRSRLSSDEEASGSRSTPTKDDQIAAARRLSLSSKELDLSGLGVTSVPAAAWETSDVVKLDLSKNSIEDLPNELSLCSSLQSLVLSNNKIKRWPHTVVSSLPCLSSLKLDNNPLVEISSTDLVPLSKLEVLDLSGNASALPEPSAVSALPQLQELYLRRMKLHEFPNGLLGLKLLRILDLSQNHLTTVPEGIKNFTALIELDLSDNNITALPAELGLLEANLQVLKLDGNPLRSIRRTLLERGTKAVLKYLKEKLPSE

SEQ ID NO: 45727 - protein, 634 aa, Zea Mays
MGRQPKPPASPSPPPCPPSDSDPDPGSGFDPIEEWLVDFDPAMSSELEAKGPELAEQAAAVPLTLETAAQKSFELEFGVKDQKVEVVSSELDGLLAPDQLLVSGIGDLAVREDIPEEAVAMKMAATPPAAADTDMNTTVSVEVESEGGKEGQEAPAAPADAEMMNTMVSVEVEAQGGKEGQESSDEESESESSEDDDELSSSEDSSSSEDEKEQGVNKDEESSEASSSEEEGLEVRRHGGKADNLQSLLEEGELMMGSDVENEEQKGGTKSKYEAEVLPPVPKIEIQLEPHHQTLPVGTISAIMGERVIVEGSVQHNPLNEGSILWITESRMPLGIVDELFGPVKNPYYLVRYNSEEEVPAGISAGTDVCFVAEFADHILNMKELYAKGYDESDSVDKDAEDLPDFSDDEKEAEYKRSLRQAKRQTDRQHEPMKTSCYMKGSQPRGSGIRKPMPPRNLDTSTRGHQPQPHFRRSDMAPAASSSQHGGRWSCTRRQHHAEPPRRSQPIPASVSEPELQWRRSQPVPAAVSEPELQWRHRSQPVPAAVSEPELEWPRDQPIPAAVSEPELQWLPKPNAHALSSDHAPDRNACKSNAVRWQTTSEPSIWSSVYCPYGARQLWSASKSTRIYDSGATR

SEQ ID NO: 45728 - protein, 264 aa, Zea Mays
MSAAQLLRHSRKLRSLQNPVGCENFSFVRHFSSGSGSFIARENGIGKRTRGTRFSQHNQPAKQLETFSAGVNGSCTWRIASNSLTPSAASWLSGSFSCGQVVSARPFSSSADLPPHQEIGMPSLSPTMTEGNIAKWLKKEGDKVSPGEVLCEVETDKATVEMECMEEGYLAKIIHGDGAKEIKVGEVIAITVEEEGDIEKLKDYKPSSSAEPVAPAEPKAEPEPSQPKAEEKKPTQAPEAKTPKIEEASQSGDRPTIKCERYWS

SEQ ID NO: 45729 - protein, 443 aa, Zea Mays
MVVSARPFSSSADLPPHQEIGMPSLSPTMTEGNIAKWLKKEGDKVSPGEVLCEVETDKATVEMECMEEGYLAKIIHGDGAKEIKVGEVIAITVEEEGDIEKLKDYKPSSSAEPVAPAEPKAEPEPSQPKAEEKKPTQAPEAKTPKIEEASQSGDRIFASPLARKLAEDNNVPLSSVKGTGPDGRILKADIEDYLASVAKGGLRESFADPGLGYVDIPNAQIRKVTANRLLASKQTIPHYYLTVDARVDKLVQLRGELNPLQDASGGKKISINDLVIKAAALALRKVPQCNSSWMNDFIRQYHNVNINVAVQTEHGLFVPVIRDADKKGLGAIAEEVKQLAQKARDNSLKPADYEGGTFTVSNLGGPFGIKQFCAIINPPQSAILAIGSAEKRVIPGSADGQFEFGSFMSATLSCDHRVIDGAIGAEFLKAFKGYIENPTSMLL

SEQ ID NO: 45730 - protein, 225 aa, Zea Mays
MAANAGNKIRNAKLVLLGDVGAGKSSLVLRFVKGQFVEFQESTIGAAFFSQTLAVNDETVKFEIWDTAGQERYHSLAPMYYRGAAAAIVVYDITNPASFTRAKKWVQELQAQGNQNTIVALAGNKADMLDARQVPAEEAKAYAQENGLFFMETSAKTAINVNDIFYEIGEMSTILNLLVWAVHGLRISCTAKKLLQGQQAPSPQAGMVLNQRPNERTVSSSSCCS

SEQ ID NO: 45731 - protein, 287 aa, Zea Mays
MVKEREEQVAIVRMVLGEGTPEMDIIRALHMAGDDPTKAINILLDLNKAAPPLPPSPSPFPCPSPSPSPGKPAKALVDSTPPCKAPTRPMPTAEKPKSTTSNGGSEEHWWLVGSAEMVGLSTCKGRRITSGDVVTFSFPNATTAVGKSRPSRPALASCSSEIMRFSTPSHGEVGRIPNEWARCLLPLLKENKLKVKGSCKSAPEVLTIMDTVLLSVSIYINSSMFHDQKQSSPKAARFAPYDSTFHPLPALFKLIGLAPFIKAAFTPEDLYSRKRPTETKILAFYVF

SEQ ID NO: 45732 - protein, 69 aa, Zea Mays
MANSNLPRRIIKETQRLLSEPAPGISASPSEENMRYFNVMILGPAQSPYEGVPLIYGWLYLAYFCMDSL

SEQ ID NO: 45733 - protein, 630 aa, Zea Mays
MNSMDEINLLRQAQRQHQHHLMVRGIGEEIDLEIGPVDDPSFSGASLVAVTSTHDTVVHADDHKSLLIPCSQPGAADGLAPQQHLSQGEEHDGMLRSPSGHTKKKKKVVKKWREEWADTYKWAYVAVHDTTTRIFCSVCKEYGRKHRRNPYGNEGSRNMQMSALEEHNNSLLHKEALRLQMASKEKLQPPEIEGPVYVKALSKTAASILECVLRRDPHEAEYIQSIQEVVHSLEPVLVKNAQVPWIDDRGEAHVNRGFRVQFSQALGPCRGGLRFHPSMSLSVAKFLAFEHTLKNALSLYKLGGAAGGSDFDPKGKSDNEIMRFCQSFMDELYRYLGPDQDFPAEDIGVGPREMGYLFGQYRRLSGHFQGNFTGPKIFWSGSSFRTEATGYGLVFFARLLLAEMNKELKGLRCVISGSGKIAMHVLEKLLPCGAIPITVSDSKGYLLDEDGFDYMKYSLLRDIKAQQKSLKEYLKSYPHAKYIDDAKPWSQRCDVAFPCASHNEIDQGEAVAISNSGCRVLVECSNMSCTVQAVDILRKAKVIVAPAKATAAGGVALGEIELNPEFNLMQLSVEDFENRIQDAIKQTYERSVKAAQDYGIMKESPEFLVHGANICAFLNIAQAMTDQGCV

SEQ ID NO: 45734 - protein, 228 aa, Zea Mays
MLQDDSMTILMAFRAPSVEIIGLTTIFGNVDTKGATRNALLLCERAGCPEVPVAEGSHEPLKGGKPRVADFVHGSDGIGNLFLPAPSAKKVEESAADFLINKVSEFPGEVSVLALGPLTNVALAIKRDPSFASKVKKIVVLGGAFFAAGNVNPAAEANIHGDPEAADIVFTSGADIVVVGINITTQVCLTDEDLLELRNSKGKHAAFLYEMCKFYRDWHAKSDGFHGI

SEQ ID NO: 45735 - protein, 294 aa, Zea Mays
MFENYKVPALFLAKNAVLTSFASGRATSLVVDSGGGSTVVSAVHDGFVLQKSVSTSPVGGEFLTDCMMKSLESKGIVIRPRYSFKKKEISPGEYKIVDLDLPNTTESYRLYCMRAIASDVKESVCRVPDTAFDEVAYANVPTTSYELPDGQTIEVGADRFKVPDILFNPSLSQTIPGIDGFADSIPVRGLQRMVIDSVNKCDVDIRKELFSNILLSGGSSSILQLKERLEKEVLEESPQAARVKVMASGNSVERRFSVWIGGSILASLGSFQQMWFSKAEYEEHGVSYIQRKCP

SEQ ID NO: 45736 - protein, 228 aa, Zea Mays
MMKSLESKGIVIRPRYSFKKKEISPGEYKIVDLDLPNTTESYRLYCMRAIASDVKESVCRVPDTAFDEVAYANVPTTSYELPDGQTIEVGADRFKVPDILFNPSLSQTIPGIDGFADSIPVRGLQRMVIDSVNKCDVDIRKELFSNILLSGGSSSILQLKERLEKEVLEESPQAARVKVMASGNSVERRFSVWIGGSILASLGSFQQMWFSKAEYEEHGVSYIQRKCP

SEQ ID NO: 45737 - protein, 1042 aa, Zea Mays
MATLHSMVTLLLLPLLLLTARPASSSSSIDRYEKHHDREALLALKEALIGSSGLLSSWNSSSSDVCRWAGVTCSRRHAGRVVALSLRQRNLGGSISPAIGNLTFLRSLDLFDNMLSGEIPRTMTRLRRLSFLELAYNYLAGEIPEGLANCSNLAYLSVEVNQLHGGIPSGLGLLSRLQVLYVGENSLTGHVPPSLGNLSALQRLALYQNKLEGAIPEGLSRLRYLRYIQAARNSLSGTIPPRFFNISSLQYFGFSSNRLHGRLPPDAGRHLPDLQVLLLGGIGNNFSGTLPASLSNATKLQELGLAHNSFEGKVPPEIGKLCPESVQLGGNKLQAEDDADWEFLRHFTNCTRLAVLDVGGNALGGVLPRFVANFSGPVNTLIMEKNRMSGSIPLGVGSLVHLEDLEFGGNNLRGVIPEDIGRLRNLKFFTLEENLLSGGIPTSFGNLTQLLSLFLSNNRLNGSIPENLGSLRRLTSMALSFNRLTGAIPGALFSLPSLADSLLLSHNYLSGVLPPQIGSLKHATTLDLSTNNLSGEVPGALGDCASLVYLYLDGNSFTGSIPPSIGNLKGLSTLNFTRNGLSGSIPQELSQIHGLQRLCLAHNNLSGAIPQLLQNSSALVELDLSYNHLGSEVPTHGVFANMSGFSATGNDGLCGGVAELKLPPCEVKPHSHRKRLRLKIFLPAIGIAICLSLLLVALLLFKGRKGSDRISATRNHLLENKYPRVSYLQLFEATDGFAPANLIGAGKYGSVYKGRLSITGVGDSVVAVKVFTLQHPGSSRSFLAECEALRQVKHRNLINIITCCSSIDPRGNDFQALVFDFMPRYSLDRWLHPRSDEETHKLSLTQLLDIATDVADALDYLHNSSRPTVIHCDLKPSNILLGSDWTAYVADFGLAKLISESMDQPNLNIGTESTIGIRGTTGYVPPEYGAGGQASVAGDAYSFGVTLLEMFTGKAPTDDMFIEGLTLHLFAEAGLPDRVSEIIDPELFNAELYDHDPEMLSCLASVIRVGVSCSKDNPSERMNMEHAAAQLHRIKEYIEEIP

SEQ ID NO: 45738 - protein, 254 aa, Zea Mays
MWCRYSFSCVATQRMSSEFSWHYIPGAGDDEESWARGLTPTLFWKHSYDLIDAGPDRCNQIVADIVEKDRVYRAQRGEHCPQITCKSLRSLAGAKCNDDQTTEMCAMNLDHCTSTMDAHCSNNGLLLFWIGTSNLAVSSTFHGALVGVDCILNCDSTSKLPASSSENSYLELSIVDDRFSLMRNLPKAVDFAKRNLMAGRKILVCCQNGEDISICVALAILALLFDDNGKYNNVDCLVKLLHKDLRLFLICISA

SEQ ID NO: 45739 - protein, 218 aa, Zea Mays
MEEILGPFWELLPPPAPEPEPEREQPPVTGIVVGSVIDVAAAGHGHGGGDMMDQQHATEWTFERLLEEEALTTSTPPPVVVVPNSCCSGALNVDRPPVMEEAVMMAPAAVSSAVVGDPMEYNAILRRKLEEDLEAFKMWRAASSVVTSDQRSQGSNNHTGGSSIRNNPVQNKLMNGEDPINNNHAQTAGLGVRLATSSSSRDPSPSDEDGSRCLPRKE

SEQ ID NO: 45740 - protein, 408 aa, Zea Mays
MSFIYNLEEVVTNDIPTTLHRSKADCPVQEEMVTVSVDGSVLDRIAKIMTYLRLGSSGKVLKKKKKERDIKGKNNLASGDCDESVKPSKINGSTQKHQSDMPPPPARPPQNNNFTGKEKQPVPVARADDDDIFVGDGVDYTVPNEEMSQSPVSDMDESPHNHQKQSNFIEPMYGPVPPSEPAQAWQQPNGYDAVQAQMAAAGYQGDWSSYVYAEQQLGYPEQYVQQSTQEYDVLADPSISQDPRFMTQADKDRGLGSVFKRDDQRLNQLREKDERERDPNFISDSYSECYPGYQEYNNEIAGSDDEDDLSKMDMGGRAKGRLHRWDFETEEEWAKYNDQKEAMPKAAFQFGVKMQDGRKTRKQNKDQKLTNDLHKINKILARKKGEKDGAEDGGHYDDDLPSSKKQRG

SEQ ID NO: 45741 - protein, 439 aa, Zea Mays
MDAPPPSQPDDAAPAPSSTLASAPSPAPTSNPPTSAAAAAPAPDSAIANPNPNLAAASSASVPAASSSAPPIPRGGVVLGVPAPRSAQTPAGYTGFVPPPPLAHQFGSMHRGPDQPPPSSSQFRQPSPGTQNIGIVGSLNTSQISPGTISGPQKPRPGLPSSTPIPSGSQMPGSQRPPSQSLMRPVTVSSPSLASQQTPQSSSSTFRPQQRPQVSQPRPQQSQLVTPPQQNTILTQQQQQQKQQQSASHQNQQIAAPKNQPQLSQHPTARTPISMTPKPDLPAIQNVAVLQSVDTAATDANASETGTRLLTKRSIHELVAQIDPNEKLDPEVEDVLIDIAEDFVESVTTFACSLAKHRKSSTLEAKDVLLHAERSWNITLPGFSGDEIKLYKKQHINDIHRERLALIKKSMATDTRNSAAQAAANQKNQTPKPPAPASP

SEQ ID NO: 45742 - protein, 492 aa, Zea Mays
MDAPPPSQPDDAAPAPSSTLASAPSPAPTSNPPTSAAAAAPAPDSAIANPNPNLGTVANPAQTLEAPGPSSAAARPPPPRMRTPYTHLAAPITMSSSSSAATAAASSASVPAASSSAPPIPRGGVVLGVPAPRSAQTPAGYTGFVPPPPLAHQFGSMHRGPDQPPPSSSQFRQPSPGTQNIGIVGSLNTSQISPGTISGPQKPRPGLPSSTPIPSGSQMPGSQRPPSQSLMRPVTVSSPSLASQQTPQSSSSTFRPQQRPQVSQPRPQQSQLVTPPQQNTILTQQQQQQKQQQSASHQNQQIAAPKNQPQLSQHPTARTPISMTPKPDLPAIQNVAVLQSVDTAATDANASETGTRLLTKRSIHELVAQIDPNEKLDPEVEDVLIDIAEDFVESVTTFACSLAKHRKSSTLEAKDVLLHAVLSITERSWNITLPGFSGDEIKLYKKQHINDIHRERLALIKKSMATDTRNSAAQAAANQKNQTPKPPAPASP

SEQ ID NO: 45743 - protein, 364 aa, Zea Mays
MALEAVVLSQSQFQQGSRFGCGAMAAGGAWSDLLFSGTEGLFEMGGAAGRGWNAAASSPPQLLQELGDNGAAGSLPVASAGSASGGAGQDAPAMAAAAASGRRKRRRMRPVKNEEEVESQRMIHIAVERNRRKQMNEHLAALRSLMPPAHTQRGDQASIVGGAINFVKELEQLLQSLEARRRSPQCAAYAVDPDDAGPFADFLTFPQYSMCAVIAAPENTGHHREGGAVAEQEASGSKPSAVADVEATMVESHANLRVLSRRRPRQLLRLVLGLQGHRLTVLHLNMSSGAHMVLYSFSLKVKLHNLLPTFPREQLQAATRWLSVQGSIDRTWCLGFRAFFFSGSCFASNRQQLAAPNSPVCLLY

SEQ ID NO: 45744 - protein, 128 aa, Zea Mays
MGAAVALHSAACYAHGKFTSGIPYPIALNAVISLSGWLPCSRTLRSKMEGSHIAVRRAGSLPILLSHGRVDEVVVYRDGERSAEVLRNSGFSFLTFKPYNGLGHYTIPEELDDLCKWLSSSLGLGRSR

SEQ ID NO: 45745 - protein, 226 aa, Zea Mays
MSYYGSSSSGGRSSRRVDYGRTYVVRPKGRHLATIVWLHGIGDNGASWSQLLDSLPLPNIKWICPTAATRPVAAFGGFPCTAWFDVEDTSIDGRDDIEGLDASAAHIANLLSSEPSDVKLGIGGFSMGAAVALHSAACYAHGKFTSGIPYPIALNAVISLSGWLPCSRTLRSKMEGSHIAVRRAGSLPILLSHGRVVVYRDGERSAEVLRNSGFSFLTFKPYNGYR

SEQ ID NO: 45746 - protein, 277 aa, Zea Mays
MQQGCLALSCRRSSRSGQSAPSRSSRATNSSSADDEILVRDVLYDSLILVDYSFINNGAGVDLLPVYVSRLIITLDAVNDARRKGDQGRAVSFINAFSTSNIPNFLIKWATCQAGSGALSKPICNTPQAILKWLIDLEDKGLKVFGDYSSWVMRRFVCNEVKNGYGNMVQSDADLFFVDKQSGRELMDTKGSEDDEAVEEMETAGNAFMAAAQSMKGVTNGIRKRKSCGNEDAAAVKFVKYKVEDSSVKGYLLAANGMSSGSEVENPQSDDEMEESD

SEQ ID NO: 45747 - protein, 162 aa, Zea Mays
MRRKSPLHPASRSCVSLLCTPRFDSTDPAGGKWRTVGPRHRRCGPGGAPAPGTRSSSCAASSASSRPPPRCSASPPTSSPRSTPSAAALTSSAACSGATRWCSPSSSPFSRPSGHPSSGSGRYLSTCRQGECCRSCEYLILSFSGTSSSATNVATGADGQSC

SEQ ID NO: 45748 - protein, 412 aa, Zea Mays
MADMGMDAYRFSIAWSRILPNGTGQVNQAGIDHYNKVINALLSKGIQPYVTLYHWDLPQALEDRYNGWLDRQIVNDFAAYAETCFKAFGDRVKHWITLNEPHTVAVQGYDAGLHAPGRCSVLLHLYCRTGNSGTEPYIVAHNFILAHATVSDMYRRKYKAAQNGELGIAFDVIWYEPMTNSTIDIEATKRAQEFQLGWFADPFFFGDYPATMRARVGERLPKFTADEAALVKGALDFMGINHYTTFYTRHNDTNIIGRLLNDTLADTGTISLPFDKNGKPIGDRANSIWLYIVPSGIRKLMNYVKERYNSPTVYITENGMDDGNSPFTSLQNALKDSKRIKYHNGYLNNVAASIKEDGCDVRGYFAWSLLDNWEWAAGYTSRFGLYFVDYKDNLKRHPKNSVQWFKTLLSSS

SEQ ID NO: 45749 - protein, 158 aa, Zea Mays
MSRTFKSTTGLSRRFLNLIAANHSPGVKSLHRIGLGRIFNSTPAPIPNGDRLESAAGQEDYMVRPRALDIIRLPTPSGRGFLFDANSCGVSTVAHLHTPKQLKTSFLLCLIDGAASSPSSACGLGYFIFLCALCFSAHFRACIPGIVITLFRLCNYLK

SEQ ID NO: 45750 - protein, 168 aa, Zea Mays
MSRTFKSTTGLSRRFLNLIAANHSPGVKSLHRIGLGRIFNSTPAPIPNGDRLESAAGQEDYMVRPRALDIIRLPTPVMSFRSSASFESKEWKLDCFPFSDCKVFCMDQSGRGFLFDANSCGVSTVAHLHTPKRCRRLLIFTWRTMQPRRYTSILFFSTLVLHVDVSFD

SEQ ID NO: 45751 - protein, 161 aa, Zea Mays
MEAVVVDAGSKLLKAGIAAPDQAPPLVMPSKMKLDVEDQEMADGAVVEEVVHPVVRGFVKDWDAMEDLLNYVLYRDIGWEIGDEGQILFTEPLFTPKTLREQLVQLMFEKFNVSGFYASEQAVLSLYAVGRISGCTVDIGHGKIVNQSFKLYLLNQVDEAI

SEQ ID NO: 45752 - protein, 259 aa, Zea Mays
MSSSWNSVGLAILYQVLGWVAFAAWSFSFYPQVLLNYKRKSVVGLNFDFLVLNLTKHSSYLIYNAALFFSPFIQQQYHDKYGDKEMIPVAANDVAFSLHAVALTAFTVFQVFIYERGTQKVSKVCISISAIVWIAALVCLIIAWPKSDWLWLIDVFNSIQVGMTAIKYIPQAIMNFRRKSTIGWSVGNILLDLTGGVLNFCQMGVQSIDQHTLVNFYGNIGKTLLSLETVFFDVLFIIQHYVLYPVKKDENDDFPVLPH

SEQ ID NO: 45753 - protein, 253 aa, Zea Mays
MASDTEGIAALFSMYNDDEEEEDADEPSPPFPALPAAVTSSSPLSPQAGAEDPNPSVAPPSPSRPEELASLKTLASPHPSPARGLLPPLPSRRSSSPFAVSSPSPLRGPFFAPPADLPRPPRRGALAIVDYAHDETAMSPEQEDGEITSNTYGFGSDAQAAEGNLEERTYSGTVHVMTPNTLAELSQHPDAPEQNQVGTDMAVDVTRTEIKGAQVEGTTDISTNGESDDPSNRFLPPPVTTKCSAALQGWKEL

SEQ ID NO: 45754 - protein, 244 aa, Zea Mays
MAGAVSVSAHRRQWRYTWEALNHLPLLRLYLLPRAALPFRIPSDLRADLRLQGSLLHLSFSLPGDGAAVALRVPVPRVLVDPSAPVECRAAAAGDHLELRLALVLPVDHPVVAAAFPPPPGAEPPASLALRDDLKSLSTGDVHLYCKNCSSRLTKQPLRKIMEMPSVDWVDVADNWVGGCCTSFGGAGEKLVSQFIRAYGRLEGTSLLDATSITVETDNLETDLVSQLMAAYDSSSATHLQKFL

SEQ ID NO: 45755 - protein, 549 aa, Zea Mays
MAVHVGSPKPSSPPPPLPPTPRRAALPHPLGPPRRPPTPGLSPPPVLLAPRGRGCRRAQGPRPEGARRPFRPRRVPRRRRGGPPRAPPRARPARRPPCRRRRVPSTPRRGASGFSSAARWKIMEMPSVDWVDVADNWVGGCCTSFGGAGEKLVSQFIRAYGRLEGTSLLDATSITVETDNLETDLVSQVACSALSRHFVAIKEDIFNVSVEKDHTTGKIKLKNSEEQANITATHAQPPIILEEGPSVSCSETNGVTQTNQPGISQTEADTDAYFEKSENDCCVEKVGKSKKEVDLLLVDPCRCCCVNGYSEKAEDNPSQLSLVNEKKQNMLEIKRDYKLTKTISLGSSFIVKASNLLNDFEWVELLCGQCSSPLGSYPSQCSLGPADGRLRLFKCYTSTEIPVTGPHDVFRGHTLERVFVNLLLEVAEDEISFRTLVRDLKTKRPMLQLVLLSSKAWLSSGCCYENDIDGSHGTTDLQPSVKLLYSDYSNASEADLRIVEAWASKYRAEELYMMKRQIDELTECLSSGRNNFPVSCSSLEGMRLSSLRR

SEQ ID NO: 45756 - protein, 1175 aa, Zea Mays
MNNDPKASKISQISISSEVDYWSSKDIDAESYTLHLAMQENSKGETEECTYYMWRQKFAVQPDCRIQKRMEVDQWVVTLAFPHGQRLSRGAKSPGVYAFLPTEMVTNLPFIIQADFLLASSRESILFDSQWNRGILECVPSAFINAFGALLKSSRDAPHFALPPIFRFLPIQESSISLFDSIRLSIKTKVQAEDIMPCEPCTAQKVFCKPAEVSRLDSAFCRILNLAQKQGIGLQNLSSYGTFVLSSYLDNLEYDDVLEFLGVGYANREWYSKCIDGLNLVKEASEEVYLQILYFVAGNWKVFSGTSMMLISLIKYVDASGQLSCSSVLAAQRSLRFLNENNKTPHVIEQMKNGCWVKTLIGRRSPLNAILFNSEWENASAISILPFIDTAFYGVDITDFRSELRLFGVVVDFKRNYQLVVDNFRFSIDTITPGATILMLNCIRYVEECHDFVERLKDLRWVKTNVGFRAPHETFLIDDDWKCLLEVIDKTPLLDLEFYGDEIKLYKEELCKTGIIAGFKEASKKIVCHVKKLVNTSITKELAFALLKCYSDLTTRHGRLPVALANFMQHERWLHTTFGFRSPKEAILFSSEWESIALVSCLPFVDDSDAQYGLGKEIYCYSNELKALGAKTRLEQGAAFVISGLRIPTDPSAVTPQAVISLLKCIRIWRQNGSDLPKSFMSAINLKWVKTTAGYRHPNGCVLFGSVCSSHVYRDDGPFVDEVFYGQELVSYESELQKIGVNVDPRAGCACALMAQHLKGLSNADAISRIYSYLEVYRWKPRFTSDDWIWIPHAANQGQWVNPASCVLYDTHGLFGSQLYVLVKWYSSKLLRYFNTAFGVKHRPTVSDYCKLWSMWQGSNSTLTQKECVAFWEFFGKNWSTDMGKFIAGCVDKVPVSSGDQILLLEKQDVFIPDDLLLEDLFKKQAQKPLFVWYPSTSLPCLSPARLNDIYSSIGVQKISKSVVSNQYDHLEIESVTLVHKGTVIKLGLLKIVLAFLTDPILDISVEKRYEMVTSLTNVAVYETRGPLNVSYQVGLSSGRSLHVTCARFFRWERESSRLFVTEADEPGSMTYAMKMEYASCFAEEISKGLLSENKEQIPALAELVRTGFLLEFDVPAVQILLNLKNLRLFEQDEQFLLKLSQHCDDGLGGPSPSYINIIVCYLRVLWDFAKRSTY

SEQ ID NO: 45757 - protein, 731 aa, Zea Mays
MAILFLHWKIPQEMVDVHQGHGRRKPFHCEVACPYSKIAASVQCDDSSGDEKLNFAPDNEPIQKWHRSLSSDSVVQTLRCLRRKPAVAFTYFKDTHSLGFHHDFSTYSEIIQILSHSFQGKMLVSLFREILLGTGSGGPEILPLIDHLRKTCATSHVGMIEMGVKLDVHGFSSFIIGLCDCGKFDLAYNMVRRYAVLQEISQERVPIEAMAYNMVIDGLCKEMKLKEAEKVLEIKTRHGSAPDLYSYSYLIHSHCKMGNLEKAWYHVEDMVSHGIEINCYIVAYLLQCLRKLGMVSEVIVHFQKFRDLGVHLDGVLYNIAMDAYCKLGNMNEAVKLLNEMMAGSLVPDKIHYTCLINGYCLKGETENAWQVFEEMLKANIKPDVVTYNILASGYSRNGLVMKVFDILEHMMDQGLEPNSLTYGIAIAGFCRGGNLSEAEVLFNIVEERGIDNINVLYGSMVCGYLHSGWTDHAYMLFLRVAKQGNMVDRLSCSKLINGLCRDEKVGEASTVCKMMLEKNVVPDVISYSKLISAYCQTRDMHNARLWFHDMVERGLSDVIVYTVLMNGYCKVGRLQEACELFVQMINLGIKPDVVAYTVLLDGHLKETLQQGWQGIAKERRTFFLRTKHKVLLNSMKDMEIEPDVTCYTVLIDGRCKAEYLEEARGLFDEMLAKGLIPDVHTYTALINGYCSQGEIAKAEDLFQEMIAKGMKPDVLSFSVLHKRTLRHEKAH

SEQ ID NO: 45758 - protein, 113 aa, Zea Mays
MLEGKAVVEDTDMPAKMQAQAMSAASRALDRFDVLDCRSIASHIKKQGELHLLPPGVAQVPRLQRGGSMMTSPTANIASSRPGKAGGGWVFFSPAFVDGLPRCIRYHHGNTNQ

SEQ ID NO: 45759 - protein, 540 aa, Zea Mays
MTDMNSDEILEVPDTPDRLQQSKYHVSSSIVGRDGTMAAANPSPQRKFRIRFKNNSVQGSSSQNNGCSILPAALDTDHIFKQAEAAQILELSKDYKAKFSLQKPDSTRISVDSEKRAGKHGFDQSRSISNNISCSVTGGRNPTFQVKDGEVGQQDAGHQSANFLDIGPGFPTIQVGKPGYRLCTRTTDKLKGVTGADVCPGSSSGEVKGDLITNKVIAGPTSPLRVFPRRHVGQKRLVRNGCISPSNIAKTDAKVNEKQEMCSLSEHLDHPHQPDAFDGGDVIDLTENSPIMTRQRSEVNNKLMSGHNMDTRAAKKLRTDRFGRTLVRQSKCHANNSSCSEVSLSGLNNNGKGIDCDILDSDQTGEANLRGVDLSTAGTYLNKNFSDISTEQGWRTTHNHTSKLPISFMGNITSSSGWESGSSTTRSNQNHGSAGGKHSSVSGANIIVPDKIGNKTIMLGRERRKQTSTSSHIGESSSAADEPRGDLQSSKISAGPNHSSHQHNIPKHNWSRMSYWLANSRSSSTMNLLVLPQQKRLMQL

SEQ ID NO: 45760 - protein, 84 aa, Zea Mays
MSNSKTLVPVTTRICTFSMYGNNNEDRAFLTPSKLGMTASWLTLLMPSQRKELVLFGLIFLEMGKVMVNSSMEATEKRQLICAL

SEQ ID NO: 45761 - protein, 410 aa, Zea Mays
MPMAVSAVTASHLALSFPARSRRRRAAPRAAAGGLTARARRLRCEFVAGGGNGALSGEDDPRLVDRQKVLDAAMNDINNSFGKGSVTRLGSAGGAFVETFPSGCLTLDFALGGGLPKGRVVEVYGPESSGKTTLALHAIAEIQKLGGNAMLVDAEHAFDPAYSKALGVDIENLIVCQPDNGEMALENGTEQLLTASAPQNSAILVADRMCRSGAIDLICIDSVSALTPRAEIEGEIGMQQMGLQARLMSQALRKMSGNASKAGCTLMFLNQIRYKIGVFYGNPEVTSGGIALKFFASVRLEIRLIGKIKSAKGDEDVGVKVRVRVQKSKVSRPYKQAEFEIIFGEGVSKLGCVLDCAELMDVVAKKGSWYSYKDIRLGQGREKALQYLRESPTTCDEIEKDFLDSTLDSS

SEQ ID NO: 45762 - protein, 133 aa, Zea Mays
MGCSISGLNALYDAATGGGDVWINERRFRVLRQIGEGGFAFVYLVREHQPASDAAFARRDPAHVSEDGTYAMKKVLIQSKEQLDLVREEIRVSSLFNHPNLLPLLDHAIIAVKALEAKSRGGQVSRGAAGGGG

SEQ ID NO: 45763 - protein, 344 aa, Zea Mays
MDGNARSTAASQKKSIVPDDDLVELLWHNGSVVAQPQGHHRPAPPSDRDCPGTSGLTAEETAAWFPDTLDDSLEKDLYTQLWYSTIADAAPQHEGMFPGPTSQPSPPPPVASSGVESSWAGDICSTFCGSNQVPRTPAGIRGKDAALQPEVPSGAGAHDGTSSSGGSGSNYGGSGLPSDSVHVHKRKGMCRDESDSRSERRRDRIKEKMRALQELIPHCNKTDKASILDETIEYLKSLQMQVQIMWMTSGMVPMVFPGAHQYMPPMALGMNSGCIPAAQGLSQMRRLPYMNHPMPNHIPLNSSPAMNPMNPLNTVNQFQNGHLREASNHFLHLDDGRAAVPRVQ

SEQ ID NO: 45764 - protein, 418 aa, Zea Mays
MDGNARSTAASQKKSIVPDDDLVELLWHNGSVVAQPQGHHRPAPPSDRDCPGTSGLTAEETAAWFPDTLDDSLEKDLYTQLWYSTIADAAPQHEGMFPGPTSQPSPPPPVASSGVESSWAGDICSTFCGSNQVPRTPAGIRGKDAALQPEVPSGAGAHDGTSSSGGSGSNYGGSGLPSDSVHVHKRKGMCRDESDSRSEDAECEEARRPNPGGGMGGNAGLVQLKSIISQRGRDRIKEKMRALQELIPHCNKTDKASILDETIEYLKSLQMQVQIMWMTSGMVPMVFPGAHQYMPPMALGMNSGCIPAAQGLSQMRRLPYMNHPMPNHIPLNSSPAMNPMNPLNTVNQFQNGHLREASNHFLHLDDGRAAVPRVPRPGPHVYGHQIAQAEEHNRILEVAASTVIPTSKAGQPPTFDGV

SEQ ID NO: 45765 - protein, 370 aa, Zea Mays
MDGNARSTAASQKKSIVPDDDLVELLWHNGSVVAQPQGHHRPAPPSDRDCPGTSGLTAEETAAWFPDTLDDSLEKDLYTQLWYSTIADAAPQHEGMFPGPTSQPSPPPPVASSGVESSWAGDICSTFCGSNQVPRTPAGIRGKDAALQPEVPSGAGAHDGTSSSGGSGSNYGGSGLPSDSVHVHKRKGMCRDESDSRSERRRDRIKEKMRALQELIPHCNKTDKASILDETIEYLKSLQMQVQIMWMTSGMVPMVFPGAHQYMPPMALGMNSGCIPAAQGLSQMRRLPYMNHPMPNHIPLNSSPAMNPMNPLNTVNQFQNGHLREVPRPGPHVYGHQIAQAEEHNRILEVAASTVIPTSKAGQPPTFDGV

SEQ ID NO: 45766 - protein, 694 aa, Zea Mays
MESRYGVVEHGMLHYLEEFFSLQIEHQVRKKCSPLLESALLPGGSDSTLHEWKAVPDIWRTAAEKYADLVAVVDPYHEPPTEWTYTQLEQEILDFSQGLRAIGVAPDEKLALFADNSCRWLVADQGIMATGAINVVRGTRSSDEELFQIYTHSESIALVVDSPQFFNRLAESFMSRINTRFIVLLWGDKSCIDSQAIKDIPLYGYKDIIELGRESRNALFLSDEQGQQDVFESISPEDVATLIYTSGTSGTPKGVMLTHRNLLHQINNLWEIVPAEPGDRFLSMLPTWHAYERACEYFIFSYGIQQVYTTVKYLKEDLQRYQPQYIISVPLVYETLYISIHRQISSSSAARKIIALSLIKISFLYMEAKKIYEGTVLSNNLVKPSVIAYMMKWLWARLVAAFLWPLHNLAKILVYKKIHSAIGISKAGISGGGSLPMHVDKFFEAIGIKVQNGYGLTETSPVVAARRPFCNVLGTVGHPIKHTEIKIFDIETGEVLPDGSKGIVKIKGPQVMKGYYKNPSATNEAFDQEGWFSTGDVGWIVPHHAMGPSRQCGGMIVLEGRAKDTIVLSTGENVEPAEIEEAASRSTLINQIVVIGQDQRRLGAIIVPNNDEVLAEAKRKSILGEDGELAKDKVMNMLYDELRTWTAHCSFRVGPILVVDEPFTIDNGLMTPTMKIRRDKVTDKYRREIEALFK

SEQ ID NO: 45767 - protein, 341 aa, Zea Mays
MEAKKIYEGTVLSNNLVKPSVIAYMMKWLWARLVAAFLWPLHNLAKILVYKKIHSAIGISKAGISGGGSLPMHVDKFFEAIGIKVQNGYGLTETSPVVAARRPFCNVLGTVGHPIKHTEIKIFDIETGEVLPDGSKGIVKIKGPQVMKGYYKNPSATNEAFDQEGWFSTGDVGWIVPHHAMGPSRQCGGMIVLEGRAKDTIVLSTGENVEPAEIEEAASRSTLINQIVVIGQDQRRLGAIIVPNNDEVLAEAKRKSILGEDGELAKDKVMNMLYDELRTWRKCLIILFTRFRTAHCSFRVGPILVVDEPFTIDNGLMTPTMKIRRDKVTDKYRREIEALFK

SEQ ID NO: 45768 - protein, 235 aa, Zea Mays
MLYRPPRCSHCSICNNCVERFDHHCPWVGQCIGKRNYRFFFMFVSSTTVLCIYVFAFCWVNLRRIMDTHQCKIGGLTSFHIYLISTNQTTYENFRYRYDRRTNPYNLGVGQNFIDVLFSRIPSSKHDFRAKVKADSSTFASSLSMGRVLSPPKTSVDLEMGMKRQAVAAEDFEDLHSQIGSAMGLERCGTEPPHFVGRKGCSEMSPDIEAFAEEFGMEGGLSERKKIERRTNDDS

SEQ ID NO: 45769 - protein, 181 aa, Zea Mays
MDLNVDEAEHSMEMHLPYLAKVFQGHNVKVVPILVGALSSQNEALYGQLLSKYVDDPKNFFSVSSDFCHWGSRFSYTYYEKKHGAIHKSIEALDRMGMEIIETGDPVAFKEYLQEYENTICGRHPISVFLHMLKHCSTKIKIGFVRYEQSSQCKNMRDSSVSYASAAAKVAGASGEEDKQD

SEQ ID NO: 45770 - protein, 73 aa, Zea Mays
MQNGETGFKQIIVEEGEVLLTTPRLAGADKAAAPSLSPAVLPWNRRRLGRSPRSPSPPTSANQKYPLVYQYTM

SEQ ID NO: 45771 - protein, 307 aa, Zea Mays
MAAAVAAVAAATTAEDEARLLRLEEQAEHGGGGAWDYLCLARRLRARRPAHVLRVGLALLNNASARSGLASEQWTLYEQVATAAMDCQRLDVAKDCIGVLSKQFPGSTRVARLEALLFEAKSEWAEAERAYTQILEINPFDQIVHKRKIAIAKAQGNMSLAIGYLNKYLELFMADHDAWRELAETYVSLQMYKQAAFCYEELILSQPTIPLYHIAYAEVLYTMGGLENLQTAKKYYASTIQLTGGKNTRALFGCTSAINQLTKGRNKEEEGSELQRLAAEVLLNNYKQQAPSKAPLISSLLKNMKLS

SEQ ID NO: 45772 - protein, 334 aa, Zea Mays
MEAVDKIAEPKDPFVLTAQKVQSSEPPIPIKASCEGNDSQQQEETDLPDDGEESFRSMDSSDEGVRSSFSGASHPPEPIDMDIMKTVYVAIDEKSEPPVSLVRGVSVKGPFIDDLSIRVTGAKANLVVGAGGAEGMAEERKVSASAVASVTTARSSQATSLPQDSEEKECVWDASLPPSGNVSPHSSIDSMGVVTAMSTLNSCTSTYKSETIAGEAMLNVERNCESVKGVRGDLLESAKTSMSRASDSSVVSDDSSWSHITGGASKPHKGNDPRWKAIHAVRTRDSVLGMSHFRLLKRLGCGDIGSVYLSELSGTRCYFAMKVLLFGDGILSRW

SEQ ID NO: 45773 - protein, 647 aa, Zea Mays
MVAREAARPRVRDRLLRNRPPISPPSLRVRRPRPHIFSSLARVAGRVEIGEAFVLALWTAEPDMDRDEEVGHGDRSLLFIGDEDDLGVDRDGGSPPTSSDDGSFSDRSDAETRAGHVRRRDGGEREDTPEDGQNGAWPQSYRQSIDMLSAVPSPTMNSIMAASPSLTRFGSSFLKAGSSFFLRKGEGSGLPLTRPLLPPSLPQLSQSSLHPQPRPVKQSTDSLAQAPRWPAAHEAELPERPSRQCLKSDYIELPPPASKCSRNQSIINGFNVLCGVGILTTAYGIKEGGWLSLLLLPLLGGSSCYTGLLLKRCIDSSPNIETYPDIGQVAFGIFGRIFVSVVLYMELYASCVEYITLLGDSLSSVFPSAHLAFTGIDLNAHNLFATTMALAILPSVWLRNLSLLSYLSAGGVIATITVIVCLCWVGIGEGIGFRFSGAVVNVTHLPVALGLYGYCYSGHSVFPNIYSSMKERSQFPFVLMFCFTVVTLVYAGVAVSGFLMFGESTMSQFTLNLPQQYIPSKIAIWMTVVNPYTKYALTMTPVALSIEEALPKKMQSYLVGMLVRTCLVLSTVAVALLFPYFALVMALLGSVFTMLVALILPCACYLSIKKGAVPLWEIILCIIIIAIGVVCACIGSFTSINQMISSR

SEQ ID NO: 45774 - protein, 647 aa, Zea Mays
MGVAMKLLARVRRRLVPLLRRHRMALLTAPAVAALLLLFWSAAYGGDAQDQGVPPPYQDASKDVEVRVRDLLARMTLAEKVGQMTQIERIVASPQALRDYYIGSLLSGGGSVPRKQATAAEWVTMVSDFQKACLSTRLGIPMIYGIDAVHGHNNVYGATIFPHNVGLGATRDPNLVKRIGAATALEVRATGIQYAFAPCIAVCRDPRWGRCYESYSEDHRIVQAMTELIPGLQGDVPQNFTSGMPFAAGKDKVAACAKHFVGDGGTQNGINENNTIIDQQGLMSIHMPAYLDALRKGVSTVMISYSSWNGLKMHANHDLITGFLKGRLNFQGFTISDWEGIDRITSPPGANYSYSVQASILAGIDMRPDPDEQDRRRRDSDSARQVHHGPVREPHAGPQPRGPAGEAGAQGPGAGGGAQVAGAPQERQAGRRAAAAPAQEGRQDPGRREPRRQPGVPVRRVDDRVAGRHGAHHRRHHGPGRREGGRGPVDGGGVRGEPRRRVRQERRLLVRDRGRGRAPVHGDQGRQHEPDDPGPRAEHRTDGVRRRAVRDRAHQRPPRGDTAVPGRHGRGRGGLAAGDRGPGCHRRAVRGLRVHGEAAADVVQVGGPAADELRRRALRPAVPARVRAHHTGQDVPELEEGGARGKG

SEQ ID NO: 45775 - protein, 196 aa, Zea Mays
MLGHSTFGLSMWLLKWLPVHVVDRVLLCIARAMLGDTARLGLKRPASGPLQLKSLSGKTPVLDVGTFAKIKSGDIKVRPAVRQVSGRAVEFADGELEEFDAIVLATGYKSNVPFWLKDRVLFSEKDGLPRKAFPNGWKGEKGLYSVGFTRRGLMGTSVDARRVAHDVEQQWRKAKGTHRDGVPLPLVAVVYHGDGL

SEQ ID NO: 45776 - protein, 726 aa, Zea Mays
MLAEKHKTEKEQNNQLRDQISHLLKVEQEQNLKMQERDLTIQSLQTKLKSIESQLNEALNASDARSTIGSESASVISSPKITESTADSSSVTKRLEEELAKRDALIEASSPSANKPANGQGREIGRSDSSKSRSPDVFASPVSQDKTGNSGAIVKSSNELAKTTPAGEYLTSALMDFDPDQFEGFAAIADGANKLLMLVLAAVIKAGAAREHEILAEIRDAVFSFIRKMEPKKVMDTMLVSRVKILYIRSLLAKSPELQSIKVSPVERFLEKSNTGRSRSSSRGSSPGRSPVHHHGHGSRTALVDEHVHGFKVNIKQEKKSKFSSIVLKLRGIEEETWRQHVTGGKLREITEEAKAFSIGNKALAALFVHTPAGELQRQIRAWLAENFEFLSVTGADAAGGAAGQLELLSTAIMDGWMAGLGTAQPPTTDALGQLLSEYTKRVYTSQLQHLKDIAGTLATEEADDPAHVSKLRSALESVDHKRRKIMQQMRTDTALLTKEEGGSPIRNPLTAAEDARLASLISLDNILKQVKEVIRQSSTGPMRKSKRKALLELLDDLLTQMPSLLDIDHPCAQKQIMEARKVVESLQEDPDDPAPQSNALGEGEVSQWNVLQFNTGTTAPFIIKCGANSSGELVIKADLRVQEPKGGEVIRVVPRPTVLADLSFEEIKGVFEQLPEAVSLLALARTADGTRARYSRLYRTLASKVTALKETVAEMERGGVFKDVR

SEQ ID NO: 45777 - protein, 172 aa, Zea Mays
MSTSSLKEPNVSQSKDVENGNDNSVKSCISKPVLNGNKCANKEQNVPSCCPGAVTNGNEAGNADVEYIDSENLVDLPDVDAALCTLVKRLDSKDWVMTCEALNNVRQLAMYHKERLQELLEPLVPLIVKSVKNPRSAVCKTALMTCADIFKVYGDLLVESIDPLLLRQLLHR

SEQ ID NO: 45778 - protein, 305 aa, Zea Mays
MDLAAMLERDVLDSTPGVRWDDVAGLSEAKRLLEEAVVLPLWMPEYFQGIRRPWKGVLMFGPPGTGKTLLAKAVATECGTTFFNVSSATLASKWRGESERMVRCLFDLARAYAPSTIFIDEIDSLCTSRGASGEHESSRRVKSELLVQIDGVNNSSTTDDGQPKIVMVLAATNFPWDIDEALRRRLEKRIYIPLPDFESRKALININLRTVQIAADVNIDEVARRTEGYSGDDLTNVCRDASMNGMRRKIAGKTRDEIKNMSKDEIAKDPVAMCDFVEALVKVQKSVSPSDIEKHEKWMAEFGSA

SEQ ID NO: 45779 - protein, 360 aa, Zea Mays
MAEIRKYAMSNQPPDIPQILLEAQSRWLRPTEICQILSNYKKFSIAPEPPNRPQSGSLFLFDRKILRYFRKDGHNWRKKKDGKTVKEAHEKLKVGSVDVLHCYYAHGEENENFQRRTYWLLEEGFMNIVLVHYLEIKGAKQSFNHAKEAEETAGLSNADSPACSNSFASQSQVASRSMDAESPISGQISEYEDAETDNSRASSRYHPFTEMQQPVDGTVMGNFFGASSPSVSVNNLAAGYLGEMQPTGANFTSHFATRNDIASVFNDTGSELGGGPKTSIDSVLLGEPFPEYPGGFMESTLYSSVATLGNSLEDGLQTFMSEALYTNNLTQKEVDALGAAGITSSKRMMVIQIKVSGIHF

SEQ ID NO: 45780 - protein, 1012 aa, Zea Mays
MAEIRKYAMSNQPPDIPQILLEAQSRWLRPTEICQILSNYKKFSIAPEPPNRPQSGSLFLFDRKILRYFRKDGHNWRKKKDGKTVKEAHEKLKVGSVDVLHCYYAHGEENENFQRRTYWLLEEGFMNIVLVHYLEIKGAKQSFNHAKEAEETAGLSNADSPACSNSFASQSQVASRSMDAESPISGQISEYEDAETDNSRASSRYHPFTEMQQPVDGTVMAAGYLGEMQPTGANFTSHFATRNDIASVFNDTGSELGGGPKTSIDSVLLGEPFPEYPGGFMESTLYSSVATLGNSLEDGLQTFMSEALYTNNLTQKEVDALGAAGITSSKTENDGYTDQSVRYPLLKQSSSDLFKMEPDGLKKFDSFSRWMSNELPEVVDLDIKSSSDAFWSTTETVNVADGSSIPINEPLDVFVVSPSLSQDQLFSIIDVSPSWAYNGTKTKVLITGTFLAKKEDVENCSWSCMFGDSEVSAEVLVDGSLRCYTPVHHSGRVPFYVTCSNRVACSEVREFEFRDSETHYMDISDKHTTGINEMHLRIRLDKLLSLEPEDYEKYVLSNGNKSELINTISSLMLDNNLSNLALPSDEKELCTVQDQNLEKQVKEKLYYWLIHKIHDDGKGPNVLGKEGQGAIHLVAALGYDWAIKPIVAAGVNINFRDIRGWTALHWAACCGRERTVGALIASGAASGALTDPTQQYPSGRTPADLASENGHKGIAGFLAESALTSHLSALTLKESPSGNVEEICGLTAAEGFAASSSSQLACVNSQEESLKDSLGAVRKSTQAAARIFQAFRVESFHRKKVIEYGDDDCGLSDERTLSLVSLRNPKSGHGDSHSAAVRIQNKFRGWKGRKEFMLIRQKIVKIQAHVRGHQVRKNYRKVVWSVGIVEKVILRWRRKGRGLRGFQPEKQLEGPSWQIQPAKAEAEDEYDFLKDGRKQATGRLDRALARVRSMNQYPEARDQYRRLQACVNSLRESQAMQDRMLADSAGTDGGDFMTELEELCRDDGDAPMSTIS

SEQ ID NO: 45781 - protein, 1026 aa, Zea Mays
MAEIRKYAMSNQPPDIPQILLEAQSRWLRPTEICQILSNYKKFSIAPEPPNRPQSGSLFLFDRKILRYFRKDGHNWRKKKDGKTVKEAHEKLKVGSVDVLHCYYAHGEENENFQRRTYWLLEEGFMNIVLVHYLEIKGAKQSFNHAKEAEETAGLSNADSPACSNSFASQSQVASRSMDAESPISGQISEYEDAETDNSRASSRYHPFTEMQQPVDGTVMGNFFGASSPSVSVNNLGYLGEMQPTGANFTSHFATRNDIASVFNDTGSELGGGPKTSIDSVLLGEPFPEYPGGFMESTLYSSVATLGNSLEDGLQTFMSEALYTNNLTQKEVDALGAAGITSSKTENDGYTDQSVRYPLLKQSSSDLFKMEPDGLKKFDSFSRWMSNELPEVVDLDIKSSSDAFWSTTETVNVADGSSIPINEPLDVFVVSPSLSQDQLFSIIDVSPSWAYNGTKTKVLITGTFLAKKEDVENCSWSCMFGDSEVSAEVLVDGSLRCYTPVHHSGRVPFYVTCSNRVACSEVREFEFRDSETHYMDISDKHTTGINEMHLRIRLDKLLSLEPEDYEKYVLSNGNKSELINTISSLMLDNNLSNLALPSDEKELCTVQDQNLEKQVKEKLYYWLIHKIHDDGKGPNVLGKEGQGAIHLVAALGYDWAIKPIVAAGVNINFRDIRGWTALHWAACCGRERTVGALIASGAASGALTDPTQQYPSGRTPADLASENGHKGIAGFLAESALTSHLSALTLKESPSGNVEEICGLTAAEGFAASSSSQLACVNSQEESLKDSLGAVRKSTQAAARIFQAFRVESFHRKKVIEYGDDDCGLSDERTLSLVSLRNPKSGHGDSHSAAVRIQNKFRGWKGRKEFMLIRQKIVKIQAHVRGHQVRKNYRKVVWSVGIVEKVILRWRRKGRGLRGFQPEKQLEGPSWQIQPAKAEAEDEYDFLKDGRKQATGRLDRALARVRSMNQYPEARDQYRRLQACVNSLRESQAMQDRMLADSAGTDGGDFMTELEELCRDDGDAPMSTIS

SEQ ID NO: 45782 - protein, 450 aa, Zea Mays
MAAPRQPHPPAAEEGAAPAGPLPAAAPGPRPYDVTVAATELRPVDCNLAALCDHVQAEGFGSGAFSDLVVEAMGATYRLHRLILSRSAYFRNMLHGPWRESGAPTVVLHIDDANVDSDAIAIALAYLYGQPPKLTDSNAFRVLAAASFLDLQDLCTICTDFIISELWTSNFLQYQLFAESQDYGSHGERVRNACWGYLCQSATMELREVLPKLSSQTLHALLTSDELWVPNEEKRFELALLTLLAKVAMCEIQVSGNETNLPSADRSMRKGKTPMNESGEELLMDSELQNLKLHDNLGNEISHNIIAISDMNGEAPKRMEIDCSTGGPSGESTSYQFNENNWISSEQTANNYFSRTSSSVVVPTEWGRPNAPLWGGRVVGRRQIRYIRGSSCLSTDEYNAFMNIFERGSLLYCNMSFDALLSVRKQLEEFGFPCKAVNDSLWLQGASDCC

SEQ ID NO: 45783 - protein, 195 aa, Zea Mays
MNGGEYGRMEEMARQLVARLAATPDSALRGLPFLHRVLTLPLLSAASAVLRLSLLLSRLRSRRALPVPVVSVGNLTWGGNGKTPMVDFLARSFHRLGVSPLLLTRGYAGGDEPKMLRRRLSDTSAKIGVGANRTAVASSMLQEYGFIHHFQNTFAEKKLSSVCKLESGNRIGVAILDDGMQAALELAPRCGDCDG

SEQ ID NO: 45784 - protein, 658 aa, Zea Mays
MEAALGALCRAGGWSYAAVWRFHPQDPRLLTLGDCYCEDEAKAMVQKMLNLVEVVGEGILGQALVSGECQWIYDDTCHALNQISHADNGDLHQGYTWWQHQFLSGMKTIAVLPLQLHGLVQFGSTRKVPRSSVFLNQVRDIFDRMKNASSDGPMEYTQNNSLACGQQPILTSSRPVNDMLVHNKVNPLQTEKLLEDIERTESIRSSICSPSNSQRSLNDLTSHGTGNSSMDTNILAMPVNSKSIYDLKRFDNVTELFHRSSNDRIGFQVSSSKEPDSTIAGVMSEYKSLNNIHMTENDSCGQNIGYTPYLYTTTNSSNSGLDELSYSGVALSSSFTAVSGKVKDCLQTESDKFLCKSVSFGSNPCASKFQENRLSPYHALMHEQSLIPDPGESVRLLSQEESFIVQGDSSQFKDTADFTGQGNSTFPELPNRSPEEATAETLENNMKDCSGNNSLLETMMLDLSTNSFVQDWWDNSVLLAENLPNSSEKDPEPAMELANRHSLPTGERGSPFIPVIEQLLGDVAHPPTPTGHSSLEAEATALAGRVSDYQLPQFAFRDCLTVDNAQIPALACSNYTCRTRSAQNGSSEVPSANVSVDDTCSLNTANSNGSQSSNPEGTKVAKRRARAGESTRPRPKDRQLIQDRVKELREIVPNGAKH

SEQ ID NO: 45785 - protein, 728 aa, Zea Mays
MARDLAPEVERLLQNRDPNTKKKAALCSIRIVRKVPDLAENFMSAAASLLKEKHHGVLISAVQLCMELCKASHEALEYLRKNCLEGLVRILRDVSNSSYAPEYDIGGITDPFLHIRVLKLMRILGQGDADCSEYINDILAQVSTKTESNKNAGNAILYECVETIMGIEATSGLRVLAINILGRFLSNRDNNIRYVALNMLMKAIAVDTQAVQRHRATILECVKDADVSIRKRALELVYLLVNDTNVKPLTKELVDYLEVSDQDFKEDLTAKICSIVEKFSLDKLWYLDQMFRVLSLAGNYVKDDVWHALIVLMSNASELQGYSIRSLYKALQASGEQESLVRVAIWCIGEYGEMLVNNLSMLDMEEPITVTESDAVDAVEIALQRYSADVTTRAMCLVSLLKLSSRFPPTSERIKEIVAQNKGNTVLELQQRSIEFSSIIQRHQSIKSSLLERMPALDEANYLVKRAASTQAAVSSVNSAPAVTSGGPLKLPNGVAKPPPAPLADLLDLGSDDAPVTTSAPTTSPNDFLQDLLGIGLTDSSPIGGAPSTSTDILMDLLSIGSSPVQNGPPTSNFSLPGIETKPPPVTPQVVDLLDGLSSSTSLPDENAAYPTITAFQSATLRITFSFKKQPGKPQETTINASFTNLATTALTDFVFQAAVPKFIQLRLDPASSSTLPASGNVSVTQSLSVTNNQHGQKPLAMRIRMSYKVNGEDRLEQGQISNFPSGL

SEQ ID NO: 45786 - protein, 828 aa, Zea Mays
MKAPGVVARLMGLDAMPTSGVPEPYCTPFRDTRLFRDSHSLKRSPEYSMNDQFSHVPQRVDGYIRKPLDLRAPKMPSSPIERFQMEALPPRSAKHLPMSHHRLLSPIKNPGFSSARNAAQIMEEAAKILQPRAQASSREKICSFSPARIPLRVSEPRESIPPSQRTVPLKPQSSRTAPELPDVRFSRAQQMNRSWNSEEDIVIFRPSIDSYEINNPSCSKNKGKSISLAVQAKNNVQKREGVTGSGRNSGVQKEHDEQRANQPFRTQSNLQRKKPSSSGTSSPVLRQNNQKQNSLVTRGKVPANKTVSTQQGRKLMAGDSSSGKIKSGSKVSKVGGRKDIVESISGDREGSSSNNKDFPQKKRLIERNSTNEKGTFVPEKPVGKLKKQVQPNVVMDEHIKWNKESKDTTDVVSFTFTSPLVKPSAGLSRLVGKWDTRSNLDMDAGCDKDDSDNKVEGLSSVGLNFVNGDALSLLLEKKLKELTSKIDPSITFTRGDTFVPATFTLEEPPTSSCSNWGSESGVFDCSPSEVKPSQYDYCPSAKGQIFRGSKIKVEEQECSSISNARKEHENEELSPLSVLEPTSLSESCWSSECSGSSGGGKSYSSIFDVKNAKGNFLIDPASVDIEAKTTTDSASSASVDTSDISDVTQCSKTSRHTELDYIADVLSSVNLTTDELGPLFVDQDRPALDSSLFQKLENMHVYNKQGKEPFCRGGYRRLLFDCVNECLETRRTAYFRAGYAAWSKGAAALIRGVEAQVCSEITSWKSMGDWTEDELVDKDMSSGLGTWVDFLVEEFEAGVEVENHVLGSLLDEVVADMVVGRHGRSVNL

SEQ ID NO: 45787 - protein, 366 aa, Zea Mays
MPAWAEAALVLASPSPATASSTTSSCGARPRAAVGSVRLFCKGFPCSIRSKAGFQIHNYRTRMFKIKAKAESVDQQLENLQSEKSAQSEEASKVPQDLLYKRIAEVKEKERQNALEEIIYCWVTYRFMENDIYMTPALSPGGGPVRDISALPNQEDKLRNIHSADAFEMIQNHLNLIMGEKIASPPDTVVEISNLNLGKLYAASIMYGYFLKRVDERFQLEKTMKTLPPKPNQQIVFENLQPNPFWDMESLVQITPDGEEISLDDEKSNPNKLRSYVSQLDADTLQRYATIRSKEAVSLIEKQTQALFGRPDIKVLDDGSVNAKDGRMITITFTELNHLVLEAVAFGSFLWEAESYVESKYHFVNS

SEQ ID NO: 45788 - protein, 239 aa, Zea Mays
MENDIYMTPALSPGGGPVRDISALPNQEDKLRNIHSADAFEMIQNHLNLIMGEKIASPPDTVVEISNLNLGKLYAASIMYGYFLKRVDERFQLEKTMKTLPPKPNQQIVFENLQPNPFWDMESLVQITPDGEEISLDDEKSNPNKLRSYVSQLDADTLQRYATIRSKEAVSLIEKQTQALFGRPDIKVLDDGSVNAKDGRMITITFTELNHLVLEAVAFGSFLWEAESYVESKYHFVNS

SEQ ID NO: 45789 - protein, 77 aa, Zea Mays
MERLYKHFSMEQFLIDHGCQVLFLYTVALCGCFLSFVCEPMDFTNLLACGGACLYMKALGLARGFLKGSRRIRMSGH

SEQ ID NO: 45790 - protein, 167 aa, Zea Mays
MASPRGQPRRHEPAGARGPTSLPPGPEQGVPSFSYLVGGDQGAQQERIFHKANCWECLWHSWYYSCTGECYFQNQVRGHILIDFINELLTWILSSVLHFLRRTRKWRMLIPLPLLLVTQRFITCAQYLVLCSRFVGVILFDEMYAVNSYNFCCQCFSESKWFPVTSI

SEQ ID NO: 45791 - protein, 389 aa, Zea Mays
MLLRVGRRAALLLAATAAFSRLRDPDTAVYVSASPPQPPRQAFSSSAAAEGLRSGTCLFSPYLLPYPFQGFPVLNTFTSASVSPANNGDQGSDGSSGDPRCCPACLGRNSIAKAASAVGPAVVNISSMHDMHGWVNEQSIGSGTIIDPDGTILTCAHVVADFQSTKAIVRRKVSVTLQDGREFEGVVLNADRLSDIAVVKIKSMTPLPAARLGSSSQLQPGDWVVALGCPLSLQNTVTAGIVSCVDRKSSDLGLGGLRREYLQTDCAINQGNSGGPLVNLDGEIIGVNVMKVRNADGLSFAVPIDSVIKIVDNFNKNGRVVRPWLGLKMLDLNPMIIAQLKEKSSTFPDVRKGVLVPMVTPASPAEQAGFRPGDVVVEFGGKPVESIKE

SEQ ID NO: 45792 - protein, 367 aa, Zea Mays
MLLRVGRRAALLLAATAAFSRLRDPDTAVYVSASPPQPPRQAFSSSAAAEGLRSGTCLFSPYLLPYPFQGFPVLNTFTSASVSPANNGDQGSDGSSGDPRCCPACLGRNSIAKAASAVGPAVVNISSMHDMHGWVNEQSIGSGTIIDPDGTILTCAHVVADFQSTKAIVRRKIKSMTPLPAARLGSSSQLQPGDWVVALGCPLSLQNTVTAGIVSCVDRKSSDLGLGGLRREYLQTDCAINQGNSGGPLVNLDGEIIGVNVMKVRNADGLSFAVPIDSVIKIVDNFNKNGRVVRPWLGLKMLDLNPMIIAQLKEKSSTFPDVRKGVLVPMVTPASPAEQAGFRPGDVVVEFGGKPVESIKEVTKDNY

SEQ ID NO: 45793 - protein, 435 aa, Zea Mays
MHLEEDEQLARAIQESLNVESPPRRNGSANGGTMYHPPRETGNAYQPPRENGSANGGNAYHPLPFMFSSGFRACAGCHREIGHGRFLSCMGAVWHPECFRCHACSQPIYDYEFSMSGNHPYHKTCYKEQFHPKCDVCKQFIPTNMNGLIEYRAHPFWVQKYCPSHEMDGTPRCCSCERMEPRESKYVLLDDGRKLCLECLDSAVMDTNDCQPLYLEIQEFYEGLNMKVEQQVPLLLVERQALNEAMEGEKAGHHHLPETRGLCLSEEQTVSTILRPRMAGNKIMGMITEPYRLTRRCEVTAILILYGLPRLLTGSILAHEMMHAWLRLKGYRTLSPDVEEGICQVLAHMWIESEIMAGSGSSAASSSSGSSSSTSSKKGGRSQFEHRLGDFFKHQIETDTSMAYGDGFRTGNRAVLHYGLKRTLEHIRLTGTFPF

SEQ ID NO: 45794 - protein, 130 aa, Zea Mays
MSQRDVDYSCGFCGYPLNLSSSNRSTSEVDKVSCFPLTWRSYRPKTKLLCRKCGASIGYGYGEPAALCSFDPASSSSSSTSQKYLIKIQALQPSDGTQKRVREECFWFDLQELVQGSEPWSEITNIPLLF

SEQ ID NO: 45795 - protein, 343 aa, Zea Mays
MPGRLIDGLKRVSVSNPVMLLDEIDKTGSDVRGDPASALLEVLDPEQNKAFNDHYLNVPFDLSKVIFVATANKMQPIPPPLLDRMEVIELPGYTPEEKLKIAMKHLIPRVLEQHGLSTANLQIPEAMVKLIIERYTREAGVRNLERNLAALARAAAVKVAEQVKTLRLGKEIQPITTTLLDSRLADGGEVEMEVIPMGHDMSNTYENPSPMTVDEAMLEKVLGPPRFDDTEAADRVASPGVSVGLVWTSVGGEVQFVEATAMVGKGDLHLTGQLGDVIKESAQLALTWVRARAADLNLSPASDINLLESRDIHIHFPAGAVPKDGPSAGTCGTSLWNQESNFT

SEQ ID NO: 45796 - protein, 967 aa, Zea Mays
MEERIGISRESMPAPGYLLDYISAFTVPTYSYLLQGGNPLDFNFAHLETVGVHSASLTNQVEAQTVISDAKGSFSASPLGDSVESTDKPGGSMCRETNTADNLMLLGGGKNDIAEEKVVKRGTKRLNAAQPKHSLPSDGHKNTKKPAASGLSHLGVKSQAYVRRNRSKPSRESGNVTSIRSSMIPAKVYEPNDEKVTAQKNNADDHGVLSVSSIKQSGPNRDIAPKSIASDDHAAMELDGIQTILESECVVNDKVNKAGNNNKAKQLSSNDTNHDRFLVGCGEIAAEVSSAETPDANLKVVIKPCYSSASTYDEKESCAVHEKADDGHLDECMAHIREGELGHSRTLPCVVEASTSHNDVVGPSCEGTVNIVDEHADGDINTVAGKIDSHEDLDSSRHSNMILKVSGTSIDFSRPASLKESSDLVRPEASNISHVKDEIEVCNSAIVAQKDTECLSSGRSMNIEESPVSVRKNSYVGNSNSAHPISVGIDLSDALSPPKNDESNVESEIKKYENLNKMEKKAYEDSILKNARVIEANIKKAGQRSPCNIALEKRRKSHWDFVLEEMTWMANDFMQERLWKSVAAAQVCHWIASDAHAKFEKASILKKQKAVIKIIAKGIMSFWRSAEALQTADRTAKVMPHNSTMLEEIDPSGVKAGKEQGHNSLEAKESSQQRSQIHDYAVRFLEYNRTADLHVLPEAPPTPDRLNDFGVLKVSDHLSEESLFYTVAAPGAVLAYRDSLESLFMYHKEDGNAELNDDYEASACDSVADLPQENAYEEDEGETCTFLSPKAYVGGSISNMVHKKKHVMPQRISLARPYEIGTYVPYQPCMESKSRNQPLLSNGKRPTSFLAIPPKRTRTAARQQVVSPFHAGASVPPQDFSSGNTNSYQDDQSSLHSESLPWRNMDFESTVDSDRQLPYDAGEMCTKVNNKKKLKNSGYKIAQNAANLYVPTSAKGHIYDPRKQMQV

SEQ ID NO: 45797 - protein, 403 aa, Zea Mays
MAASSRPLVSVKALEGDMVTDAPGIALPPVFGAPIRPDVVRFTHKLLSCNKRQPYAVSRRAGHQTSAESWGTGRAVSRIPRVPGGGTHRAGQGAFGNMCRGGRMFAPTKIWRKWHRRVNVNLRRVAVASALAATAVPALVQARGHRIETVPEMPLVISDSAESIEKTSQALKILKQVGAYADAEKAKDSVGIRPGKGKMRNRRYINRKGPLVVYGTEGSKVVKAFRNLPGVDVANVERLNLLDLAPGGHLGRFVIWTESAFKKLEEVYGSFDAPSQKKKGFVLPRPKMANADLGRIINSDEVQSVVKPLNKEVKRREKRKNPLKNMAAVLKLNPYLGTARKMATLAEAARVKARKEKLDSKRTKLTSETAKVKAAGKAWYKTMISDSDYTEFENFTKWLGVTQ

SEQ ID NO: 45798 - protein, 490 aa, Zea Mays
MTIDMSIPGSSGLLNAAGKRDMKFFSNPYVLALTGAAGIGGFLFGYDTGVISGALLYIRDDFPAVKDNYFLQETIVSMALVGAMIGAAGGGWINDAYGRKKSTLLADLMFALGSLVMCAAAGPYILIIGRLLVGLGVGVASVTAPVYIAEAAPSEIRGGLVSTNVLMITGGQFFSYLINLGFTEFVLMLFLPESPRWLYWKDEKAKAIAVLERIYESDRLEEEVELLATSSMHEFQSNNTGSYLDVFKSKELRLAFFAGAGLQAFQQFTGINTVMYYSPTIVQMAGFSSNRLALLLSLIVAAMNAAGTIVGIYLIDRCGRRRLALTSLAGVVVSLAILATAFILQSSSGLCMSAASGTCQGALGWFAVAGLALYIAFFSPGMGPVPWAVNSEIYPEAYRGTCGGMSATVNWVSNLVVAQTFLSIVGLVGTGPTFLIVAGIAVLAFVFVATYVPETKGLTFEQVEQMWRERAWGNSGGNCESLLAGTAAAP

SEQ ID NO: 45799 - protein, 250 aa, Zea Mays
MPDHKYCERHINRNRHRSRKPVENQPRKATKEVTTAAAGSLPCAGPQGSLKKAKVNDSKPGTGSYWTDSLNRTMLSREKANKPTDDESLLLSSTKNSQPTLSLLTQLKQQNKPDKLGPTPENEPNSDTMLKAWGGSHHKSISSTQRHDAESLQSVLQNFSLAQNDRLESEKNRYSDSVLVSSAFYSADGPQTTCLTPNMTQVQQDCISSSWEMPQGGPLGEILTNSKISEDLSKCGSRSYGWLLNLDHAP

SEQ ID NO: 45800 - protein, 961 aa, Zea Mays
MYLDVADSGVLPYGWTRYAQFSLSVVNQIHNKFTIRKETQHQFSARESDWGFTSFMPLGELYNHSRGYLVNDTCIVEAEVAVCKVVDYWSYDSKKETGYVGLKNQGATCYMNSLLQTLYHIPYFRKAVYHMPTTENDMPSGSIPLALQSLFYKLQYNDSSVSTKELTKSFGWDMHDSFMQHDVQELNRVLSEKLEDKMKGTVVEGTIQQLFEGHHMNYIECINVDFKSTRKESFYDLQLDVKGCQDVYASFDKYVEVEQLEGDNKYHADKHGLQDAKKGVLFIDFPPVLQLQLKRFEYDFMRDTMVKINDRYEFPLQLDLDRDDGKYLSPDADRNVRNLYTLHSVLVHSGGVHGGHYYAFIRPTLSDQWFKFDDERVTKEDAKRALEEQYGGEEELPQTNPGLNNTPFKFTKYSNAYMLVYIRESDKDKIICNVDEKDIAEHLRIRLEKDREEKERRKKEKAEAHLYTIIKVARDDDLKTQIGKDIYFDLVDHDKVPSFRIQKQMAFAQFKEEVAKEFGIPTQFQRFWLWAKRQNHTYRPNRPLCPQDEAHTVGQLKELVNKAHNAELKLFLEVELGLDLKPLPLPDKTREDIFLLFKLYEPEKEQLRYVGRLFVKASGRPQDILPKLKMLAGFSQDDDIELYEEIKFEPNVMCEYIDNRLLFRSCQLEDGDIICFQKSSKADSADRYRFPDVPSFLTYIRNRQVVHFRSLEKPKEDDFFLEMSKIFTYDQVVEKVAEKLGVDDPSKIRLTSHNCYSQQPKPQPIKYRGVERLLDMLIHYNQTSDILYYEVLDIPLPELQALKTLKVTYHHATKDEVSVHSIRLPKNSTVGDVLNDIKTKVELSHPNAELRLLEVFYHKIYKVFAPNEKIENINDQYWTLRAEEVPDEEKNLGPFDRLIHVYHFTKDTQNQTQVQNFGEPFFMVIREDETLSSIKERIQRKLKVPDEDFSKISALNLPSAF

SEQ ID NO: 45801 - protein, 1059 aa, Zea Mays
MTTSPPPAEQHEEEEVLVPYGPHLELPNGAQPMEVVPAEPAATVENQQIEDPPISRFTWTIENLSRVSTKKLYSEIFVVGGYKWRILIFPRGNNVEFLSMYLDVADSGVLPYGWTRYAQFSLSVVNQIHNKFTIRKETQHQFSARESDWGFTSFMPLGELYNHSRGYLVNDTCIVEAEVAVCKVVDYWSYDSKKETGYVGLKNQGATCYMNSLLQTLYHIPYFRKAVYHMPTTENDMPSGSIPLALQSLFYKLQYNDSSVSTKELTKSFGWDMHDSFMQHDVQELNRVLSEKLEDKMKGTVVEGTIQQLFEGHHMNYIECINVDFKSTRKESFYDLQLDVKGCQDVYASFDKYVEVEQLEGDNKYHADKHGLQDAKKGVLFIDFPPVLQLQLKRFEYDFMRDTMVKINDRYEFPLQLDLDRDDGKYLSPDADRNVRNLYTLHSVLVHSGGVHGGHYYAFIRPTLSDQWFKFDDERVTKEDAKRALEEQYGGEEELPQTNPGLNNTPFKFTKYSNAYMLVYIRESDKDKIICNVDEKDIAEHLRIRLEKDREEKERRKKEKAEAHLYTIIKVARDDDLKTQIGKDIYFDLVDHDKVPSFRIQKQMAFAQFKEEVAKEFGIPTQFQRFWLWAKRQNHTYRPNRPLCPQDEAHTVGQLKELVNKAHNAELKLFLEVELGLDLKPLPLPDKTREDIFLLFKLYEPEKEQLRYVGRLFVKASGRPQDILPKLKMLAGFSQDDDIELYEEIKFEPNVMCEYIDNRLLFRSCQLEDGDIICFQKSSKADSADRYRFPDVPSFLTYIRNRQVVHFRSLEKPKEDDFFLEMSKIFTYDQVVEKVAEKLGVDDPSKIRLTSHNCYSQQPKPQPIKYRGVERLLDMLIHYNQTSDILYYEVLDIPLPELQALKTLKVTYHHATKDEVSVHSIRLPKNSTVGDVLNDIKTKVELSHPNAELRLLEVFYHKIYKVFAPNEKIENINDQYWTLRAEEVPDEEKNLGPFDRLIHVYHFTKDTQNQTQVQNFGEPFFMVIREDETLSSIKERIQRKLKVPDEDFSKVPDFQMFCS

SEQ ID NO: 45802 - protein, 216 aa, Zea Mays
MVAVSTATMASSLLLRPRALLPPHPIPSSSRRPLPAPRVQLQGSIQEKPGLPAKSDGERRRPAGTRLYSLAPYPLLLAALLPGAEPVTAVFAPFVELVKTWDLPGWLVHWGHPGNMEEKAKAKDLHPKLLAGMFFFFALGATGGITALLTSDKPIFESPHAVTGVIGLALLTIQSVLPKLFEGNPGLRTTHGLLGSGIMTLFLIHAALGLQLGISF

SEQ ID NO: 45803 - protein, 97 aa, Zea Mays
MAAGYRAEDDYDYLFKVVLIGDSGVGKSNLLSRFTRNEFSLESKSTIGVEFATRSLQVDGKVVKAQIWDTAGQERSNRRRKSIRREGIVVLHGDLCA

SEQ ID NO: 45804 - protein, 133 aa, Zea Mays
MAYVSPATDDTSTDLDTDEKNQMGLPSGRSSASSAASLHQRQPQSDIHSHEYHQLSLLLMLASLTSIFHPLVCLVDTQMAKPEYQAMETGRASKRRCMIGYFNRNNKFPRSIKVSSNLHRKTNIYNYVMFPTI

SEQ ID NO: 45805 - protein, 259 aa, Zea Mays
MYMVSSVHVHCGLVCLFACRSKPPAAGKTTMTKSSSAGQKRARQPRFAFMTKSDVDHLEDGYRWRKYGQKAVKNSPFPRSYYRCTNSKCTVKKRVERSSDDPSVVITTYEGQHCHHTAVACFPRANHAADGRHHLPFVEFSAASSAHHHYHSNPYSGTASCVNDHHLPPLLPTTTTLAPRHNALDNGQQELQAAMSMPVASVPTTSLLPPPTTALAAPPVASVSMTSSSSLPPASSSAAPAAVDKGLLDDMVPPAMRHG

SEQ ID NO: 45806 - protein, 998 aa, Zea Mays
MRDNFEKIILIDHDLSEQRDVEYLLWQLHYKRIEDFRRNISAASSLASQSGKSNTNPDRVKRIKSAFKSFLSEATGFYHDLMLKIKSNWGLPLNYFPDSLDNANNSVRDDMKTVQLKKGLISCHRCLIYLGDLARYKSLNGDGDSASREYTAASSYYKEAASIYPSSGNPHHQLAILASYSGNEVVAVYRYFRSLAADTPFATARDNLIILFEKNRQSYGQLPDNSKVPSTKTLPPRPSGWGRGRGEVRFQPKDVNAETAERERECNNGDTLKTFYIRFVRLNGILFTRTSLETFGELFSSVSNDLQILLSSGLEEDLNFGSDAAENALAAVRLTVILIFTVHNVNKEPDRQSYAEIVQRRVLLQSAFTAAFDFVGRILRRCSELHDIASSFYLPAILVYIEWLASHPELAVDSEMEEKHANARSFFWSQCISFMNKLILTNLASVNDDDDEACFSNMSIYEEGETGNRFALWEDLELRGFLPLLPAHTILDFSSKHTFGSTKEKKARVQRIFAAGKSLLNFVQIDQLRIYFDSSSKKFVMAKNPPVSKTNTPLHESPDALKTSGTEMDYEAARRFDSVSSNMGTLQSKVQFCPDGDDDEEIVFKPTASEKFPKAPSDLLVNGYTHPVPMSTAGWPTNASLVPVQSTGSMTATGWPPNGGSNAFPSTASLSAAGNYNINQSLPRSSVGWAVNGEQSVIPSIAPRFELVQPVEEPVSSWTSSGAQHVGTQHKHTGLTFPDVVSEPLVSASMVQRFSSTDYSKFLSEQEMLLVNGLNTVNLTGNGYLKQRLQPGLSGLQSMGYSSQTPIEPGGTTANSMHNHLKITGENVPSTLDSVVPSIAPLGGMPMKFTEAPLTASKKNPVSRPSKPVGPPPGFDHVAPKRQDDSIPVEKLQIPQVDDYSWLDGYQQSIDHVHNLRTVYSGVSDSTAFATPFPFPGKQQLSGMHAQGATNEKTWQDFRLFEPSKQNMLQNYHQRNQQNGQIAEQEPANSVWSSSYHV

SEQ ID NO: 45807 - protein, 583 aa, Zea Mays
MEEKHANARSFFWSQCISFMNKLILTNLASVNDDDDEACFSNMSIYEEGETGNRFALWEDLELRGFLPLLPAHTILDFSSKHTFGSTKEKKARVQRIFAAGKSLLNFVQIDQLRIYFDSSSKKFVMAKNPPVSKTNTPLHESPDALKTSGTEMDYEAARRFDSVSSNMGTLQSKVQFCPDGDDDEEIVFKPTASEKFPKAPSDLLVNGYTHPVPMSTAGWPTNASLVPVQSTGSMTATGWPPNGGSNAFPSTASLSAAGNYNINQSLPRSSVGWAVNGEQSVIPSIAPRFELVQPVEEPVSSWTSSGAQHVGTQHKHTGLTFPDVVSEPLVSASMVQRFSSTDYSKFLSEQEMLLVNGLNTVNLTGNGYLKQRLQPGLSGLQSMGYSSQTPIEPGGTTANSMHNHLKITGENVPSTLDSVVPSIAPLGGMPMKFTEAPLTASKKNPVSRPSKPVGPPPGFDHVAPKRQDDSIPVEKLQIPQVDDYSWLDGYQQSIDHVHNLRTVYSGVSDSTAFATPFPFPGKQQLSGMHAQGATNEKTWQDFRLFEPSKQNMLQNYHQRNQQNGQIAEQEPANSVWSSSYHV

SEQ ID NO: 45808 - protein, 289 aa, Zea Mays
MVHRARYNDGDDIPPLVIGVSAPQGSGKTTLVFALDYLFRVAGRNSATLSIDDFYLTAKEQNELRDRNPANALLEFRGNAGSHDLQLSVETLESLIKLTKEGMKMKVPRYDKSAFGGRGDRADPSVWPEVEGPLEVVLFEGWMLGFKPLPNEVVKEVDPQLEVVNKNLEAYSDAWDRFIQSWIVIKIREPGSVYQWRLQAEVAMRADGKPGMSDEEVCSLTKLLTILEQSLCYPSNLGALLMVLSCGFFGYGFCITLPTGIPCISANTVQRGAEWFESRSSAGHRHRRK

SEQ ID NO: 45809 - protein, 198 aa, Zea Mays
MAPLHAALPPPSSAAAHHHAAAPPVFLARSPYHPRRAAASCPLAVAAAPSSRKAFLSCPLLGHWTTAAPPRAIPSSSSSSTPALIASVQDLYDFICCGPLVDRIGYTSEKITESIDRWLLAGARVARLFRLNELQLSDAEKARIYHFYIPVFLWCEDEVMVHRARSGSALPKEVGRRLLCSHLIIFFGLLVGILPHCL

SEQ ID NO: 45810 - protein, 137 aa, Zea Mays
MGTLRRIPPPQPLPSPTRPRARNTPRRVLEANQGRWFISLSSRCVRSLSLPLSLLIRSGHFLLASPPVPRPGTLELSPRQGRRSPRARGENGGGARGGVSRTPRSVWPGSSGCTRRLTPRRGARRPRSPRWWTPAWI

SEQ ID NO: 45811 - protein, 125 aa, Zea Mays
MHRPPLRADEFRTLDYRRRSSSTAATSGSTFACCPLSTAAGAALLLAGGNDDDDVIDTEATGGAARAVVGGGNNDVVGTEATGIDIAACSSCWPLSRALCRGASVVVVGRRGGRWWSLTQLAVPL

SEQ ID NO: 45812 - protein, 93 aa, Zea Mays
MSVELILWLFSFVSVMVLIGLTAYQLICLSDLEYDYINPYDSSSRINAVVLIEYSLQGALCASFLLTLHWFPFLVMTPVTYYHVKLYVLLALG

SEQ ID NO: 45813 - protein, 781 aa, Zea Mays
MEIAKKTEQIVDMLRKMTNHQPLITIIKRNLTLDFLPQSTKAAGINSYMVASIQKRCELICKRLLERILQVEEGAAKEMEIHMLPYIVALQAFCIVDPTLCIPVTDPSKFVVTLQPYLNIQVDSKSAAQLLESIIFVIDAVLPLIRKPTQNVVEELEKDLKHMIVRHSYLTVVHACIKCLCALSESAGRGPGLVENLVNIFYKHLSGANSDSQLLGRSLFCLGLLLRYGYQLMQTSENQLDFPKIINLLQRKYLLRDDFSLKVRALQTLGYILIAKPEFMLQKDMLKLIETALSSEVDYRLKIQGLQNLYEYLRDAESQLTAESTVKPPVRCEINGRSKVPVAAGAGDTNICGGIIQLYWSSILERCLDTNDQVRQSALKIVEVVLRQGLVHPITCVPHLIALEMDPLEGNSKLAHHLLMNMNEKYPLFFESRLGDGLQMSFKFFESIVSNHKMAANIKSNPIAFVKPGISRIYRLIRSNRNSRNKFVHSIVRKFESDSRSRSTVSFLVYCAEVLASLPFTCSDEPLYLIYDINRIIHLKAGGVESNLKRWTSMSQSQNTVDMPTLPGERHVVMQEPGGYYDNVGYAHERVNANPCSTSDVDMAKVQVDVDMAKVQGDCLDAIALQLLLKLKRHLKVVYSLDDARCQSFSLKEPPKSGETFSRQNIPFNVSSTNISLPSCLQDVASVYQDFKTVLHEDSMDFAVFIPSVQIRKRPTPRNTTNPTPRSTTRVRRTAASSVTKARGGARGDDSDDSDDDDWTGGPRVLDFSGGGRVTRQRVQV

SEQ ID NO: 45814 - protein, 1320 aa, Zea Mays
MQLLQLKAIGVICTVFSSYTQHRSYLVDEILHLLRKLQFSKNAVRTYHLADEDQKQIQMITALLVHLVQFSAIVPNSLKGTVDWTTIVDASGDADYYPIKCHEAATEACCRFWTDVLQRFTAAKSQDMSETKGIIDNLVQDFLMILNLPEYPAAASILEVLCVLLLQNAGLKSKDTNVRCFAIDLLGGIASRLKHDSVICSEEKLWILQDLTDAGSDGSKILKNKCCVCLGGRDCMGAASQDNLERDSVCPLCFCKQQLNVLQTYCQSQIKENGKKTAASTSKKSAKPAEVPAVDIIQQILLSYLQESGPQDDGNLFTRWFYLCIWNKENQHSQEEIIYYLARLKSKEILRDSGNGLAISRDSAKKICLALGQKNSFCRGFDKILALLLASLRENSPVIRAKALRAVSSIVEADPEVLGDKRVQSAVEGRFCDSAISVREAALELVGRHIASHPDVGLKYIEKVAERIKDTGVSVRKRAIKIIRDLCASNPNTDTTHAFVEIISRVNDEESSVQDLVCKTFYELWFEEPTGSHKHLVADGSSVPMEIAKKTEQIVDMLRKMTNHQPLITIIKRNLTLDFLPQSTKAAGINSYMVASIQKRCELICKRLLERILQVEEGAAKEMEIHMLPYIVALQAFCIVDPTLCIPVTDPSKFVVTLQPYLNIQVDSKSAAQLLESIIFVIDAVLPLIRKPTQNVVEELEKDLKHMIVRHSYLTVVHACIKCLCALSESAGRGPGLVENLVNIFYKHLSGANSDSQLLGRSLFCLGLLLRYGYQLMQTSENQLDFPKIINLLQRKYLLRDDFSLKVRALQTLGYILIAKPEFMLQKDMLKLIETALSSEVDYRLKIQGLQNLYEYLRDAESQLTAESTVKPPVRCEINGRSKVPVAAGAGDTNICGGIIQLYWSSILERCLDTNDQVRQSALKIVEVVLRQGLVHPITCVPHLIALEMDPLEGNSKLAHHLLMNMNEKYPLFFESRLGDGLQMSFKFFESIVSNHKMAANIKSNPIAFVKPGISRIYRLIRSNRNSRNKFVHSIVRKFESDSRSRSTVSFLVYCAEVLASLPFTCSDEPLYLIYDINRIIHLKAGGVESNLKRWTSMSQSQNTVDMPTLPGERHVVMQEPGGYYDNVGYAHERVNANPCSTSDVDMAKVQVDVDMAKVQGDCLDAIALQLLLKLKRHLKVVYSLDDARCQEPPKSGETFSRQNIPFNVSSTNISLPSCLQDVASVYQDFKTVLHEDSMDFAVFIPSVQIRKRPTPRNTTNPTPRSTTRVRRTAASSVTKARGGARGDDSDDSDDDDWTGGPRVLDFSGGGRVTRQRVQV

SEQ ID NO: 45815 - protein, 401 aa, Zea Mays
MAGRLPGAAASSPLPRALLLIAALVLFSISFLSLRSLRPAADPALASAADKYRPLLRLQSSSSVYHSPEAFTAGYADMERSFKVYIYPDGDPKTFYQTPRKLTGKYASEGYFFQNIRESRFRTDDPDQAHLFFVPISPHKMRGKGTSYENMTVIVKDYVEGLINKYPYWNRTLGADHFFVTCHDVGVRAFEGLPFMVKNSIRVVCSPSYNVDFIPHKDIALPQVLQPFALPEGGNDIENRTTLGFWAGHRNSKIRVILARVWENDTELAISNNRISRAIGELVYQKQFYRTKFCICPGGSQVNSARISDSIHYGCVPVILSDYYDLPFNDALDWRKFAVILRERDVYQLKNILKSISQEEFVSLHKSLVQKHFVWHSPPVSYDAFHMIMYELWLRHNVIKY

SEQ ID NO: 45816 - protein, 376 aa, Zea Mays
MGGAQLVGRWVESYTGMSPDNIKGLLLALSCSLFIGASFIVKKKGLKKAGASGVRAGVGGYSYLLEPLWWAGMVTMIVGEIANFAAYAFAPAILVTPLGALSIIISAVLAHIMLREKLHIFGILGCILCVVGSTTIVLHAPPERQIESVAEVWDLATEPAFLFYAAVVFAAAFVLICHFVPQYGQTHIMVYIGICSLVGSLSVMSVKALGIALKVTFSGMNQLVYSQTWVFSFVVILCIVTQMNYLNKALDTFNTAVVSPIYYTMFTSLTILASVIMFKDWDRQNPTQIVTEMCGFVTILSGTFLLHKTKDMVDGLPPNLPIRLPKHADEDGYADDIIPLRSAADDSRLIPSSRQSIYMGSGKYPPIHSVGDHNVG

SEQ ID NO: 45817 - protein, 397 aa, Zea Mays
MTFLFPAKNQQGTMEGRPSAPARVSMFRRLMVRVTPAERLAGDGKERDKDERPPASGAGADAEVGSVGLDKMVLSFMEDSSAAAERPPRGRCSSCFNGNNQDGSDDEDFDFLPSASAPAAAPAAAGDALELLKCASTPERNLLADASRIAERCGSGSGSGRKKADVRRAVADGLRALGYDAAVCTSRWDRTPSHPAGEHQYIDANVEPGAGAAARVRVRVVVEVDFRSEFEVARPTKAYRAALQALPPLFVGSPERLGRVVGVVADAARQSLRKRGLHFPPWRKREYMRAKWLSPHARSSSSADRTPAPATPVSAAAAAFSGEFELWFDEKEKPKAADYDGGIPGGEDDGAGKKVTVMVSPTPTPWRAEEPGAASKLCPQAKRKVVTGLASLLPLAS

SEQ ID NO: 45818 - protein, 122 aa, Zea Mays
MVQAGGSGHRRGTRSSLCSSEKMRDRGRRRWRARGRNRLVRARGWIRSLSPRDMPVRSSLVGSCFMKWMQLERRTSGPTSRGGSPWATGPARPRCRSSRTTPSPPTPLSDNSSPPGSPACLS

SEQ ID NO: 45819 - protein, 126 aa, Zea Mays
MPVRSSLVGSCFMKWMQLERRTSGPTSRGGSPWATGPARPRCRSSRTTPSPPTPLSDNSSPPVYLRYCLNVWDVGGQKTIMSYWRNYFEQTNGLVWFADSSDIRRLDDCRAELHNLLKEEDKGLPI

SEQ ID NO: 45820 - protein, 140 aa, Zea Mays
MVQAGGSGHRRGTRSSLCSSEKMRDRGRRRWRARGRNRLVRARGWIRSLSPRDMPVRSSLVGSCFMKWMQLERRTSGPTSRGGSPWATGPARPRCRSSRTTPSPPTPLSDNSSPPGSPAWFLHFVFLSVNHVFPYYCRWV

SEQ ID NO: 45821 - protein, 683 aa, Zea Mays
MIRHREQLHEREQYILELEMKLNDKDRELNALKIDHQTVWANQDLIREQTKELATVRRERDNSEAERAQHLTQIHELQEHLREKESQFIALEEQHRAAQDNILYKDEQLREAHAWVSQVREMDALQSQSLQVELRERMEQFNQYWISSQQQYAEMQRSLLHTIQQLQQELTEAREQSGAQKDGPQVSREGSAESSLVQSMGNSVASNGSATADGNQQLLKNNGSVDVSVQANSASAVPVPSSLLGIGGPAAHIAAMHAFMIHPQGIPQPLVASPNSGVPQFGSFQSQSTIQPNSQWPNQQEVQNVSQPQDETNYQTSQSDRTVLQQGAINTDELSSKPSQDSQPDHLNAHVKQQQSPVVEANVAEHVSCDEQQKILNEQDSLSNMNNHIGIVEHLEQNTESKDERAASDKQPEPVSRQHKHLNFPPFTTQIHLKKSATENPNVVNQVDIMKSVAGGFSSQLPRAPKEPSLLDERSLLACIVRAVPAGTEGGIRISSTLPNRLGKMLAPLHWHDYKKQYGKLDDFVASHPELFVIEGDFIHLRDGAQQIISATTAAAKIAAATASSASYSSLLPSVAVTPVAQNTRQKRRPAVDSRSSNAIPSGNGFTDQFNIIQGVSDVTISGKVRNIQDNGFIDEVRTGQPSVLTAATANGARHDKCANNTRHGYGGKQQGRTTGTTYLSRR

SEQ ID NO: 45822 - protein, 170 aa, Zea Mays
MATEKPILYNAWISSCSHRVRIALNLKGVDYEYKSVNPRTDPDYGKINPIKYIPALVDGGIVVSDSLAISLYLEDKYPEHPLLPKDLKRKALNLQIANIVCSSIQPLQGYAVIGLHEGRMSPDEGLHIVQSYIDKGFRAIEKLLEGCESKYATGDDVQLMCSLNHRYMPA

SEQ ID NO: 45823 - protein, 261 aa, Zea Mays
MGSNDPNTPSKASKASEQDQPPATTTSSGTASVYPEWPSFQAYSAIPPHAFFPPTVAANPQAHPYMWGAQPIVPPYGTPPPPPYVMYPPGTVYAHPSTPPAMHPFGHYPMPTNGHAETHGAAPSAPEMNGKSEPGRTSAPSANGITSHSESGSESESEGSDDNSQNDSHSKDNDGKEDGNSQNGMSYSGSQGVVNQTMAMLPMQPGAMVGGVPSSTAANLNIGVDYWAAPGSAAVPAAHGKAPAGSARGDQWEKYILLTTD

SEQ ID NO: 45824 - protein, 238 aa, Zea Mays
MVRLFQGKSEPGRTSAPSANGITSHSESGSESESEGSDDNSQNDSHSKDNDGKEDGNSQNGMSYSGSQGVVNQTMAMLPMQPGAMVGGVPSSTAANLNIGVDYWAAPGSAAVPAAHGKAPAGSARGDQWDERELKKQKRKQSNRESARRSRLRKQAECEELGQRAEALRSENSSLRAELERIRKEYEQLLSQNASLKEKLGAASSDSLPDMNEQNDGDGDGGYRKQPDSDGHQPGSES

SEQ ID NO: 45825 - protein, 261 aa, Zea Mays
MALMSLGAAGYTTATAPPRPRRCTLPFRAAASPAALDRRRRPHNVAGDFFVDHRCIDCQTCRWMAPEVFKRVDGKAAVAAQPSSEEERTKALQALLSCPTSSIHTEKPPKDILKVQNMFPLPIDDKLLPGVYLCGYNSEDSYGATSYLVIHPQGNILIDSPRYTPKLANNIEKLGGARYMFLTHIDDVADHRKWAEQLKCERIIHSGDVIFRCTHWLRFWRLLQKEESQQQILIASQVLEVVAMEVFANHGWRSNSRIEYG

SEQ ID NO: 45826 - protein, 884 aa, Zea Mays
MVSRSYSNLLELAAGGSGGEPLPSLGRRRIPRVVTASGIVPDLDVSDAASAADQSSHAPRERVIIVANQLPVRASRRAAAGAGGGGWDFAWDQDSLLLQVKDSLRAHHGRADVEFVYVGGLRDDVPPAEHDQVAHDLLEGFRCVPTFLPADLRSRFYHGFCKQQLWPLFHYMLPLSPELGGRFDRLLWQAYVSVNKIFADKILEVISPDEDFVWVHDYHLMVLPTFLRKRFNRVKLGFFLHSPFPSSEIYKTLPVREELLRSLLNADLIGFHTFDYARHFLSCCSRMLGLKYESQRGYIALEYYGRTVTIKILPVGVHLEQLRSVLNLPELGVKVAELLKQFCHRNRLLLLGVDDMDIFKGISLKLLAFEQLLMQHPEWRGRVVLVQIANPARGRGKDVREVQEESDAMVRRINDAFGQPGYQPVILIDQPLQFYERMAYYVVAECCLVTAVRDGMNLIPYEYVIARQGNERIDSILGLGPASRKKSMLVVSEFIGCSPSLSGAIRVNPWNIDSVADAMDYALEMPEGEKVLRHEKHHRYVSTHDVGYWANSFLQDLERICLDHNRRRCWGIGFGLKFRVVALDPNFKKLAVEHLVLAYRRTKKRVILLDYDGTLMPQTSLGKSPTSRTIDMLNSLCRDRNNMVFLVSAKSRMTLNEWFLPCESLGLAAEHGCFLRLRRDAEWETCVPVIDCSWKQIAEPVMKTYTETTDGSTIEDKETAIVWCYEDADPDFGSCQAKELHDHLESVLANEPVSVKAGPNLVEGVSKGLVAKRILSTTQERGDADDDLPDFVLCVGDDRSDEDMFEVIAAAAAARGVSSLQAEAEVFACTVGRKPSKAKYYLDDPADIVRLVQGLASVSDDDQTHAPPPPPPSAATTAADTVPR

SEQ ID NO: 45827 - protein, 92 aa, Zea Mays
MCLLFITEVDKAGRWARNHYLSSAALPSIKGDKLIVPHESLDISIERLKEHGITTKKSSQNLKKIGACHMSISQREGRLQFVPLPGTQTVIG

SEQ ID NO: 45828 - protein, 255 aa, Zea Mays
MGYLPALGGKAAHLVNDLATVILNPVSERERQPHHPTHLPATEGEDTLFVDDDSDQNSDGPDTSSFRAFLMSFVPSSTASKNSMETIPEHNLDVEYPTLTPVGKACSGRKGLFSRGKHSLGRIISKAGLGNLRQKQTHSIDGEIIGQTESVAPRFEVKGSKESTLHDKLPAMSEPSLLLTEMMRAVLYTSLPVLVQGRNWMLVYSTWRHGISLSTLYRRSRLCAGYSLLVFLCIVHILPLCYTKHDTLFFPLTLA

SEQ ID NO: 45829 - protein, 123 aa, Zea Mays
MSSFVPCQSTGLRPSSGRGRSHMDYGAAVYAWGLWRSFSVAKAIRRAWRHKASCRLACESKGGSACRISPAGGAQGGELWRGRSCCYRLRDNLLLAAEKVLEMLTKKMICLSSLLHKMLLETA

SEQ ID NO: 45830 - protein, 75 aa, Zea Mays
MGCRSLGCAKVFSPLSLNNNSWWMYVCMYSLGCAKVFPLDVRNTFTPHCNPRLHSRPLLLPPLPRDRSPQHAGVA

SEQ ID NO: 45831 - protein, 143 aa, Zea Mays
MEHCHIHCKAAGYITAHSRKSTSESTGYVFLRCTITGHGEAGYMFLGRPWGPFGRVVFAYTFMDRCIKPSGWHNWDKSENERTACFYEYRCSGPGALPSNRVTWCRQLLDVEAEQFLAHTFIDPDVDRPWLLQMMAIRIPASA

SEQ ID NO: 45832 - protein, 137 aa, Zea Mays
MQGTGSLVQNKLVGAPGGGSSPHVVQNADIPVKQTTSSSSREQSDDDDMEGDAETTGNGNPVQHRLQRRKQSNRESARRSRSRKAAHLNELEAQVSQLRVENSSLLRRLADVNQKFNEAAVDNRVLKADVETLRAKD

SEQ ID NO: 45833 - protein, 155 aa, Zea Mays
MSSEEARASFSELVVGSPTRTEGETYSSGDMSSEEGAHVTCFTEDLHDVTLHFQIVRFSKQIYVWVGCNTAKFGHLYAAATTRPDNRVSVTSVLGGTSDNTGSMLKTGLNIVLACNIPKDSPILEAAAERKLVEKLKGLGYIKTPAVGANTSSAQ

SEQ ID NO: 45834 - protein, 292 aa, Zea Mays
MKIIARSKRKNFERNHEVPTAEHVWNTESLIRAKGMMCCVCLESISPAQPLGQMMTSENMVHRCNVCGAAAHIICSSNSQKDCKCISMFGFKHVVHQWTVLWTDIADQSEEGQYCSYCEELCSESFLGGPPIYCCMWCQRLVHADCQSAMATETGEICDLGPFKRLILSPLFVRAISKPGSILSSITHGANEFATTVRGRLNRTKKEKHQNRFSSDSNDDSSSDTTLNSNQRAGELKTIGDSAQRSPENEHDSSESDGRELISESRRLEKWGSARRSSQAQATFSFESGAGF

SEQ ID NO: 45835 - protein, 355 aa, Zea Mays
MKIIARSKRKNFERNHEVPTAEHVWNTESLIRAKGMMCCVCLESISPAQPLGQMMTSENMVHRCNVCGAAAHIICSSNSQKDCKCISMFGFKHVVHQWTVLWTDIADQSEEGQYCSYCEELCSESFLGGPPIYCCMWCQRLVHADCQSAMATETGEICDLGPFKRLILSPLFVRAISKPGSILSSITHGANEFATTVRGRLNRTKKEKHQNRFSSDSNDDSSSDTTLNSNQRAGELKTIGDSAQRSPENEHDSSESDGRELISESRRLGNDETGEVKLKYALSELPADSRPLLIFINKKSGAQRGDLLKHKLHFLLNPVQVFELSSSQGPETGLFLFRKLALAMIFREFYHGEVA

SEQ ID NO: 45836 - protein, 291 aa, Zea Mays
MQALKNVPPDLQTKDKFLVQTTVVPFGTADEDIVPAFFSKETDQYIEEKKLKVVTVRVSEPQVEKLINGVPHAKETAGVTVAEQTLDSVNEAPNVVNEVRHSLKASFPSLSGTPATFNENSSSVNECPTILQEFLVPSKQASFALSESASNLQESSVASIETLFSSTEASVDLKESPPLEYTPAPSEVPSLSDKESTNADNVYIPQVTKDFQNLQMKLNNLEVKLDEAKTLIVKLREANRTTILERDKLQKEMVFLKRAEAAARSQSIGFPLLFVIYVAVVGILLGYLLHL

SEQ ID NO: 45837 - protein, 215 aa, Zea Mays
MIWFVILLATRAAGVLHGWAMAAAAGGWSGVIPATVHVQVRRLQPLLPGARGRAAGRARHYRVLPGGVEVQVRQPPLHAMSAVRASRQAASQPASEGSRAPAEARWAYAPLLHRAGWLSRSRLRCAARARAVSWSSRRAHGRDLRSAAARAGRGQWRPTTLTGCRLGPLPGDAETVHGFFRAARWNSHGPTTSAWRLGAERRHGGRTARQRVLDR

SEQ ID NO: 45838 - protein, 139 aa, Zea Mays
MEAMGHSDLTVRISETGWPSRGDEDEVGATVANAAAYNGNLMKRIAMGQGTPLKPHVPVDVFVFALFNEDMKPGATSERNYGLFYPNGTPVYSLGFNGASFSPSPTYSSSSKLVITFQMAVVVLLASFSILHTAVPCHA

SEQ ID NO: 45839 - protein, 198 aa, Zea Mays
MKATLKGRYEGDKATAATTLAAPAGDLRLKASATEAAFTNGPSLRGLTLTLEKPGAFLVDLKPHNQDVRFQFMNSALVLDKRVSLTYTHSTSLAAAPAAAPPSRTALDCTVTFDPANKVSLSHSLGSGGCRLKYTYAHGVDRLTTIEPLFDTNKNAWEFAITRKFAGGDAVKGTYQASTKLLGLEWSRDSLAGGSFKT

SEQ ID NO: 45840 - protein, 212 aa, Zea Mays
MERFDSKFHEKYTVLKKRKLLDEGLERKREAELKELYDAMKDWVSELKKDNAELNDKLMEKQDELEKARQEFLEDILTRDTEILRLKQLLDEKAEKNNSTASGFHCLTPEAILENSTSMSPKRKTPLSHGKEKRVQLSENAPHSSPAKESQELVCSRRRTCIRGNGTNEIRSAHMLRLLLQSLVRMKVSVNDESEIFSVSVSHEASASPSLG

SEQ ID NO: 45841 - protein, 81 aa, Zea Mays
MLCRFPACRFLHNVTLSYFCTVGTWKALSASLIPELPGSPAARVSSPPMCRYFLLRCLVYFDIFLVMDRELLACCIMNCVL

SEQ ID NO: 45842 - protein, 244 aa, Zea Mays
MDSKKKRNKKKKGNQGKNAADVTSIAGEAASQNHNHELAPIDHHKGSDADDVMSSVGEELPQYKNHQPNIQADYNGTSAYDTTSSIGECIACYQNNEPMMTQENHKASNAVPADQRSVGLSESSVELDMHRLHEAKLDKLHETIKQLENEKSLWLQKVITMEGELEKLHNEVGCHAQNEVLLEEKLNSLQSGYDVLIKKEEVVDNKVRCIDNINDTLTHQESLLKERLSGLEETNKSLLVQSGR

SEQ ID NO: 45843 - protein, 308 aa, Zea Mays
MATQALAPSLRLLLLLPLLAAAAAAAALSHPAHEFCAVGGDASGCGGGGDGTRILIKGGTVVNAHLAEEADVYIEDGVVVAVRPDIPVDVDNVRVIDATGKYVMPGGIDPHTHLEMEFMGTVTIDDFFSGHAAALAGGTTMHIDFVIPVDGNLTAGLESYKHKAAKAAMDYGFHMAITKWNDEVAREMEVMVKEHGINSFKFFMAYKGSLMVTDDLLLQGLRKCKSLGALAMVHAENGDAVAEGQQRMIDLGITGPEGHALSRPPILEGEATARAIRLAKFINTPLYVVHVMSIDAMDEIAKAKREGT

SEQ ID NO: 45844 - protein, 264 aa, Zea Mays
MAVASRLAVTRVSPADGARPAAAAGRRSGLAVVRLPPTDSRGRRRRRGGAVAASPPTEEVVQMTEPLTKEDLVAYLVSGCKPKENWRIGTEHEKFGFEVDTLRPIKYDQIRDILNGLAERFDWEKIMEGNIVIGLKQGKQSISLEPGGQFELSGAPLETLHQTCAEVNSHLYQVKAVGEEMGIGFLGLGFQPKWALSDIPIMPKGRYKIMRNYMPKVGTLGLDMMFRTCTVQVNLDFSSEQDMIRKFRAGLALQPKENQMDFSA

SEQ ID NO: 45845 - protein, 477 aa, Zea Mays
MLAARFLRMTEAVAKGNLVAKLETFFDSCVLQGWKDSVAALQAAWRISGWNESRIVQPCIDSIVEKILLPPSKVTWSYTYTRPGYNSTRKPHQSVPKDWWTEDISDLDIEVFRSVISTVRASRLLPPPLIGEALHVYACKHLVDPLHVASDAGLTANGVLHQPPQSSDDGEEKLVAMQRRVLESIVTMVPGEPGSVTGRFLLRLLRVANYVSASSSTRAQLIRQAGSQLDEARAADLLIPLPSDPHAYDVGTAEAVLEHFLAQFQRPAPTDERRRMSAAMEKVARIFDEYLRTIALDRSFPVGKFVDLVECLPDIARSDHDGLYYAIDIYLKEHPELSKADKKRLCRLIDCRKLSPDVRAQAIANDRMPLRTIVQLLFVEQERTIGAAAGSHAASGGAADRASVGVISQLAAGTKDEEPASSAGHKSDVHRPRRDHARVADGASAMARSLSASTKTPPAARKERTPEETGSRMRNKQ

SEQ ID NO: 45846 - protein, 206 aa, Zea Mays
MLRRLPFRCYFVSASLKEKLYITDGYGLTDKSPNSWDIYDPATDSWCTHKNPLLTPDIVKFVALGEELVTIHRAAWHRMYFAGVYDPLERTWRGRGNEIALCYSSPTVVVDGTLYMLEQSMGTKLMVWREDAKEWAMLGRLSDKVTRPPCALVAIGRKIHVVGRGLSMVTVDVDTAARVDGFLVTTSVGPLVEEDLTPERCVVITI

SEQ ID NO: 45847 - protein, 227 aa, Zea Mays
MWTSDEDDELVKALCEISADPRYKVEGGAFKNCYSQGIENILSQKLPGRGIKASPHVDSRLKVMKRKYYSIKDMIASTGFSWDDTRKMIQCEKQRYDEYCRDHPRAKGLYGVPFVYFDTFDAIYGKDSSAGEGLEGSEAAIANMENENINEVGDDEVEEDRMSTGISGRSPAATLSSKSQKKDNYDGKRNRTESNCPSLDKFKDVHVQFQNAIQHASTMAAAMELFK

SEQ ID NO: 45848 - protein, 66 aa, Zea Mays
MPSPPPRSSKRPPPRPCSWPLVGVGLIAARAALLRPAHGRGAWPPLGLRGGGAPGPDRARVGAHQG

SEQ ID NO: 45849 - protein, 618 aa, Zea Mays
MGGLVPVRSGFSRLHAAAATLLGAAVGQWSVVGIDCRPSTASIAARSGATARLLYSSSSSSLLLLLLLLPAGGSDHQTGTTAMEAGTWAAAAVAAVALYVAWFWRMSRGLSGPRVWPLLGSLPGLVQHAEDMHEWIAANLRRAGGTYQTCIFAVPGVARRGGLVTVTCDPRNLEHVLKARFDNYPKGPFWHAVFRDLLGDGIFNSDGDTWVAQRKTAALEFTTRTLRTAMSRWVSRSIHARLLPILADAHVVDLQDLLLRLTFDNICGLAFGKDPETLARGLPDNAFASAFDRATEATLNRFIFPECVWRCKKWLGLGMETTLARSVRHVDRYLSAVIKARKLELSAATRKDLLSATPHDDLLSRFMRKGTYSDESLQHVALNFILAGRDTSSVALSWFFWLVSTHPAVERNIVRELCAVLAGSRGVEDPALWLAAPLDFEELDRLVYLKAALSETLRLYPSVPEDSKHVVADDVLPDGTFVPAGSSVTYSIYSAGRMKTVWGEDCLQFRPERWLSDDGTRFQPHDSYRFVAFNAGPRICLGKDLAYLQMKNIAGSVLLRHRLTVAPGHRVEQKMSLTLFMKHGLRMEVRPRDLSVVIDELRGAGEYDAAARATAASA

SEQ ID NO: 45850 - protein, 195 aa, Zea Mays
MDHDGARWLPALPGHARHHRPHRHHHRPAHGRRHVHFGTRLPAVMSGSYTYIYPVVAIILSQRYALLIDPLERFVFTMRSLQGVLIIVGVFQAVVGFFGIWRVFIRFLSPLTAVPFVTLTGLGLFFSAFPGVTKCIEVGLPALVLLVIFAEYASHVFAKGSFVFSRCPVLVTVVIIWIYAEILTAAGAYNQLGIT

SEQ ID NO: 45851 - protein, 205 aa, Zea Mays
MMSHLPNILLASILHLAAWAGHVDVVRCLCKHKADVGAAAMDDTAALHFASQKGHVEVARELLASGASVKAKNRKGFTALHFAAQNSHLDLVKYLVKKGVDVTAKTKGGQTALHVAEDDEVRAFLKECEQSLKKGAELPSEKDDSAEKEGDSKSSGEVMKDEEDAEQGEKRKSELVGASSLSGAKKAKVSLGHLVCENDMDEEEE

SEQ ID NO: 45852 - protein, 214 aa, Zea Mays
MRKKIFLCTRLQGLVMRQQWSRLHLAAWAGHVDVVRCLCKHKADVGAAAMDDTAALHFASQKGHVEVARELLASGASVKAKNRKGFTALHFAAQNSHLDLVKYLVKKGVDVTAKTKGGQTALHVAEDDEVRAFLKECEQSLKKGAELPSEKDDSAEKEGDSKSSGEVMKDEEDAEQGEKRKSELVGASSLSGAKKAKVSLGHLVCENDMDEEEE

SEQ ID NO: 45853 - protein, 270 aa, Zea Mays
MGSPTRVRRTTGFTLLLVLLFLSPPVSAGQPKGVCVSPGGRFPAFSSEGKPPGRAPKGRRDLALCRIFRQKTCCDVMQTFPALVSVRNLALAGEGSQECIHLWELLECSICDPRVGIRPGPPVVCASFCDMVFKACSESYFSIDTKTQALSPCGLDDILCGKTHKWVSNGTELCRLAGFSVQISETSSGGVGHTFCYGGKASLDSISDSWTSSKDRPTLSGVASWDVQDFQRWAREMPIGERVSWAIGGMVLTAGLIFISVILQLSGMMS

SEQ ID NO: 45854 - protein, 316 aa, Zea Mays
MPASAIRVLAAALRPGMPPRSPRHLRPRPALHGRKGVIPGITSATAPTILALTPLSIEGRVPFQGLPLRQPPPFSPSSALRHPHPHPPPPSSSYAQVFGALLLPLPSPHIWIRGSLRLPRKGPTTRAPSSIRNKLKRPRLMSWSAVQIVGNFAPVGEQSPTSSSTTLAKAGGSKARVTEIFVVTVSGSKVPCLAFGTRKASFLLEVPLSVVASLFDEGHSGGHAVDIGIVIEEHLNPVVHACKDARMSFRLITLLIKSELQTSQSRLVGRIDSVRVRLAMVNKGKGISLPRHVVLHVVHPQRPLLRRMQVRKEIGL

SEQ ID NO: 45855 - protein, 632 aa, Zea Mays
MDEEVGAAGRQQVQWKSYCSTLSLLAFQSFGVVYGDLSTSPLYVYRNSLSGRLNGYLDETTIFGLFSLVFWTFTLVPLLKYVIIVLSADDNGEGGAFALYSLLCRHAKFSLLPNQQAADEELSTYYHPGTDRAVVSSPFKRFLEKHRKLRTCLLLFVLFGACMVIGDGVFTPTISVLSAISGLQDPATSGLGDGWIVFIACVMLVGLFALQHRGTHKVAFLFAPIIVLWLLSIGIIGLYNIIRWNPRIFVALSPHYIVKFFKKTGKDGWISLGGVLLAITGTEAMFADLGHFSAASIRLAFVSVIYPCLVLQYMGQAAFLSKNIPAVYNSFYLSIPSPLFWPVFVIATLAAILGSQAIISATFSIVKQCLALGCFPRVKVVHTSRWIRGQIYIPEINWILMVLCLAVTLGFRDITVIGNAYGLACITVMFVTTCLMSLVIIFVWQKNLLISLLFFVFFGALEGAYLSAAVMKVPQGGWAPIALSAVFMFIMYVWHYGTRRKYLFDLQNKVSMRWILNLGPSLGIVRVPGIGLIYTELVTGVPAIFSHFVTNLPAFHQVLVFVCVKSVPVPYVPMDERYLIGRIGPREYRMYRCIVRWRPRSRPRRGRGGATSRRRRAGWRSCTPPARRGPGW

SEQ ID NO: 45856 - protein, 501 aa, Zea Mays
MTHRNMLWTHQSVNPEWEQRHAQVQPGSSYYAGTASDSSNLGVQVAVGVPGNTANVGICDLRNHECPHVHNSYPHAGVTSRFVFPTTMYNPSMSAAAVNIYIPQTQSFGLGSVLPPSLHNQVPTGTIDESSSSVNFGDSAIGFMKRKNAVVAGSHHFLHGFAGSSSSVHVPQNPVHGPWNPSSQSNCLPSSAASNLPEYHNSNGWPYLEESSADASNSFSSVAACQELAPHGNYLYPACHISQSNTWVPQPAGYGVPQWGYSNAVVNPPGTADMSNGPLPHFCQNSMQAPQIQVSHQQFIGNNAVHGLNPSATGLPLHPRMLALPFNAEHTFGHPMHPPLINQVNNGALRILPYQLPQVIDVCVQNATVMDHSRIYEAGHVIDEHSDMRLDVDNMTYEELVALQEQIGDVNTGLTESYIQENLRSSFHVPGAASMSDQFSELSLENDACIICQEEYKAKELIGTLECGHKYHVNCIKQWLMMKNLCPICKTTALSSDRRNG

SEQ ID NO: 45857 - protein, 259 aa, Zea Mays
MLQTVSVLWLLARSWHLMPAGYGVPQWGYSNAVVNPPGTADMSNGPLPHFCQNSMQAPQIQVSHQQFIGNNAVHGLNPSATGLPLHPRMLALPFNAEHTFGHPMHPPLINQVNNGALRILPYQNATVMDHSRIYEAGHVIDEHSDMRLDVDNMTYEELVALQEQIGDVNTGLTESYIQENLRSSFHVPGAASMSDQFSELSLENDACIICQEEYKAKELIGTLECGHKYHVNCIKQWLMMKNLCPICKTTALSSDRRNG

SEQ ID NO: 45858 - protein, 135 aa, Zea Mays
MKNNPSFENTCSAAAGGSGSGSFNVRNLSKVILPPLGGPSGQSQSHGGSDKWVISPLDSRYRWWDTLMVVLVAYSAWVYPFEVAFMNASPKGGLEVADMVVDLFFAVDIVLTFFVAYIDPRTQLLVRDRKKITLR

SEQ ID NO: 45859 - protein, 404 aa, Zea Mays
MTSLRTNVELEGEAGEPSYRRLVLRLVSHVIRLYSSSLVTESEVFLNMLVKVTRQDLPLWHQILVLEILRGFCVEACTLRLLFQTFDLNPVNTNVVENIVRALALVVASIQVASDSSEETLAAVGGMFSSKAKGIEWSMDHDASNAAVLVASEAHTITLALEGLLGVVFTIATLTDEALDVGELESPKCESNSMECSGQLALLCMALVNSTWLTILDSLSFILTRSQGEAIILEILKGYQAFTQACGVLRAIEPLNSFLASLCKFTINNPNEGEKKSILQSPGSKRSETSMDQRDSIILTLKNVQALRTLFNVAHRLHNVLGPSWVLVLETLSALDRAIHSPHASTQEVSASVSKLSRDTSGQYSDFHILSSLNSQELNRYGIKLLLIILSLQIALTHNYVIWH

SEQ ID NO: 45860 - protein, 695 aa, Zea Mays
MVFMAALEADLRALSAEARRRHPAVKDAAEHAILKLRSLSAPSEIAQNEDILRMFLMACNVKSVKLSVIGLSCLQKLISHAAVASSALKDILATLKDHAEMTDEIVQLKTLQTMLILFQSHLHPESEESMSQALGICLYLLESNRSSDSVRNTAAATFRQAVALVFDNVIRAESLPSGKASSARLGSRVSAVADNVTHSFSHTLSLPSNSGDPTIMQNLSDVGKLGLRLLEDLTAIAAGGSAMWLRVYSLHRTFALDILENPVNTNVVENIVRALALVVASIQASDSSEETLAAVGGMFSSKAKGIEWSMDHDASNAAVLVASEAHTITLALEGLLGVVFTIATLTDEALDVGELESPKCESNSMECSGQLALLCMALVNSTWLTILDSLSFILTRSQGEAIILEILKGYQAFTQALRTLFNVAHRLHNVLGPSWVLVLETLSALDRAIHSPHASTQEVSASVSKLSRDTSGQYSDFHILSSLNSQLFESSALMNIAAVKSLLSALHQLSSQHISGSSQLSVQQIGSISFSVERMTTILANNLHRVEPIWDQIAAHHLELANCSNPQLCNMALNSLDQSICLVAGSEKFQGISAAPHQFPESHLVKESETVSFEYAVLSPLMILYSSNKNVDVQMGALKILLHVLERHGEKLSYSWPSILHMLRMVTDASEKDLISLGFQHDMISLWEFSPGIAP

SEQ ID NO: 45861 - protein, 1045 aa, Zea Mays
MTSLRTNVELEGEAGEPSYRRLVLRLVSHVIRLYSSSLVTESEVFLNMLVKVTRQDLPLWHQILVLEILRGFCVEACTLRLLFQTFDLNPVNTNVVENIVRALALVVASIQVASDSSEETLAAVGGMFSSKAKGIEWSMDHDASNAAVLVASEAHTITLALEGLLGVVFTIATLTDEALDVGELESPKCESNSMECSGQLALLCMALVNSTWLTILDSLSFILTRSQGEAIILEILKGYQAFTQACGVLRAIEPLNSFLASLCKFTINNPNEGEKKSILQSPGSKRSETSMDQRDSIILTLKNVQALRTLFNVAHRLHNVLGPSWVLVLETLSALDRAIHSPHASTQEVSASVSKLSRDTSGQYSDFHILSSLNSQLFESSALMNIAAVKSLLSALHQLSSQHISGSSQLSVQQIGSISFSVERMTTILANNLHRVEPIWDQIAAHHLELANCSNPQLCNMALNSLDQSICLVAGSEKFQGISAAPHQFPESHLVKESETVSFEYAVLSPLMILYSSNKNVDVQMGALKILLHVLERHGEKLSYSWPSILHMLRMVTDASEKDLISLGFQSIRVIMNEGLATIPVQCLDECILVTGAYGTQKTDINISLTSVGLLWTATDFIVKGLVSKPIEQASHMNDDVQSCEMTEEANSKQVPPKLVDYSILFFSVFSVLQKLGSDDRPEVRNSAVRTLFQTLSIHGQKLSKSMWEDCLWLYVFPMLEHVSHLASTSSRDEWQGKELGTRAGKAVHMLIHHSRNTAQKQWDETIVLVLGGIARLLRSFFSYLQQLRKFSSGWVLLLSFIKNSILNGSKEVAIAAINCLQTFVGANCPKGNLESSYVKSVLDIYELVLQTSSNFKNDSTDKVKQEVLRGLGDLYVQAQSLFTGDMYLRLMAIMHLMIKTTLNPTDYDSELGSIPAVQRGILEIIPMLRPTVVLSPMWTHLLLELLCYLNGHEGPLQKNNEQTPDHNSQALVDGAKHALVERSNLNGGGTKLDMVGSGWGILFVEKLVPIIANLFLEAPPNERFSVSPEVIQGLGRYLLFMIYI

SEQ ID NO: 45862 - protein, 1307 aa, Zea Mays
MDSAANWRSTQGTDPAAGGVDPNAAAPAGSDWRTQLQPEARHRIVNKIMETLKKHLPVSVPEGLTELHKIAVRFEEKIYTAATSQSDYLRKISLKMLSMESQTKTQQNPGNVQVIPNQNPPGPAPGLPPQVSNPAQSSAIPLISQQQTRQSNASTSVQGSLPSLGQNSSSVSQASTLHNMSVMPQNTMNNGLAQGTPQDMYAAQRQMAGRQQQQQQQQAHNQLIYQQQKYLNQKLQQNSLMPSHIQQQQPLLQSTQMQSSQQPMMQMSSGLQPGQTAIPQTQSMTMHSATQSGIQQNPLNSVQQSVQPLLHQPTQSVVRQQQHPQSMHQQSSLQQTQPTQQPNIPLQQQQPQLMNQQSNLQQNQLMNQQSGVVETQQQQRLPVQSNNLLNMQQTQQMMNQQSMSLHQPQQLANQGNMSSLHQQQHQQNQQQQQLLGTGPNARMHMLQQQKVIQQPQQQQHAQQTSMGLIQPQSQQNQLQQPQQHMMSQFQSQPNQMQQQLGMQQRLQTSAGMLLQQNNIDQKQYVQAQRGLQEAPSTSVDSTAQTGHPGIGDLQEELYQMIKSLKDQYFVELNELYNKVSIKIQQIDNQMPAQKSAEQYEKMKGFKGMLERTLHFLQVNKSNIHPGLREKIPIYERQILSILSSQRRKPVQAPGQQTFQQSSGQAPSSNISQQLQTSQGLQQHDSHTSQMPQASLPSMNTGVQTSGAPAPQGTNFGVPTTQQNVTNAPQAGSNLENAQGNNFNHVQHGSMGAALQQERTGPMQGALNAQQQSSSNMISNNAMSTMQTNNNANANSLQQLKQQRQEHQMMQSQQMKQRQQMMQQIQQKQTLQPQLPIQQLKKQQQQGQMQFPQLHSGNDVNELKVRQGAAIKSGMYQQLSQRNYYQQIKQGGVFPISSPQTLQTSSPQISHHSPQVDQHSLLQSQVKTGTPLHSANSPFVPSPSPPVAPSPMPMDSDKPLSNLSSVTSAGQAGHQQTSLAPQTQSIAVNTPGISASPLLAEFTSADGSPANVPTQVPAKSSAAERPLDRLLKALRTTQRESLSAAVSDIGSVVSMIDRIAGSAPGNGSRAAVGEDLVAMTKCRLQARNFITHDGSGASKKMKRDTSAMPLNVSSAGSVNDSLKQSYGVGTPELQSTATSRVKWQRAEVNHALMEEIQEINQQLIDTELHVSEDDAESFTTSEGGKGTVIRCTFTAVAVCPSLKSVFASAQMSPILPLRLLVPASYPKCSPVLLDKFPDEQWNSDDLSTKAKTKFSVLLRGLAEPMSLREIARTWDACARKVITEYAQQTGGGSFSSSYGCWESCVGAC

SEQ ID NO: 45863 - protein, 507 aa, Zea Mays
MALWNGIGQVASIAQLAGVDAYGLISMIVEAAKTVKRNRETCQLLARRARMIGDLLHQLERTQLMQHMETRNPVEHLEETLRHAYVLITSCRNSSYLYNCCMGGKQADRLREVQNEITFYLQLFPLVSFVDNTRTWERLLSRACPLCTTENMDELHAAAHHVEHEDGSEAIKATKFENLGSHPTLKPDIDQMEGQVMRMGGLVNLIGGTKGAELSCFTFSHILAATDNFSEKNLVGKGGFGYVYKGNLINGLNVAIKRFDACSSYQGPHEFRTEIDAIPNLRHKNIIGLLGYCVQGEESILVYEYMSNKCLASVIAGKFLGLLNWSKRLQIIKGIADGLAFLHGHSQMCIVHRDIKPSNILLDHEMNAKITDFGLALMLAPKSTAEVPVLGTYGYADPEYIVTGKISEKADIYGFGIVLFEIISGRSIHSYMKAEGTRELPYPAYAHKYNPKTLHKLVDPLLRVDEHERAQIMECVRVAQLCVDHRAKHRPVMSEVVTMLGMAASKG

SEQ ID NO: 45864 - protein, 465 aa, Zea Mays
MAASPTSSLAPPVVPMELHAGNRDRLVAALRGHISASARPLHGLVLLQGGEEKTRYCTDHLELFRQESYFAYLFGVQEPGFYGAIDIASGQSILFAPRLPADYAVWMGEIKPLSYFRDTYKVDMVFYVDEIARVVQDHFGNHGKPLLFLLHGRNTDSGNFSKPASFEVMRRARPGMKEYQLESIFLHHVYMYGGCRHCSYTCICATGDNSAVLHYGHAAAPNDRTLNDGDMALMDMGAEYHFYGSDITCSYPINGKFNRSQTIIYNAVLKAHNAVISDMRPGVNWMDMHKLAERAILESLRKEQIVQGDVDDMMAQRLGAVFMPHGLGHLLGIDTHDPGGYPEGLERPKDPGLNSLRTTRELKEGMVITVEPGCYFIDALLTKTRDDPISSKFFNWQEVEKYKSFGGVRIESDVYVTAQGCRNLTNCPRETWEIEAVMAGAPWPLPASSSMVVAAENSNDISKAS

SEQ ID NO: 45865 - protein, 135 aa, Zea Mays
MRNLLTDSFELGKRGQSSGNVDIELGLQGDLTSSAQPGFEGFYEQVKEVESLLNTLTKLLKDLQNSNEESKVVTKASAMKEVKKRMEKDVNEVTKIARLAKSKVEQLNKDNAVNRGKPGFGKGSGVDRSRTTTTV

SEQ ID NO: 45866 - protein, 361 aa, Zea Mays
MGFGMVSLIDGFFRRALTSAGLRPGSAAVDADTTIHFWAHPSLLQAQAQPSSAAPRPVVVLIHGFGPDPTWQWAAQAGPLSRHFDLLVPALLFFGASATRAPARSDAFQAAALAALLAGGGHVPGLGGRTVHLVGANYGGLVAYHLARELEQRGVRVGKVALCDADACWGAEDDRALAGRSGAADVVDLLAPGDTAAKHFADNREEKVALVKGITAKEGFELTPLPQEVFIIWGEFDQIYPVEKAHKMGGKLGEKATVKVIPGCRARDTCRSNRTSSSSTASPRLPAAACCCFHLQWQRCRQVARVLFLVLHLYCIPRGTSLLLCYCVYKILCSWVLFRLFVFYPAGLEIETVHIVVFSKM

SEQ ID NO: 45867 - protein, 135 aa, Zea Mays
MSWSAPDDILLSTSLAGFLDKKLIVLLRDGRKLLGTLCSFDQFANVVLQGACERVIVGEQYCDVPLGLYVIRGENVVLIGELDHEKDELPAHMTCVLEAEIRKIVHEQPCVFPKIILTVALKSLLSCSFTGCFTG

SEQ ID NO: 45868 - protein, 506 aa, Zea Mays
MMSAMFNSYSCLLFLFFLFLANTLCYILDLTVSLSILSRFWKRQLVVAKDARRVDSLCSRIYLSHRLLDGTTRFKELHQIVEDAKAKLESEVGPLDGTSSKMARGIVGRLPVAADVQQLCSLAIEKADEWLSSNIQSETKQNDTLPSACRFKFEDITASSLVLVLKEAVSSQYHAIKGYKLWYWNSREAPYTGEPAVFPKDQRRILISNLQPCTEYSFRIISFTEDGELGHSESKIFTKSVEIIHKNTEHGAEGCSSSAKRAGKRQNARSSGFQVRQLGNVFRRAQTENGYPSTLCKYEIEDSCDQSESVIPDKDQFRCGASRKLDLNETSVPDLNAEVVMPTECCQNENGCTSGKNAFTKSNGCGDSETCAEGHVGDAPAMESRSQSRKQASDLEQETCLDDSNLVARAARLFAPRLGQLDDNYEYCVKIIRWLECSGLIEKDFRMKFLTWFSLRSTEQERRVVITFIRTLIDEPSSLAAQLLDSFEEIVTSKRPRTGFCTKLWH

SEQ ID NO: 45869 - protein, 436 aa, Zea Mays
MVGGGGGGPLRRVGKYEVGRTIEEGTFAKVKFAQNTETGESVAMKIKREISIMKLVRHPNVVRLHEVLASRKKIFIILEFITGGELFDKIIRHGRLSEADARRYFQQLIDGVDFCHKKGVYHRDLKPENLLLDSQGNLKISDFGLSAWPAQGSFLLRTTCGTPNYVAPEVLSHKGYNGALADTWSCGVILYVLLAGYLPFDEVDLTTLYGKIESAEYSFPAWFSGGAKSLIRRILDPNPETRIRIEEIRSDEWFQKNYEPIKEIENEEVNLDDVNAAFDDPEDDNEDAFEDETGPLTLNAFDLIILSQGLNLAALFDRRQDCDKLQNRFLSRNPAKVILSSMEVVAQSMGFKTHIRNYKMRVEGLNADKTSHLSVMVEVFEVAPSIFMVELQRAAGDTSEYNTFVNNYCSKLDDIIWKFPTEKGKSRIPRLSKSHS

SEQ ID NO: 45870 - protein, 337 aa, Zea Mays
MLEVKGEGILSWCADDNFILEDDLAPDFEVPFLSMDLNALANHLSKIRLSRRLFIEDDLFPEAMADASEDNEIAIELDTSVEIDAKGSSVGHNLNFEPRKDTSHHESASNICADDQIKTERQPQCFARENTASTKVSTHSVNSDSEDKSYKQVMDTDPGTSHSKGLMFEVGAAEEELDMLLDSFGGTHLSSSNLDEPFEPVSTLQEISRSNEKVGPSLSSGPPLLAPLDDALDDLLSETSHTAAQNEGFATQCITSQPTADSGQNTDFRYTKKIDVTPSIHDSVDDLLEDTSPCLNEPKQTTTAQASNSTPLDSVPIRSGPSNASASEDFDSWFDSL

SEQ ID NO: 45871 - protein, 234 aa, Zea Mays
MTRHVSSRCFKCYSMLNNRQKVEWNNRGFSTLHALVAAAVSFYLVMISDLFNEDAHNSIIIDRKSWLSDCMFGVSIGYFLTDLTMIMLYFPSLGGNEYLLHHGLSMYAIGLALLSGKAHMYILMVLFTEITTPFVNLRWYLDVAGQKTCNLYLYNGVALFVGWLIARIILFIYMFTHMYFHLDQARSIFSLGFYSLVAVPSVVAVMNVFWFWKILKGMVKTLSRRKHSENGRTD

SEQ ID NO: 45872 - protein, 176 aa, Zea Mays
MTRHVSSRCFKCYSMLNNRQKVEWNNRGFSTLHALVAAAVSFYLVMISDLFNEDAHNSIIIDRKSWLSDCMFGVSIGYFLTDLTMIMLYFPSLGGNEYLLHHGLSMYAIGLALLSGKAHMYILMVLFTEITTPFVNLRWYLDVAGQKTCNLYLYNGVALFVGWLVQQLLSRVINFF

SEQ ID NO: 45873 - protein, 260 aa, Zea Mays
MLINMPNICWRSFTLCNTYSPSNQLQGGCTQRMDLWITSCSQAARHHARIGSVDFPVKKNVKSSQVQNATCFVGLVRQLQCRRSAKSHILNVKSDTVAHQKVSGVSWSLENMPRRIGCVVSGLGFAAYGLASAEGPVNNNIDSTESAMSSTNLSHGKEVHTDYSVTGIPGDGRCLFRSVVHGAYIRSRKPIPNEDHQRRLADELRTKVADEFIKRRAETEWFVEGDFDTYVSQIRKPHVWGGEPELLMASHVLHYFVDED

SEQ ID NO: 45874 - protein, 256 aa, Zea Mays
MGNCVASGGATTVTAAGEDGRRRGRRWKAPREEQLGSVPGRIFSNDGRSRTAAVFTQQGRKGVNQDGHGPHGHLVARRVRDALPLKLMAAVRESKPGLDMAAAAWRKAFARAYKAMDKDLRSHATLDCFCSGSTAVTVLKLGSDLYMANIGDSRAVLGSRDGGGMVAVQLTVDLKPDVPSEAERIKKCRGRVFALQDEPEVPRVWLPFDDAPGLAMARAFGDFCLKDYGVISVPEFFHWSLTEKDQFVILASDGQS

SEQ ID NO: 45875 - protein, 87 aa, Zea Mays
MSDGRRVHPHPLLADPPPRLPARAPRTPFTSPHTARSFARPPGAGRPPGSPVPAAGGFPPPPVARSSICVVVVCCWASPPMALQHGH

SEQ ID NO: 45876 - protein, 115 aa, Zea Mays
MFLTQGQVPLRGCLTTTSTSTRYRPISPSNQSSPNAKYLVRQGHISIIYESWFCLSYTFVMKMCVAFKKALHGPDKSRIDFMREIGATNFYQNFYIFMNDFIVANEYCNRLSILQ

SEQ ID NO: 45877 - protein, 262 aa, Zea Mays
MVVTVLFQSGVLGRVSLLSPWHCFQRSEAHGICIAVAATPTTGQRRHLHLPPRLPPVSASLDPAASHPSKGAMSPSGELLASISSVFTVAFVLLACVELGDAAAAAVGVYRLIQYDLAGAPLGSRAAVLNHHAAALPLPAGADLSRSALVAPLLDLPLSFLREYLVEKKHLGGLLILLPTNNDSVDDKGQFKGVLTELEKLLLHEQVPYPVYFALHDDNLDNLLADIHRIASTGQPASATTGGDGYLDLKERVIANSFRLLP

SEQ ID NO: 45878 - protein, 302 aa, Zea Mays
MASAEIPNSSPDATNPAAAAATATATATGPDISSSPPLPPRKRRLSPSSSPTRSASRSRSPRSRSPRGRRSRSRSRSRSRSRSRSPQYPPDGKRQRHNDLTVEACRDFLRDRCTRSDLECRYAHPHNSASVDRQLLRSIGMEDPNVKTICRDFTRGKCSRSANECRFLHHSSVEDAAIVCQDFLRGQCNRIACRYSHVVAHPVPPMSHVPMPYPEMLYMPPPPPPPLGVPMMGPPPSPFADNKNRVEVCRDFLKNMCNRESCRFLHPGTHTAAASANVEVCRDFKRGECNRPACRFLHPYTS

SEQ ID NO: 45879 - protein, 160 aa, Zea Mays
MPWTPTSKFPHPFSRVKQPAGYRLSYQIVDSMIWLGIRDMINEFRKKKLKLRPVTYLSGSQGSGNDIPHGYIWSPHLVPKPKDWGPKIDVVGFCFLDLASNYVPPEPLVKWLQAGDKPIYVGFGSLPVQDPQKMTEIIVKALEITGQRGIINKGWGGLGT

SEQ ID NO: 45880 - protein, 310 aa, Zea Mays
MPWTPTSKFPHPFSRVKQPAGYRLSYQIVDSMIWLGIRDMINEFRKKKLKLRPVTYLSGSQGSGNDIPHGYIWSPHLVPKPKDWGPKIDVVGFCFLDLASNYVPPEPLVKWLQAGDKPIYVGFGSLPVQDPQKMTEIIVKALEITGQRGIINKGWGGLGTLAEPKDFVYLLDNCPHDWLFLQCKAVHHGGAGTTAAGLKAACPTTIVPFFGDQPFWGDRVHARGLGPPPIPVDQFGLQKLVDAIKFMTKPVVKDKAVEVAKAMESEDGVTGAVRAFLRHLPSKTEEPSPPQPSGFLEFFLGPLSKCLGCS

SEQ ID NO: 45881 - protein, 198 aa, Zea Mays
MESIAKEFGIKRYNWLVYMDKKNKEQEKRQKEIVKGDPSIKKMSRRERRKASQIEREKEREAARSVGRVSYRDPYREQRRSPSYEAYSRGRRSRSRSRSRSPSHSRRHGRGIHAESNYWSKQKAPRVEYITEFGGSDDTSEPKVSGISPPSSPIRIDIPNRSGNSTFNICKYTLGELFSDGAYYLNPGVLKMTMSGIG

SEQ ID NO: 45882 - protein, 345 aa, Zea Mays
MPASPSLSLFHPLLTPPQRHCSFGLVEERYIHPGLDWLVLVLLLNGRICSMDFHSKATNYLVTASDDESIRLYDTQDAVKKYGVGLVCFTDNPSIVLYSSNNGWDESLRLLSMNDNRFIRYYKGHLDRVVCIALCSGKENFLSCSLDRTILLWDHRAEKPQGLLRAQRRPTVSYDAQGMVFAVAYGGRIKMFDIRKFGMGPFATFSVGTDDSEAHVVQFSGDGRRILLTTKAGRVHVLDSFEGNSIASFRAKPILTNSTLEASFCPEGNHIVSGSGDGSVYAWNVESGKVACWESTDVKPPRVRWSPGSLMFVTGTSELSCWVPDLSKLESFTISHTNTRSSSSL

SEQ ID NO: 45883 - protein, 295 aa, Zea Mays
MDFHSKATNYLVTASDDESIRLYDTQDAVKKYGVGLVCFTDNPSIVLYSSNNGWDESLRLLSMNDNRFIRYYKGHLDRVVCIALCSGKENFLSCSLDRTILLWDHRAEKPQGLLRAQRRPTVSYDAQGMVFAVAYGGRIKMFDIRKFGMGPFATFSVGTDDSEAHVVQFSGDGRRILLTTKAGRVHVLDSFEGNSIASFRAKPILTNSTLEASFCPEGNHIVSGSGDGSVYAWNVESGKVACWESTDVKPPRVRWSPGSLMFVTGTSELSCWVPDLSKLESFTISHTNTRSSSSL

SEQ ID NO: 45884 - protein, 282 aa, Zea Mays
MDFHSKATNYLVTASDDESIRLYDTQDAVCLNTINSKKYGVGLVCFTDNPSIVLYSSNNGWDESLRLLSMNDNRFIRYYKGHLDRVVCIALCSGKENFLSCSLDRTILLWDHRAEKPQGLLRAQRRPTVSYDAQGMGPFATFSVGTDDSEAHVVQFSGDGRRILLTTKAGRVHVLDSFEGNSIASFRAKPILTNSTLEASFCPEGNHIVSGSGDGSVYAWNVESGKVACWESTDVKPPRVRWSPGSLMFVTGTSELSCWVPDLSKLESFTISHTNTRSSSSL

SEQ ID NO: 45885 - protein, 289 aa, Zea Mays
MMNQSVYTIPKMQFFRCLNTINSKKYGVGLVCFTDNPSIVLYSSNNGWDESLRLLSMNDNRFIRYYKGHLDRVVCIALCSGKENFLSCSLDRTILLWDHRAEKPQGLLRAQRRPTVSYDAQGMVFAVAYGGRIKMFDIRKFGMGPFATFSVGTDDSEAHVVQFSGDGRRILLTTKAGRVHVLDSFEGNSIASFRAKPILTNSTLEASFCPEGNHIVSGSGDGSVYAWNVESGKVACWESTDVKPPRVRWSPGSLMFVTGTSELSCWVPDLSKLESFTISHTNTRSSSSL

SEQ ID NO: 45886 - protein, 173 aa, Zea Mays
MAEGNGGSRAEAGVRESSEPSPKRSSIPAMPHEECVEGIRSALKHPTVRFLRERMESAGCLVWPRLIRAATCSSAGGYASQQGIQVCCNHMTCQDEITQVMIHELIHAYDDCVAKNLNWTNCAHHACSEECVKRRALMSVKNNPYCSEGAAKDAIDAVWDICYNDTRPFDRAP

SEQ ID NO: 45887 - protein, 161 aa, Zea Mays
MAASATAARPLAGTAVPLPLSTRTRPARVALLSLIPPAPAQRLALRRGAWLSPPERSRSVRCLAAMSPEMRATLDKVVGSSKVVLFMKGTKDFPQCGFSHTVVQILRSLDVPFETLDVLANEALRQGLKEYSSWPTFPQLYIDGEFFGGCDITVGFQSPLI

SEQ ID NO: 45888 - protein, 147 aa, Zea Mays
MNTERLRKLVELVGKQRLVLDLSCRKKDGRYTIVTDRWQKFSDVFVDEPTLEYLAAFADEFLVHGVDVEGKRLGIDEELVELLGHYSPIPVTYAGGVSTMDDLERIKKAGKSRVDVTIGSALDIFGGDLPYKDVVLWHRKQSMVGQV

SEQ ID NO: 45889 - protein, 968 aa, Zea Mays
MAEKLRDLSQPIDVTLLDATVAAFYGTGSKEERSAADQILRDLQNNPDMWLQVVHILQNSQNLNTKFFALQVLESVIKYRWNALPVEQRDGIKNYISDVIVQLSSNEVTFRQERLYVNKLNIILVQVLKHEWPARWSSFVPDLVAAAKSSETICENCMAILKLLSEEIFDFSRGEMTQQKIKELKSSLNSEFRLIHELCLYVLSATQRPQLIRATLATLHAFLSWIPIGFIFESPLLETLLKFFPMAAYQNLTLQCLTEVAALQFGDFYNVQYVKMYTFFMIQLQAILPPEKIPDAYANGSTEEQAFIQNLALFFTSFFKNHMRILETTQENSAALLMGLEYLIGISYVDDTEVFKVCLDYWNVFVLELFEAHNEMEPAAAVSMMGLQTRMVPGMVDGTVTAVHQRRQLYSASLSKLRMLMICRMAKPEEVLIVEDENGNIVRETMKDNDVLVQYKIMRETLIYLSHLDHEDTEQQMLKKLSKQLNGEDWSWNNLNTLCWAIGSISGSMVEEQENRFLVMVIRDLLNLCEITKGKDNKAVIASNIMYVVGQYPRFLRAHWKFLKTVVNKLFEFMHEMHPGVQDMACDTFLKIVQKCKRKFVTQQVGENEPFVSELLSNLATTIADLEPHQIHTFYESVGHMIQAESDNTKRDEYLKRLMSLPNQKWAEIIGQASQSIDILKNQDVIRSVLNILQTNTSVASSLGPHFFPQISLIFLDMLTVYRMYSELVSSTIAEGGPFASRTSFVKLLRSVKRETLKLIETFVDKAEDLPHLGKQFVPPMMDPVLGDYARNVPDARESEVLSLFATIINKYKGEMLEDVPRIFEAVFQCTLEMITKNFEDYPEHRLKFFSLLRAIGTHCFQALIQLSSQQLKLVIDSINWAFRHTERNIAETGLSLLLEILKNFEASGFQNQFYKTYFLTIEQEIFAVLTDTFHKPGFKLHVLVLQHLFYVYHINIRIMPRLFEITP

SEQ ID NO: 45890 - protein, 219 aa, Zea Mays
MEKILRVYDMNRPDAAPRELDKSPGSVRTAAWLHSDQTILSSCTDMGGVRLWDVRTGKIVQTLETKASVTSAEVSQDGRFITTADGSSVKFWDANHFGLVKSYDMPCNVESASLEPKSGSKFVAGGEDLWVHVFDFFTGEEIACNKGHHGPVHCVRFAPCGESYASGSEDGTIRIWQLSPANADDNEVANANGKTTAGVNEVTTKIEGFHIPKEGQTEG

SEQ ID NO: 45891 - protein, 231 aa, Zea Mays
MVQEASHIHCTVGDRDKSVDELHEVVPNVVGAISSAITDLINLGAKKLVVPGNFPIGCVPLYLAIFQSQKEDYYEEQTGCIKWLNDFAEYHNKMLQEELEKLRNLHPDVTIIYADYYGAALNIFRAPLQFGFTVPLNACCGSDAPYNCSPSILCGRPGSTVCPDPSKYISWDGLHFTEASYKVVIQGVLGGYAKPPLSETCKGAEFKVSQLHQCTDNPTNTVSYDALSSFI

SEQ ID NO: 45892 - protein, 137 aa, Zea Mays
MATVHPQSPAGPTHLPQEERHGDAPVPPAVSGEPAAAAEAGGEIAALDKQLAVVGGGEERRPAGAGAGAASAGGGGKLVAEAMRKYAAPRSSRFHGVTRLKWSGKYEAHLWDNTSQVEGRKRKGKHADPSFNVVHWA

SEQ ID NO: 45893 - protein, 345 aa, Zea Mays
MYDLPPEFHFGLLDWKPPGFGGGVWPDIRDGVPDYPGGLNLQHSIEYWLTLDLLASEQGAPTPCAVARVRHAADADVVFVPFFASLSFNRHSRVVPPARDSEDRALQRRLLEFLAARPEWRRTGGRDHVVLAHHPNGMLDARYRFWPCVFVLCDFGRYPPSVANLDKDVIAPYRHLVANFANDTAGYDDRPTLLYFQGAIYRKDGGFIRQELYYLLKDEKDVHFSFGSVAGNGIEQATQGMRSSKFCLNIADAVKKGFLMNLIKGISREEWTRMWNRLKEVEKHFEYQYPSQTDDAVQMIWKAIARKVPSIRLKINRLQRFSLFETNRTDETLPPSSSWLQNQAP

SEQ ID NO: 45894 - protein, 334 aa, Zea Mays
MEMRVVLLLCQVICMQAAVIGAVAAAAGARPPAMYVFGSSILDVGNNNYLRGPAVGRANSPYNGVDFPGSIPTGRFSNGYNIADYVAKSMGFACSPPPYLSLAQAPAPAPAQSSGPDLAQTALTIGINYASGGAGILDSTNAGNTIPLSEEVKYFGATKAKMVAAAGPSAVNPLISRSIFLIGMGNNDLYVFGASERARNRSDAEQRRDAAAALYASLVSNYSAAVTEVRRHQRVAARMRAGGARAQPDGRVLRRPQRRRRRLQRRPALPAHRPRREAAGPRLRPRRLLRLHAGRPGGPARVRVHRRRKHVLRRRAAAGRGGLVHAQLHALRRP

SEQ ID NO: 45895 - protein, 73 aa, Zea Mays
MRRLPCCGLGLGWCLFITGFFLAAIPWFIGAFVLICVRVHDQREKPGYVACTIAAVVAAVAILLGVTKGTHVW

SEQ ID NO: 45896 - protein, 643 aa, Zea Mays
MTARSDDPGVSPGTSAAAGGEIWGTWEELLLACAVRKHGTASWDSVAMEMLSRCPPAAADSLTPAGCRLRYRLLHRRFTAAAAVNGDEEPDAASADCCVEELRKLRVAELRREVERYDLSIGSLQSRVERLKEERARSISGEANPVPAVKEDGEEEPAEGRKESLEEEGDDAGGGEEDRVSGGESGRSCKESNSSDLKRPRPARDAGDGDAAARREDEGAGDAARESSAVKREQVSGESVVGSKDTVAAADTEKESSDVQSSASPSRRREREIGAGEDADVASAPPPPAPAAAVLPAAEAEALRAFLEVVRTSKPGSVFERRLESQDDAKYRCTIRRHVDLETVRSRLDGGSGSYASATEFYRDLLLLCANALVFYPRGSPERSAAARTRALVAKHMSKDQPGPSGKAVAGPAASKKAKAEADVGSLLEKTAPIIVCRKRSSIAKAAAAATAKEERSEKAESDKEGEKQQEAVGKRKAAAAAKDRAAWGPRTNKTRGGPAVRKASAQSHKGASAAADNGSDSDAPPEEAKKQPAADKKGGGGGGVAKKRNAVNFLNRMKQGGSAPSTERVSLLETLKLSAAAEQKKAGKGEGKEPAGGSGSKKATPGRRNVGRPPKRAAAPPSPPPSKRAKGGGGGGKRGGRK

SEQ ID NO: 45897 - protein, 622 aa, Zea Mays
MATPAPPTNCVNQASSSCRTESHAQRASDLSLLHPSLRSLSHTTTVELPRHHRRPVEVASLCPPFPSSSSPPSPSLPFPPSNSCFACFPAPSSKTRLLISVLWPSVRPAGPPASSKKACRSQVFSLYYLSGIASHRIDGATTYGTAHEIMSSEDSLKSLSLDYLNLLINGQAFSDVAFSVEGRLVHAHRCVLAARSLFFRKLFCGLDPNHPPPPPGARAAAAAAPELVIPVSSIRYEVLVLVLQFLYSGQASVAAPKSGPLPGCGARGCWHTRCGAAVDLALDTLAAARSFGVEQLALLVQLESMVKEASVDDVMKVLMASRKFEMQELWATCSHLVARSGLSADLLAKHLPIDVVAKIEEIRAKSPVPAGAPRSPFLTHHYLPINAASSAADRDHKIRRMRRALDAADIELVKLMVMGEGLDLDDALAVHYAVQHCGRDVVKALLELGAADVNSRAGPTGKTALHLAAEMVSPDMVSVLLDHHADPSARTLDGVTPLDVLRGLTSEFLFKGAVPGLTHIEPNKLRLCLELVQSAVMVTTRDVDAAGDDAGGSDGGGGGNFPRSDADDSLVSLTMNSTLMYQGQEMAAAAVAAGEARKGNGGGGGGGRGSPSNLYFPNGGFP

SEQ ID NO: 45898 - protein, 278 aa, Zea Mays
MAAAAGKARAVSLAAAVRVVAATARPASSAAAAAGVGAMALIVQGEDTAFGSLEWWAYAGISCFLVLFAGIMSGLTLGLMSLGLVELEILQRSGTDVEKAQAAAILPVVQRQHQLLVTLLLCNAVAMEALPIFLDRMFHPIVAVILSVTFVLAFGEVIPQAICTRYGLAVGANFVWLVRILMVICYPISYPIGKILDCALGHNESALFRRAQLKALVSIHSKEAGKGGELTHDETTIISGALDLTEKTAAEAMTPIESTFSLDVDSKLDWTITSSSPN

SEQ ID NO: 45899 - protein, 448 aa, Zea Mays
MACSTAARRHRRPLFTILVALSLLQVSAMIVPLDEQEGDRVGLLPGQPRSPAVSQFSGYVTVNERSGRALFYWFFEAQTSPAEKPLVLWLNGGPGCSSVGYGAASELGPLLVNSNGTGLEFNKFAWNKEANLLFLESPVGVGFSYTNTSSDLENLDDRFVANDTYTFLVNWFNRFPQYRSHDFYISGESYAGHYVPQLAEVVYEHNKHLEAKQRIHLKGFIAGNAETDDYYDYTGMVEFAWSHTVISDQLYERVKTACDFRLSPTSTECGHVMDLLYHTYDEIDIYNVYAPKCNTDDGSAPLPSSSSSADDSSASSKQQSKRRLRMYSGYDPCYSSYVETYFNRMDVQKSLHANTSGRIRDRRWSLCSDPVFDIYDMEVFSVLPIYSKLVKAGLKIWVYSGDVDGRVPVIGSRYWVEALGLPIKSQWQPWYLKDQNPCIGHWYRHDVK

SEQ ID NO: 45900 - protein, 480 aa, Zea Mays
MACSTAARRHRRPLFTILVALSLLQVSAMIVPLDEQEGDRVGLLPGQPRSPAVSQFSGYVTVNERSGRALFYWFFEAQTSPAEKPLVLWLNGGPGCSSVGYGAASELGPLLVNSNGTGLEFNKFAWNKEANLLFLESPVGVGFSYTNTSSDLENLDDRFVANDTYTFLVNWFNRFPQYRSHDFYISGESYAGHYVPQLAEVVYEHNKHLEAKQRIHLKGFIAGNAETDDYYDYTGMVEFAWSHTVISDQLYERVKTACDFRLSPTSTECGHVMDLLYHTYDEIDIYNVYAPKCNTDDGSAPLPSSSSSADDSSASSKQQSKRRLRMYSGYDPCYSSYVETYFNRMDVQKSLHANTSGRIRDRRWSLCSGDVDGRVPVIGSRYWVEALGLPIKSQWQPWYLKDQVAGRYVEYEGLTMATVRGAGHAVPQDKPAEALVLIKAFLSGTQLPAKSGKCSIMFQKGSASVFPEKHTCFDKLRVDW

SEQ ID NO: 45901 - protein, 545 aa, Zea Mays
MAEYGERYQGNGDPATPEGGYAQTEYAAAGGSPPADRKPSVFSDHADGRSSQPQHETQSHGSGSSKSRERDRERDKGKDRERGRDRVREKERDRDRDKDRERGDRDRDRDRHHMDRRERSEIREHRDRSDDRDRHRDDRDRRRSHDSERRRDRDRDGHRRHRSRSPSMSRDRDRRSRSRSRSRSKSKRVSGFDQAPTQQALPIVAAGVIPGQLPGVTAPIPGVGVLPNLYNLAAGQFNPLAIQPQAMTQQATRHARRVYVGGLPPTANEQTVAIFFNGVMAAIGGNTAGPGDAVLNVYINHDKKFAFVEMRSVEEASNAMVLDGIMFEGAPVKIRRPTDYNPSLAAALGPSQPNPNLNLSAVGLTPGSAGGLEGPDRIFVGGLQYYFTEAQVRELLESFGPLRGFDLVKDRETGNSKGYAFCVYQDLNVTDIACAALNGIKMGDKTLTVRRANQGASQPRPEQESILLQAQQQVQMQKFVYQVGGALPTKVVCLTQVVTEDELRDDEEYDDIVEDMREEGHKYVPHNAIADCFVVRPYAIVAIGP

SEQ ID NO: 45902 - protein, 154 aa, Zea Mays
MPLHHPKHRHHDEDLLPYRRSDDEAKPRRPYTPTFPSSPASTNRLLLFFAVACLVLAAASFAFAVSTSRNRQSLPQPPPTVAFRCGRAEDSLRSFLAASSHGNFSAGDREKVLAVVGVHTEHGNFSAARRAALRATWFPLNPEGIFRTWNWIII

SEQ ID NO: 45903 - protein, 252 aa, Zea Mays
MFAMTLWLGNSAYLYISVAFAQMLKAIMPVAVFLLGAAFGLEEMSYKMLSIMSVISVGVIVASVGEITISWVGVVYQMGGVVAEALRLIFIEIFLKKKGVKLNLISMMYYVSPCSAVCLFIPWLFLEKPKMDDSISWNFPPFTLFLNCLCTFVLNMSVFLVISRTSALTARVTGVVRDWSVVLLSAAIFADTQLTFINIIGYAIAIAGVVAYNNHKLKVKPQANPQQGDENKVISGSTQDVVLSVSSAKETS

SEQ ID NO: 45904 - protein, 392 aa, Zea Mays
MPPPSSSRYSPGRLLAARPASATTVGRWARLSCSLSMNGCAPGAGDRGAVCVRETRALPAAPAPHDAVGRLRAAVDALWSNAAPPAAPSGIIRIEVPITQRVDAVEWLHAQTTLPRCFFSARAPLPDAPALAGNGNGNGSVHRQQPVSVAGVGSAVFFRGTEPFSLADWRAIKRFLPRDCPLVRAYGAIRFDATSDASVEWEDYGSFYFVVPQVEFNELEESSVLATTIAWDDSLSWTWHNAVEELQSTLRKISPCSSVQANKASLQTAIVSLNHVPTKASWDLAVTKALHMIKGRQRELVKVVLARCSRYITDTCIDPVELLACLKAEGQNAYQFCIQPPGAPAFVGNSPEQLFHRKYLNISSEALAGTRARGKTRADDFQIVAKRTSNSL

SEQ ID NO: 45905 - protein, 219 aa, Zea Mays
MAIALLPSVRLLPQSLSRRPPPTSSPLSVRRPRPRALPLPRVHCRAGRTPDPLTAAREAAAFWAGKLAGAVPWKAAVSGVVALAVSFTCLVGLANARTGENRLRQEIEDLEKDTGYKLRVLAQNYPDTPGLAIKDFWQVDERTIVFVADPTFGNIINFNIGPLVDLDVPRSFWSQVSGKYGNMFYWKEKGEDASIEAAVTAISRCLRNPAGTNNCSEVL

SEQ ID NO: 45906 - protein, 630 aa, Zea Mays
MQTARASANAVWSPPSLPGPGAAANHSYNIDCGGAADFTSALGRRWLADRFFSAGGAAGMVAEPHRFPQPQERTLRFFPPSSAGKSSCYSLPLPPGRYYLRLFSVYDNYDSKLRTPSFDVSAAATLVLSFRSPWPEPAARYGAYSDLIFPSATEPASDLCFYSLSTDAPAVASIEVSPVHPLAYDGATTGADLVLVNYGRVTCGNSLFGPGFTRDADAFSRVWQADVDFRNNDLSYDAITAGGRKVFGSNQPPNYFPTKLYESAVTTGGDAANEIEYLMPVDTRLSYMVWLHFAEIDAGIGSPGQRVFDVVLAGENVTRIDIFKQVGGFTAFKWTYIVKNLTSSTLSVRLVPVVGRPILCGLENYAMVPLEMRTVPSQVAAMKALKESLKIPARMGWNGDPCAPRAWDAWEGVTCHRGDKGLVITQLDLASQGLKGYITDEISHLKDLVSLNLSYNSLTGSLPPGLGQPSLVSLDISSNEFTGSIPGTIGSSKLQTALLNNNQLDGQVPERLYSIGVHGGVIDLSGNKGLCGVPTLPACALFWEKGGLNKTGKIALGASFGFVLLVILIVVYILCIRRGPYDYDFDFPQDLTSISAISAKRNRYQRAKSVMLAEMEAHNPDGFYTNGSPH

SEQ ID NO: 45907 - protein, 621 aa, Zea Mays
MAGWGPSRLPTCGPWGRGVALERELSRDGSHYSISSGILPSLGARSNRRAKLRPFIVSPYDRRYRCWETFLIILVIYSAWVSPFEFGFIRKPAGALAAVDNVVNAFFAVDIILTFFVAYLDRMTYLLEDDPKRIAWRYTTSWFILDVASTIPSEFARKILPPNLRSYGFFNMLRLWRLRRVSSLFARLEKDRHFNYFWVRCAKLICVTLFAVHCSACFYYLLADRYPDPTDTWIGNSMPDFHQRGLWIRYVVSVYWSITTLTTVGYGDLHAENTREMIFNIFYMLFNLGLTAYLIGNMTNLVVHGTSRTRKYRDTIQAATSFALRNQLPSRLQDQMISHLSLKFRTDSEGLQQQETLDALPKAIRSGISQYLFFNLVQKVYLFEGVSNDLIFQLVSEMKAEYFPPREDVILQNEAPTDFYILVTGSAELIELRNGGEQMAGVAKAGDVVGEIGVLCYRPQLFTVRTKSLCQLLRMNRTAFLSLVQSNVADGTIIMNNLMQLLKQQKDNSVMVGVLKEIENMLARGRLDLPITLCFAVNKGDDLMLHQLLKRGLDPNESDNNGHTALHIAASKGDEQCVKLLLDYGADPNARVQNMKYDREWNRRAAREAACKLWMGQPCVG

SEQ ID NO: 45908 - protein, 668 aa, Zea Mays
MTYLLEDDPKRIAWRYTTSWFILDVASTIPSEFARKILPPNLRSYGFFNMLRLWRLRRVSSLFARLEKDRHFNYFWVRCAKLICVTLFAVHCSACFYYLLADRDTIQAATSFALRNQLPSRLQDQMISHLSLKFRTDSEGLQQQETLDALPKAIRSGISQYLFFNLVQKVYLFEGVSNDLIFQLVSEMKAEYFPPREDVILQNEAPTDFYILVTGSAMAGVAKAGDVVGEIGVLCYRPQLFTVRTKSLCQLLRMNRTAFLSLVQSNVADGTIIMNNLMQSFDIEKLLKQQKDNSVMVGVLKEIENMLARGRLDLPITLCFAVNKGDDLMLHQLLKRGLDPNESDNNGHTALHIAASKGDEQCVKLLLDYGADPNARDSEGKVPLWEALCEKHNAVIELLVESGAELSSGDTALYACIAVEENDAELLENVIRYGGNINNPTKDGTTPLHRAVCDGNVQMVELLLEHGADVDKQDSNGWSPRDLADQQGHDDIQALFKSRKAHRKHASNGRVAPMLIGRFNSEPSMPDMSHENARVRSEVVPQKLLRKRVSFQNSLFGVISSSHAHQDTGRLLSKGLAGTEGPNCRHDSLIRVTISCPEKGGNAAGKLVRLPRSMAELLELGAKKFGIKPGKVLTVGGAEIDEVELIRDGDHILLVSDEWVPDVEQIRP

SEQ ID NO: 45909 - protein, 784 aa, Zea Mays
MAGWGPSRLPTCGPWGRGVALERELSRDGSHYSISSGILPSLGARSNRRAKLRPFIVSPYDRRYRCWETFLIILVIYSAWVSPFEFGFIRKPAGALAAVDNVVNAFFAVDIILTFFVAYLDRMTYLLEDDPKRIAWRYTTSWFILDVASTIPSEFARKILPPNLRSYGFFNMLRLWRLRRVSSLFARLEKDRHFNYFWVRCAKLICVTLFAVHCSACFYYLLADRDTIQAATSFALRNQLPSRLQDQMISHLSLKFRTDSEGLQQQETLDALPKAIRSGISQYLFFNLVQKVYLFEGVSNDLIFQLVSEMKAEYFPPREDVILQNEAPTDFYILVTGSAMAGVAKAGDVVGEIGVLCYRPQLFTVRTKSLCQLLRMNRTAFLSLVQSNVADGTIIMNNLMQLLKQQKDNSVMVGVLKEIENMLARGRLDLPITLCFAVNKGDDLMLHQLLKRGLDPNESDNNGHTALHIAASKGDEQCVKLLLDYGADPNARDSEGKVPLWEALCEKHNAVIELLVESGAELSSGDTALYACIAVEENDAELLENVIRYGGNINNPTKDGTTPLHRAVCDGNVQMVELLLEHGADVDKQDSNGWSPRDLADQQGHDDIQALFKSRKAHRKHASNGRVAPMLIGRFNSEPSMPDMSHENARVRSEVVPQKLLRKRVSFQNSLFGVISSSHAHQDTGRLLSKGLAGTEGPNCRHDSLIRVTISCPEKGGNAAGKLVRLPRSMAELLELGAKKFGIKPGKVLTVGGAEIDEVELIRDGDHILLVSDEWVPDVEQIRP

SEQ ID NO: 45910 - protein, 853 aa, Zea Mays
MAGWGPSRLPTCGPWGRGVALERELSRDGSHYSISSGILPSLGARSNRRAKLRPFIVSPYDRRYRCWETFLIILVIYSAWVSPFEFGFIRKPAGALAAVDNVVNAFFAVDIILTFFVAYLDRMTYLLEDDPKRIAWRYTTSWFILDVASTIPSEFARKILPPNLRSYGFFNMLRLWRLRRVSSLFARLEKDRHFNYFWVRCAKLICVTLFAVHCSACFYYLLADRYPDPTDTWIGNSMPDFHQRGLWIRYVVSVYWSITTLTTVGYGDLHAENTREMIFNIFYMLFNLGLTAYLIGNMTNLVVHGTSRTRKYRDTIQAATSFALRNQLPSRLQDQMISHLSLKFRTDSEGLQQQETLDALPKAIRSGISQYLFFNLVQKVYLFEGVSNDLIFQLVSEMKAEYFPPREDVILQNEAPTDFYILVTGSAELIELRNGGEQMAGVAKAGDVVGEIGVLCYRPQLFTVRTKSLCQLLRMNRTAFLSLVQSNVADGTIIMNNLMQLLKQQKDNSVMVGVLKEIENMLARGRLDLPITLCFAHIAASKGDEQCVKLLLDYGADPNARDSEGKVPLWEALCEKHNAVIELLVESGAELSSGDTALYACIAVEENDAELLENVIRYGGNINNPTKDGTTPLHRAVCDGNVQMVELLLEHGADVDKQDSNGWSPRDLADQQGHDDIQALFKSRKAHRKHASNGRVAPMLIGRFNSEPSMPDMSHENARVRSEVVPQKLLRKRVSFQNSLFGVISSSHAHQDTGRLLSKGLAGTEGPNCRHDSLIRVTISCPEKGGNAAGKLVRLPRSMAELLELGAKKFGIKPGKVLTVGGAEIDEVELIRDGDHILLVSDEWVPDVEQIRP

SEQ ID NO: 45911 - protein, 380 aa, Zea Mays
MASPSSCNATGVPFTLLGALITAGPAAWPACVGGGRAFLRDYARRGTNALLWAGLLAVTWLLLLRVAALLRLWALGSRIPGPRALIADPGLASVLRNGGDISGFLSKLHGRYGPVVRLWVGPSQLLVSVVDPTLVKEVLSKAKDKLPLTGRTYNLACGRLALFVSSFQKVKRTRDSLKIFLNERLTVGTGQSSFKIIDAVLNRIDSIMSKDFMDTRSFSQHMAFNIISATLLGDAFFDWSDAAAYEELLMLVAKDGCFWASYTIPPFWRPSYRRYQTLCAKLKILTESVIRKSRYQNSSLHHFDQRSCQKSEGTDPHRSVLDNMMRSHCLHGAAKGPLNLEEETCGNIMGLMLHGISTSANLIGNILTRLVLFPELQDQI

SEQ ID NO: 45912 - protein, 834 aa, Zea Mays
MPTGGTDVKVYTVGPGYAHAEARKSPVVDGVVMRNPDGKEVRYPVLLTPTEKQMARDVCNAFRQMVCGFDLLRCDGRSYVCDVNGWSFVKNSYKYYDDAACILRKIFLDAKAPHLSSTIPPTLPWKSEPVQPTEGLTRQGSGIIGTFGQSEELRCVIVVIRHGDRTPKQKVKLKVTEEKLLNLMLKYNGGKPRVETKLKSAVQLQDLLDATRQLVPPTRSGRESDSDADDIEHIEKLRQVKAVLEEGGHFSGIYRKVQLKPLKWIKVPKRNGDGEEERPIEALMILKYGGVLTHAGRKQAEELGRFFRNNIYPGEGTGLLRLHSTYRHDLKIYSSDEGRVQMSAAAFAKGLLDLEGQLTPILVSLVSKDSSMLDGLEDASTEMDEAKARLHEIIISSEKAKNTEGPVEFPWMVDGAGLPANASQLLPKMAKLTKEVTSQVKLLAEGEDERLALTSTFSKYDQAKALGKTTIDVARIAAGLPCGSESFLLMFARWRKLERDLYNERKDRFDITQIPDVYDSCKYDLLHNAHLNLKGLEELFKVAQILADGVIPNEYGINPKQKLKIGSKIARRLLGKILIDLRNTREEAISVAEPKFIEDEALFLPTKEAEHQQKVHVRNEDGRRSSSTSEKSLDQEDEDDRETKYRLDPKYANVRTPERHVRTRLYFTSESHIHSLMNVLRYCNLDESLQGEESLVCQSALDRLHRTRELDYMSNIVLRMFENIEVPLEDEKRFRIEMTFSRGADLSPLEDKTSESSSLLQEHTLPIMGPERLQEVGSCLTMDKFEKMVRPFAMPPEDFPPAAPPQALGYFSKGAGVLERLASLWPFHKSANGK

SEQ ID NO: 45913 - protein, 102 aa, Zea Mays
MSTMKFCRECNNILYPKEDRDRRTLFFACRNCEHQVHHTAGERTQVLQDVASDPTLPRTKTVRCNLCGHGEAVFFQAAARGEEGMTLFFVCCSPDCGHRWRE

SEQ ID NO: 45914 - protein, 406 aa, Zea Mays
MQPSFALVCDKRTKCLLLFIRGAISTKERLTAATSAEVPFHHIILSEGKISNVVLGYAHCGMLAGARWIAKLVIPHLHNKMQEFSGYHIKVIGHSMGAGIGAILTYILHEHYEFLSCSCLAFAPPACMTWELAESGKDFITSLVNRNDVVPAFSKVSSESLRSEVMVSSKLDDVQDHFHHGLFATISQRVAFIRSHMLSISHSTGKIADYGSSISEPLLKDTIPPTANGHGVDCSQQQQVVASEETVVVLVNNNDHFTSLKAADSGVTSQEGSDSNAASSDSPQRPPPPADEAPNQNGTGKDKQKEPVSAGCSSSRQLFPPGRIIHMVALPPQQPDPNSDDGTSSGEVVGIYETPRGLYGKIRLAPNMIKEHYMPSYIRTMESLLEQLQKDDDDGSVCTCTAPSDL

SEQ ID NO: 45915 - protein, 339 aa, Zea Mays
MAAVKVDKATNELLLGPDWTLNIDICDAVNSDHGQGKEVIKALKKRIQHKNANVQFLALTLLETLIKNCGDHVHYQVVERNILEEMMKIVKKKRSGVEFPKRSPDAASMFISPVTQPESLPTYLQAGYGMPVDSSSRLDEAMSSNGAPLSISDLERMLGAVELLNEMLRAVNPNEKDAANDEIITELVTQCRSYQKKIMSSVSLVRDEDLLGQALDLNDRLQILLEKHDSIASCSPSSADVIDVVCEVPSGTAPNQGTNFPPQAALRTAIVPTNVLDDEDEENEDDEFSMLARSPQTPRAPLHQPSMMKQQALQPLFPIQHRHQLRTTHCLRTILQPRQ

SEQ ID NO: 45916 - protein, 434 aa, Zea Mays
MGKPKQQVLSRFFSPKPAPVLSSAAPDPPPPLPPNPKPSAAHPPVSTVASFSPAKRARALSLSPKSPAAKRPNPTPPPSRDAVRRRLLEPLHQEPPRLLDPTGGGKGYTPLEQQVVDLKARHPDVLLMVEVGYRFRFFGEDAAVAAAVLGIVAHPDRSFLTASVPNFRLGFHVRRLVAAGHKVGVVRQTETAAIKAAARGVGGAPFSRGLSAVYTRATIEAAAGELEGGGAAAPEEGSSYLVCIVDKEVEAAGREGLQVKVGLVAIEVSTGEVVHGEFLDSDSRSGLEALLLGLAPVEVILGTPLSFATEKIMMAYVGPTSNVRVERVSCEWFGKDAALAELITLFEKSVNNASRAEDDRKLIETNDDNNNFHGIEGIMAMPELVVQALALSVRYLKEFSLSANALQQLEEQLRWYNRRVSVPNYEQYMHIFWV

SEQ ID NO: 45917 - protein, 357 aa, Zea Mays
MRRHMAPIKEQKHTTSAEQQVMLDAELQLWNHTFGYVKSMALKAAIDLGIPEAIHQHGGTATLPQIVTRVKLHPSKTPCLRRLMRVLTLTGVFGAQEPHDDDGGCDDELVYTLTPASRLLVGSPGQNVGPFLTLMLGPIFVSSFLDLRGWFQHETPDPSPFKMTHGRDIWELAAHDAAFGRLFDAGMVADSSFIMDVVVRECGGVFEGISSLVDVAGGLGGATQTIAKAFPNLECSVLDLPNVVASAPADTAVKYVPGDMFESVPAADAVFLKWIMHDWGDADCVKILKNCKKAIPAQGGKDDGTGGHDVDPGHAEDGARAMKSMNAGLGLPCTAARTPPSLELMSGDHACVGVHVS

SEQ ID NO: 45918 - protein, 458 aa, Zea Mays
MAGKGKEVYVAAIDQGTTSTRFIVYDRHAKPVASHQLEFKQHYPEAGWVEHDPMEIIETVKVCMKEAVGKAKDGKHNVVAGLKAIGITNQRETTVMWSKSTGRPLYNAIVWMDARTSPVCRRLENELSGGRTHFVETCGLPISTYFSALKLLWLMENVDAVKDAVRTGDALFGTIDTWLIWNLTGGVAGGQHVTDCSNASRTMLMNLKTLDWDKPTLAVLGVPVEILPKIISNSEKIGVVAKEFPFAGVPISGCLGDQHAAMLGQLCQKGEAKSTYGTGAFILLNTGEEPTQSSHGLLSTIAYKLGPAAPTNYALEGSIAIAGAAVQWLRDSLGIIQSAAEIEKLAETVPDSGGVYFVPAFNGLFAPWWRDDARGICIGITRFTNKGHIARAVLESMCFQVNDVLSSMHKDAGEAGEVKSAEGEFLLRVDGGATVNNLLMQIQAMLSVSAFGSLEMDE

SEQ ID NO: 45919 - protein, 106 aa, Zea Mays
MKLLLARMVLDLIVLPKFLLRLLRFANFLGRCSRARKALELSQLLGVNISPTGTFAVVMSHCLYEVRRENYCFSFLMREVVHGHSTEGSVCLSSTTSMTSYFFMDL

SEQ ID NO: 45920 - protein, 145 aa, Zea Mays
MQRDLSRSLSPPRRRRRSPSPERYRGRRGRRDRSPSRSRSPYRPSYRRRSPFPSPRRRESCSPSPRRRNSPPPSRKRYRRKSSPSVISSPVTASQSSHLGLEENKNAIDTQRLQEEKKRWEVSALLCSLHYFFLQSQMFTVAPFA

SEQ ID NO: 45921 - protein, 548 aa, Zea Mays
MVGAHLAAPTPRCPSLFPVSDSTHLPFPLAAGDPEPGAAHMAGRDERWGARGGPGDTHASTSRAPAGTAGESEGASPDSLRNTPSNIARLEDAIGHCAARRKYLAHTKSPSDGKDVRWYFCNLPLADKVLSSSVPRTEIVGKGDYFRFSERDSLALEASFLEREEVLLAYWWREYAECSAGPRGSLVESDDSAYLYKVEEERVGVPVKGGLYEVDLMRRHCFPVYWNGENRRVLRGHWFARKGGVDWIPLREDVSEQLELAYNCQVWHRRKFQPSGLFAARVDLQGSTLDLHALFTGEDDTWEAWLVFDTGPKLGSNTIKLRRGFSPSESASTKPSQDELRQTKEEEMDDYCSQVPVGHLVFMVHGIGQRLEKANLVDDVVDFRRVTANLAERYLTSYQRSTQRVLFIPCQWRKGLKLSGESTVEKLTLDGVKGLRVALGATVHDVLYYMSPIYCQHIIDSVSNQLNKLYMKFLKRNPGYSGKVSLYGHSLGSVLSYDILCHQESLLAPFPTEYLNMETSDRSQGAKSANEVALHDSALSHHVCSRIH

SEQ ID NO: 45922 - protein, 663 aa, Zea Mays
MSLQVANINAKEETPVGHGEVICFSIYSANSDVQAADFGNGKTCIWVDVLDGGRGVLMEFAPFFEDSSIKKVWHNYSFDSHVIENYGIKIAGFHADTMHLARLWDSSRKIDGGYSLEGLTNDRRVMDTVPEDLPKPGKTSMKTIFGRKNIRKDGSEGKVVSVEPVKKLQREDRELWICYSSLDSMSTLRLYDSLKSKLTTRRWILDGCPRGTMYDFYEQYWRPFGALLVKMETEGMLVDRGYLSEIEKAAIAERKLAADKFRKWASKYCPDAKYMNVNSDIQIRQLLFGGIENRHKSGETWPHSKTFKVLNEESVATEGKKTSKYRTIKLCSIVEDLKIDMFTPSGWPTVSGDALRSLAGKIPTEYIYTIDDIQDDDEYTSGSENPDGNSSYGTAYEAFGGGKNGKEACHAIAALCEICSIDSLISNFILPLQGDHISCAEGRIHCSLNINTETGRLSARTPNLQNQPALEKDRYRIRQAFVAAPGNSLIVADYGQLELRILAHLTNCKSMLHAFKAGGDFHSRTAMNMYQHIRDAVQEKKVLLEWHPQPGQEKPPVPLLKVSVKEARDTLKLWYRDRKEVLAWQKSQKKLASEKGEVYTLLGRSRHFPYLTQYGPGQRGHIERAAINAPVQQMLLCVPCLRSKGMSALRSLVGGSYCRCMMK

SEQ ID NO: 45923 - protein, 454 aa, Zea Mays
MTPPVSSKPQSSSGNFFQMNSTVIKIIRADVLPRFAEFLSRHGLPQLQMEAAWVLTNIAASDYTLLVAECGAVPRLVELLGSLNANIRHQAIWCLGNIAADLPSCRGILFDHGALTPLLSQFREGMKIPVLRTAMWALSNLCFGKLPAEVQVKPILEIISQLIHSADEKILADACWTVYYICGDKGDAVQDVLDAGVCPQLVNLLMHASANVLLPVIMALARISAGDDKQVEVLIENDILNCLGQLVARNYPKNIKKQACLIVSNIAAGSKDQIQAVIDADIITSLIVLLRTSEPDVKKEAAWAISTAASGGSSDQIQYLVSRGCLEPLCSVLTHNDPDLVYTCLEGLENILHAGEAGKKGEESGTNPYAEFILECGGLEKLEDLQDVDSDRIYELAMKLLQSYWEEEVSESDDPNIPGSNDSSDTVEATSEDAAAAVQPPPVPPPPSAADEAE

SEQ ID NO: 45924 - protein, 228 aa, Zea Mays
MEMLLVVLIENDILNCLGQLVARNYPKNIKKQACLIVSNIAAGSKDQIQAVIDADIITSLIVLLRTSEPDVKKEAAWAISTAASGGSSDQIQYLVSRGCLEPLCSVLTHNDPDLVYTCLEGLENILHAGEAGKKGEESGTNPYAEFILECGGLEKLEDLQDVDSDRIYELAMKLLQSYWEEEVSESDDPNIPGSNDSSDTVEATSEDAAAAVQPPPVPPPPSAADEAE

SEQ ID NO: 45925 - protein, 349 aa, Zea Mays
MPRAPRRQSDEARRGAYKPRVDFSRSRRRREDGLLALRRLNRDTGLFKRRRDEPAPAVPASDLTPTRAEAAPFAGITRPAFTPSSPPDVAAPRDAAESELEGLSELVDKLCSDDTTSQLEATIQFRKLLSDEKNSTVIKIIRADVLPRFAEFLSRHGLPQLQMEAAWVLTNIAASDYTLLVAECGAVPRLVELLGSLNANIRHQAIWCLGNIAADLPSCRGILFDHGALTPLLSQFREGMKIPVLRTAMWALSNLCFGKLPAEVQVKPILEIISQLIHSADEKILADACWTVYYICGDKGDAVQDVLDAGVCPQLVNLLMHASANVLLPVIMALARISAGDDKQVEVAL

SEQ ID NO: 45926 - protein, 80 aa, Zea Mays
MAVVGVLALQGSYNEHMAVPCTSRVRRRWKACLGNLCWAHLSCKQSSSVAFRAKNRGAGTCWRIRLYSPPKLFWESASKL

SEQ ID NO: 45927 - protein, 259 aa, Zea Mays
MAVVGVLALQGSYNEHMAALRRIGVKGVEVRKPEQLLGIDSLIIPGGESTTMAKLANYHNLFPALREFVGGGKPVWGTCAGLIFLANKAVVLLSGQKTGGQELVGGLDCTVHRNFFGSQLQSFETELSVPKLSEKEGGNDTCRGVFIRAPAILEVGPDVEILADCPVPVDRPSITISFGEGTEEEEYSKDRVIVAVRQGNILATAFHPELTSDSRWHRFFLDMDKESPAKAFSALSLSSSSRDTEGLPKNKPFDLPIFE

SEQ ID NO: 45928 - protein, 160 aa, Zea Mays
MSWRFPLFGIEELQRLLKDREAYNAFFNSLDQVKTQNNVRDELKKETLQLARENLEKEQRILELRNQCTIIRTTELAAAQDRLTDLERQKDDIMRSYSPAALLNKLQTSMAKLDEESEELHQKFLEKDIDLPTFVQKYKKLRTAYHKQALLHLAGQTSLR

SEQ ID NO: 45929 - protein, 208 aa, Zea Mays
MSWRFPLFGSSQQQQADPSFQDIPTQSWYPPSVVGSSSRPSTPTSSSASLHQRASDSPQSSSRGQPSPAEAAGIIARLKDKSIEELQRLLKDREAYNAFFNSLDQVKTQNNVRDELKKETLQLARENLEKEQRILELRNQCTIIRTTELAAAQDRLTDLERQKDDIMRSYSPAALLNKLQSIMIMLAFRTFSIPVQNNNNKNINGKVG

SEQ ID NO: 45930 - protein, 426 aa, Zea Mays
MEDAVAAENGIEGEGYVVVKAAAAAEAEGDSGASDRGDLAAPAEDAAPAGSEDAPAPAVTPDETAAPAKAPAKKGGSGDAAGVRKARPQNGRVPAAAAAAPRVKKPGVLSQSASFPARGAAAKKASAVATPKQAKGVVTNGSEAAAGRAAEKKANSARTPVARRSMPVKSGSADAAAPNDAIPAVQEPHENTDKPLKQMQPGKTEDDVRSTTSSTNTPRAAARKSAAVAAGFSFRLEERAEKRKEFFQKLEEKIHAKELEKTNLQEKSKESQEAEIKLLRKSLTFKATPMPSFYKEQPPKVELKKIPPTRARSPKLGRHKPANSATAASADGSVSCESPRSTANSSKASATTKAEARPVVTRPKISNSKPKASRAKVARAQETPAEAPPSEPAAPEDFTVEHGVGDATGPDLTAQLVASNEVPVHG

SEQ ID NO: 45931 - protein, 310 aa, Zea Mays
MSGHARQASFALLRAFLVIVSFRAGGVSSTRTLTMTNHCGHTVWPGILSSAGSPALETTGFALEPGQSRSLPAPRGWSGRLWGRTHCSADAAGRFACATGNCGSGRLDCAGHGAKPPATLAEFTFDGHEGLDFYDVSLVDGYNLPMLVEPHAPNGGGGANCLLTGCVMDLNAACPAELRVGDGGAGAGGAVACRSACEAFGTAEHCCHGEHGNPDACWPTAYSQFFKKSCPRAYSYAYDDATSTFTCAGGGTSYAITFCPSATSVKSVGTDPEARAAVGGGRVPAAAAWRTMPSVLVLLGLAMTALSHVF

SEQ ID NO: 45932 - protein, 75 aa, Zea Mays
MKDPEGNWIQLPPKYEPIVAEDGTTNNLNEYIMMSVGDVADRERMANDVYCNKHGVVLNETIFPEFFAQLPAPHT

SEQ ID NO: 45933 - protein, 442 aa, Zea Mays
MATAGGAAPAAMDEKARRTRDLLASFYNTDPSAAAGGAAAPAFLARPSPTAAPASPLDSINSTSFDPDIYMNVLVQQSNLEGLLQRHVKMATEIKNLDTDLQMLVYENYNKFISATDTIKRMKTNIVGMEANMEQLLTKITSVQSRSDTVNTSLFDKRENIEKLHRTRNLLRKVQFIYDLPTRLNKCIKTEAYADAVRFFTGAKPIFEAYGDTSFRDCKKASEEAMDVVIQHLQTKLYSDSEPIEARAEAVVLLKQLKFPVDNLKSNLLEKLEECLLNFQNETTHASIGDISKTFRAYLIIFPDSERRLIELAQALFLNRYETVRENLKKRIPSTDLLAMLRSLWEDATIIDEVISEAALPAFSLETTRDIVKQHIATAFLHLQSEISEALVRTHSTSNEKLEESQLQTAMETSKIKVSQGCIDLLQCSVSGYVASRNFIIW

SEQ ID NO: 45934 - protein, 315 aa, Zea Mays
MAKPRKTRTSAPDPPVAAVRLPWHTPAPAVPTAVLISLAALLIRVLVSVGPYSGQGAAPKFGDYEAQRHWMELTLHLTPADWYRNTSDNDLAYWGLDYPPLSAYQSLLHGRIINTSLPEAVALRSSRGYESMESKLLMRWTVLSSDLLVFFPSALWFVWAYMKLGVGISGEERREGWMWLLALVLISPCLVLIDHGHFQYNCISLGLTLGAIAGVLSKNELVGASLFTLAINHKQMSLYFAPAFFSHLLGKCLKQKYPIVEVTKLAFVVLGTFALVWWPFLHSYEAVQQTCETCFSVGTELMKSVISGSLSISSI

SEQ ID NO: 45935 - protein, 861 aa, Zea Mays
MATAVASQPCHLPLSAGGDPSTSNVHTLEKVYGFRFICRSIVDVKTHKFHSRISKRKCYLRNSLSECDRTIHSGRWLEFRRHKGVFQRTRRMVHIIPLASDGDGNHISVNGALQVGSTSNIDEIKLKLNKALQSEDISNGLVQSIHDAARSIELALIEHSKLPKSSWFPKTWLGVENNAWIKSLSYQAAVDSLLKAVIDVSSRGNDRDRDINVFVQRSLSRLLTPLESVIKNELSKREPALYEWYSSDQNPLVVRQFVNIFENDPMFYSATAICLEGEPMNTSESDLSLLMLGLICLAAITKFGSAKVSCQQFSSMVPDIIGRFMDMLLEFAPLSKAYNLAKDIGLRREFLYNFGPRAAVPKLGNDHGLEISFWIELVQKQLLWALDREKIWSRLTTSESIEVLEKDLAIFGFFVALGRSTQGYLSFKGLTDLDDSLNGIVRYLIGGSVLYYPQLSSISSYQLYVEVVCEELEWLPFYNDDVLSAKTDTEGREEVPKGEVISRVLNVCSYWMTSFTKYSSWLENPSNVKAAKFLSKGHVMLSDCMKELDISRNMSNDSGFLEPEEELDTGTELASFDKSLENVEEALVKLENLLQELHVSSSHSGKEDLKAACSDLEMIRRLKKEAELLEASFLAKAEYLEADASSGSLSPAEEGPVKTSSRTNDTSAPQKTGSRVDNKRRPFWDFFGRSLKVDPALADQDLITVANVEKEGMESNDILRFEQLRRELIELEKRVQKSADEAQKEETVLQGTQLLAIDTGAAMGLLKRALIGDELTQKEKQALQRTLTDLASVVPIGILMLLPLTAVGHAAILAFIQRYVPSMIPSTYAPGRLDLLRQIEKVKEMEVAEGSSEDILEELNK

SEQ ID NO: 45936 - protein, 630 aa, Zea Mays
MHSNALHLSAMCSIKCCFLLRRLRRPRIHCFSTAGASTTLPRKNYAGDPLCGAGPPPAPGTGDAARAHEAAVRRLAAAGDVDGVQLALQEMRLRGVPCTEGALVAAVGAFARAGAPDRALKTFYRAVHDLGCARPHRAAALQPPHRRAAAGRTWALCQNNRVGAARKMLDEMARKGCPPDDVTYATIVSVLCKLDRLDEATEVLAAMPPVAASYNAIVLALCREFRMQEVFSVVSDMVGRGLQPNVITYTTIVDAFCKAGELRMACAILARMVITGCTPNVVTFTALVRGLFDDGRVHDALDMWRWMVAEGWAPSTVSYNILIRGLCSVGDLKGASSILNSMEQHGCFPNVRTYSTLIDGFSKAGDLGGAISIWNDMSRSGCKPNVVVYTNMVDVFCKKLMFNQAKSLIDKMLLENCPPNTVTFNTLIRSLCDCRRVGRALGVFHEMRRHGCVPNGRTYNELIHGLFREGNCGDALHMVTEMQSHGIELSLVTYNTVVSGLCQTRMSREAMVFVGKMIVQGIQPNAFTFSAIIHAYCKEGEVRMAAWMLGAMNVVNCHRNILVYTILMAELCNQDKLVDAMTYLLKMLYEGIYPNTVTWNVLVRGVFRNLGCIEPSDFIQHITMNLSEGT

SEQ ID NO: 45937 - protein, 388 aa, Zea Mays
MNEAVQEAKLLRQVNALIVAHLRSQNLGQAAAAVAAATMTPISAAESVPANHLLRLVAKGLAAEHGGGDAASAFDSAGFGVAVQPPGSSAVDFSIQDVKGSSKSFPKHEVKHVSDHKNAARCVKFSPDGKYFATGSADTSIKFFEVAKIKQTMVGDSKDGPARPVVRTFYDHTQAINDLDFHPESPILISAAKDSTIRFFDFSKTNARKAFRVIQDTHNVRSVCFHPCGDYLLAGTDHPVAHLYDINTFTCYLSANAQDSSSPINQVRYSCTGSLYVTASKDGSLRIWDGVSAECVRPIIGAHGSSEAISAIFTKDERYVLSCGKDSRVKLWEVGTGRLVKQYAGAIRRQFRCQAVFNETEEFVLSVDEQNNEVVVWDALTAEKMPVI

SEQ ID NO: 45938 - protein, 450 aa, Zea Mays
MQSLTLCAMKELRLYENSEKALLSSTSANGTAILRVVQALSSLVSTLQDRKDPEQPAEKDHSDAVSQISEINTALDALWLELSNCISKIESSSEYASNLTPASASAATLTAGVAPPLPAGTQNRRTQGLLGRSGIRRRGAAGFGIGDGAEVARANLPEVTGAAGFAGGAQRDLAAATQSCASSPIYGDGAFASTVYPSPKRWAADLPNHQELKSKFLSRTSARRPANLMALVDAKAAGASTSTVAAAPTVEHLLFLVVLDGVETPIHEGTLYGSAGGTVTVTGPGQLSADGLESVLVRGGGTGAGAVRFTLCADAAAEGVGAACFERCGAARVEGAREVSVSSCRAVEVERAGRVTLDRCRDARLRGGGALRATRCRRADVESFGGVRLARCKAARADWCGTVEVELCRAVDVRRCGAVTGERCRVVNAAGCGSVEVARAVINMVEEEQP

SEQ ID NO: 45939 - protein, 77 aa, Zea Mays
MCKRLNVKVLPFFHFYRGADGLLEAFSCSLAKFQKLKDAVAMHNTARCSIGPPVGVGDVDLLDSTSPQEKPAEASPH

SEQ ID NO: 45940 - protein, 287 aa, Zea Mays
MEALLELEKMQRVLSLMSSRGLSHTDSSCGGAAADRFLAQFLLFMCRSYFMFHGLDVNKPQAIFKYLPVLSFTESYIYQLDASNEDCLHVVPDDNTSKVLGKKEESLNETSLSQMIEPLEGLLQCQGLMTDRLRTELKSGIQYWSLERKLCQALLRNEKVNELHMDFLSVSEFLVEISDDLYDYEDDVMNNTFNILRMFAAIYGPLEAPNMLAKCIGEAEEKYESFSKKLDPSLSGSYWRRCEEATKEGGKTSGHAYGTWNIPRVISNEDAFRRERRSKHDACAVIT

SEQ ID NO: 45941 - protein, 139 aa, Zea Mays
MFHGLDVNKPQAIFKYLPVLSFTESYIYQLDASNEDCLHVVPDDNTSKVLGKKEESLNETSLSQMIEPLEGLLQCQGLMTDRLRTELKSGIQYWSLERKLCQALLRNEKISIEDVMMAIHLKSFDYRVLNLLMFQLTGQ

SEQ ID NO: 45942 - protein, 339 aa, Zea Mays
MNAVLRVSLGNFLFFAIFSLVMIGVKDQNDRRDAWHHGGWIAKIAVWAVLIVLMFCVPNIVITIYEVLSKFGSGFFLLVQVVMLLDFTNNWNDSWVEKEERKWEIALLVVTVVCYLSTLAFSGVLFMWFNPSGHDCGLNVFFIVMTLILAFAFAIVALHPQVHGSVMPASVISVYCAYLCYTSLSSEPDDYECNGLHRHSKQVSMSALILGMLTTVLSVVYSAVRAGSSTTFLSPPSSPRSGAKNPLLGDEEDGKGDGKESEPRPVSYSYTFFHLIFALASMYSAMLLTGWTSAASESSELMDVGWTTVWVRICTEWVTAGLYIWTLIAPLLFPDRDFS

SEQ ID NO: 45943 - protein, 265 aa, Zea Mays
MSTPHSSSTSSVPPHRASPPQIPQSLTLAPTASSASPSSSSASGMRDAAEDDSDSPPSQMSEDDPGGGGGDRWEPDLRGGNGGGGGGGRWAPPDQVLENVLETVLEFLTAARDRNAASLVCRSWYRAEAQTRRELFIGNCYAVSPRRAVERFGGLRAVVLKGKPRFADFSLVPYGWGAYVSPWVAALGPAYPRLQRICLKRMAVSDDDLALVASSFPFLRDLSLVCCDGFSTLGLAVIAERCRSLILWVMKAFVLWLMHALISVS

SEQ ID NO: 45944 - protein, 251 aa, Zea Mays
MIVHTEDGDEVTESPIFPRTEFIPGLGSINSFTHDPKRAELISSFWAENIGDSDANKDRDTDYGPDMQESKVISPLTGTVKKNIGAEGTIRCHDNQINLSPGLANTTTKLNNSPSRKAFSVQDKLWSIYAAGNTVPIPFLKAIDISPLALVSENESGNGLAGSSTNDALEAVRELFSGDGQAKKGRKGQNEVPLPPGVHHRLTTSPTLMNLAQALAYHKTCYEDMPLQDSQATQEQQTIQNLCDTLRTILG

SEQ ID NO: 45945 - protein, 397 aa, Zea Mays
MKWSLLFHDFIAKCLTKDPRLRPAAIEMLKHKFIEKCNSGASKMLAKIKVAKKIRATLAVQNELSDPDNTTQDVPFRINEDYGETVPTSSQQHMKHGTYNDCQAGDFGTMIVHTEDGDEVTESPIFPRTEFIPGLGSINSFTHDPKRAELISSFWYEKHKFILLFVLSVIESSLTRRFYLSHHKSYAQFLDRAENIGDSDANKDRDTDYGPDMQESKVISPLTGTVKKNIGAEGTIRCHDNQINLSPGLANTTTKLNNSPSRKAFSVQDKLWSIYAAGNTVPIPFLKAIDISPLALVSENESGNGLAGSSTNDALEAVRELFSGDGQAKKGRKGQNEVPLPPGVHHRLTTSPTLMNLAQALAYHKTCYEDMPLQDSQATQEQQTIQNLCDTLRTILG

SEQ ID NO: 45946 - protein, 252 aa, Zea Mays
MIVHTEDGDEVTESPIFPRTEFIPGLGSINSFTHDPKRAELISSFWAENIGDSDANKDRDTDYGPDMQESKVISPLTGTVKKNIGAEGTIRCHDNQINLSPGLANTTTKLNNSPSRKAFSVQDKLWSIYAAGNTVPIPFLKAIDISPLALVSENESGNGLAGSSTNDALEAVRELFSGDGQAKKGRKGQNEVPLPPGVHHRLTTSPTLMNLAQALAYHKTCYEDMPLQDSQATQEQQTIQNLCDTLRTILRL

SEQ ID NO: 45947 - protein, 566 aa, Zea Mays
MAFSPRSPWSRAKKTDVYSTFVVHGDDDEDDARGGRGPSTRAEEDEEEDPSSLPPLLQRLPKDFGGASFDDDEDPYSSDPDDASLSATAAFKSGVPASGRSPFLDLRRSSPRATDDDPYSTFVVHSTTRSGRTSSSPRGSASGTFIRRSGGSSSPRESVSGTFIRRTGSPSSPGKSASGTFIRRPGSPSSPRGSFSGTFIRHTSGGSSSHESASGGGGGFGSSFWTPAVEQSEELRQPSPLMQQQQQQHSRRKPSVSSVPDSVTREDPSTKYELLHELGKGSYGAVYKARDLRTQELVAVKIISLTEGEEGYEDIRGEIEMLQQCSHPNVVRYFGSYQGEEYLWIIMEYCGGGSVADLIGITEEPLDESQIAYICREALKGLAYLHSIFKVHRDIKGGNILLTEQGEVKLGDFGVAAQLTRTMSKRNTFIGTPHWMAPEVIQESRYDGKVDVWALGVSAIEMAEGMPPRSTVHPMRVIFMISSEPAPMLEDKEKWSLLFHDFIAKCLTKDPRLRPAAIEMLKHKFIEKCNSGASKMLAKIKVAKKIRATLAVQNELSDPDNVILVL

SEQ ID NO: 45948 - protein, 489 aa, Zea Mays
MAFSPRSPWSRAKKTDVYSTFVVHGDDDEDDARGGRGPSTRAEEDEEEDPSSLPPLLQRLPKDFGGASFDDDEDPYSSDPDDASLSATAAFKSGVPASGRSPFLDLRRSSPRATDDDPYSTFVVHSTTRSGRTSSSPRGSASGTFIRRSGGSSSPRESVSGTFIRRTGSPSSPGKSASGTFIRRPGSPSSPRGSFSGTFIRHTSGGSSSHESASGGGGGFGSSFWTPAVEQSEELRQPSPLMQQQQQQHSRRKPSVSSVPDSVTREDPSTKYELLHELGKGSYGAVYKARDLRTQELVAVKIISLTEGEEGYEDIRGEIEMLQQCSHPNVVRYFGSYQGEEYLWIIMEYCGGGSVADLIGITEEPLDESQIAYICREALKGLAYLHSIFKVHRDIKGGNILLTEQGEVKLGDFGVAAQLTRTMSKRNTFIGTPHWMAPEVIQESRYDGKVDVWALGVSAIEMAEGMPPRSTVHPMRVSGASQCVVSICS

SEQ ID NO: 45949 - protein, 154 aa, Zea Mays
MTPPHHPVNFAVLLLFLCLPAVPPAAAAADPTPTPWPPQFHATLVMDYHGNMSVADLWYDWPGGRNLHVIRYQLAADAPYYDNEWNNGTSFFYTPALRTCRSAAVGVGILRPDWLRPGAVYLGRRDAGGFDCHVWAKADFITYYEDVNTKRPVK

SEQ ID NO: 45950 - protein, 262 aa, Zea Mays
MDTQARPVPPRVKLGIQGFEVSKLGFGCMGLTGAYNSPLDDEAGIAVIAHAFSRGVTLFDTSDVYGPLTNEILLGKALKQLPREQVQVATKFGIRHDESGTRTVCGRPEYVRACCEASLRRLGIDCIDLYYQHRIDTTTPIEETIGELKKLVEEGKVKYIGLSEASPDTIRRAHAVHPITAVQMEWSLWSRDIEPEIVPLCRELGIGIVPYSPLGRGFFGGRGVKEQVSAESNLVSTWDPKVCSRKFGEEQANLFANGRTGQ

SEQ ID NO: 45951 - protein, 289 aa, Zea Mays
MDAADLYGYQATHVAAQYGQTAFIYRIVAKWNADPDIPDNDGRSPLHWAAYKGFADSIRLLLFLDAYRGRQDKEGCTPLHWAAIRGNLEACTVLVQVGKKDDLMVKDKTGLTPAQLAADKNHRQIAFFLDNARRVHDRGCGANTRFGKLSKLGLAPFLWCTIIGMLITYVHSVILGQYVMTMTAPFGMFAWSGVFLATAGLVMFYKCSRKDPGYISINTRGSQNQRDDEPLLKMELENPALLFGNWSQLCITCKIVRPVRSKHCSTCDRCVEQFDHHCPWVSNCIGKDL

SEQ ID NO: 45952 - protein, 359 aa, Zea Mays
MASEIEVLEDTTTSSTSLVAAASTAPSAAEGAGAPAENESLKNDVYTAAAYGDLEKLQRLVEGEGRPVTEPDGGGYYALQWAALNNRVAAAQYILEHGADTNAVDHTGQTALHWSAVRGHIQVAELLLKEGAKMDAADLYGYQATHVAAQYGQTAFIYRIVAKWNADPDIPDNDGRSPLHWAAYKGFADSIRLLLFLDAYRGRQDKEGCTPLHWAAIRGNLEACTVLVQVGKKDDLMVKDKTGLTPAQLAADKNHRQIAFFLDNARRVHDRGCGANTRFGKLSKLGLAPFLWCTIIGMLITYVHSVILGQYVMTMTAPFGMFAWSGVFLATAGLVMFYKCSRSGLHQHKYKGLAKSKGR

SEQ ID NO: 45953 - protein, 200 aa, Zea Mays
MGSPKAAKSMVKQRIWRHRLVAPFAAVLITAVVVFSGLFAQDPSATSEFTAVNAGNTLPVRDKSESTARGSPNKEDLATAAFEQELDVGNSEPNQAFQGTVPAAGERGTATAVPVQRERSSGGSEPEEKQSPPQDQEGEETSAKSGASFCARTVVHKLEEEYVLCALLEPRLSTNSSLGCSPRAFYLKEMFSWVEVVFLF

SEQ ID NO: 45954 - protein, 256 aa, Zea Mays
MARNEEKAQSMLNRFITMKQEEKRKPRERRPYLASECRDLADAERWRSEILREIGAKVAEIQNEGLGEHRLRDLNDEINKLLRERGHWERRIVELGGRDYSRSSNAPLMTDLDGNIVAVPNPSGRGPGYRYFGAARKLPGVRELFDKPPEMRKRRTRYEIHKRINAGYYGYYDDEDGVLERLEGPAEKRMREEIVSEWHRVERVRREAMKGVMSGEVAAAGGRSGEAAREEARGREEREGERRGSWEGIRCTCAAT

SEQ ID NO: 45955 - protein, 615 aa, Zea Mays
MEFYNNADKHPRVFGMTASPIIGKGGSNKLTYTKCINSLEELLNAKVCSVDNVELESVIASPKVEVYFYGPVGHSNLTTAYIKELGGYKFQSECMLRESVCNFNESLKKLKSLWRLHENLIFCLQEVGLFGALQAARTFLSSSSVSLDGKGADINDYANKAMSLLSRDILEGPDADSFDLETIEEPFFSKKFAVLINVLSRYRLEENMKCIVFVKRIIVARVVVQILQNLKCLDFWRCEFLVGCHSGLRNMSRDKMSSIIEKFSSGEVNLLVATSVGEEGLDIQTCCLVVRFDLPETVNSFIQSRGRARMSKSKYVFLLERGNHSQEKLLDDYITGEIIMDKEINLRTSNDMFNCLEENIYRVNDTGASISTACSVSLLHRYCDNLPRDIFFVPSPSFFFVDDVDGIVCKLILPPNAAFRQVNGQPCPSKDEAKRDACLKACIKLHELGALTDFLLPGQGSRKIKVSTTNNSESNKDDDESFREELYEMLIPAVLRPSRCKLDSSFKLHFYYIEFIPIPADRRYQMFGLFVINRLPEESEKLDVELHLARARIVKAGIKYLGKIEFNKEEALSCLSVQMPTQNFQGAMPDMSFFFYLTDDTRTQFSRNVFESSPG

SEQ ID NO: 45956 - protein, 1040 aa, Zea Mays
MSEDEAESSSSGAAASEPKDPRTIARKYQLDLCKRAVDENIIVYLGTGCGKTHIAVLLMYELGHLIRKPSREVCVFLAPTIPLVRQQAMVIADSTNFKVQRYYGSGKHSRDHQAWEKEMGEYEVLVMTPQILLHNLRHCFIRMDLIALLIFDECHHAQAQKRHPYAQIMKEFYNNADKHPRVFGMTASPIIGKGGSNKLTYTKCINSLEELLNAKVCSVDNVELESVIASPKVEVYFYGPVGHSNLTTAYIKELGGYKFQSECMLRESVCNFNESLKKLKSLWRLHENLIFCLQEVGLFGALQAARTFLSSSSVSLDGKGADINDYANKAMSLLSRDILEGPDADSFDLETIEEPFFSKKFAVLINVLSRYRLEENMKCIVFVKRIIVARVVVQILQNLKCLDFWRCEFLVGCHSGLRNMSRDKMSSIIEKFSSGEVNLLVATSVGEEGLDIQTCCLVVRFDLPETVNSFIQSRGRARMSKSKYVFLLERGNHSQEKLLDDYITGEIIMDKEINLRTSNDMFNCLEENIYRVNDTGASISTACSVSLLHRYCDNLPRDIFFVPSPSFFFVDDVDGIVCKLILPPNAAFRQVNGQPCPSKDEAKRDACLKACIKLHELGALTDFLLPGQGSRKIKVSTTNNSESNKDDDESFREELYEMLIPAVLRPSRCKLDSSFKLHFYYIEFIPIPADRRYQMFGLFVINRLPEESEKLDVELHLARARIVKAGIKYLGKIEFNKEEMILAHNFQEMFLKVLLDRSEFTPSYILLGNDGALDMDSTFYLLLPIKQKFYGDNMIDWPAVKRCLSSPAFQDPMGLSLHDSYLPNESLKLLGGTYNKADVIGSLVYTPHTDLFFFVDAILDGTNAKSELNGATYAEHFKQRLHIKLSHPEQPLLKAKQLFCLRNLLHNRQLESTELCSLKIIGFSKDMGSSLSLLPSLMYRLENLLVAIELKDVMSSYFPEASQISASGILESLTTERCLERISLERLEVLGDAFLKYVVGRHNFISYEGLDEGQLTRRRSDIVSNSNLYELSIRRNLQVS

SEQ ID NO: 45957 - protein, 578 aa, Zea Mays
MSKSKYVFLLERGNHSQEKLLDDYITGEIIMDKEINLRTSNDMFNCLEENIYRVNDTGASISTACSVSLLHRYCDNLPRDIFFVPSPSFFFVDDVDGIVCKLILPPNAAFRQVNGQPCPSKDEAKRDACLKACIKLHELGALTDFLLPGQGSRKIKVSTTNNSESNKDDDESFREELYEMLIPAVLRPSRCKLDSSFKLHFYYIEFIPIPADRRYQMFGLFVINRLPEESEKLDVELHLARARIVKAGIKYLGKIEFNKEEMILAHNFQEMFLKVLLDRSEFTPSYILLGNDGALDMDSTFYLLLPIKQKFYGDNMIDWPAVKRCLSSPAFQDPMGLSLHDSYLPNESLKLLGGTYNKADVIGSLVYTPHTDLFFFVDAILDGTNAKSELNGATYAEHFKQRLHIKLSHPEQPLLKAKQLFCLRNLLHNRQLESTESEARELMEHFVELPPELCSLKIIGFSKDMGSSLSLLPSLMYRLENLLVAIELKDVMSSYFPEASQISASGILESLTTERCLERISLERLEVLGDAFLKYVVGRHNFISYEGLDEGQLTRRRSDIVSNSNLYELSIRRNLQVS

SEQ ID NO: 45958 - protein, 162 aa, Zea Mays
MSAKCEGLSGPLRLQQGPLKRPLNYRGCARDPNCGGRPPCAIRATDPPAAARKLPPPPTARWRLHLPGPSPQSGVLRRRHRGRWETRGLARADAEHGGGADRRGVHGHRRTRSIVEEQIEEASMATAAATPFQLQFDKPIPFQDQRGSQERRRSKVGTKISE

SEQ ID NO: 45959 - protein, 425 aa, Zea Mays
MDFSAGSYFTSWPVNSASESYSLADGSVESYGGEGIMPPSSYFMTARSDHNLKFSVHEQDSTMLPNDQLTYAGARQTDLLPGETPSRDKLCENLLELQRLQNNSSLPSNLVPPGVLQHNSTPGAFHPQLNTPGLSELPHALSSSIDSNGSEVSAFLADLNAVSSASALCSTFQNASSFMEPVNLEAFSFQGAQSDSVLNKTTHPNGNISVFDSAALASLHDSKEFISGRLPSFASVQETNVAASGFKTQKQEQNAVCNVPIPTFTARNQIAVAAMPGSLIPQKIPSWINENKSEGPVSHPSDVQIQPNSVGNGVGVKPRVRARRGQATDPHSIAERLRREKISDRMKNLQDLVPNSNKADKASMLDEIIDHVKFLQLQVLSMSRLGAPGAVLPLLAESQTELQPTHKDYWTRKNRKTPSPSRKRL

SEQ ID NO: 45960 - protein, 102 aa, Zea Mays
MVNNIISLGTTCSEVAFLVSGSKISNLVTDFISLNSLLAQGVHPSSVGASLQGEVLMILICYLALATCVPCFYLQADMTHDCYLADVRNIDHVCSQYCSCYI

SEQ ID NO: 45961 - protein, 188 aa, Zea Mays
MMLPTATATAVFLTAAPSSFSTRRRRSRAIFASLSPSFSSSEEPLLVRAARGEDGLPRPPAWMMRQAGRYMAEYQALAKRHPSFRERSENTDLIVEITLQPWRAFAPDGVILFSDILTPLPAIGVPFDISDSKGPVIQSPVRSKEQVRELVPIDLDMLQFVGESLKILRNEDLWGPHGQLQLTLLKGG

SEQ ID NO: 45962 - protein, 271 aa, Zea Mays
MMLPTATATAVFLTAAPSSFSTRRRRSRAIFASLSPSFSSSEEPLLVRAARGEDGLPRPPAWMMRQAGRYMAEYQALAKRHPSFRERSENTDLIVEITLQPWRAFAPDGVILFSDILTPLPAIGVPFDISDSKGPVIQSPVRSKEQVRELVPIDLDMLQFVGESLKILRNEIDGKAALLGFVGAPWTIATYIVEGGMTNTYTNIKSMCHTAPDVLKGLLSHLAQAISDYIIYQVNSGAQCIQIFDSWGGQLPPHVWEQWSKPYIKQVYLSA

SEQ ID NO: 45963 - protein, 375 aa, Zea Mays
MCVGKIGVTVILGAIHFKVQMRMVSWRRTMMVTWLWDIQTVKMMIQSLMMKRWHTIRVGAKVQKGLKKQSRENGDESQLQLAARNPPTESLESEDEDGFPVSFSESKKSSEIVSNKNGGKDKETSNKDLKRKSGAISDRGDSSGGVKAEIDGASKKKKKGKDKSTVMDTGKVNNEEKEVKLHDSPADPVSTKQKKKKNKNKSASEGDTSEQSAKNNNIDKDNEEASAQEANKKIKKKKAHDISRSESQAGTGLGESDSKEPLQTRTFANGMMIQEVEMGKPDGKKASRGKKVSVRYIGKLKNGTIFDSNVSGRPFEFRLGVGQVISGWDVGVNGMRVGDKRRLTIPPSMGYGSKRVGQIPQNSTLIFDVELVNVK

SEQ ID NO: 45964 - protein, 850 aa, Zea Mays
MTTEILRSMLYRGADIIRDIEWVIFDEVHYVNDAERGVVWEEVIIMLPKHINIVLLSATVPNTVEFADWIGRTKQKKIRVTSTNKRPVPLEHCLFYSGEVYKICERDMFLAQGFKEAKDAFKKKNLNKFGVKPGSKSGTPAVRAGTQGKNPDTSNKGRDQKYPKHRNSNSGVATVQQSSSGPKRFESLFWMPLVNNLLKKSLVPVVGIQSLLRRGIGVHHAGLLPIVKEVVEMLFCRGVIKVLFSTETFAMGVNAPARTVVFDSLRKFDGKEHRKLLPGEYIQMAGRAGRRGLDNIGTVIIMCRDEIPEESDLKNLIVGKPTRLESQFRLTYTMILHLLRVEELKVEDMLKRSFAEFHAQKNLPEKEKLLLQMLRQPTRTIECIKGEPSIEEYYEMTLDAEAHREYITEAIMQLPNSQQFLTPGRLVVVKSDSDDDHLLGVILKNPSALLKKYVVLVLTGDCSSSALAPEFNKNEKGPVDFQGGQFIVLKGKRGMDDEYFSSVSSRKASGVININLPYKGDASGMGFEVRAIENKEIISICSSKIKIDQVRLLEEPNKTAYSRTVQQLIKEQPDGTKYPPALDAIKDLKMKDMYLVESYRAYHILLQKMSENKCHGCIKLKEHISLMREQKMYKDQLNELKFQMSDEALQQMPEFQGRIDVLKVIHYIDSDLVVQLKGRVACEMNSGEELISTECLFENQLDDLEPEEAVAIMSAFVFQQRNASEPSLTPKLAEAKKRLYDTAIKLGKLQSEFKVPVDPEEYARDNLKFGLVEVVYEWAKGTPFADICELTDVSEGIIVRTIVRLDETCREFRNAASIMGNSALFKKMEVASNAIKRDIVFAASLYVTGI

SEQ ID NO: 45965 - protein, 902 aa, Zea Mays
MTTEILRSMLYRGADIIRDIEWVIFDEVHYVNDAERGVVWEEVIIMLPKHINIVLLSATVPNTVEFADWIGRTKQKKIRVTSTNKRPVPLEHCLFYSGEVYKICERDMFLAQGFKEAKDAFKKKNLNKFGVKPGSKSGTPAVRAGTQGKNPDTSNKGRDQKYPKHRNSNSGVATVQQSSSGPKRFESLFWMPLVNNLLKKSLVPVVIFCFSKNRCDKSADSMFGTDLTSSSEKSEIRVFCDKAFSRLKGSDRNLPQVVGIQSLLRRGIGVHHAGLLPIVKEVVEMLFCRGVIKVLFSTETFAMGVNAPARTVVFDSLRKFDGKEHRKLLPGEYIQMAGRAGRRGLDNIGTVIIMCRDEIPEESDLKNLIVGKPTRLESQFRLTYTMILHLLRVEELKVEDMLKRSFAEFHAQKNLPEKEKLLLQMLRQPTRTIECIKGEPSIEEYYEMTLDAEAHREYITEAIMQLPNSQQFLTPGRLVVVKSDSDDDHLLGVILKNPSALLKKYVVLVLTGDCSSSALAPEFNKNEKGPVDFQGGQFIVLKGKRGMDDEYFSSVSSRKASGVININLPYKGDASGMGFEVRAIENKEIISICSSKIKIDQVRLLEEPNKTAYSRTVQQLIKEQPDGTKYPPALDAIKDLKMKDMYLVESYRAYHILLQKMSENKCHGCIKLKEHISLMREQKMYKDQLNELKFQMSDEALQQMPEFQGRIDVLKVIHYIDSDLVVQLKGRVACEMNSGEELISTECLFENQLDDLEPEEAVAIMSAFVFQQRNASEPSLTPKLAEAKKRLYDTAIKLGKLQSEFKVPVDPEEYARDNLKFGLVEVVYEWAKGTPFADICELTDVSEGIIVRTIVRLDETCREFRNAASIMGNSALFKKMEVASNAIKRDIVFAASLYVTGI

SEQ ID NO: 45966 - protein, 115 aa, Zea Mays
MPDLSLCRIHRRGLTHGRLPDPGEPRRHPHRRALVGLPVAAPRIGVVHRRCVRVLLPGLRPLRTAPPFFLFCPGACLMWRSVWSCRTLLASRSEEYMLLFRLPPDKLKHDNVMDH

SEQ ID NO: 45967 - protein, 590 aa, Zea Mays
MDAVAFPPPPAPFLDDDLDFGDFTFASAPQPQPQPPTAAFDDDWGDFVASGLGSDAGASAPTDAPAAAPSSSPWEKPRGPLPLSLFGADADDDGQEEEEGPAGPPPMDTAPQCAPSVPSNGSRPADLKDLIAGLYGYQPPHTADAVPQVKAEEDDQGFGDDDWEFTAATGQPAADQDGGGPGHADGFGKIEDISKSLSTDQEDWSSFTSADGKLNHVRLTTDGLGNHESTGEFVRASTYSPANSSAILNLYKGSKRVDDVVIAQGSAESVQSSSDLFSNNEMGAQKGSTISDENNKATAMGGDIQEIYDKLKDSSLPEGFFTEEQPWKDIYITELLNCIKEEHLKDFEQEYCLAEKIEGATEDTDIAVELYKLSISTLDLLKLASKEEQGDYVGAWYSMLLSCAQELKHGVALWQEFYHANVCDRVVSEGGHYFIALGEIYRVAQILYLSLQRFKPWVLADPGMLSKMLSCLDSCTYAWTSGLETALKMVIDSSHIDSSLAKALMESIKNITKLEVPNLQKNIPNNEMQCRLTLLPSSLLPGLNLVIWNGGHYFVKVANLWANRISPDPPLLPSNPTSSMNNAATHSQSC

SEQ ID NO: 45968 - protein, 452 aa, Zea Mays
MAASWRAVALAVAAVGWLLAGAARAFPAEDLVARLPGQPPVTFRQFAGYVDVDAKAGRSLFYYFAEAREDAAAKPLTLWLNGGPGCSSVGGGAFTELGPFYPRGDGRGLRLNKKSWNRASNLLFVESPAGVGWSYSNTSSDYSTGDVRTAHDMYQFLLGWYAKFPEYRSRALFLTGESYAGHYIPQLADVLITHNEKSKGFKFNIKGVAIGNPLLKLDRDVPATYEYFWSHGMISDEIFLAISHSCDFEDYTFNDPHNESKSCNDAIAEANSVVGDYVNNYDVILDVCYPSIVMQELRLREYATKISIGVDVCMSYERFFYFNLPEVQQALHANRTHLKHHWSMCSEFWLSSQCQTLTRVICTIMCQYPELQQHRRQHQHTAYTSKNRRAQDTTLGVQVGGWVTEYGNFLTFATVRGASHMVPFAQPDRALGLFRSIVLGQRLPNTTNPHID

SEQ ID NO: 45969 - protein, 211 aa, Zea Mays
MGSSSAPAAAAAAAPSRRKVALYLALLTLQYGAQPLISKRFVREDTIVTSLVLATEAAKVICAIILLIAEGSLKKQFSNWTLTGSLTASGLPAAIYALQNSLLQVSYKHLDSLTFSILNQTKLLWTAFFTFLILGQKQSSRQVLALALLIGAAVLLSVGESSSKGSKGGGSDYILLYGIIPVTVASVLSGLASSLCQWASQRCHLLEVCAC

SEQ ID NO: 45970 - protein, 210 aa, Zea Mays
MAARCSTAASVVRTGSRDLSPSFSFTAAALPSARLRPVGAWVRGGGYTCRLRAVCAMGSAPSSSQSPSPHTPSGQTQGKADYKSLSEEEWKKRLTEEQYYVTRQKGTERAFTGEYWNTKTPGIYQCVCCDTPLFQSSTKFDSGTGWPSYYKPIGENVKSKLDMSIIFMPRTEVLCATCDAHLGHVFDDGPPPTGKRYCINRSRDCVIASP

SEQ ID NO: 45971 - protein, 239 aa, Zea Mays
MGNRASRHHRQAAEQQPATPTLPKPQPQIQPPPPPPPTQTQQYQQAPPQSQQKPKPAADVGAVGRVLGRPMEDVRATYTFGRELGRGQFGVTYLVTHSETGQRFACKSIATRKLVHRDDIEDVRREVQIMHHLTGHRNIVELRGAYEDRHSVNLVMELCEGGELFDRIIAKGHYTERAAASLCREIVAVVHSCHSMGVFHRDLKPENFLFLNNKEDSPLKATDFGLSVFFKHDVDVDLT

SEQ ID NO: 45972 - protein, 195 aa, Zea Mays
MAHRAQHEIAAIYDTENINLNDAEERAQYTLKQAIQEDPDDAVQWHQLGLYNICMTRFSRSVNFLKAALARSPDCSYAWSNLGIALQLSDDPSSETVYKRALVLSSTQQLHAIFSNLGILYRQHRNYEFARKMLLRSLELCPGFAPASNNLGLVFVAEGRWEDAKSWFEKALQSDPLLDAAKSNLLKVLTLSTKQ

SEQ ID NO: 45973 - protein, 56 aa, Zea Mays
MHASCKSECLCGLNACRYPDFVLMWRHHGKKEKKRKITTPANQWIKRICRFDGGGS

SEQ ID NO: 45974 - protein, 208 aa, Zea Mays
MVIMAGASDRRRHHHHDHHTATAKPAPPAAASPSPTPAPANRTRLHDFAFPTQSWGAHRLLRCSKDVGGPASPPPHPQTPSPDKEKHQQASSPGAAAASQPPRPWNLRTRRSPTAAPLASRSDAAAPAGGAQPPQLQSPPPPAAPTKRAFSAALSRDEIAEDFATIRGTRPPRRPKKRPRAVQRQLDMLYPGLSLADVNLDSYKIEER

SEQ ID NO: 45975 - protein, 169 aa, Zea Mays
MMQKRWEGKISVQEQAAGPPSVRARARACVQVNKIFPPGGRSPRFLSLGSGHQLWSGHIFLLFSRQVALAPCVSLRVWLTAERARIWAGLPDNACFCAGGSAESTATADWGWGTGGFRFRLPGADDNDGRGGDTRLRAANCETDFFFAWRTGSTFCFVFLWLPTEAKCI

SEQ ID NO: 45976 - protein, 769 aa, Zea Mays
MGRFCLISLPPSPTTSSFPTYSLGCSLMAIEAARLSPSIAAAAFLASRPPLALRPFSLRRRFPLLRVLANSSGGDGRVVALSSSELRKRRGLSSSSGAADSASDGDEKLRSLRRLFARPDVAIDAYIVPSQDAHQSEFIAECFTRRAYLTGFTGSAGTAVVTKNKAALWTDGRYFLQAEKELSHHWTLMRSGNHGVPTTSEWLNDVLPSGCRVGIDPFLFSFDAAEELKDSIANKNHELVLVQGMNLVDEIWGDARPNPPKEPTRVHDIKYAGIDVPSKLSFIRSQLAENGCDAVVISMLDEVAWLLNMRGSDVPHSPVFYSYLIVEVSTATLFVDNSKVSKDVLEHLEQAGVKLKPYEAIISEVERKKILRQFNRENIIFAMLLLIKTLIALSRLAEKGAKLWLDSSSVNAAIITAFKSSCDMKKKGKAGEEVGEKEASSNDRITGDPSVHNGVISAVYNVSPVALAKSVKNDAEIEGMKNSHLRDAAALAEFWCWLEEEICKSVPLTEVQIAEKLLEFRQKQDGFIETSFDTISGYGANGAIIHYRPTPESCSSVGSDNLFLLDSGAQYIDGTTDITRTVHFGEASPRQKECFTRVLQGHIALDQAVFPERTPGFVLDVLARSSLWKIGLDYRHGTGHGVGAALNVHEGPQSISYRYGNLTALQKGMIVSNEPGYYEDNSFGIRIENLLLVKELNLANSFGGISYLGFEKLTFVPIQSKLIESSLMSPSEINWVNDYHEEVWEKVSPLLSGHSRDWLWKNTRPLLDV

SEQ ID NO: 45977 - protein, 74 aa, Zea Mays
MCQCFQFTLSLTLIGSNAAAQIWHGDTFQRDNVGVLRQQPQSFVVPPGNSHKLRRQLPLVWACRVFPVRGAAAF

SEQ ID NO: 45978 - protein, 543 aa, Zea Mays
MAPSSPSPAAPTRVSGRKRAAKAEEIHQNKEEEEEEEEVVAASSAKRSRKAASSGKKPKSPPKQAKPGRKKKGDAEMKEPVEDDVCAEEPDEEELAMGEEEAEEQAMREEVVAVAAGSPGKKRVGRRNAAAAAGDHEPEFIGSPVAADEARSNWPKRYGRSTAAKKPDEEEELKARCHYRSAKVDNVVYCLGDDVYVKAGENEADYIGRITEFFEGTDQCHYFTCRWFFRAEDTVINSLVSISVDGHKHDPRRVFLSEEKNDNVLDCIISKVKIVHVDPNMDPKAKAQLIESCDLYYDMSYSVAYSTFANISSDSDTASGISSDDVDLETSSSMPTRTATLLDLYSGCGGMSTGLCLGAALSGLKLETRWAVDFNSFACQSLKYNHPQTEVRNEKADEFLALLKEWAVLCKKYVQDVDSNLASSEDQADEDSPLDKDEFVVEKLVGICYGGSDRENGIYFKVQWEGYGPEEDTWEPIDNLSDCPQKIRDFVQEGHKRKILPLPGDVDVICGGPPCQGISGFNRYRNRDEPLKDEKNKQMENML

SEQ ID NO: 45979 - protein, 175 aa, Zea Mays
MIMVEGISQICNDLQVDPQDIVMLVISWHMKASTMCEFTRQEFIGGLQSIGVDSIEKLQAKLPSLRAELKDDQKFHEIYNFAFAWAREKGQKSLALETAIGMWQLLFAERSWPLIDYWCQFLQVRHNKAISRDTWAQLLEFVKTIDPQLTNYDEEGAWPYLIDEFVDYLKENGLA

SEQ ID NO: 45980 - protein, 154 aa, Zea Mays
MRNRDSAMKSRERKKSYIKDLETKSKHLEAECRRLSYALQCYAAENMALRQSLLKDRPLGAPTATQESAVLTETLPLVSLLWLVSIVCLFLMPVLPNRSPAAPSSGGRDLVMAAGKTSSETPEILELILHGRRCKSTRAKIKLCILPFHAGAAC

SEQ ID NO: 45981 - protein, 1145 aa, Zea Mays
MLSSAKRDIQEMGSLISLENDSLTEDLLPSRNAFLVRQSRSGRRHGNILLRGSVFRTFSINFFTYGFPVLLLALSFWSFNFTSICAFGLLAYVGYILYAFPSLFQMHRLNWSLLVFILLWAASTYVFNVAFTFFNKRFQKDMMIWETVGLWHYSIPGLFLLAQFCLGVFVALCNLVNNSVFLYLTSEGGPSTSDDHLIDGLFFTEKEDTMVLIVATIAWGLRKLSRAITLTLLFLLVMKRGFIHAVYMCFFLVFLVNHSIDKRLRQILVLFCEVHFSILYILQLDLVSSALERSGSLTMEVLSQLGLSNNATAKDFMEIGSIVCFCAVHSHGFKMLFSLSAVLRHTPCPPVGFTILKAGLNKSVLLSVYSSQNSRDGEDHRNLHEKKIASYLSKIGQKFLLVYRSYGTYVAFLTILLTLYLVTPNYISFGYLFFLLFWIIGRQLVEKTKRRLWFPLKVYATVVFIFTYSLSVSPIFAESVSKFLKLYPDLGFDPEASLLENVWQSLAILVVMQLYSYERRQNSDKNFGVSDASESGLLGFLRRFLIWHSDKILSVCVFYACLSSISLSGLIYLLGLIVFSTLPKVSRIPSKVYLVYTGLLAASEYLFQMVCKPAQMCPHQHFYGLSVFLGLKYYDSGFWGIEYRLRGKVLVIVACTIQYNVFHWLDLMPTSLVHKGKWEEPCQLFISSNPPYSPVRSNEESHSSNRFTSLFSKVQGLIGSSSSSSSSVGPGSIHQKLEYVDNAIEGSDEDKRHSFAKIWGLSKESHKWDKKRVIFLRRERFETQKTTFKCYMKFWIENLFKLRGLEINMIVLLLASFTLLNVVSIFYIMCLVLCILMNRDLIQKLWPLFVFLFASVLILEYVALWNDEITWYHGTNDIEVHCRECWKNSRIFFDYCSKCWLGIIADDPRMLISYYVVFIFSSFKLRSDHFSSFSDSDTYRQMMSQRKNAVVWRDLSLETKSFWTFLDYVRLYAYCHLLDIVLALIAITGTLEYDVLHLGYLGFALVFFRMRLEILKKKNRIFKFLRMYNFGLIVLSLAYQSPYVGQFSSGKCDQIDYLYEIIGLYKYDYGFKITSRSAFVEIVIFLLVSVQSYIFSSSEFDYVSRYLEAEQIGAMVREQEKKALKKTEQLHHLRRSEEHKRQRNM

SEQ ID NO: 45982 - protein, 253 aa, Zea Mays
MKPAARRPLLLCALAAAAALSILLVAPPPLAAHLSSLLLAFPASPYAGGPKLVVLLAGQSNMAGRGLAPSLLPPQFRPHPRVLRLAASRRWVVAAPPLHADIDTHKACGLGPAMPFAHRLLHAASPDLVLGLVPCAVGGTRIWMWAKGEPLYEAAVARGRAAVAAGGGTLGAVLWFQGESDTIELDDATAYGGRMERLVNDFRADLGMPNLLVIQSSLNFSLPRGFVRMSPSCSSVLMNFTSIWPEFAYSRIK

SEQ ID NO: 45983 - protein, 499 aa, Zea Mays
MDERKNSFSAHYYKLSSLLRGGNKNKTKNRDTPHHRHPHFVLLSRSSTVHTHHPVLPLFSSPRSLPPTQGLDSWAGRGGRRQDKRSRRHDGDLQRAHHHHLPALPMHDDRLERGSWLGAEASHLLDQHQQEERQQKAWRRGEQDLTPGLVLRRRQQASGDRPGGGLRVRQEHLHAPAHQRLRRRRGAAQGREPGLQHAHQRHHDRDMPRRLPLPGQDRQEGEGRHRARPEGQQLRPHVRAGEGDQARPGGPEAHLQPRHRPPRPAGAYHAAQDLCHRRFDERVRDLLDFSIYLDISDEVKFAWKIQRDMAERGHSLESIKASIEARKPDFDAYIDPQKQYADAVIEVLPTQLIPDDDEGKVLRVKLIMKEGVDKFNPVYLFDEGSTISWVPCGRKLTCSYPGIKFAYGPDIYFGNEVSVLEMDGQFDRLDELIYVESHLSNLSTKFYGEVTQQMLKHADFPGSNNGTGLFQTIVGLKIRDLYEQIVAERAGAPVEAAKV

SEQ ID NO: 45984 - protein, 79 aa, Zea Mays
MEAQNGSCGGAPVVLNVYDLTPMNNYLYWFGLGIFHSGIEVHGMEYGFGAHQFPASGVFESSARSLKILQESTTATRII

SEQ ID NO: 45985 - protein, 74 aa, Zea Mays
MDWVRPRGRHRRMRLRRSDVGHEGARPEQPLLVWWPEECDVPPTACSTDCFHELRFGASEESLLLQLFFLNDRC

SEQ ID NO: 45986 - protein, 321 aa, Zea Mays
MWRRAATAALSLGAGAGAVSIATSEDPAATFKVCAHLPPRLLRDSVTAATIAFDYKWSLWGLEPGTPVWQSAKHHAHLRSANRLQELCFRNGGIYIKLGQHIAQLEYVVPEEYVQTMRESMLKRCPVSSYEQVRGVFTKDLGESPETVFAEFDPAPFASASLAQVHVARTHDGQKVAVKVQHDHLTNTGVVDIATVDLLVNALHYIFPTFDYRWLVDEVRESAPKELDFLNEAKNSERCLNNFRKLSPQIAGSIYAPKVYWNLSTSRILTMEFMDAKEVTDVSGIKSIGVHPVDVSNLDGKGHSWFFLTTASTKSLIIILG

SEQ ID NO: 45987 - protein, 298 aa, Zea Mays
MWRRAATAALSLGAGAGAVSIATSEDPAATFKVCAHLPPRLLRDSVTAATIAFDYKWSLWGLEPGTPVWQSAKHHAHLRSANRLQELCFRNGGIYIKLGQHIAQLEYVVPEEYVQTMRESMLKRCPVSSYEQVRGVFTKDLGESPETVFAEFDPAPFASASLAQVHVARTHDGQKVAVKVQHDHLTNTGVVDIATVDLLVNALHYIFPTFDYRWLVDEVRESAPKELDFLNEAKNSERCLNNFRKLSPQIAGSIYAPKVYWNLSTSRILTMEFMDAKEVTDVSGIKSIGVHPVDVSNL

SEQ ID NO: 45988 - protein, 86 aa, Zea Mays
MQSYLSYSRCISAVFHAKHEPLTCKPTWVCSKNSWGSQIRIPFYDHKHVNKLELRHKCVYSFNTHLLKTCAYAFSIRHVWQTAEMN

SEQ ID NO: 45989 - protein, 782 aa, Zea Mays
MPIEEMNEDYLCAKLHLVDLAGSERAKRTGSDGLRFKEGVHINRGLLALGNVISALGDEKKRKEGAHVPYRDSKLTRLLQDSLGGNSKTVMIACISPADINAEETLNTLKYANRARNIQNKPIVNRNPIADEMKRMRQQIEYLQAELVSARGGATSDDVQGLRERISWLEQTNEDLCRELYDSRNRSQNDPCEPEIQRTLNGFTKSEGLKRSLQSTDPFDVPMADSVRGNPKDIEDEVAKEWEHTMLQDSMGKELNELNRQLERKESEMKMYGCDTVALKQHFGKKLMELEEEKKAVQQERDRLLAEVESLSADGQTHKLRDAQLQKLKSLEAQILDLKKKHENQIQILKEKQKSDEAAKKLQEEIHFIKAQKVQLQHKIKQEAEQFRQWKATREKELLQLRKEGRRNEYERHKLQALNQRQKLVLQRKTEEAAMATKRLKEILEARKSSARDSSAGSNGTSQGYNMGERSLQKWFDQELEVMVHVHEVRNEYEKQSQLRAALGEELAILKQEDIRAGGSSPQRGKNGNSRTNTLSPNARQARIASLESMVTISSNTLVAMASQLSEAEERERAFSGRSRWNQLRSMGEAKSLLQYVFNVAADARCQVKEKEVEIKEMKEQMTELVGILRHSESRRREMEKQLKQREQTTPMATTPPKSGNGTTKHSADDPNTPLSPVAVPAQKQLKYSAGIVNSPSKGVAAIKKEQLKMVPIAQLSAGKRVSIAGHSGKLWRWKRSHHQWLMQFKWKWQKPWKLSEVIRHSDETITRIRPRPPLLPHKPHN

SEQ ID NO: 45990 - protein, 385 aa, Zea Mays
MASGDLLLRAHAGAPVLARAFSCRLLVPARRRSGLISPLAASKVGIADVVGRVRSGGADQKRRRRDAKEGFGFSGVATRRELIDDEKVEQDEEDEALKLGVEKNGGETGGVDGSYLSETRFDQCAISPLSMKAVKDAGYERMTEVQEATLPIILQGKDVLAKAKTGTGKTVAFLLPAIEVLSTLPHQRGQLRPPINLLVMCPTRELANQVAVEARKLLRYHRTLGVQVVIGGTRLTQEQRSMQANPCQILVATPGRLKDHLENTPGFSTRLKGVKVLVLDEADRLLDMGFRRDIEKIIASIPRERQTLLFSATVPEEVRQISHVAMKKDYRFINTVKEGDEETHAQVSQMYMVAPLDLHFSILYDVLKKHVAEDADYKKVAVCKN

SEQ ID NO: 45991 - protein, 780 aa, Zea Mays
MSTRELMTCLILQPVMNFASPVYINELVVYLLNAKDTGSAGGTNMANTGTVTLVPYKGGSQGCQMESRNLTVETSGLVPPNNSGMRSLVTSECGKSKVSEDDNDGTIQPRQPDWAAVLDAATKRRSEVLAPENLENMWAIGRNYQKKMVKLDHSSRQKGSEGSDNSTSAGAVGKELSSNFNDRIASVDDKYMVNLMQSKNRNAQSTFVTGSHPLALQNMNEVKPKEGSQVNFTSKEKPHETSNRVKAQLKRCNSTPDIEKRYLAKSNQPMVSSERLNVRINQDERGVGPASHVEVLMHVPKIRCRVVGAYFEKQGSKSFAVYSIVVTDADNKSWFVKRRYRNFERLHRQLKEIPNYSLHLPPKSFLSSSVDDYLVHQRCILLDKYLQDLLSIANIAEQHEVLDFLSASSKTYSAGKSSSVMKTLAVNVDDAMDDIVRQFKGVSDGLKRAVGTSPSSATAQFADNRMSLSWNQEEKDNHNLHQRNLERAHSLSDGDSNYEDHISSVNSGCHSDNEVNNRGHTSNDVEHIETCSSLDKQASDQIGKPAKEYSDSSNMSSLNAFEDPTGIPPEWMPTNVSVPLLNLVDKVFQLKRRGWIRRQVLWISKQILQLVMEDAIDEWIIRQINWLRREDVIVQGIHWIQDTLWPNGIFFTKLDEYKGNAGTSEFDKQSLGSPTLAVGNKKGRTSSFELHLEASRNASEVKKLILDGTPSALVSIIGYKQYRRSARDMYYFLQSNVCIKQLAYAMLEQVLVTVFPELRQLIEDIHEKGRKEQASFTYQL

SEQ ID NO: 45992 - protein, 1015 aa, Zea Mays
MRKRMESVDDLIEEAKLRTVWWALCIFAVSYFLTHTSKSMWTNVPMSILILAFLRYLSFKVEFRWREHPVRKQTHLSQASKRQLSANDHRLSTVPPVSRWRRKVGSPSVEAAFESFIEKILRDFVLDLWYSDITPDREAPELIRGLVLHALGELSGRVKEMNLVDMLTRDMVDLIGNHLDIFRKNEILIGVDVMRTLSSEEIDERLKQHLIVSQELHPALLSSEHEYKVLQEIVGGIMALVLRPQDAQSPLVRCFSRELMTCLILQPVMNFASPVYINELVVYLLNAKDTGSAGGTNMANTGTVTLVPYKGGSQGCQMESRNLTVETSGLVPPNNSGMRSLVTSECGKSKVSEDDNDGTIQPRQPDWAAVLDAATKRRSEVLAPENLENMWAIGRNYQKKMVKLDHSSRQKGSEGSDNSTSAGAVGKELSSNFNDRIASVDDKYMVNLMQSKNRNAQSTFVTGSHPLALQNMNEVKPKEGSQVNFTSKEKPHETSNRVKAQLKRCNSTPDIEKRYLAKSNQPMVSSERLNVRINQDERGVGPASHVEVLMHVPKIRCRVVGAYFEKQGSKSFAVYSIVVTDADNKSWFVKRRYRNFERLHRQLKEIPNYSLHLPPKSFLSSSVDDYLVHQRCILLDKYLQDLLSIANIAEQHEVLDFLSASSKTYSAGKSSSVMKTLADGLKRAVGTSPSSATAQFADNRMSLSWNQEEKDNHNLHQRNLERAHSLSDGDSNYEDHISSVNSGCHSDNEVNNRGHTSNDVEHIETCSSLDKQASDQIGKPAKEYSDSSNMSSLNAFEDPTGIPPEWMPTNVSVPLLNLVDKVFQLKRRGWIRRQVLWISKQILQLVMEDAIDEWIIRQINWLRREDVIVQGIHWIQDTLWPNGIFFTKLDEYKGNAGTSEFDKQSLGSPTLAVGNKKGRTSSFELHLEASRNASEVKKLILDGTPSALVSIIGYKQYRRSARDMYYFLQSNVCIKQLAYAMLEQVLVTVFPELRQLIEDIHEKGRKEQASFTYQL

SEQ ID NO: 45993 - protein, 238 aa, Zea Mays
MDTRLAPSSFRIPPASLQAIPYAMLLALVPAYELLLVPLARRLTGARAGIAPLQRIGVGLCLVALSMASAAAVERRRRDAAVPASGGRRQQQLSVLWLVPQFFVFGLSELFTNVGLMEFFYEQASSTAGTAAHMQAFFMAFFYCSFSFGFYLSSVLVSLVNRATAGGGRPGWLGDNDLNKDRLDLFYWVLAALSVLNFFCYLLCARWYNSGAAGSGPDGAAPGGEVASEEEDDGKGLI

SEQ ID NO: 45994 - protein, 312 aa, Zea Mays
MGLRSPLVLLLLLLFLAATFRPSAAALAPPTGSIVKQLSSVVRWPRAAPSTHGPKQPGHPQYADGHVGVALQFESGYFVETLVEGDKLGVTPHTVRVSPVEGGELLAVDSAHSNIVRITPPLSEYSRGRLVAGSFQGHSGHIDGKPSDARFKRPTGVAVDDMGNVYVADTANLAIRKIGESGVTTIAGGKSNIPGYRDGPSEDAKFSTDFDVVYVKKMCSLLVIDRGNAALRKISLPQEDCTYQDSALLSSDLILVIGAVVAGYIFSGFQHGFGFSGSEKVVCWPCIFHLHRFFHLICIRVIISSKLVPQYS

SEQ ID NO: 45995 - protein, 672 aa, Zea Mays
MKQFAKSDTSVLKQHYEKKLTDLEQEKKALQKEIENLRHALTNISSSMDDNAQKVKENYLQKLNALESQVHELKKKQEAQQQLLRQKQRSDEAAKRLQEDIQRIKSQKVQLQQKIKQESEQFRSWKAAREKEVLQLKKEGRRNEYEMHKLLALNQRQKMVLQRKTEEAAAATKRLKELLEAKKSSRETYGSANGSGMQALIRAIDDELEVTVRAHELRSYYERQMQERAAISKEIAKLKEESKHKISDCPQAMSPSARSSRISALENMLSSSSSAMVSMASQLSEAEERERVFNGKGRWYHVRSLPEAKNIMNYLFQLASSARSQVLDKEVICNEKEHTITELKEKVVVLNGGIRQLETQVRDLRSQNTQLFTALNNAKKSARSNGTGFAGRKSVRSSQHFGYSKDNFNWVDDMDISDSEHSDELENMSDGSDSDWVQSTRKAKKHQRRVSSHSNPNLDCQNTQGSAEPEKPSDEKCILPKYISSDGCSCSKSSSCKTNKCECRGSGAQCGAGCGCKDSKCSNRDSSTIEKANQGAMLLQTAFSEKEAQDAKPRKPLTNIGNNVVNQTAETKKPRKNRRKSAIQLVPGPLLPSEPVATEAAPRDIANIPLKLPRAMSSVTPAESNPPLTDRNAAKPDESVSTGSKNSTGAAATRAPSQLRKNATTEKENQLR

SEQ ID NO: 45996 - protein, 214 aa, Zea Mays
MDSPSCRLFGAQRSPHDLLGGGAVADVVLWRKKEVATGTLAAVVASWALFYCVPGYTLLSFLAQVLMILLTVLFVWAKAAQLLNRAPPPIPLMKISDESMSEAAEMVGSFINKVLKDFENIALGKDNSLFYKVAFVLLLASIVGRLTDLITLVYTSAIIALTVPALLEKSEEHIARFFKKTSIYVQAFGRACKEYKCSVQRYSLAQTLVAAPKK

SEQ ID NO: 45997 - protein, 192 aa, Zea Mays
MPLSLLSVSVVEHQQSTSSPLAERFPRGAQDPSQTRSAPWSVCHLADASSAPPPVARPYLLLSPWRLPLDPSLREPSPAARQCRPQSPMAQELPILLLLGRRRWARPVSRFLCSSSNRLKVFQFVSSSNRYSSSAPWRSQPSMPCPCNLVSSSCPPWWRRRFSSTLPKCSMICSGGHRRSCKKIKSDHDVVR

SEQ ID NO: 45998 - protein, 164 aa, Zea Mays
MALAAPSSLRLLPTTPSQAPSPPCASRPRHLRELRLCQRLATAAAAAAAAAAAATAPLASSPTTSVAVEERGAGKGTPIDLAALDGTWRLCYTSASDVLVLFEAAERLPLLQVGQIYQKFECKDRSDGGTVRNVVRWSIENLLEHNCWYLNAWTLEYIKSMTVG

SEQ ID NO: 45999 - protein, 190 aa, Zea Mays
MDGRFVPNITIGPLVVDALRPVTDLPLDVHLMIVEPEQRVPDFIKAGADIVSVHCEQTSTIHLHRTVNQIKSLGAKAGVVLNPATPLTAIDYVLDVVDLVLIMSVNPGFGGQSFIESQVKKIAELRRLCAEKGVNPWIEVDGGVGPKNAYKVIEAGANAIVAGSAVFGAPDYAEAIKGIKTSQRPLAVAA

SEQ ID NO: 46000 - protein, 847 aa, Zea Mays
MEMGDDDNSSSRKCNTSSLKMLLEKEMSKEAESKRRHPSVIARLMGLEEDLPTKEPTVHHTVSDLSRDLNATNNTLQGKEHHHFIMSKTQNYQSCHEKIEYNDVFEVSEGQPGTDCFHDRTSQKGWSSENKSEQFNIARDKIMEPEQLAIEEKLLCTKELPEALVFPCSNRDLFLEFPEEHNPTFSRQSSGLHANQAPPQTKRITVLKPIRSVDSDGIRRPRAEIGKQNVLKMRRFHQIPSSKEEIPSQPSRIILLRPTPGKPGISKAKLTSRATSFQLPNRNSLNGSLDDNQASIGSAGLVHGMMQCRQDGCHQRDDSLLSSAYSNGYGGDESSFSDSEVDYTSGSEINYIEDCDTLSDSEGGSPLSRHSWNYIRRYEGQCSSSSFSKISHFSESSVVTEAKKQISERWSMVTCNEMSQVQLSRRKCTLGEMLSIKEAKEDEATTGMFYVSSNQSCGLENELTTRSTNVTTSRKNGDNGERSSKLPRSKSVPVISSTSDNMTVNMQASNPESCKLKVAVVSNKGKSAFKGRVSDFFLSKSKRPRRQMPAYHQSDCIAEGLEGCITHNRQDCNHKMDAIEKAMHYDDEFNSFSTRISTSIPDRTTSGASVSLGSSTGNLDKLGVNKCLNGNRDQPSPTSVLDAPSEDSSCNEPETLGTTTSKNANDDESECHVLVQNIMSSAGLGTSQSRMVFAGWHLPDHPLDPVLRNKVSQLQEKSSYRRLLFDCVNVALIEIGENALLSALPWSKRSSRTWRGTSSPDLGVEVWSILKDWIHGARMFVVSKRDNAGIILDRIVKQEVEARGWVKLMMAQVVVITEELEGGVMEELVEEAVLDFYSLFSVVRYRL

SEQ ID NO: 46001 - protein, 247 aa, Zea Mays
MCSSSRFDLVVTPRHDYYALTASGQQEVPHLFRRWITPQEPPRSNVVLTVGALHQADSAALRLAAIAWHDELAPLPKPLLIVSIGGPTRNCKYGVDLARQLITSLYNVLDSCGSVRISFSPRTPWKVADTIFKEFAGHPKVYIWNGEEPNPHMGHLAWADAFVITADSISMLSEAGSTGKPVYVIGTEHCKWKFSAFHKTLRERGVVRPFTGLEDISNSWSYPPLNDAIEVATRVREVIAERGWTVG

SEQ ID NO: 46002 - protein, 372 aa, Zea Mays
MAEAQALVPAQGPDEAPLDASAIHSRVEQLSLKRLEVEPEAEVAEDEVALGLDSTHKAAQDAMDEWDSATAAVSIDDLDAYLEQLRKDVAMAEQGNQKVSDMIQLDVGIEMLESLISNLGPKALNHFDESSVLGLSDSTDSCRNRSIADKDYIYELELDHQIEKSTMELEILQHLQRDDEMFQLESKLLPFGAKILDFKDDCLRMFLKAPILTSDCEIYGQKFNCSIDSFISDHELLIEIDKINMEPKKVQIIPDDMSVDILIERMESSRDTVCSPTLIWLIQQCQHQSIINALRRSLVNDANSSRHCFEYLNKKEMIVAHLDRGDRPTNIASTILCKTKELANELEPQIRQHLLTLVDAVEDIIIRELRSR

SEQ ID NO: 46003 - protein, 238 aa, Zea Mays
MATKMVLCRFVALAAVACLLRPGAPVELHRKLSGWSDDAGATWYGAATGAGSDGGACGYQNAVDQPPFSSMIAAGSPSIFQNGKGCGACYQGAVQLARAGHRVQGGRRLEPELLRGAHRVRVRGRRAGVRGAHAARRRRRGGVGADAAVVGRGVAVQLRRHPAGALLRPPHLRLRQDGRRQQRHPRGVDARRHVPLGRQLRQLTRTDGRTEITARPPARPPAGRRDGRERRGAIAFSL

SEQ ID NO: 46004 - protein, 478 aa, Zea Mays
MTARTAPEPPCTMAGCALRFSPDGRYLASAGEDCVIHVWEVSEFERKREENGLCNPLVAMACNGSPETTLALASSLDGSNREKKRRARFLEGRRSVSSDRLMVPEHVFALSEKPIRTFVGHSEDVLDLCWSKSQYLLSSSMDKTVKLWHISSASCLKTFSHSDYVTCIQFNPVDDRYFISGSLDEKVRIWSIQNREIVDWKDLHEMVTAACYTPDGQSALIGSHKGSCHIYDTSDNKLLQKKQIDLQNKKKKSSQKKITGFQFLPGSTSRVLITSADSRIRVFDGLNLVHKYKGFRNTNSQISACLAANGRYVISASEDSHVYIWRNDGSLEKGRSKANVTVTSSYEHFHCQDVTVAVAPPSNGSAVVSRSNSTKHDERDSVLEHPLLHAVPEKLQDSSDLQPQSGNILSTSSNHSGDRATWPEELMTPTKQSPQSSASLLSGADQAPCWSAWGTVIVTAGRGGQIRAFQNFGFPARV

SEQ ID NO: 46005 - protein, 169 aa, Zea Mays
MAKPRSGGGGGLLDLEGHYAFYGAYHSNPVNVGIHELFVWPIFLTALMLLHLTAPSTHAAGISAAVYAAYYFLLDRRAGALAALLCYLCWAASGALSARLGFSVGWKKRAPALLDNLVQAFLMAPFFVLLEILHTFGGYEPYPGFHDKVSKLIEEARKEWEDKKSKKSS

SEQ ID NO: 46006 - protein, 262 aa, Zea Mays
MDHHHHHHHHMIPGQEPPAADSSAPDSFFLGPAGAIIFSGGAGVSGAGSSSGAAALGSSAGAGGGPSPSSSSPSLSRYESQKRRDWNTFGQYLRNHRPPLSLSRCSGAHVLEFLKYMDQFGKTKVHTPVCPFYGHPNPPAPCPCPLRQAWGSLDALIGRLRAAYEENGGTPEMNPFGARAVRLYLREVRESQARARGISYEKKKRKKPSAASAAAPGPSSEGSPPPGPSGGGGGFGTSASPRFIMPTAQLELEFLHGTPLFW

SEQ ID NO: 46007 - protein, 103 aa, Zea Mays
MEWMMLMTSTCGHGLTVHEGRIYQLKLFCDKDYPEKPPSVRFHSRINMTCVNHETGMVDPRKFGLLANWQRDYTMENILTQLKKEMAASQNRKLVQPPEGTFF

SEQ ID NO: 46008 - protein, 78 aa, Zea Mays
MHGFYPLRGKHYHEMINPFRVLTDVSYIHVFQVKKLIKEKKNDAGISEYIDINKELQEVSSFLILSCNVIPHARVATC

SEQ ID NO: 46009 - protein, 491 aa, Zea Mays
MYKNQLQELAQRSCFNLPSYTCLREGPDHAPRFKAAVNFNGEQFESPGFFSTLRQAEHAAAEVALAALARRGPSYSLAARILDETGVYKNLLQEVAQRVGAPLPLYTTERSGVGHLPVFTCTVELAGITFTVVREEVNSSNETENSDEQEQIRIARALLNYRLKEKMAMANYPHVSPFPKKFPMQPERKPSFGQSSQSSYSKILPLFRPKSNSRSRPESPASTDGASQMPGRAMDIHTPSPRSRFPAAEAAPYVPVGHFRMPCHSMAPSVTIRTAVPVFSAPPLPPPSARPQQLPPLMSHPPPIRMASPVRMRPASPMFASSAPAQGPKLVRPVQLKDVQDQPRKETAPSVIPVQVKDVQYQSRKSSMSPVIPVVVKDAQRQPLPVQTKDVQTQTQAPKESLADPIPAIRPAVKIDLPAQGKKEASAGATSEAPSSATGNNGAMERGTSSDVLLARRSRAAVDGDGDKVEAKHEAEAQAVAEAAIRQLEIN

SEQ ID NO: 46010 - protein, 114 aa, Zea Mays
MAMRALPLTPSRSSSFGAHQTRPSGGGPRSVRAYAKGDEEGDKQSLFGSITEALDFSQVRSEKDAELLYEARESTRGGGRMTREQYGALRRKIGGTYQDFFKSYVEGILSTPFP

SEQ ID NO: 46011 - protein, 131 aa, Zea Mays
MRYAPIISDEPQDRTVEAGRCWSEGTKSPWGYCIVSSGGRGFGACSRTSPLVSPAPAPGRSRGLRRTAGAAATVAAVPKLHCSSCCLCRTEILLQLFTPQQCIRGQPVPASVEDAIWRTPTNCKLKERILL

SEQ ID NO: 46012 - protein, 152 aa, Zea Mays
MSDVCVAVHYCSSWPQFFFRILVTAFVGTAIAFACFSCAAVVAKRREYLYLGGLLSSGLSILLWLQFAASIFGQSTSSFMFEVYFGLLIFLGYMVYDTQEVIERAHHGDMDYIKHALTLFTDFVAVLVRILVIMLKNAADKSEDKRRKRRRW

SEQ ID NO: 46013 - protein, 659 aa, Zea Mays
MKAHLEEMRTCIEAAQGGLFLEEMQRKWNDYNKALKMIRDILMYMDRTYIPTNKKAPVFDHGIELWRDTIVRSPTIQGRLSDMLVELIHIERTGDVINRGLMRTTTKMLMDLGLSVYQDDFERPFLEVSASFYSGESQQLIECCACGEYLKQAERRLSEESERVSQYLDVKTNEKITAVVVKEMLANHMQRLILMENSGLVNMLVEDRYEDLTRMYALFNHVPDGLTAIRSVMTSHIKDTGKSLVTDPERLKDPVDFVQRLLNMKDKYDNIINVSFSNDKSFLNALNFSFEHVINLNNRSPEFISLFVDDKLRKVVKEANEEDLETVLDKVMTLFRYLQEKDLFEKYYKQHLAKRLLCGKAAPEDSERSMLVKLKTECGYQFTSKLEGMITDLNTSQDTTQGFYASTSSRLLADAPTISVQILTTGSWPTQTCNTCNLPPEIVSVSEKFRAYYLGTHNGRRLTWQTNMGNADIKATFGNGNKHELNVSTYQMCVLMLFNSSNVLTYREIEQSTAIPTADLKRCLLSLALVKGRQVLRKEPMSKDIADDDSFCVNDKFTSKLFKVKINPVVTQKETDPEKLETRQRVEEDRKPQIEAAIVRIMKSRRVLDHNSIMTEVTKQLQPRFMPNPVVIKKRIESLIEREFLERDKVDRKMYRYLA

SEQ ID NO: 46014 - protein, 523 aa, Zea Mays
MWFMTFVGTPFWMAPEVIQNSEGYNEKADIWSLGITAIEMAKGEPPLADIHPMRVLFIIPRENPPQLDEHFSKPMKEFVSLCLKKNPAERPSAKELLKHRFIKNARKTPKLLERIRERPKFAAKSMDATQNGQTHDEEEDFGTGTIKVNRTKDTAPSLSQGTVRKSAVRDFSDRSEGTGTVRVVSRPPQIASTKDGRSDMPQSPKAPIRTADRENQWRSSGTGSEESLSLRDTQSGRGRVESSTDDNDHSVSGSGTVVLRSPRASQLYSTASNHSAKPPSRFSSYEDMSNSGTVVRTQNEDPETPRSSRSRLGIQEKTSNAPLEDSAINLAEAKAALQAGLRKGNARERPFINRHEKGSHEHRSSGVNSQEVQSEDVDTQKGHKLRQLPDGQSASRASSVASPAVSSLLLPSLKEATGDKFDRPAVHAFLDSLMDLERDIPGSCEVLVGRLLHRLGSSKDSSLQGLQETAMSIFTKEPEPPSEKAGDKKLANMPPLAAPTVSPLARFLLTRWQNQVSQDLNSV

SEQ ID NO: 46015 - protein, 465 aa, Zea Mays
MATRRRLSPTFFGGLRAREHGGASGSSRATAGLPYLADLSSNPGGRGGGVIAVEHSGDPVIPFAISFGKTAQTCNLLAVADEDGYVGLYDTRRRLPSTSSSLEKSAETRVPDWVAHNNAIFDVCWIKEGSQILTASGDQTVKIWSVGNRKCIGVLSGHTGSVKSLSCHSSNPELIVSGSRDGSFALWDLRCDPKSPNSHGETCLTSSAVVREAHSPIQRNRTRSRAKAASTSITSVLYLKDGVSIATSGAADNVVKIWDTRNLEVPVSNKNSQAGALPLEGVKHGISCLSQDSYGAYIAASCMDNRIYLYSVLHVNKGPINVYTGSKIEFFFVKSAISPDGTHILGGSSDGNVYLWQVDQPESVTAVLKGHEGEATSVDWCASEVGKIATSSDDSTVRVWSTKKMDCTNVSSPTVIRKRAIAPNTEHRRSITHEPAATTSRGAVACARGDGEQQSGCHSPLQPRG

SEQ ID NO: 46016 - protein, 881 aa, Zea Mays
MSNTSSSSSVERAMQRWRAVEILFPSEAEAAADFVDDGVSIPRVSATASATVAPSAGSGNMEDSQTLIDKALAELPQELADLAKDPKNHARSKDPGWKYGFWPNETKKEMVQCIFCKKVVPAGIRRFKQHLCGGFGDTEKCPKAPAIVRKEMRDYLVQNTRSKATLMEEENVQTAEEECQGEVVVVPSSGTKAKEAKRKVIAQASITSFVGKKYVKSVSSMLCKTPEEVVNQRHSSTSSQPTLEHCTKKSKEAKQIVDDHVADFFYENGIPLNAINSRSWEIMVESIGQYGPGYRSPSYNAMREPVLERAVVKTNELRKRHEESWKEYGCTLMSDGWTDQRHRHLINFLANSPAGTFFLGYVDASSEVVDGIMLANLLEKQIEMIGKEYVVHVVTDNGANFKAAGRILMERIPTLFWTPCAAHCLDLLLEDLGKIKDFSSCINDAKKVSRFIYKHGRILDMMRAKVGGDLVRPAVTRFATSFLTLASMHRHKQALKNLFVSEDWYRNKLSTSMEGKAAENIVLSVPFWNHVEDCLKASQPILIALRIADGDETPAVPEIVSAMNTARTSIKESLKKKPQLLNEVLGYFEKRWENQMEQKLYGAALFLNPAKFFPIRENDRREATRLRSLFNDVLWKMVSDDDEQSIISKQADDYERSEGEAFSKAIAIKDRNRKNPILWWGAYGGLAYELQTLAKRIVSLCCSASGCERSWSTFSQIHTKRRNRLEHKRLNKLVYVSYNRKMANRFTKIRELGSKGKRSNPLHLEEFQWENEWVVADNDSVHQGAAHDEAIGASQGLSGHNLPMVTAAHARNLWTTSEFPTRKRTSRKRPRVPEPTINEEEILEDGEESESEEMQKNGEDGSGPSTSFGTENAFQVDEDLL

SEQ ID NO: 46017 - protein, 821 aa, Zea Mays
MEDSQTLIDKALAELPQELADLAKDPKNHARSKDPGWKYGFWPNETKKEMVQCIFCKKVVPAGIRRFKQHLCGGFGDTEKCPKAPAIVRKEMRDYLVQNTRSKATLMEEENVQTAEEECQGEVVVVPSSGTKAKEAKRKVIAQASITSFVGKKYVKSVSSMLCKTPEEVVNQRHSSTSSQPTLEHCTKKSKEAKQIVDDHVADFFYENGIPLNAINSRSWEIMVESIGQYGPGYRSPSYNAMREPVLERAVVKTNELRKRHEESWKEYGCTLMSDGWTDQRHRHLINFLANSPAGTFFLGYVDASSEVVDGIMLANLLEKQIEMIGKEYVVHVVTDNGANFKAAGRILMERIPTLFWTPCAAHCLDLLLEDLGKIKDFSSCINDAKKVSRFIYKHGRILDMMRAKVGGDLVRPAVTRFATSFLTLASMHRHKQALKNLFVSEDWYRNKLSTSMEGKAAENIVLSVPFWNHVEDCLKASQPILIALRIADGDETPAVPEIVSAMNTARTSIKESLKKKPQLLNEVLGYFEKRWENQMEQKLYGAALFLNPAKFFPIRENDRREATRLRSLFNDVLWKMVSDDDEQSIISKQADDYERSEGEAFSKAIAIKDRNRKNPILWWGAYGGLAYELQTLAKRIVSLCCSASGCERSWSTFSQIHTKRRNRLEHKRLNKLVYVSYNRKMANRFTKIRELGSKGKRSNPLHLEEFQWENEWVVADNDSVHQGAAHDEAIGASQGLSGHNLPMVTAAHARNLWTTSEFPTRKRTSRKRPRVPEPTINEEEILEDGEESESEEMQKNGEDGSGPSTSFGTENAFQVDEDLL

SEQ ID NO: 46018 - protein, 921 aa, Zea Mays
MDQQRRSSIRLYGSNASSRSGSFDFEHDQDKERADQPSDGDRREVVVKIDAEPHSPVSLHAAGGMSGHSSAVSTPRAGGAVSMLAASASGSSASTSSAGGDAPRSGESFSFKNRTPQSSAGGGESSEDPPSRLIGSFLRKQAAAGGELSIDPDFEVDEMRRPPRAPTSVNASRELRVSFQDPRKRFSPSTSSASSSSYDASHNRNQSTIDLDTAEVLRCTSTSTGSSLLARSKTRSRLMDPPPPSTSSAPASEVDPRKSFVSKGLPPKSGQLRSGLIGKSGLIGKSGPIGKSGAFEDEDDDPFMDEGMTSDFKRDTMDCLLIMEWVSLVVIVGALICSVTIPSLSIKKLSGLHLWKWELLVFVLICGRLVSGWVIRIAVFFVERNFLLRKKVLYFVYGVRRAVRNVLWLGVALVSWHLLFDKAAKRETHTLVLPYVTKVLCCLLVATVIRLIKTLLLKVLASSFHVSTYFDRIQEALFNQYVIETLSGPPLVDESRMMAEVQRLQSAGASIPSELEATAMPGKSGPTAQEWAPHDGHKTERHLDDGISIDQLHKLSQKNISAWSMKRLMKIVRYGALTTMDEQLKHATGEDELATEIHSEYEAKVAAKRIFQNVAKPGSKHIYLSDLMRFMRQEEALKAMDLFEGAQEHNRVSKRSLKNWVVNAFRERKALALTLNDTKTAVNKLHQMANVVVALIVLALWLLILGIATSKFFVLLSSQLLVAVFMFGNTLRTIFEAIVFLFVMHPFDVGDRCEVDGMQVVVEEMNIMTTIFLRYDNLKVYYPNSKLAQLPIMNYYRSPDMGDSVDFTVHVATPVEKLSLMKERLMHYLDNKKEHWYPGSMVVLRDVDDTNKLKASIWCRQTINFHDMGMRFERRELLLQEMIKVLRDLEIEYRMLPLDINVRNAPAIQSSRMPSTWTFSY

SEQ ID NO: 46019 - protein, 1458 aa, Zea Mays
MLEGTADRKERRRNVFDADSGLRWLEEERETSLLGRRERKKDVDRDVDNRKIDRRSDNVSARDNTDPRTAPSSERWNDGSTRSLGNEGRRDAKWSSRWGPDDKEKDSRSDKKVDAEKDETHADKQAFTGRLLSESDSRDKWRPRHRQESHSVGTATYRAAPGFGSEKGRVKDSSNVGFAAGRGRGNPNSVASFNRPSSAGSIGAPAVHGKFAKTAVSFRYPRGKLLDIYRQKNMMSSFDDAHMKLDEIPSITLSIAAKPLAFVAPDTVEEALLEDIRKGKVISSEGINGTGNKERAKELEEPASGIDDDKGKASFAIAGLGQEGSSGLISVNDAFYVEGTLPSGVSTSLPKKSLEGNAFSNQHRITDTQEGLKTAEIKENVDHDLGTKLPDDSNTLFDVPSFEHLQEPPKPYQSNNMDTKVGGHAIYPEELTLYYLDPQGGVQGPFLGADIISWYEDGYFGLELPVRLSQFSDDVPFRPLVEVMPHLVQKPQSRIPVPCDGNSESLESSQSKFESSVRSASSVRGDQLSNWDTESNAVDPKRGDHEESIPSRSGWLSSPETGKDISNTSNRQQHIPESVNQDAEEVLYTGRPNSSMGQSLRDLENDHADFQLTPHDPHSVVGEANLPQHNVPRDSDLSPLGLLWSELEGHPKQPLSSNVLGVNERRNSKPTTPKDILPVNMRQGPLSRMNEVSSVRDEWPANFGRLDNMNGPNISGRIPQVEAEHHLNFDGHLLLQQIRREQQQHQQRQEQLMARSNLEFSGAFPGQVFDSLHQHRQPMNQQLPDVEHLLRVQFELEQQQQHQLQQEQHQRQLQQQRQAQFLQRQQQQQQQQMILEQLLQQQLQGSNFGPTNMVDQVLLREHVFNELHQQPHHLQRQHDAAIEQLIQAKFGHGLHREHHNDMLDVLSRSNQRQMLPLEQQILLGLQHEHEQQLQSQQLANALRQHSGREEEMHLSGVWPMDDAAQFIRSGTSPNQRHGCFDLLENLQRSSSFDHHDHLDRSLSLQERLHMGGLGIHSLERSDSLPGGGPGPNTDVINALSRHHGLGQLETHGDVYPLGQMPMLPSGVHPQQHRHQEQLPGSHIGRRERHWSDANGQLQNSLMQSSHINQLQMEVEKQRRNVEMNLSVDNPHAWAALMNKERNAEQDLSDMIHKKLALQSQQSLGFPDVSVAASFGHKDHFVQPVAENPLKSVDMLSFEESLSERSLYAKSGQLAQEGSANLGTLPNSIENTGNFNLRPGSGSMFEQKHFLGIDDVQSDFSETTGGRTSANQLVGSVNELTRGKRQGSSASLAGDDTNFSEEAVSKWSDSGMSKGSSHSLLKRSTSQHSTTSQSVSADLSVIRLKKAGLASSDENKMESGLASVAQGMEGCVISNKETGAYGMPSATNNPDASGQSFSEALKSSRKPQLQYDASESADGGPGGKGAKKKTKKGKQIDPSLLGFKVHSNRIMMGEIVRDD

SEQ ID NO: 46020 - protein, 525 aa, Zea Mays
MPFRNLLLPLPFLRSKPPTLWTAKKGPSVVHETGSLSKDSQEELNLHANPAAATEHETEESLVIRPKACDSMFDNGHPSSPDEGPEQSEENQNREDCSAPVTAPGEDGYNWRKYGQKQVKNSEHPRSYYKCTHPSCPVKKKVERSVEGHVTEIVYRGSHTHPLPLPSRRSSVPPTQLECGSQSDGLENLSSKPGPAYHSAASQSQGIAPDGQFQDVHREALETKLSGSLTTTEIADRPVMDVSSTLSSNENGDRAVPPTNGRNEDETESKRRKMEASAATNTTTNTGIDMAAMASRASREPRIVVQTTSEVDILDDGYRWRKYGQKVVKGNPNPRSYYKCTYAGCSVRKHVERASNDLKSVITTYEGKHNHEVPAARNSGNGHPSSGSTPAPPQGSGGLHRRLEPPQVSIPRLSAAAAAAAAAAAYGSLSLRFPPQLSAAPGGFSFGMLRPTGMAPSLGGFLPAQMPGRGLPMQGCAGLVLPRGEAKVVSPEQQSGLPVANGNAAATYQQQQQQLMARWAQGHQM

SEQ ID NO: 46021 - protein, 87 aa, Zea Mays
MAIQVKPEVISWTPRIIVFHNFLSSEECDYLMAIARPRLQISTVVDVATGKGVKSDVRTSSGMFVNSEERKSPVVQLSFYASDTKEC

SEQ ID NO: 46022 - protein, 409 aa, Zea Mays
MDAIRKQLDQLMGANRNGDVREVSRKYYDRDVCRLYLAGLCPHDLFQLTKMDMGPCPKLHSLQLRKEYEEAKAKGTDNYDRELEETIERLIVECERKIQRALKRLEEEDAKAAIAISVTEVTQTKEVMELSKQIRQKMKDIDAFDLEGNTEGKIRATEELDKLKEQRAEEQAKMLLEAFNKDRASLINSLQNATQTTTPVPPAAPDARTQEMINEKLKKAEELGENGMVDEAQKLLDEAEALKKLATRPQAVPDSTKMSAHVQITDQKLRLCDICGAFLSVYDSDRRLADHFGGKLHMGYMLIRERLSELQEEKNKKRKLDRAEYDRRSRERSGERARDSSRDRYIDRSSSRDREYDRRRSHDRYHDRERERDSRQSRSYDSRSHRRSYSPRGSSRDYDRSGYVYLYFS

SEQ ID NO: 46023 - protein, 396 aa, Zea Mays
MDACSLVHCHLPRPLQLPLLAPPTPSRHRPRVASALVCCCCPAAAADHHQERPWEWYDRAIQSHAGSDLARSLGLLADMQASGGRPSGSAYARLIRALSRAGRALEAEALLLEMRRLGPRPEAAHYNALLEGLLAAAHLRLADLLLLQMADDGVARNRRTYTLLLGAYARAGRLEDSWWVLGEMRRWGIRLDTAGYSMLVRLYRDNGMWKKATDLVMEMQEVGVELDVKIYSGLIDTFGKYGQLADARRMFDKMRAEGVRPDISTWNALIQWHCRVGNMKRALRFFTSMQEEGMYPDPKIFVMIISRLGEQGKWDEIKKLFDGMNNRGFKESGAVYAILVDIYGQYGHFRDAQDCIAALRAENTQLLPRVFCVIANAYAQQYCTWTRIFLRYSAFE

SEQ ID NO: 46024 - protein, 359 aa, Zea Mays
MKKRQKKCAKCDMKSPTISSPIFGWLVKDTKASAVRTNAIADFKLKGDGDIHNSGETGVSGLEEESSSPGMVSKDSINEVRGLSDDTIKELVASSGKKHLLPTEVESILKDLWKNEARFCMLLCDFQKNMSSEPEKRRGYEMFFLSSLLVAPNRFRPSTSSSLGIMEHPQSVLLSKVQESNLALQHNNASSNHMDVLQRWMDLQRSVNVLYDSSKGLARSEKNAHGIRQLLEKKEGILRQKMMGKRVNYACRSVISPDPYLAVNEIGIPPVFATRLTYPEVVLYALFNILYDSIWHNFVYVCVLTCFALCDRDDNGMGKAGGWGSKNLPYTHPQCDSRVQCRTHGCVNKKLIYIYTSIL

SEQ ID NO: 46025 - protein, 531 aa, Zea Mays
MHTGEGKNEPRPAVVTVMGHVDHGKTSLLDALRQTSVAAKEAGGITQHIGAFVVEMSSGASITFLDTPGHAAFSAMRARGAAVTDIVVLVVAADDGIMPQTLEAMSHAKAANVPIVVAINKCDKSGADPERVRIQLGSEGLLLEDMGGDVQVVEISAVTKTGLDKLEEALLLQAEMMDLKARIDGPAQAFVVEARVDRGRGPLATAIVKYGTLVSGQHIVVGAEWGRIRSLRDTAGNITQSAKPAMPIEIEGLKGLPMAGDDVVVVDSEERARMLSHGRKKKQEKDRLRKIDEGMAEELEIKEETPERVEMTIIVKADVQGSVQAVTDALRSLNSAQVFVNVVHVGVGPISQHDIDLAQACGAYIVGFNIRSPPSPITQAAARANIKVLLHKVIYHLLEEMGKAIVEKAPGTAETQVSGEAEVLNIFELKGRSKSKGPDVKIAGCRITDGHFSKSGTMRLLRSGDVVFEGPCESLKREKKDAETVEKGNDCGLVIQDCDDFQVGDIIQCVEQVIRKPKFISTQSGSVRIEC

SEQ ID NO: 46026 - protein, 249 aa, Zea Mays
MGARATSPPPWRRHCLCRALHFLVLLLWGTSEANKEQAMLPPRGWNSYDSFSWIVDENAYLQNAQIMTEKLLPHGYQYAVIDFLWYRKYVDGAYTDSYGFDNIDEWGRPFPDLQRFPSSRVDRGFSQIASKVHGMGLKFGIHLMKGISVQAVNADTPILDIKTGKPYLEDGRQWTARDIGLSHRTCAWMTHGFMSVNTNIGAGRAFLRSLYRQYADWGVDFVKVDCIFGTDYSPEEIITISEELQLLQH

SEQ ID NO: 46027 - protein, 325 aa, Zea Mays
MLPFGWLTDPSVNQGPHRKCNLTLDEQKAQMALWSMTKSPLMYGGDLRNLDDSTLNIITNSGLLKINHYSRNNMEFHYVHSERTSNGEHSGHFRSPYPVRVTKNDGIFVSLTACSDDAAKGWYMFPQDGKPDHICRNYEILNDKNVSFCLGKTKRFLASDVLTMDTKEHQSKFHISVTNTDDTCLDASAGRRQTASEIRLPMFSACRWHAKQMWELNANGNLVSSYSRLCATVESRDEGGTSGGRAWIATGSEGEIYLAFFNLDSMSRKMTVQISDLGKVLGRNLLEKNPCSYTEVWSGKNFGPVKEEISAVVHSHGSMVFEIIC

SEQ ID NO: 46028 - protein, 437 aa, Zea Mays
MESSIRLLRLRKRMATFNNIATQVEILAKRKLSYCHLAQMKYLFPEAIQIKRVLLHDEKSLCMYADMEIILVMDVVEYTSTDHSPSMTICDAFYSKLLTFLDAHHKGTDIPEAILPEPFNLRSRGQLNLEASHNGHAAEPHLQGTTKDGFSNASHFPQSFRKLMSQKVITDGAERTQLLLDPTKLSSVSAYDTEGTNRSPKKQDKHASVTVNSEISATPSRHLISRCQEGTPKQETLESPLLAQTPATQTPKRQLPTPLEKLEATCGHISEPRSASSARRSLNTSLKFEGGSPSYHDRMEHVATSKIGILSEDSSSFNKSLEENGPVFFTDRDKINLADPVGVQEKMASLRSTFGIVCDISHSIKNSLITKQELFHNILANNLEIEQMGEIEEQLHILEDLAPNWISKKVINGEEILYSFETIADQNSVWERLVEAV

SEQ ID NO: 46029 - protein, 325 aa, Zea Mays
MAKETGTNEIVALKKIRMDNEREGFLITAIREIKILKKLHHQNVIKLKEIVTSPGPERDEQGRSIDDNKYKGSIYMVFEYMDHDLTGLADRPGMRFIVPQIKCYMKQLLTGLHYCHVNQVLHRDIKGSNLLIDNEGNLKLADFGLARSFSSDHNGNLTNRVITLCCYRKVLIVFLDCSCRPPELLLGSTKYNLAVDMWSVGCIFAELLNGKPILPGKNEPEQLTKIFELCGTPDDTIWPGVTKMPWYNNFKPHRPLKIRVKDFFKHFDRHALDLLEKMLTLDPSQRISAKDALDAEYFWTSRAMSAAVNTMRIRAPRWRRLCRRP

SEQ ID NO: 46030 - protein, 570 aa, Zea Mays
MAFSAASSAAAAAAYPRTTLPLRRRPGLLALLLLLLCFLSFQVVIHVPSARSAVSLWLFSGHRAERGTRENCPGCSKLQDVDKAEKTIAYTDQHGRIKLFKVTAREFGSSSIWENPWLPRDSQPVARTQEVAGDHLLASGSETTNLSSAETLATTIVDPIKLRRQVFRRRRKERRVQELLQMDKKIELQMRNAAINSSRNFNNKVRGSYNIWRQEFRLVNTDSTLRLMKDQIIMAKLYATIALSQKEPDMYALLMKRIKESQTSIGDALIDSELDSSALERAKAMGHVLSSARDVLYSSAMKMWFITHPPQLATVHVENIDNFKWLNSSYCSVLRQLESARLKEYYFKAHDPSSLSDGNENLKYRNPKYLSMLNHLRFYMPEIHPKLEKILFLDDDVVVQKDLTPLWDVDLKGMVNGAVETCKESFHRFDTYLNFSHPKISENFDPHACGWAFGMNMFDLKEWKKRNITGIYHYWQDLNEDRKLWKLGTLPPGLITFYNLTYPLNRTWHVLGLGYDPAVDIAEIDNAAVVHYNGNYKPWLDLAISKYKPFWSKYVDVDNSHVRRCYEGKQ

SEQ ID NO: 46031 - protein, 627 aa, Zea Mays
MCPPPDQRCRCGSSRVTEPNAGLARTALAAASYRMWIKLKRLSRTLTSMVGSSYSKLPPENSQEVAGDHLLASGSETTNLSSAETLATTIVDPIKLRRQVFRRRRKERRVQELLQMDKKIELQMRNAAINSSRNFNNKVRGSYNIWRQEFRLVNTDSTLRLMKDQIIMAKLYATIALSQKEPDMYALLMKRIKESQTSIGDALIDSELDSSALERAKAMGHVLSSARDVLYSSGEVSRKLRVMLQSTELNIDAVKKQNSFLVQHAAKTVPMPLHCLHMQLTTDYYFRDYVTKEHFDDDALKAGQYKEKLEDLSLYHYAIFSDNVLAASVVVKSTVANANEPEKHVFHIVTDRLNFAAMKMWFITHPPQLATVHVENIDNFKWLNSSYCSVLRQLESARLKEYYFKAHDPSSLSDGNENLKYRNPKYLSMLNHLRFYMPEIHPKLEKILFLDDDVVVQKDLTPLWDVDLKGMVNGAVETCKESFHRFDTYLNFSHPKISENFDPHACGWAFGMNMFDLKEWKKRNITGIYHYWQDLNEDRKLWKLGTLPPGLITFYNLTYPLNRTWHVLGLGYDPAVDIAEIDNAAVVHYNGNYKPWLDLAISKYKPFWSKYVDVDNSHVRRCYEGKQ

SEQ ID NO: 46032 - protein, 145 aa, Zea Mays
MATEKLGIKVERNPPESRLSELGVRQWPTWGCEKSKFPWTYSAKETCYLLQGKVKVYPDGHGEEFVEIAAGDLVVFPKGMSCTWDVAEAVDKHYNFEVKQRKIKLRISGLHNSHQRSVRRFSCYDKWNLYMLVCDSCPQGLKLPR

SEQ ID NO: 46033 - protein, 567 aa, Zea Mays
MSGTKSASIIGTKVAQCLAKRGDCSSSLQKAGIFDWVDASSDDECTAIMTSRKKQRIQANTQAKNLTSQRYGGRGSIATVGSISDCTGGKSGLNSSKKPEPVGSTDDLYDIGPYTQMAAEAMEALSNASTVNYVVRENAHPESSVLRTNMGKESKANKICFELSLQKRIGGSSSSVKKHPSKLKDKKSRKQMTRKAKGSIDSTTIEGDTNHEVSEGVKGSGASDSNVVGSNAVMCPKRKRTYMFISRSSKVQFNKAGSSTTPRSKSKEVVDVSTTKPVSVSGPDLNQLARVEKQFTSAQEDHNSSLTNRGPLGELNSKCSHFRTQVSKKPLKRGLVKSPGSRELVSLLRNEASLVLQTSRQRRNMSKVHVLLSHSMDKETIKMQTKILIYFGLQVAATISEATHFVAEKFARTRNMLQAIAMGIPIVTPSWLECCREARCFVDEKAYIMRDMKKEKELGFSMPVSLSRARKKPLLQGRRVLITPNAKPSKELLKSLVVAAHGQPLERITASTMKKKIFEGAFVLSCEQDHSVCMPLIESGLEVFDSELLLNGIVTQKLEFARYRLFP

SEQ ID NO: 46034 - protein, 530 aa, Zea Mays
MAPPARPPRAGEDLEEGTGESSPPPRSPRASNPDCHEVQRKICERLRQTGRHDRTLADPTFNARFARHLERLPRRYLLDLDLDDKLEDVLLHWGILDECADPNKRPVFRARFIKYKTVPREDDGIGHDQDHEEPCQKLLEDLSLERRKIADRNDSLSISSRGDLKTVLLHEIIFSSIDKPKLLSREAHVYSTKDGFCLDVFVVDGWKTEETDELIAAIKETLTQKNASPSNSTNSSTPEKIVDLQQQVGDYEIDLSMLTRGDKIASGSSADLYRGTYKGHDVAIKCLRSLYLNNPSEVEFLQEVLILSGVNHENILQFYGACTKHPNYCIVTEYMPGGNIYDFLHKQNNFLDLHKILRFAIDISKGMDYLHQNNIIHRDLKSANLLLGHDQVVKIADFGVARHGSQQGQMTAETGTYRWMAPEIINHKPYDHKADVFSFAIVLWELATSMVPYDNMTPLQAALGVRQGLRLDIPGSVHPRLTKLIRQCWNEDPDARLTFAEITKELQDSLHHIEAPKGASRRSRAKMQKK

SEQ ID NO: 46035 - protein, 557 aa, Zea Mays
MAIVVVVFHNPIGRPAARTHPPPAAPATARRGFKILKMAPPARPPRAGEDLEEGTGESSPPPRSPRASNPDCHEVQRKICERLRQTGRHDRTLADPTFNARFARHLERLPRRYLLDLDLDDKLEDVLLHWGILDECADPNKRPVFRARFIKYKTVPREDDGIGHDQDHEEPCQKLLEDLSLERRKIADRNDSLSISSRGDLKTVLLHEIIFSSIDKPKLLSRLTALLSEVGLNIQEAHVYSTKDGFCLDVFVVDGWKTEETDELIAAIKETLTQKNASPSNSTNSSTPEKIVDLQQQVGDYEIDLSMLTRGDKIASGSSADLYRGTYKGHDVAIKCLRSLYLNNPSEVEFLQEVLILSGVNHENILQFYGACTKHPNYCIVTEYMPGGNIYDFLHKQNNFLDLHKILRFAIDISKGMDYLHQNNIIHRDLKSANLLLGHDQVVKIADFGVARHGSQQGQMTAETGTYRWMAPEIINHKPYDHKADVFSFAIVLWELATSMVPYDNMTPLQAALGVRQVRISVPDTCQANFLGIALGHSGQRAPKIDQADSTVLERRS

SEQ ID NO: 46036 - protein, 588 aa, Zea Mays
MAPPARPPRAGEDLEEGTGESSPPPRSPRASNPDCHEVQRKICERLRQTGRHDRTLADPTFNARFARHLERLPRRYLLDLDLDDKLEDVLLHWGILDECADPNKRPVFRARFIKYKTVPREDDGIGHDQDHEEPCQKLLEDLSLERRKIADRNDSLSISSRGDLKTVLLHEIIFSSIDKPKLLSRLTALLSEVGLNIQEAHVYSTKDGFCLDVFVVDGWKTEETDELIAAIKETLTQKNASPSNSTNSSTPEKIVDLQQQVGDYEIDLSMLTRGDKIASGSSADLYRGTYKGHDVAIKCLRSLYLNNPSEVEFLQEVLILSGVNHENILQFYGACTKHPNYCIVTEYMPGGNIYDFLHKQNNFLDLHKILRFAIDISKGMDYLHQNNIIHRDLKSANLLLGHDQVVKIADFGVARHGSQQGQMTAETGTYRWMAPEQVLIQVLHVNLSFLRTCLVTRKPLQSPSIPLSPKELFKRILFISKIINHKPYDHKADVFSFAIVLWELATSMVPYDNMTPLQAALGVRQGLRLDIPGSVHPRLTKLIRQCWNEDPDARLTFAEITKELQDSLHHIEAPKGASRRSRAKMQKK

SEQ ID NO: 46037 - protein, 491 aa, Zea Mays
MEILEHWFVFSWIHQKHNWAWKLRGKRMSGHIHKSFRLTGQNCKLGIVANLLACNAWIDRLGKDGRYREAEKLFRGMADRGLDPNEVTYAILIHSLCKRGMMEDALCMFDRMREKGIRMTVYPYNSLINGYCKHNNFHQARGLLNEMVAKGLTPSPASYSPLIAGLCRKGDLASAMELHREMTRNAVSGNVYTFTALISGFCKDGNMDEATRLFHKMMESSLVPNEVTFNVMIEGYCRVGNIRKAFQLYDQMLDRGLTPDNYTYRSLISVVCLTLGAMKAKEFVADLENNCAVLNSFSLTALMHGFCKEGSAEILCKEMLAGHFLPNSYTYNCFLDYLANEGELEKAKVLHAAMLEGCLANTVTFNTLIKGFCMAGQIQGAIDLMQKNTESGFFPDCISYSTIINELCKVGDTNKAFELWNEMLYKGLKPDIVAYTILIRWCNIHGEFDKGLGIYSDMVKNGVRPNWDTYRALFLGASLMTTNGRTLLLTT

SEQ ID NO: 46038 - protein, 287 aa, Zea Mays
MNSTLQCLHSVPELKSALLSYSDTVKGNGIDQASHNLTLATRNTFGDLDQSVRPVTPLQFLQTLRKKYPQFAQQHNNVYMQQDAEECWTQLVYTLSQTLTSDSSESAVLPMKQLFGIDLVSRVHCAESGEESMETELVYSLKCHISQDVNHLHEGIKHGLKTELEKASPTLGRTAVYTRESRINELPRYLTVQFVRFFWKRESNQKAKILRKVDYPLELDVYEFCSDELKKKLKAPRQMLRDAENAKLGLYMGKLAAQKKMRSHQVALGNRLVWTLTKLSLLYQRNN

SEQ ID NO: 46039 - protein, 383 aa, Zea Mays
MPTVNVKWQKEVFPGIEIDTSQPPIVLKSQLYTLTGVPPERQKIMVKGGLLKDDADWSTLGVKDGQKLMMIGTADEIVKAPEKGPLFVEDLPEEEQVVALGHSAGLYNLGNTCYMNSTLQCLHSVPELKSALLSYSDTVKGNGIDQASHNLTLATRNTFGDLDQSVRPVTPLQFLQTLRKKYPQFAQQHNNVYMQQDAEECWTQLVYTLSQTLTSDSRVHCAESGEESMETELVYSLKCHISQDVNHLHEGIKHGLKTELEKASPTLGRTAVYTRESRINELPRYLTVQFVRFFWKRESNQKAKILRKVDYPLELDVYEFCSDELKKKLKAPRQMLRDAENAKLGLYMGKLAAQKKMRSHQVALGNRLVWTLTKLSLLYQRNN

SEQ ID NO: 46040 - protein, 216 aa, Zea Mays
MAGLSLLCGDCGAQLRSVEEAQAHAEATNHANFVESTEAVLNFVCSDCGKPCRSQTEVDLHTKRTGHTEFADKTAEAAKPIDLEAPLKPASEDVMDVDTSASASGEPQEMVVPEVNKEMLTDLEGMGFSTARATRVLHFSGNSTIEGAINWLSEHQEDIDIDEMPLVPANSKTEDNKPSLTPEEMKIKAQELRDRARKKKEEEERRMEREREKARA

SEQ ID NO: 46041 - protein, 149 aa, Zea Mays
MAGLSLLCGDCGAQLRSVEEAQAHAEATNHANFVESTEAVLNFVCSDCGKPCRSQTEVDLHTKRTGHTEFADKTAEAAKPIDLEAPLKPASEDVMDVDTSASASGEPQEMVVPEVNKEMLTDLEGMGFSTARATRVLHFSGTSQLKNGG

SEQ ID NO: 46042 - protein, 685 aa, Zea Mays
MTRRVRRRTCREREGRVVRGAWCVVSARPEGEDDAAAVEVDWRALPDDTVLQLFARLNYRDRASMASACRAWRALGSSSCLWSTLDLRAHRYDREVASSLASRCGSLRRLRLRGHEAAEAVPALCAHGLREVVADGCRGLTDATLAVLAARHEDLQSLQIGPDPLERISSDALRHVALCCSQLRRLRLSGLREADADAVGALARCCPLLEDVAFLDCGTVDETALAGIHSLRFLSVAGCRNLKWATASTSWTQLSSLIALDVSRTDVSPSAVSRLISHAKTLKLICTLNCISVEEEQLHNPAVFSNSKGKVVLTINSDIFRSFETMFPIVDAKEHGVFHQCNWSHKDKIAGDITTWLEWILSQSLLRIAESNPQGMDGFWLQKGTTLLLRLLKSLQEDVQERAATALATFVVMDDETANVDPARSEAVMQNGGIRMLLDLARCSRESAQSEAAKAIANLSVNTKVAKAVADEGGITILTDLAKSMNRLVAEEAAGGLWNLSVGEDHKASIAVSGGIKALVDLIFRWPAGTDGVLERAAGALANLAADDKCSLEVAKAGGVHALVTLARSCKLDGALEQAARGLANLAAHGDNNDNNAAVGQEAGALEALVQLTGSQNEGVRQEAAGALWNLSFDDRNREAIAAVGGVEALVALVQQCLNASEGLQERAAGALWGLSVSEANRLHC

SEQ ID NO: 46043 - protein, 118 aa, Zea Mays
MGISARWLKSLVGLRKVEQQPRKESADVGRMKSDVADQFHFQNQRSQDDSSIAAQEEIPEVPYGNDPPEDDSNAPSCLEPTYSSADVPLFQTEEELKEIWAATIIQTTFRAFLGSGPC

SEQ ID NO: 46044 - protein, 406 aa, Zea Mays
MGISARWLKSLVGLRKVEQQPRKESADVGRMFHFQNQRSQDDSSIAAQEEIPEVPYGNDPPEDDSNAPSCLEPTYSSADVPLFQTEEELKEIWAATIIQTTFRAFLARRAHRALKGLVRLQALVRGHIVRKQADTTLRCMQALVRVQARVRARRVRMALENQTDQQNTSPEHTTVARVREIEDGWCDSIGSVEDIQAKLLKRQEAAAKRERAMAYALAHQWQASSRQITAFEPDKNSWGWNWLERWMAVRPWESRFLGTYTADGIFVVNETKQPDRSATKTPYRKPVKKHDSTLQSNMLNQKGFPSNSEGVGSSANRPSGLVSTKSRLKVLPREGPEEAPSRPSPLVRSASNPKERTSGSEAGRHLTKKGTVNRSLKATKDSHMLGSRHHLASCIDPVPTRVELET

SEQ ID NO: 46045 - protein, 497 aa, Zea Mays
MYEHLPAFPIAPAAVGDCRGIPFDPSFLPRLLLSATSCTSPFLAERAVSALHATGLKLGALPSSLPASNALISAYSQADLLPSALRVFSLLSHPSTASYTTVLSALSRHGRPHEAISLFATSASAVAPDAELLSCLVSCCRRASALLPARAAHAYGIKNVAALAFYASAGPALVALYASRGKVGAARRVFGYMDGLDVVSWNAMIGGFASAGMDEESWACFREMHSRGVRGNARTAVVVLGSCDMESGRQVHGTIVSSHGGSSNAILWNALMSMYSRAGCVTDAERVFLEIVKKDVVSWNVMIGAFAKNGYGERALEFVDMVLQCGMKPDSVTFTAVLMACCHCGLVDEGLVLFQRFVSVVGLVPTMEQCACIVDLLARAGRFLEALEFIGQMSVRPNTVVWGALLSASKMHHNVEFAKIAFEQLVQVEPENAGNFVTMSNIYAKAGMVEDAKRKGLQQGKPNHAISDMKRLEVPACFDATRKLTEDKYQQMLPQEI

SEQ ID NO: 46046 - protein, 298 aa, Zea Mays
MFGGKGIEVSLWDITSCSKTWSAKSPRTNSLGIFTRPWFTAGTFLCKDDHRKIVACTNSHQVRLYDTALQRRPAISVEFKESPIKAVAADPNGHDVYIGTGTGDLASFDMRTGKLLGCYFGKCSGSIRSIVRHPDLPLIASCGLDSYLRIWDTNTRQLLSAVFLKQHLTTVVLDSHFSVEEPGEMKSKQLESSVETETEVRKEKKKKSKAITEDETEAQIRKEKKSRTIEEEEQAGLVDHSDINDEVYARKEKKKKKSRGIEGGKERDSDGEICSPKRRKSGERSKCLKKRSKKQLVA

SEQ ID NO: 46047 - protein, 220 aa, Zea Mays
MAGRRESPLMRGGGAGPPLSRGSRIAAAVVVGVALGCLCAFLYPAGLFPRAPDSASHWPRQAEPVACDTSREVAKLKSRLVLLERKNAAFKMQMKELSMKLQLAGQGKNEALYKAGPFGTVKALRTNPTVTPDLSINPRLASLLEQVAVKKELIVALANSNVKEMLEVWFTNIKRAGIPNYLVVALDDNIESFCKSKDVPVYRRDPDDGIDNIEILTWNP

SEQ ID NO: 46048 - protein, 521 aa, Zea Mays
MRDIRNRFDHGGNWKKSPTYLISSSYLQPLLLWTGATLICRGLDPVVLPSAASQAVKTRLITFVRSLSTVLAVAYILTSLIQQVQKFLMDMRNPNDTRNMGFDFTMKALYTGVWIASVSLFMELLGFNTQKWITAGGFGTVLLTLAGREIFTNFLSSVMINATRPFVVNEWIDAKIDGVDVSGIVEHVGLWSPTLIRGVDREAIYIPNHKFTVSILRNNTQRTHWRIKTYLAISHMDAGKIGTIVADMRKVLAKNPHIEQQKLHRRVFFEKIDPKNQALMIFISCFVKTSHFEEYLNVQEAVMLDLLRIVGHHKARLATQIRTVQKSYGNADFDNIPFGEDMYSRVRGRPLLIDTSARISDDKPRPRPVSSREEQKVKTNGSVDIKSSSPENASSSNSEKQEPKKMVPEDTRVKNIKGDNVMPVTPSLDPATSTSKAGKGKTREPEPTERQGDGSVSVANPKKESRPVFEDNIVLGVALEGSRRTLPIEEGNPHLSLSETEVDTEEAASSPKDKIGQSPKL

SEQ ID NO: 46049 - protein, 319 aa, Zea Mays
MAVGLTSQLFQRVTATDIFCQRNKFRSSEMRSSLPLPSTSFPSVADRRDCWGRNVLESSCMPMLYTPRRYRSLGFRSFALPIPLKEIPLVKNTSLALTRSCDALLANPATSLVVPAIGIIVFALWGFLPLMRDIRNRFDHGGNWKKSPTYLISSSYLQPLLLWTGATLICRGLDPVVLPSAASQAVKTRLITFVRSLSTVLAVAYILTSLIQQVQKFLMDMRNPNDTRNMGFDFTMKALYTGVWIASVSLFMELLGFNTQKWITAGGFGTVLLTLAGREIFTNFLSSVMINATRPFVVNEWIDAKIDGVDVSGIVEFLY

SEQ ID NO: 46050 - protein, 433 aa, Zea Mays
MDMRNPNDTRNMGFDFTMKALYTGVWIASVSLFMELLGFNTQKWITAGGFGTVLLTLAGREIFTNFLSSVMINATRPFVVNEWIDAKIDGVDVSGIVEHVGLWSPTLIRGVDREAIYIPNHKFTVSILRNNTQRTHWRIKTYLAISHMDAGKIGTIVADMRKVLAKNPHIEQQKLHRRVFFEKIDPKNQALMIFISCFVKTSHFEEYLNVQEAVMLDLLRIVGHHKARLATQIRTVQKSYGNADFDNIPFGEDMYSRVRGRPLLIDTSARISDDKPRPRPVSSREEQKVKTNGSVDIKSSSPENASSSNSEKQEPKKMVPEDTRVKNIKGDNVMPVTPSLDPATSTSKAGKGKTREPEPTERQGDGSVSVANPKKESRPVFEDNIVLGVALEGSRRTLPIEEGNPHLSLSETEVDTEEAASSPKDKIGQSPKL

SEQ ID NO: 46051 - protein, 198 aa, Zea Mays
MTVYHPAPTRGDWDCEEERREGEVDCTAHTTRPRSSVPFRAPPQHETPKPYPLASPSSSSPPPIRAPAECRREAVGGSSSATRRRRPRCCTCGTFRGSARKRSSSSSASLSAASSTPRAASAPTTTRPLSSSLTLIRQEIINNKSPGETAGNVLLVTIEGVQSSDVTIDVIHMAHDNWRKYHYQHLQLERYHVCFAAF

SEQ ID NO: 46052 - protein, 367 aa, Zea Mays
MTGAAALRQSSRRIFRHLAAAPAFSRSGLQHPERLLSSQSSPEHGARGAVSGSELALYPPERVRNFSIIAHVDHGKSTLADRLLELTGTIQKGHGQPQYLDKLQVERERGITVKAQTATMFYRHITASQDSDMPRYLLNLIDTPGHVDFSYEVSRSLAACQGALLVVDAAQGVQAQTIANFYLAFESNLSIIPVINKIDQPTADPDNVKDQLKRLFDIDPSEALLTSAKTGRGLEQVLPAVIERIPSPPGKCDAPVRMLLLDSYYDEYRGVICHVAVVDGALRKGDKIASAATSRAYEVLDVGIMHPELTPTGVLYTGQVGYVISGMRSTKEARIGDTLHQAKSTVEPLPGIWSSSHIDHTNRTLYF

SEQ ID NO: 46053 - protein, 416 aa, Zea Mays
MTGAAALRQSSRRIFRHLAAAPAFSRSGLQHPERLLSSQSSPEHGARGAVSGSELALYPPERVRNFSIIAHVDHGKSTLADRLLELTGTIQKGHGQPQYLDKLQVERERGITVKAQTATMFYRHITASQDSDMPRYLLNLIDTPGHVDFSYEVSRSLAACQGALLVVDAAQGVQAQTIANFYLAFESNLSIIPVINKIDQPTADPDNVKDQLKRLFDIDPSEALLTSAKTGRGLEQVLPAVIERIPSPPGKCDAPVRMLLLDSYYDEYRGVICHVAVVDGALRKGDKIASAATSRAYEVLDVGIMHPELTPTGVLYTGQVGYVISGMRSTKEARIGDTLHQAKSTVEPLPGFKPVKHMVFSGLYPADGSDFEALSHAIEKLTCNDASVSVTKETSNALGMGFSNLFFYVCFTDVAS

SEQ ID NO: 46054 - protein, 847 aa, Zea Mays
MEAQIPNYPSLPPQLICQLHNVTMHADAETDEVYAQMTLQPLSPQELKDPFLPAELGTASNQPTNYFCKTLTASDTSTHGGFSVPRRAAEKVFPPLDFNQQPPAQELIAKDLHGNDWKFRHIFRGQPKRHLLTTGWSVFVSAKRLVAGDSVLFIWNDNNQLLLGIRRANRPQTVMPSSVLSSDSMHIGLLAAAAHAASTNSRFTIFYNPRASPCEFVIPMAKYVKAVYHTRISVGMRFRMLFETEESSVRRYMGTITGISDLDPVRWPNSHWRSVKVGWDESTAGEKQPRVSLWEIEPLTTFPMYPSPFALGLKRPWPAGLPSLYGGRGDGLTSSLMWLRDRANPGFQSLNFSGLGMSPWMQPRLDNSLLGLQSDMYQTIAAAAALQSTTKQVPPSAMQFQQPQNIADRSALLSSQILQQVQPRFQQIYPQNLNENKIQGHTQPEYLQVQQQLQRCQSFNEQKPPMHPQQQQQEPQQQQCVQTPQDQQMQEQKHLHNFHSLPDALSAFSQLSPATHSPPSALQTVPAFSHQQNFPDTNISSLSPSTGPSMHGMLGRLPSEAASSLPCVAMNAPVSVSDPWSSKRVAVESVNPCRPHVSPHIEHLDMATCNMPQSSALAPLPGRECLVDEDGCSDPQNHLLFGVHIDSHSLLMQGGIPALQNDNSSGTIPYSTSNFLSPSENDFPLNQPLRSAGCLDESDYLPCAENAEQANQQFATFVKVYKSGTVGRLLDITRFSSYDELRSEVGRLFGLEGQLEDPLRSGWQLVFVDREDDVLLVGDDPWQEFVNSVSCIKILSPEEVQRMGKPGIQLLSSAPSRRLGNGCDSYASMQEPRGLDAGMAPVGSVEF

SEQ ID NO: 46055 - protein, 226 aa, Zea Mays
MKGVHHIQSELVACASGANFTPHIINVAAGEDVSMKVISFSQQGPRAICILSANGVIANVTLRQQDSLGGTVTYEGRFELLSLSGSFTPTDSGGGTRSRSGGMSVSLAAADGRVIGGGVAGLLVAASPVQVVVGSFLPSYQLDQGANKKPVIEITTVPPAPVGFTISSGDMDDAYSGSQHPRSAAAKGGSTTTALFKVENWTAPAPAPDQARKAPAPEAKVPVPGG

SEQ ID NO: 46056 - protein, 544 aa, Zea Mays
MAPTVPSAAKSASPSQPSGKSEVADLKQQLRQLAGSRAPDADDQRRDVFKRVISCMTAGIDVSAAFGEMVLCSATSDVVTKKMCYLYVGSHARAHPDLALLTINFLQRDCRDQDPTIRGLALRSLCSLRVPNLVEYLVTPLTTGLKDPSAYVRTIAAVGAAKLYHISATACIDADLPASLKALMLSDPDAQVVANCLHALQEIWTLEAANSEAAAREIETLYSKPVVFYLLNKIKEFSEWAQCIVLELASKFLPSDNNEIFDIMNLLEDRLQHANGAVVLATIKVFLHLTMSMTDVHQQVYERIKAPLLTLVGAGSPEQSYSVLCHLHLLVMRAPMLFSSDYKSFYCQFSDPSYVKKLKLEMLTAIANESNTYEIVTELCEYAGNVDVPIARESIRAVGKIALQQYDVNAIVDRLLQFLEMDKDYVTAETLVLVKDLLRKYPQWSHDCIAVVGNISSKNIQEPKGKAALIWMLGEYSQDMHDAPYILESLVENWDEEHSPEVRLHLLTAVMKCFFKRPPETQKALGDTLAAGLSDTHQAFAIQS

SEQ ID NO: 46057 - protein, 767 aa, Zea Mays
MDTAKSSPNSTQSPEVTSKELEDGDNVKVKVLSERLSSVVLDIRAKDDLVKQHSKVAEEAVLGWEKAETEIASLKAQLNAAAAKNSALEDRLVHLDGALKECVRQLRRAKDEQDQTVQGALAQQARQWESHKADLELRVVELTARLEAKSERSVAAADCDTGSRLAALEKENSALRTQLLAKTEELELRTIEKELNRRAAETASKQQLEGIKKVAKLQVECRRLQAAAQRRPSVNVELRRSPSSACAESVTDCQSDCSDSWASVLVAELDQFRIDRSGASSRAASLATADIGVMDDFLEMEKLASASKGDAVEDASGQVLRLEEKVKKLAAEKAEREKALHEAQRELRTSRQRVMVAEERSAELQRQLNLANGEKHAMGAEVKAAEAKRGELEGLLELARAEIAGLLDKGRILEERLESEKALTLELAAKYQDMEALRAEKRELSAQLETSRSEAKKLGDKIALMERKLEVEKALSIRLATKCHGIDALEAKKKGVELELETAREEIASLQNKASSLELRRVEEEKASSAALALRCQELDDLRSQLESSNSRIVELNEKVKTLEDVVEEQRPVTVELESQLRSRRAEISSLKEDISLLQKKLESQKNLSSAYISALGASETEKKELASRFELGEKEAEELRGKMSLLEEQIRKEKARSSEFAVKCQKMEEQISCRSLLGHQPVKSSAAIKDLQLRKETELAKAAEKLADCQKTIASLSSQLKSLADFDEFPPETETSGADSDDAWDSDLKLLQPASYPTQIGCLAVT

SEQ ID NO: 46058 - protein, 118 aa, Zea Mays
MATATSSRRVSVPALAAAAVLLLASVAAADDHNGVYDPCADASVQRGDGFTFGVVFSGRDSFSSGGVQLSPCDSRLGLANRAQVALFRPQVDEISLLTVNSSSFDPIWKLLFYTLLLN

SEQ ID NO: 46059 - protein, 829 aa, Zea Mays
MDAYQHQRRFAGAGDAPPPPPHPSHPSAQWYPAPPLPYHPPHPGHPYPPQHHHQWAPPPDMQHQHHPPLPQPYVYQPPPPPMAMQQQPPPPPGNPWPPHHGAGQHPPPTYPPPPPGQAWTNHSWAQNHGYQGQQRETNHLLDRGPMVSPAKNFGSFSSTYEQEVSYNYSSAPGTGNNMLQYPNSQAQPFPTTAAVQGGFSQGCLSMPVPLTEQPLFGHERQPIDPSDQPLEFNSRKAPDLAVHINVNSNIPAPQTLAPNHDVAATSTHSWTPSATVGYLPRAPVPPQTAQMDPSVHAAPLFGAASSSSYVSPAAFGVGNVTEVFPTDPNTPFSVADKSKKPPVPNWLREELLKKKSEPLSASAQNSENLNPMEANEAVQTIGRPDQSDSRSNDSAKSTEDDDDDEDEIEAARMAAINKEIKRVLTEVLLKVTDELFDEIATKVLNEDDSAESNEATGVFGSKETGLGRSRAKASAKVVLPAKSTNSSDHKDSTGLSSPKGALLGLASYDSDDDDDADTDSKDKMPISNLSSKDNAGAVNTEGDKSTLGKRNGNHNEQNSSLGSSPSGEDLKSNNQNFQRNANAEPEQMHIRDTENGEFRFKAKTRTEPKGAFDRMDEKAHTYAEVDIQNRKTSFGNNAEKHNDLESSHRHSEKSSKEDFVNELKADHTKELEYSRAEKYNNDDKYSMYGNIDKRGSCKEGKGSDSAAKHESDTREPHYRGNSKLDGAKGDWKDLPKDRERNRDDRRGKGKDEKDDRLRQMTSHNSRSSRSRSPRGRSRTRKENSHVRGSVSSDEPSDSVKKRKHYSHKTSMSPSPPKSRNRYTVHVVSL

SEQ ID NO: 46060 - protein, 923 aa, Zea Mays
MDAYQHQRRFAGAGDAPPPPPHPSHPSAQWYPAPPLPYHPPHPGHPYPPQHHHQWAPPPDMQHQHHPPLPQPYVYQPPPPPMAMQQQPPPPPGNPWPPHHGAGQHPPPTYPPPPPGQAWTNHSWAQNHGYQGHDNEEDWATKAKAWVAAKSVMGNHQIQQHAISTSRTEGHHNGYHDQYQQPAGLPTEVTEALHPPVPQSSIDHVPFPMTGQQRETNHLLDRGPMVSPAKNFGSFSSTYEQEVSYNYSSAPGTGNNMLQYPNSQAQPFPTTAAVQGGFSQGCLSMPVPLTEQPLFGHERQPIDPSDQPLEFNSRKAPDLAVHINVNSNIPAPQTLAPNHDVAATSTHSWTPSATVGYLPRAPVPPQTAQMDPSVHAAPLFGAASSSSYVSPAAFGVGNVTEVFPTDPNTPFSVADKSKKPPVPNWLREELLKKKSEPLSASAQNSENLNPMEANEAVQTIGRPDQSDSRSNDSAKSTEDDDDDEDEIEAARMAAINKEIKRVLTEVLLKVTDELFDEIATKVLNEDDSAESNEATGVFGSKETGLGRSRAKASAKVVLPAKSTNSSDHKDSTGLSSPKGALLGLASYDSDDDDDADTDSKDKMPISNLSSKDNAGAVNTEGDKSTLGKRNGNHNEQNSSLGSSPSGEDLKSNNQNFQRNANAEPEQMHIRDTENGEFRFKAKTRTEPKGAFDRMDEKAHTYAEVDIQNRKTSFGNNAEKHNDLESSHRHSEKSSKEDFVNELKADHTKELEYSRAEKYNNDDKYSMYGNIDKRGSCKEGKGSDSAAKHESDTREPHYRGNSKLDGAKGDWKDLPKDRERNRDDRRGKGKDEKDDRLRQMTSHNSRSSRSRSPRGRSRTRKENSHVRGSVSSDEPSDSVKKRKHYSHKTSMSPSPPKSRNRRISRSPHSKHSHRRHSPYSSAGR

SEQ ID NO: 46061 - protein, 419 aa, Zea Mays
MIRDLHIAKQTQDIGFYAGFVGASYMCGRAVSSTVWGIVADKYGRKPVIVLTLIAIVIFNTMFGLSSNYWMALITRCLLGIMCGYLGPIKAYATEVCRKEYNHLALAVVSSSRGIGLIIGPAIGGYLAQPADKYPSIFSQTSIFGRFPYFLPCLCISILAVIALIACIWFPETLHKHNGDAVDNSVETVEESLAGTDTEENGGGGCLKLFTNWPLMSAITLYCIFSLQDVAYAETFSLWAVSDRSFGGLSFTTTDVGNVLAMSGLFLFLYQMLIYPFLAKTVDHITLVRAVALLTLPVLASYPFFPSLSGFGLMVVVNCASFLKNTFSVTTITVFNILMNEAVTQDVRAAANGIAVTLMSISKAVAPAVAGIIFSWAQRRQTAAFLPGDHLVFFILNIFTFIGFVFTFRPFFVRGSAKH

SEQ ID NO: 46062 - protein, 533 aa, Zea Mays
MDFMSFGESHRHIGETNMNLYSSRSHTIFRMVIESREKGDDNEVEDFCDAVRVSVLNLVDLAGSERAAKTGAEGVRLKEGSHINKSLMTLGTVIKKLSEGIESQGGHVPYRDSKLTRILQPALGGNSNTAIICNITLAQIHTDETKSSLQFASRALRVTNCACVNEILTDAALLKRQRKEIEELRAKLRKSESDHWEEEILNLRNTLLQSELEKERISLELEEEKKAKEQRDRCLIEQAKKIENLSSLVLNSDRDDRSTAFSKNKRRVTWCPGPNAKQFDIEDLRPVQEGSTSSTVRNERDMGMPPLFEELMQESNDEPCANVYSSGPGNVSKDSEDVPLPDSHALLHVTNRRKPKAMKKSDQEQFRGRAGELLIPQDPCDGNDALRHKNTVPCVVSSLSSRESEAILVIKQLQDQIKLLEAEKSSVQTNLDAVLVLATQQKVSFNEEYEELQQITLAAEEQAKVANENLSTLSATVKSKQELAYEFLGNLLMETQGINVEMDQWRNSVDSALSFIDELFQNLCIMAQGIRGL

SEQ ID NO: 46063 - protein, 299 aa, Zea Mays
MSESELAVIKPEALKTYIWLQCFDGSIQQVEEEVAMFCPMICREIMKNGTGSSKNHAIVLPERVNPASLSLILDYCRFHQVPGRSNKERKSFDEKFVRIDTEKLCKLASAALGLQLRPLVDLTCGALARIIGGKTPDEVRDIFHLPDDLTEEEKLEPLKNLNDDPTIRLLNRLYAKKRKELQERQKLKDVQTQEEQKDERSLDELLCFINGDGDSRGGKASKSKKKNKRRKDQAKNPTKANSEPVNKEGASCVVPCKADNGNISRHPCQSQNLQDTEYPFDNADLDDGLDPAMREEIDR

SEQ ID NO: 46064 - protein, 222 aa, Zea Mays
MRTTLSDNAITNAIDIHRSISGSLHITVSNNDCGVREYDMERYQLVNHYRYNWPVNHTSVSPDKKLLAVVGDDRDALLVDSRNGKVTSTLVGHLDYSFATAWHPDSRTFATGNQDKTCRIWDTRNLSTSLAVLRGNIGAIRCIRYSSDGRFLVFSEPADFVHVYSVAADYKKRQEIDFFGEVSGITLSPDDESLFIGVCDRVYASLLQYRMIRGFDYLDSYV

SEQ ID NO: 46065 - protein, 299 aa, Zea Mays
MSNSTVSHWSSLSHKLSEVLDFSGHVAPAEKYPGSLLEGFSGVQVSTLAVNEGLVVAGGFQGELIGKDVEGCSVKFCMRTTLSDNAITNAIDIHRSISGSLHITVSNNDCGVREYDMERYQLVNHYRYNWPVNHTSVSPDKKLLAVVGDDRDALLVDSRNGKVTSTLVGHLDYSFATAWHPDSRTFATGNQDKTCRIWDTRNLSTSLAVLRGNIGAIRCIRYSSDGRFLVFSEPADFVHVYSVAADYKKRQEIDFFGEVSGITLSPDDESLFIGVCDRVYASLLQYRMIRGFDYLDSYV

SEQ ID NO: 46066 - protein, 92 aa, Zea Mays
MIRAWQAFRTQAAMPRVRRFYPGGFQGEMNRREAALILGVRERATVDKIKEAHRRVMVANHPDAGGSHYVASKINEAKDMLMGKGKSGSSIF

SEQ ID NO: 46067 - protein, 289 aa, Zea Mays
MDKFHLVSTAFLELGQGYQKAIEEITRRMGAGMAKFICKEVETVDDYDEYCHYVAGLVGYGLSRLFYAAGTEDLAPDSLSNSMGLFLQKTNIIRDYLEDINEIPKSRMFWPREIWSKYADKLEDFKYEENTEKAVQCLNDIVTNALIHAEECLQYMSALKNHAIFHFCAIPQIMAIGTCALCYNNVHVFRGVVKMRRGLTARIIDETNSMSDVYTAFYEFSSLIESKIDDNDPNAALTRRHVNSIKQTCKSSGLVKRRGYHLDTSPYRPMLIMIVLLLVAILFGALYTK

SEQ ID NO: 46068 - protein, 60 aa, Zea Mays
MTSWARPRQGVPLLRHVLFHLYYCRLLWFNFSSTNGAHPISLVEAFPNMRFLKVVMISNY

SEQ ID NO: 46069 - protein, 139 aa, Zea Mays
MNLLGNPFTFYIIQFYKLQLLKCHNTTITPLNSSQFYKCHNTSLISFPSELHRIHKLLKGRWRCTKLLIGSASGYKLLSAKSMVMEQSAFVGAGAVSEGKSGTALWMSATILSSRMGRPGQVAPPLPPSRREQSLQREE

SEQ ID NO: 46070 - protein, 78 aa, Zea Mays
MSYGPMPSHANERSRELGLAGCSLVLHICGMEPPPWIIRNEVPGTTADVFYSQIRYSTGPGRHTGHRCYQSNTINPIA

SEQ ID NO: 46071 - protein, 115 aa, Zea Mays
MRNLTRPVDEKDCPLDYQIRCLHTSLEWNAYVAGSVDGVVALKYLDRGTDRDLGYAFRCHPNSRNGKWNLVPVNCISVHPCNRTFVTGDDKGCTIVWDAQLKKKLIEGATPPGIH

SEQ ID NO: 46072 - protein, 143 aa, Zea Mays
MGLISTDMYEDVKASCRGTFFGAVDDLCQEKIDRVRWELKDLNKYNILAPCYHHPEIQEVEFSNSSLPRSFRRLGETDRPFPVRKRMSGRSWPLRLALKDGHVPMWPGLSGRSLPCTSDEVATAWLDDEDVRAAIHAKPVRYM

SEQ ID NO: 46073 - protein, 135 aa, Zea Mays
MADSKAAAAVTLRTRKFMTNRLLSRKQFVLEVIHPGRPNVSKAELKERLAKIYEVKDPNCIFVFKFRTNFGGGKSTGFGLIYDNLEAAKKFEPKYRLIRNGLATKVEKSRKQMKERKNRAKKIRGVKKAGDAKKK

SEQ ID NO: 46074 - protein, 56 aa, Zea Mays
MSSVIVVKHMNCEILQIMAAFFINVIFRYQQPSNGLVYCSGQPVNWYLKRHVCLNE

SEQ ID NO: 46075 - protein, 69 aa, Zea Mays
MDTLQEAPSDFQHPVFNTEEDEHSTKSKGPLKFYNSEIHTTSFCLSSFAKRVIESKAVYRGTSHWNGEC

SEQ ID NO: 46076 - protein, 66 aa, Zea Mays
MLKSASKELLRISRDHLTYKKLLKTLIVQSLLRLKEPAVLLRCRKEDLQLVDLVLESARNEYANKA

SEQ ID NO: 46077 - protein, 495 aa, Zea Mays
MGDRTWQQPHAQASSPDAGTKVQASSSSVHGNIIRKEPAGGGGYDDMAEFDQALFLYLNSSQDQASVIQDQPQTLNIFPSEPMHVVEPAAPKESMGATTNNTAWNNAGAGPSKQPPSNLPSRTTATPAGPRKDGSKPPAAVKREGSSSGGAMGSGTPSTSNQQEGPTRTSDAKTLRRLAQNREAARKSRLRKKAYIQNLETSRVRLAHLEQEVHRSRTQGAVFGGGGLSGSNGGLLSPEAAWFDMEHARWQEEHGKVMRHLRAALEAEYAATATTPAAAAADAQLRQLVDAAAAHHGALAELKAVAASADAFHLVSGAWVSAAERCFLWIGGFRPSELIKIAARHAEPLTEQQAMSVCGVQQWARDAEAALDHELQAMHSSVSEAISSDAAALLYPYSDVPGFMATMSLAISKLASLEAFVRQADALRLQTLHRLPQILTARQSARCFLAIADYSHRLRALSELWHTRQGHERAASTQAARPSQTPPYQSRDGLL

SEQ ID NO: 46078 - protein, 384 aa, Zea Mays
MGCAPVVWAAVWLLAAAVAGFADPGGLERAFPIVKPDYGHTKLQLAKEGLEAIQRIRTPIAAVSVIGPYRSGKSFLLNQLLSLSCDNGFGVGHMRDTKTKGIWVWGSPVEVDIGGSKVSVLYLDTEGFESVGKSNVYDDRIFALATVLSSVLIYNLPETIREADISRLSFAVEIAEEFYGRVKGQDVAFEPAKLLWLIQRDFLQGKSVQQMVDEALQRVPNNNGDTNIDELNQIRDSLAVMGDNSTAFSLPQPHLQRTKLCDMEDQELDPLYVKKRDQLKEVVASMIKPKIVQGRTLNGTEFVSFLGQIVDALNKGEIPSAGSLVEIFNKAILERCLKVYSEIMGRAGLPVSVDELREFHDLAKDEARRLFNKQHFGVQKLGPS

SEQ ID NO: 46079 - protein, 279 aa, Zea Mays
MALEPVARAVAEEVARWGAMRQTGVSLRYMMEFGVRPTERTLLLAAQFLHKELPIRIARRALDLDSLPFGLSTKPAILKVRDWYVESFRDIRSFPEVKNQEDELAFTQMIKMIKVRHTNVVPAVALGVQQLKKDLGGPKAFPPGIHEIHQFLDRFYMSRIGIRMLIGQHVALHDPDPEPGVIGLINTKMSPMTVARIASEDARAICMREYGSSPNVDIYGDPGFTFPYVTPHLHLMIFELVKNSLRAVQERYMDSDKLAPPVRIIVADGAEDVTIKPKE

SEQ ID NO: 46080 - protein, 56 aa, Zea Mays
MSSWLRSAVSRAVEAGGRSGVARAVKGYADTVAHHAGQAVADILHDRMVWDANRTC

SEQ ID NO: 46081 - protein, 154 aa, Zea Mays
MNCPATKQVQQKDHSDPPLYAVTYYNDHSCNSAFLPLSPSEFQLQTSSGKAVSICFDSSSGTAAAAAATTNASGGSPSSSAAAAAARRGTPPEVSNPPVLRRSETYPWGAGAVEQKPASCSTEYHDAFSAGAAAVPEEVVDAGRFGSIRFFHFL

SEQ ID NO: 46082 - protein, 225 aa, Zea Mays
MSGNGALAFDMEYARWLEEHNRQISELRAGVSAHASDTDLRSVVDKIMSHYDEIFRLKGNAAKADVFHVLSGMWKTPAERCFLWLGGFRPSEVLKLLSTQLEPLTEQQLSGISNLQQSSQQAEDALSQGMEALQQSLAETLAGSLSSSGSTGNVANYMGQMAMAMGKLGTLENFLRQADNLRLQTLQQMQRILTTRQSARALLVISDYSSRLRALSSLWLARPKE

SEQ ID NO: 46083 - protein, 136 aa, Zea Mays
MEFFSEYGDANRYKIQEIIGKGSYGVVCSAIDQHTGEKVAIKKIQNIFEHLSDAARILREIKLLRLLRHPDIVEIKHVMLPPSRRDYRDIYVVFELMDTDLHQVIKANDDLTKEHHQFFLYQMLRALKYIHTGMHL

SEQ ID NO: 46084 - protein, 173 aa, Zea Mays
MVGASLYGSRRSKSTAIVDQMYNDRNIFNDPEARGNLLGYQLEVANLVKSDIQYIGENRLQAQHPSVPLPCSVVQLRYYYILCGMGRSQWKDFVAVRFSKTTTINWEYFGLSIEPNGHCDNFFIAGFCQKHFEDVHPRMSKKHFFYPKVGNVSWVWSPGMVLGHGSFFVRLYH

SEQ ID NO: 46085 - protein, 169 aa, Zea Mays
MFGQGTSQEKAILEVNLEAAKQVRPSVTFMISEPCTCCHGTGRVEALDTSFSKIEREICRRLAASRRKSDPEKPKSWPRFLLRVDHEMCTYLTSGKKTKLGLLSSSLKVWILLKIARGFSRGAFELLPYSEKENYSMEKETSELPQKESRPKLSVFPIKKWMSRAKRAK

SEQ ID NO: 46086 - protein, 127 aa, Zea Mays
MAAAACSSASPLLLPSGPRHASASRAWFLGGRSRALRSEAPCCCKAAAARGSAPQCGTVGGGSSSTRRGLLGVALGASALGLAAFDAVAAGLPPEEKPKLCDAACEGAYGNYRIRTAVQGYQSGRRA

SEQ ID NO: 46087 - protein, 614 aa, Zea Mays
MYQQKQGLVHAYATKILTSKCQPQESLIIKFCRHNCSSLSLGSKLEACKLVVPFSNLVCKCESLWILSMLKLWNGSEKVGKSQGFLCDGVSYTSSTKRIISSEDLDFILVGSIKTSPLSGRLQLVDSTGCIDVFIPDLPPNESLHDIYEIVNYKLALEGPMAYIDHYDVADALSCKAVFQKLPYKKRLHHLNIYVIVQWRQLIHIGPSSCIPSYINYRIRLFHLLKLSHIFPVNSNIQCSNMPGSSLYAEAVILPYVLKFIGQGEFLEHAEGFIMSHSTLLGNSEASVAKSCNIPCSLSFGSTNLCGTLVSTYASGSEGTVLNEPIVLRKEYSRILLEFEAGIFKKYQLPRINGSYILQCPSRSFTCTMGNCGCLQGGKVSIDAQDRLWSFAITIGGNINIKGSIGDQSIGVTSMKMDEIFSRNMVDDELRLVQPWNDFYRNSYFHLDFSYEAISKKMEDYNTVCHVLNGLCVSSSEVLSVSSCVDIMMPKDASVSADFKTKEVVHGDLLISVQGKVENIHSLVCKWERCIPGNEKYSLCIHIADNNHAVYIRGYSNKHFTVGIGPGATVTFHRIRFKQHGLFLTSETYIELHRACSFIRSILQTVDPCNFTAG

SEQ ID NO: 46088 - protein, 601 aa, Zea Mays
MYQQKQGLVHAYATKILTSKCQPQESLIIKFCRHNCSSLSLGSKLEACKLVVPFSNLVCKCESLWILSMLKLWNGSEKVGKSQGFLCDGVSYTSSTKRIISSEDLDFILVGSIKTSPLSGRLQLVDSTGCIDVFIPDLPPNESLHDIYEIVNYKLALEGPMAYIDHYDVADALSCKAVFQKLPYKKRLHHLNIYVIVQWRQLIHIGPSSCIPSYINYRIRLFHLLKLSHIFPVNSNIQCSNMPGSSLYAEAVILPYVLKFIGQGEFLEHAEGFIMSHSTLLGNSEASVAKSCNIPCSLSFGSTNLCGTLVSTYASGSEGTVLNEPIVLRKEYSRILLEFEAGIFKKYQLPRINGSYILQCPSRSFTCTMGNCGCLQGGKVSIDAQDRLWSFAITIGGNINIKGSIGDQSIGVTSMKMDEIFSRNMVDDELRLVQPWNDFYRNSYFHLDFSYEAISKKMEDYNTVCHVLNGLCVSSSEVLSVSSCVDIMMPKDASVSADFKTKEVVHGDLLISVQGKVENIHSLVCKWERCIPGNEKYSLCIHIADNNHAVYIRGYSNKHFTVGIGPGATVTFHRIRFKQFAPSLLVFFNCFFHYFVRIVAA

SEQ ID NO: 46089 - protein, 429 aa, Zea Mays
MRSLLLPRRCAFASRRFLSALAGSGARAPCAGVVYGFGDNSHGAVGQPPPAAHAYVPTPVPSLPPSVSAVAAGHYHSLAVSAAGEVWAWGRNDEGQLGRGLHSPRNTWSNAELVRGLENVQVQAVSASGVVSAAIGSDGSLWVWGRSKRGQLGLGKDIVEAAVPSKVKALASYDIVKDGKLFGWGYSENGRLGEMGQSTRALSAEEYIGKTVDKYSSVMLEAVEKMVEEKIQSEDDMPIIWEPSLVHEVSRLEVSDVSCGLDHSLILCSDGIVLSGGDNTYGQLGRKAGPPELLPVGMSYRPFSMSASVGHSLALCYTTTEGTAGVETGLLSWGWNCSSQLGRSSQEDIPALVDSLSRERLVSASAGRVHSVALTSKGEVWTWGSGRNGRLGLGSSIDEAAPCLVDTLEGVEVLQVAAGMDHNLLLVAE

SEQ ID NO: 46090 - protein, 533 aa, Zea Mays
MAARGVQAPAPRRPVTLRDFLELGCDSSSDGFRSYPRRLLPLPPDAVLHLQQQQAPPTPRAEAAAAQRLLRRSSSSLALALFSSSLPGSGSGSGPAGALARISSISRSFSRRIKEGFWRRRDEDEGDGDGDDDYDGDYFDDRDSCGFPSPLVSSCSASDSDESEADVTTAPERNKATASSSTSPSPSPSSADHDRTRTDAAVADGDKAETAAVEDGDSTTGAPSTVGDKQQQLSPVSVLDFAFDDNDGEEEGSDAGTSCSCSSPAFQFQRCTPPAVDLHGTKPQAQLLHKIRRYDGVAQGIDPVDLDARFTAATSESGESADASTRLATTTSSSSTDTSSSSSSSAETTAPQHDDEEAEHQSAERALSPSPSLHYQADQEEPDDEYRLLARLLEHDAAAAECLDDEVARVLVLDFFAEGADRRLTRSAAAGGRPLHDDRSESLLVRAAAAWLRGAGPRWGIGDVARSGKAALDDMERSRRWMCVGEEECDVAADVECDAVDALVDELVTELAIVLPRWPRCDVAVDDDNVLVD

SEQ ID NO: 46091 - protein, 129 aa, Zea Mays
MQCKFLSRLFPAVCLWNQQMLPLGHRACGCWQVPSAKCSEPPTNGEVGKALQTLLLQGPPEFAVRFRPDNIIVYSRAPRQQGESPAPASEFIEKVTKKIDTLVPVPIIQKRRKKMNYPTRLPRRTRRIA

SEQ ID NO: 46092 - protein, 658 aa, Zea Mays
MSLGAEVIELSSDEDEEPVPSTTALIHHAPSSPPDVKPHLLADVDVKPLLLLPPPLHPPGYGALVPVKTEEPVPVATVSSPPRALPPPRLCRQFWKSGDYVVARRNPDVAGPGGRNRLRINPKFLHSNATSHKWAFGAIAELLDNAIDEVNNGATFVRVNKFKNPRDGNPSLLVQDDGGGMDPEALRRCMSFGFSDKQSDAFIGQYGNGFKTSTMRLGADVIVFTQNQNNWVPTRSIGLLSYTFLMETGCDDVLVPTVDYQYDLTTTSYVQMLRHDQKLFSSNLAILLKWSPFSTEAELLKQFDDMGDHGTKIIVFNLWFNDDGDMELDFNSDKKDILITGAHKKVKTNSLDKIAAQNYVSTRLRYSLRAYASILYLHVPDTFRIILRGCDVEPHNVVNDLMYRECVLYKPQIAGLTESSVITTIGFVKGAPDIDVQGFNVYHKNRLILPFWKVANNSYGKGRGVVGILEANFIKPTHDKQDFEKSVLYQRLEFRLKEMTYEYWDLHCHRVGYDNKKLPKATRAINRANHMNGGSSPTSAPPRLLAVDIPTSSSSIPRLSASAAREKISSLDSLPKSMIGLKRKFNPFGAVAASADQDGLHHMDKIDVSQRRRFNEYKTLTLENDKLRNECLQYEGSEKQLVLKPWLVERLKWLACKI

SEQ ID NO: 46093 - protein, 405 aa, Zea Mays
MLRHDQKLFSSNLAILLKWSPFSTEAELLKQFDDMGDHGTKIIVFNLWFNDDGDMELDFNSDKKDILITGAHKKVKTNSLDKIAAQNYVSTRLRYSLRAYASILYLHVPDTFRIILRGCDVEPHNVVNDLMYRECVLYKPQIAGLTESSVITTIGFVKGAPDIDVQGFNVYHKNRLILPFWKVANNSYGKGRGVVGILEANFIKPTHDKQDFEKSVLYQRLEFRLKEMTYEYWDLHCHRVGYDNKKLPKATRAINRANHMNGGSSPTSAPPRLLAVDIPTSSSSIPRLSASAAREKISSLDSLPKSMIGLKRKFNPFGAVAASADQDGLHHMDKIDVSQRRRFNEYKTLTLENDKLRNECLQYEGSEKQLVLKEQKLRSEIAEVEKKYQELLGELRSLDVKKEKQ

SEQ ID NO: 46094 - protein, 406 aa, Zea Mays
MLRHDQKLFSSNLAILLKWSPFSTEAELLKQFDDMGDHGTKIIVFNLWFNDDGDMELDFNSDKKDILITGAHKKVKTNSLDKIAAQNYVSTRLRYSLRAYASILYLHVPDTFRIILRGCDVEPHNVVNDLMYRECVLYKPQIAGLTESSVITTIGFVKGAPDIDVQGFNVYHKNRLILPFWKVANNSYGKGRGVVGILEANFIKPTHDKQDFEKSVLYQRLEFRLKEMTYEYWDLHCHRVGYDNKKLPKATRAINRANHMNGGSSPTSAPPRLLAVDIPTSSSSIPRLSASAAREKISSLDSLPKSTVIGLKRKFNPFGAVAASADQDGLHHMDKIDVSQRRRFNEYKTLTLENDKLRNECLQYEGSEKQLVLKEQKLRSEIAEVEKKYQELLGELRSLDVKKEKQ

SEQ ID NO: 46095 - protein, 519 aa, Zea Mays
MSLGAEVIELSSDEDEEPVPSTTALIHHAPSSPPDVKPHLLADVDVKPLLLLPPPLHPPGYGALVPVKTEEPVPVATVSSPPRALPPPRLCRQFWKSGDYVVARRNPDVAGPGGRNRLRINPKFLHSNATSHKWAFGAIAELLDNAIDEVNNGATFVRVNKFKNPRDGNPSLLVQDDGGGMDPEALRRCMSFGFSDKQSDAFIGQYGNGFKTSTMRLGADVIVFTQNQNNWVPTRSIGLLSYTFLMETGCDDVLVPTVDYQYDLTTTSYVQMLRHDQKLFSSNLAILLKWSPFSTEAELLKQFDDMGDHGTKIIVFNLWFNDDGDMELDFNSDKKDILITGAHKKVKTNSLDKIAAQNYVSTRLRYSLRAYASILYLHVPDTFRIILRGCDVEPHNVVNDLMYRECVLYKPQIAGLTESSVITTIGFVKGAPDIDVQGFNVYHKNRLILPFWKVANNSYGKGRGVVGILEANFIKPTHDKQDFEKSVLYQRLEFRLKEMTYEYWRTVHHYIKENKNGLR

SEQ ID NO: 46096 - protein, 146 aa, Zea Mays
MEWRGIPTRLNNIPHSREIREYFYNDVLKATKLAIEDKKTRLQIDINIPELNPEMDVYRIGTLMELVRELSLSFADDGKRVKVCVQGSMGQGAFAGIPLQLAGTRKILEFMDWGDYGAKGTFINIGAVGVYVLPTYSILQTISIIK

SEQ ID NO: 46097 - protein, 98 aa, Zea Mays
MPHDRREEIGKKAKEYMDNGKLVPDQVVTDMVVSRLSQPDIQERGWLLDGYPRSFSQAQHLENLKIRPNIFIVLEMCWKTAGSCDWQDLPFKKLPPGE

SEQ ID NO: 46098 - protein, 445 aa, Zea Mays
MSVSSPAMASPPLAAPGTHRGPCFSTLCRLPSPSCYPPLSASSSPAISTVSAFAVLKHKPRGLGLRCQAAEEAPPPARGKTSLKVMISGAPASGKGTQCRMIVEKYGLVHISTGDLLRAEVSSGTEIGKKAKEYMDNGKLVPDQVVTDMVVSRLSQPDIQERGWLLDGYPRSFSQAQHLENLKIRPNIFIVLEVPDDVLIDRCVGRRLDPVTGKIYHLKNYPPENEEISARLITRSDDTFEKVKSRLDTYKQNSEAILPTYSDLLNKIDGNCPAEVVFQAIDFLLQKICENTSASKLTKTNGKRPDSADTGSKNEWRGIPTRLNNIPHSREIREYFYNDVLKATKLAIEDKKTRLQIDINIPELNPEMDVYRIGTLMELVRELSLSFADDGKRVKPLDTRSVFKAPWGKVHLLASHFNWQEPEKFWNSWTGVTMGRRAPSLILEQ

SEQ ID NO: 46099 - protein, 436 aa, Zea Mays
MAGIDLNDTVEEDEEEAEPGNACSQQSRTSSAATFPPPPPNQPRPSAAVCLELWHACAGPVAPLPRKGSVVVYLPQGHIEHLGDAAAAGGGAPPPVALPPHVFCRVVDVTLHADASTDEVYAQLALVAENEDVARRLRGRSEDGSAEDGDEGETVKQRFSRMPHMFCKTLTASDTSTHGGFSVPRRAAEDCFPPLDYSQQRPSQELVAKDLHGTEWRFRHIYRGQPRRHLLTTGWSAFVNKKKLVSGDAVLFLRGDNGELRLGVRRAAQLKNGSAFPALYNQCLNLGSLPNVAHAVATKSVFHIYYNPRLSQSEFIIPFSKFIKSFSQPFSAGSRFKVKYESDDASERRCTGIIAGIGDADPMWRGSKWKCLMVRWDDDVDFRQPNRISPWEIELTSSVSGSHMSAPNAKRLKPCLPHVNPDYLVPSLARSRITGL

SEQ ID NO: 46100 - protein, 1191 aa, Zea Mays
MLVSVAADDSGWQESPSQAVLFADEIAAVRAVLGGTLSEASIIAALSQCGGNAERAINAILDDAEVVSAPKRAKVELDVGGVPVQVPVAVKVKAESIDVGAVAPAAVKVKAEPIDGDVVGSQQSDGSSAKATAKMKSEPAEWSAKTPDRFVPDARSVGAPVAVASAGAGISIVPRQNKRPRQEVGTIELTTTHPVPYLNSRPIRALPPMPPMGGDGEVYDPKPIQMVPPLEIQMHDPRTTLPAPSPIDIEMYQQPPRPPPVDVEMCEQRSRPRPRPLRAVVPASVTDMRMVVAPPDGEFGDFPVERDWMLVGKSYVPGLSTNRGRRRLDAGEIVHFAFPSYEKIYGGLKMTAKKAAALAQIVRFSTKRAGEIGKLSPEWTQCLVPLVNSSKVKIQGKLVFPTMELRLMQEILLYVSFYIHKSVLAEMDNSPCDMLDHANVDFTPSPLHKLLSLLNLKPSNKDAFSLDDLTTRKLKQILRGNNNNGDDSTPVLGHTFLEQGADEQAISEAALNKLVGTAETFDLEEAEPPTTLVSVLKPYQKQALFWMSKLEKGIDANEETKTLNPCWSAYNIADRRAPPVYVNLFTGQATTQFPSMTETVRGGILADAMGLGKTVMTIALILSNPRGEFSNCIKGDTRYLGDRATRGYTSTSSVRGGTLVVCPMSLLGQWKDELEAHSAQGALSVFVHYAGDKTSSLMLMAQHDVVLTTYGVLSAACKTECNSIFHRMDWYRIVLDEAHTIKSPKTKSAQAAYRLKSECRWCLTGTPLQNNLEDLYSLLCFLHVEPWCNAKWWQRLIQKPYENGDDRGLKLVRAILRPLMLRRTKETKDKIGNPILVLPPARIEVVECEQSEHERDFYEALFRRSKFDKFVAQGSVLNNYANILELLLRLRQCCDHPFLVISRADPKKYADLNQLAQQFLEGVQQSSSGRQNVVPSLAYVEGVVEEIRQGATMECPICLESASDDPVLTPCAHRMCGECLVSSWRTPDGGPCPLCRRHISKSDLIILPAQSRFQVDAKNNWKDSCKVKTLVTMLESLQRKQEKSIVFSQFTSFFDLLEIRFTQKGIKFLRFDGKLSQKHKEKVLKEFSESQDKLVLMMSLKAGGVGLNLTAASNVFMMDPWWNPAVEEQAIMRIHRIGQKREVRVKRFIVKGTVEERMQQVQMRKQRMVSGALTDEEIRGARIEHLKMLFK

SEQ ID NO: 46101 - protein, 171 aa, Zea Mays
MLVNLGVPWVILGHSERRALLGESNEFVGDKVAYALSQGLKVIACVGETLEQREAGSTMDVVAAQTKAIAEKIKDWSNVVVAYEPVWAIGTGKVATPAQAQEVHASLRDWLKTNASPEVAESTRIIYGGSVTAANCKELAAQPDVDGFLVGGASLKPEFIDIINAATVKSA

SEQ ID NO: 46102 - protein, 988 aa, Zea Mays
MASPSPASARPQRSPDEVEDIILRKILLVSLTPPANPSPAVAYLELTAAELLSESRPLLALRDAAERLLIDRLSLPDPPAGSPTPFAYLVSAFRRAADEARKISTIRDAALRARLAASIAHLRALILSYARIVAGNPDTFPTPPGAQHPASDLLVFLLAEAADPLDPTPAPGAPPPPGFIDEFLGSADYDSIEPAMGELYELLRQSVDKVSALGDFQRPLRLLRRLVGIPNCAKALVNHPKWIPKNQIMLIGEGRVMELYSVLGAFFHVSAIRDREFASKPDVGQQCFSEASSRRPADLLSSFTTIKSVMNGLYDGLKDVLLILLKNLDTREKVLEYIAEVINKNASRSGMQVDPLKCASSGMFVNLSAVMLRLCEPFLDNMEAKKDKIDVNYLFCNNRIDFKDLTAINASSEEVSSWIESINNEHAQNNASGEARFAESQEATSSGKNSTASQLRCSKKENFSFICECFFMTSRVLNLGLMKAVSDFKHISQQLSRFEDDLESNRAVRDQGGGSPQLEQDITRLEKIVEILSQDKFCYEAQILRDGAFLQRALSFYRLMILWSVNLVGGFKMPLPSQCPKEFACIPEHFLDDAMDLLVLTSRIPKALESFVLDDFLSFIIMFMGSTSYIKNPYLRAKMVEVLNCWMPQRSGLNSTASLFEGHQLCLDYLVGNLLKLYVDIEFTGSHTQFFDKFNIRHNIAELLEYLWDVPSHRNAWRQIAKEEEKGVYLNFLNFLINDSIYLLDESLNKILELKEIEAEMANIVEWERRPAQEREERLRVFHQWENIVRFDMRLANEDVGMLAFTSEQIPAPFLLPEMVERVASMLNYFLLQLAGPQRKSLTVKDPEKYEFKPKQLLKQIATIYVHISRGDKESVFSAAISKDGRAYNDQLFSSAANILWKIGGDPKIIQEFVQLAGRAKAAASEAMDAEAILGDIPDEFLDPIQYTLMKDPVTLPSSKVTVDRPVIIRHLLSDSIHLTAPTSLKTC

SEQ ID NO: 46103 - protein, 336 aa, Zea Mays
MASQFEQASQQQLQHKNMATSSTPRTGKALDPKVIRRLAQNREAARKSRLRKKAYIQQLESCKLKLSQMEQDMQRARTQGLFLGGDPGASTSSGAAMFDVEYARWLDNHSRRLAELNGALHAHLADGDLRAIVDDALTHHDELFQLKAMAAKSDVFHLITGVWTTPAERCFLWMGGFRPSDLLKTLLPQLDPLTEQQVVGICSLQQSSQQAEEALSQGLEQLHQSLADTMAGGSLTDDANMSFMSQMALALGKLANLEGFVIQADNLRQQTLHQMHRILTVRQAARCLLAIGEYHNRLRALSSLWASRPREILVTDEGNCEISIAAQPSQNQFSTF

SEQ ID NO: 46104 - protein, 254 aa, Zea Mays
MGDTSSSSHSRQDPSLLGYGFHGAIANSTPPANFFDQGGGGTYFGELEEAFMHQVASLRRTQQAATVSAPHHGDTKPFPTAAGATAATATATARPPPTLDIFPAWPMRSRLHTPKECSNVTADSTDDSESSSKNHSNHSSDQLGAAAAANMASQFEQASQQQLQHKNMATSSTPRTGKALDPKVIRRLAQNREAARKSRLRKKAYIQQLESCKLKLSQMEQDMQRARTQVHFLVPTPSALFGYSSIDLNPHVLS

SEQ ID NO: 46105 - protein, 207 aa, Zea Mays
MATKLVVLGIPWDVDTEGLREYMAKFGPLDDCVVMKERSSGRSRGFGYVTFASADDAKNVLDCEHVLGSRTLEVKIATPKEEMKSQGTKKATRIFVARIPQSVDESMFRRHFEAFGEILDLYMPKEHGSKGHRGIYHFVSCCDFGFVVIHIIDKMKAVLVVTVWKCCMCNKKVSFAKKVITPSDEVPARLYTLALFQYTVTSTSLFL

SEQ ID NO: 46106 - protein, 705 aa, Zea Mays
MPQVKSSYDGAGGDYIKWMCGAGGRPGGAMASLHRGVGSLVRDISDPCLNPSPVKGNRMLKPERWHACFDSDGKAICFRKALKFIVLGGVDPSIRAEVWEFLIGCYTLSTTAEYRGKLRAARREKYRYLIKQCQSMHTSIGTGELAYAVGSKLMDVRTLPKETEGGEVSTSQQAEHEVPCSLAENSNLIYGSGCTTRPHKRKICSKSAETVGFNQHNDNSRGSGDCDVIGEPRYDSDAFIDFPSLTGTNLVANGDGDSNGVEENPCNFLVSEHRVRPHDEHMHSFQINNNIDLIIESNTFSNDIFRPSSSDSAIFHSDAYKHDRWLDDTGYSEEIIDSLRISDAPESDLVDGMKSNGSIADKDRVSEWLWTLHRIVVDVVRTDSHLDFYGESRNMARMSDILAVYAWVDPSTGYCQGMSDLLSPFVVIYEDDADAFWCFEMLLRRMRENFQMEGPTGVMKQLQALWKIMELTDAELFEHFSAIGAESLHFAFRMLLVLFRRELSFEESLIMWEMMWAADFDEEAVRHLEENCLEPLLVDLSNGLSSEVKEVHRINSSTRRKPRTRKCHSRNGEICGACHPGMKSSTRNHLCGLSGATIWARPQQMPHPSASVLAKGGDYELPIFCVAAILIINRQKIIRGTHSIDDAIKMFNDNVLKINVKRCVRLAIKLRKKYLYKVCWISIDLKYGTCPRSGIIQDCKMKLWN

SEQ ID NO: 46107 - protein, 70 aa, Zea Mays
MEKNTPLHWACLNGRIEVIRALISAGASVSALNSHEKTPMDEAVTTGKMDVIDAIGAAVAQAELDAVTVS

SEQ ID NO: 46108 - protein, 326 aa, Zea Mays
MATTTAAARWSFPARLQLLTSRRFCFPASSAAPPSSVAGFSWADALRVAGDGGRGDESDLSGYFRKVKSCNRGMDKKGQFVKFSVEDQVVGYIHKGFIEHIRDFHDVFTIVMDDNGSNTVEHVSLQSSLRTPEDRTHAIGSVIKSLGELIPGIRNEAYGVHMNGYVEKDGQKFLWIGKRSDVKQTYPGMLDHLVAGGLPYGMSCKENIIKECEEEAGITRSISTNATSVGAVSYMDIEGFRYKRDVLFCYDLQLPADFVPNNEDGEVDSFRLVPVIHAANIIRRTDFFKPNCNLVIIDFLFRHGYINPDSRCYLDLLQSLRSGDCS

SEQ ID NO: 46109 - protein, 356 aa, Zea Mays
MNHPKGFTVDDRGNIYVADAMNMAIRKISDTGVTTIAGGKSIRGGYIDEPSVSDDAKFSTDFEVQYISSTCSLLVIDRGNQAIREIPLNDDDCAYQYEAGFPLGFALLCAAGFFGYMLALLQHRLLGMPSTINKPQAPPRPSIASIPPYQKPLNPYVRQPFIPREETARQEPEEGFFTSAGKLVGGAKSSVAEVFGFKKKSLSNPYHQQQRRANPWPVQESYAIPHDEPPPALDTRAPAPQKNYSSEKIHYVRHGHPYFNSWDGHRLPQQQPDQQLYHQQQQQHLQQHRQCSAGPQTFYEQSCEATNEVVFGAVQEVDSKRRMVEIKAVNYGDTFYEQYGMRYRNNFIGYNNTNNY

SEQ ID NO: 46110 - protein, 505 aa, Zea Mays
MTQAKPAPSGKRNWSSGGTAAGRKNKERGDDKAKGIRVAGWNKGDKKKEDKGRQVSAGSKRRWSEGVPRVGVKRAVSGFDRRKRKIDDDSWDDDGGKDVSSSKSKFTRKCSSTISRRKVSPGKGDRLKSQTLYEDDYRAGKRSISKVSDVSRGVKNRLVNSVASKGKKLGASEGVIRTKKGGAKEVDLDEEAVNSKKSDDLDLIIEEEKPRPRLTRVLDQTGKKIKPAKKVVVPDNEERAPPKKRKRMKLDPYDTSNKRIEDSSIQDGRRRLIEIKNAGYNVKISAPLDNVPFSTSTERERIEDIAFRNKLEFFAAAKISSSFPTPTLPEIAFAGVSNVGKSSLLNSLTRQWGVVRTSDKPGLTQTINFFQLASKLCLVDLPGYGFAYAKDEVKESWEELVKEYVSTRVGLERVCLLVHTKRGMKPLDYELVDLMERHKTPYQIVLTKTDLVFPIDVARRAMEIQESLKRNKSVVNPVMMVSSKTGAGIRNLRGVLGKLARFIKP

SEQ ID NO: 46111 - protein, 273 aa, Zea Mays
MTQAKPAPSGKRNWSSGGTAAGRKNKERGDDKAKGIRVAGWNKGDKKKEDKGRQVSAGSKRRWSEGVPRVGVKRAVSGFDRRKRKIDDDSWDDDGGKDVSSSKSKFTRKCSSTISRRKVSPGKGDRLKSQTLYEDDYRAGKRSISKVSDVSRGVKNRLVNSVASKGKKLGASEGVIRTKKGGAKEVDLDEEAVNSKKSDDLDLIIEEEKPRPRLTRVLDQTGKKIKPAKKVVVPDNEERAPPKKRKRMKLDPYDTSNKRIEDSSIQDVQRRFS

SEQ ID NO: 46112 - protein, 616 aa, Zea Mays
MFYICSGPWGLPCLQRDTPCFLGSPQSASLAVDCGSSRSISGSDKSMYQRDDANLGAASYYVTGAQTWGVSNVGKFTEAVYESYIISSSRQFYNTLDPELFQTARMSASSLRYYGIGLQNGNYTVALQFADFDFEDSQTWQSVGRRIFDIYLQGERKEKNFDIMKAAGGKSYTAVEKQYIVPVTRNFLEIHLFWAGKGTCCIPFRGYYGPAISAFSVTPMQTSRKTGIIVGVVVGAAVLGVLALAGLCMRRQKRRKLLLEQQELYSIVGRPNVFTYGELRTSTENFSSNNLLGEGGYGSVYKGKLAEGRVVAVKQLSETSHQGKQQFAAEIGTISRVQHRNLVKLYGCCLEGNKPLLVYEYLENGSLDKALFGSGRLNLDWPTRFEICLGIARGIAYLHEESSIRIVHRDIKASNILLDANFNPKISDFGLAKLYDDKKTHVSTKVAGTFGYLAPEYAMRGHMTEKVDVFAFGMVILETLAGRPNFDNMLDEIKVYILEWVWQLYEDKHPLDMVDPKLEEFNSGEVIRAIHVALLCTQGSPHQRPSMSRAVSMLAGDVEVGEVVNKPSYITEWQIKGGNTSSFMSNNVSGQSSMAPRSSASHTSSPFLNSVIEEGW

SEQ ID NO: 46113 - protein, 670 aa, Zea Mays
MPVAALRPPPVAVGAGRRSARLQARFALRASSLEASAAVTVTVNGSAEAAVERKEKVQEDKDNEGLPVKEEQERGLEVLYDDGFGSVTVKDYFAAAKVLCRDDGGPPRWFSPVECGHPAVDQAPLLLFLPGMDGVGTGLILHHKSLGKVFEVRCLHIPVNDRTPFEGLVQIVENLIKHEHDLSPDRPIYLVGDSFGGSLALAVAARNPQIDLVLILVNPATSFAKTPLQPVLPLLESVPSEFHATVPYLLSFVMGDPLKMAAVSIENNLSPPETLQKLSDSLTSMLPLLSELSDIIPRDTLLWKLKLLKAGAAYANSRLHAVQAEVLLLASGKDNLLPSGEEADRLFKALKNCRVRYFKDNGHTLLLEDGVNLLTVIKGANMYRRGRQRDSVTDYLPPTLSEFRQTFDVDHRLFHLALSPVMMSTLKDGKIVRGLAGVPDKGPVLFVGYHALMGIELSPLYEEFLREKRTVVRGMAHPFLFGKKLFQRNQFVLLYPGGVREALHRKGEEYKLFWPDQPEFVRMAARFGVTIIPFGCVGEDDVLELVLDYNDQKNIPGLREWIQSINKEAERVSVKGEDGNQDMYLPALLPKVPGRFYYLFGQPIEMKGMGNLVRDRKSANEVYLRIKSQVEEIMSYLKRKREEDPYRSLPQRALYQATWGASAQVPTFEP

SEQ ID NO: 46114 - protein, 187 aa, Zea Mays
MGKRPPTDPKRFGDTSNAGSSSGWTDEKHMLYITFLEESFVNQLYSSKGEMNSAESFYATPGAWQKSSYSGNGRNTKYDEGHGYWGTVEVDGDGADYMDDDASTNGPRQERDTSYHARQRNSRGSAAFRLRQHGHSFSWRESSDQNFLDGETQGSKEQGRGSSKNQQKHADTTKVAKFSISLSVSMS

SEQ ID NO: 46115 - protein, 183 aa, Zea Mays
MGKRPPTDPKRFGDTSNAGSSSGWTDEKHMLYITFLEESFVNQLYSSKGEMNSAESFYATPGAWQKSSYSGNGRNTKYDEGHGYWGTVEVDGDGADYMDDDASTNGPRQERDTSYHARQRNSRGSAAFRLRQHGHSFSWRESSDQNFLDGETQGSKEQGRGSSKNQQKHADTTKEISHPHGEA

SEQ ID NO: 46116 - protein, 604 aa, Zea Mays
MNHQFAAGIQTIAIIPVLPRGVLQLGATSVVMENTNLVLQYKNLCSQLNNRSSMASSSSVKNDLNQKIQSRPLNGLTSIHPADTRSKFFSGPPLTYQQCYGPDGRTVSSSTLANMGSNASMLMVAQRNGQVGKEHIVYAPDMRFRPQNPYCDRRVGSNTQNSVVSSGFISSISASMERHPLMTNNRQLEQGNTGEPSDSRSVLLKSLAYHNPLVHENTNMTLLHGRGQVPGFVNGHGGFDFLPEGTRVVKSNLYGSTTNQILDQICSSTSGMKGHGPTISYKIPQPTQFVGKTESSKRETCQASVALLSDSDIQVSSVLKTAISQENQTSRSDLIGSKKANEVHDPTDAIVQAVKNMDRRRLPDISNERSPPFLMDPAAESDLFDMFGSEFHHLCHNVDNDLTWKAAKPENSNRDVPEFSDHLGSSPAFNSVDDEFPYSGIFSLTDTDQLLDAVVSNANPGGKQISGDSASCKTSVTDIPSTSYCRLKEPKQSESSAPPLLIKNELAVSNFVKHPSFPEKAADGCLSQNNAIQKSQIRLWIESGQNLKCESASASNSKGVDTSSKASRKRSRPGENPKPRPKDRQLIQDRIKELRELVPNGAKH

SEQ ID NO: 46117 - protein, 602 aa, Zea Mays
MIPQARGTTSRGPNLQFHAETCHLLLRYEPVGSQVRFTLGSLARSLARTDNLGGRLAATAHLCCGLPPLFAPAPVVGEPRPSTLSPMASAAARGAAVRSPLLVHHRVPLVHPSGGGSLRVGWPGIGPGREGRRRGAPVGARVFARYSQAQDFSTRLQDRAGELPKLVEDLIQTSISTGPRGAFRMAQGIQAVLGVGGEWLNDLSKTANTSAGIPSQMQLGLLSPLYLRRLFERMGATYIKLGQFVASAPTLFPAEYVEEFQKCFDQAPAVPYDVIESILREELQRPLDSVYEYIDPVPIASASIAQVHGARLKSSQKDVVIKVLKPGIVKDIKESMLEEVDFRKEAANIQAFQGYIDAMGFDRQAKAPFVYQHCSTKRVLTMERLYGVPLTDLDSIRSLVPDPELTLVTALNVWFGSLISCESFHADVHAGNLWLLRDGRIGFIDFGIVGRISPRTWAAMEVFLASFATEDYDAMASALSEMGATGNDINTNEFAKDLRKIFSSIQDLDTEIIVATARTPDATAVSANVVLDERQMNALFLDLVRVSESYGLKFPREFALLMKQLLYFDRYTRLLAPSMNMLRDERINISTNRQPRRTDRFQ

SEQ ID NO: 46118 - protein, 404 aa, Zea Mays
MAASSPRKRLPAARLIFALLLMSSVLPRDAGAVELGLKLPFSPGDVLPVLPRQVAWPVMNTLHSAVDLLPSFVAAVAPGAPAPAAWKGACFSENEAAIELTPGDRNGTDVGGAVLRLKTASAHSWACMDLYVFATPYRITWDYYFAAREHTLEIKSWEEEAELKYVKEHGISIFLMPSGMLGTLLSLIDVLPLFSNTAWGQHSNLAFLEKHMGASFEKRTQPWVANIRKEDIQSGDFLALSKIRGRWGGFETLEKWVTGAFAGHTSVCLKDEKGDLWVAESGYENEKGEEIIAIVPWDEWWAMALKDESNPQIALLPLHPDVRARFNESAAWEYARSMVGNPYGYHNMIFSWIDTIGDNYPPPLDANLVMAVMSMWTRLQPVYAANMWNEALNKRLGTEVVDYC

SEQ ID NO: 46119 - protein, 201 aa, Zea Mays
MKIIPVPCLDDNYAYLIVDESTKKAAAVDPVEPEKVLKAAGEVGAYVDCVLTTHHHWDHAGGNEKMRLQVPGIKVFGGSLDNVKGCTDQVENGMKLSLGKDIEILCLHTPCHTKGHISYYVTSKEGEDPAVFTGDTLFIAGCGKFFEGSAEQMYQSLIVTLGSLPKSTRVYCGHEVQSLFSVSLRRNLNASGPLNLYGGCI

SEQ ID NO: 46120 - protein, 461 aa, Zea Mays
MYSTTILRATMASTVKAGPCTLRGSAKLIRTSSCRSPRWIATSSTMCRSSRGPSGRGSLPAHCQPRGTLTPLPLYWTSMGFKNFSKTARELVQRMQRIDSDYYPETLHQMYVVNAGSGFKLIWNSVKGFLDPKTSSKIHVLGSNYQSRLIEVIDSSELPKFLGGSCTCSEKGGCLRSNRGPWNDPVIMKLIHSMEGGSTREIKQVSDGDERSGSSLRAENLKGMLSDISNAESESDVDDVGLTVVQKSTDHSLLTPVHEEVKGSDTSIFCSSSSKHLLDTTPGAPQATPQMEMPIQLTCRKYFPTFGWLNNLGNAYISLHGTSAGRTLENLATGLITLLIRISSFFHLSVYRQERFIETVQPCAAAQEPEPQREEDMSACLRRLKKLESLCDHLMSKPPDMPKEKELVLMQSFDRIKSLEAELEATKNALQAAVEKQMELVETVEALQHQSTSVRRRFCCS

SEQ ID NO: 46121 - protein, 186 aa, Zea Mays
MSQAKEVRYTARSITPPADRNGTSRSPPPKRRSPSRSPPPKSASRSPRPRSPKRRSTSRSPPRRRGRSRSRDRSRSRNPGNNLYVTGLSTRVTEDDLEKFFSKEGKVKNCHVVLDPRTKESRGFAFVTMDTLEGARRSIKYLHRTVLEGRLVTVEKFNMVLGCLYVNLVGPGCAVSNHGCLQRMCS

SEQ ID NO: 46122 - protein, 164 aa, Zea Mays
MSQAKEVRYTARSITPPADRNGTSRSPPPKRRSPSRSPPPKSASRSPRPRSPKRRSTSRSPPRRRGRSRSRDRSRSRSPDDRNPGNNLYVTGLSTRVTEDDLEKFFSKEGKVKNCHVVLDPRTKESRGFAFVTMDTLEGARRSIKYLHRTVLEGRLVTVEKVRC

SEQ ID NO: 46123 - protein, 355 aa, Zea Mays
MGQCYARNVHGVDADGGGVEATTITVSAAGGPEDAASVGGGRGGGGRRSARPSPAGTPRGGRAGATPARSSAAGSPWTGSPLGLPDGIAPSPATSASTPRRFFRRPFPPPSPAKHIKASLARRLGHRSPASASQVPRPPVEVPIPEQGAGGAGEVERELDKSFGYDRHFAAKYELGKEVGRGHFGHTCLARARKGDMRGQVLAVKVISKAKMTTAISIEDVRREVKILKALSGHSNLVKFYDACEDALNVYIIMELCEGGELLDRILSRGGRYNEGDAKIIVEQILKVVAFCHLQGVVHRDLKPENFLFSTREEHSPMKIIDFGLSDFIRPDERLNDIVGSAYYVAPEVLHSAES

SEQ ID NO: 46124 - protein, 621 aa, Zea Mays
MGQCYARNVHGVDADGGGVEATTITVSAAGGPEDAASVGGGRGGGGRRSARPSPAGTPRGGRAGATPARSSAAGSPWTGSPLGLPDGIAPSPATSASTPRRFFRRPFPPPSPAKHIKASLARRLGHRSPASASQVPRPPVEVPIPEQGAGGAGEVERELDKSFGYDRHFAAKYELGKEVGRGHFGHTCLARARKGDMRGQVLAVKMTTAISIEDVRREVKILKALSGHSNLVKFYDACEDALNVYIIMELCEGGELLDRILSRGGRYNEGDAKIIVEQILKVVAFCHLQGVVHRDLKPENFLFSTREEHSPMKIIDFGLSDFIRPDERLNDIVGSAYYVAPEVLHRSYSTEADMWSIGVITYILLCGSRPFWARTESGIFRSVLRADPNFDDSPWQSVSPEAKDFVKRLLNKDYRKRMTAAQALSHPWLRDEHRQIPLDMLVFKLVKAYLRSTPLKRAALKALSRAITEDELIYIRAQYNLLEPDSGDGRICIDNFRMALLQNCTDAMKESRTLEILNALEPLAYRRMDFEEFRAATISPYQLEAVPRWEEIASTAFEYFEQEGNRAITIEELAQEMNLSAAAYSIVRDWIRPLDGKLSFVGYTKFLHGLTMRSGNTRRHH

SEQ ID NO: 46125 - protein, 71 aa, Zea Mays
MEAARQSLIAISQSVPEVGAPVVSPPSGGRGMDENGHEDVAERRYRAKLISISNQSPDARPTTCPRNNGAA

SEQ ID NO: 46126 - protein, 235 aa, Zea Mays
MSTVFMTQLPRTLRLMEGEQDQGLFPASTFHVAKDPPILFPFMITSPVHVDQLQGQSSYGDQHLGQHVLSESTQQSLCNACGIRQRKARRAMVAAAAAAAASNGGAPPQAVSGVATQQQPKPKPARKEKRSDAADRSLPFKKRCKMVVVDHAAGAAAATATPEAAAARSTKDQADHVSGDKQVVAPAAAMRSLDQSEIATPPPSAVSSFHAAFPADEITDAAMLLMTLSCGLVRS

SEQ ID NO: 46127 - protein, 263 aa, Zea Mays
MEPSRGAAGGARRWGEAETEGDAAEEGRRAEDGGEVSLREWLDRPGRAVEAAECLHVFRQVAEAVAVAHAPGVVVGSARPSCFVVSPPFARVAFIESAFGSDASGSCSGSDADPDASPPRRGDGAGRGEERAGKSFPLKSVLAMELNWYTSPEEADDSAATFASDVYRLGVLLFELFCTFETMEDKMRAMATANLRHRVLPPQLLLKWPKEASFCQLLMHPVPETRPKMSYMKSHIASRDFEGIVQVWDVTRSQVFVEMREHE

SEQ ID NO: 46128 - protein, 524 aa, Zea Mays
MTRFPPEPNGYLHIGHAKAMFIDFGLAKERNGHCYLRFDDTNPEAEKKEYIDHIQEIVHWMGWEPYKVTYTSDYFQALYEHAVELIQKGLAYVDHQTAEEIKEYREKKMDSPWRGRPIEESLKLFEDMRRGLIAEGAATLRMKQDMQNENKNMSDLIAYRIKFTPHPHAGDKWCVYPSYDYAHCMVDSLENITHSLCTLEFDIRRPSYYWLLVALGLYQPYVWEYSRLNISNTVMSKRKLNRLVTEKWVDGWDDPRLLTLAGLRRRGVSSTAINSFIRGIGITRSDNSLIRVDRLEYHIREELNKTAPRTMVVLRPLKVVITNLEEGKVLDLDGKMWPDASDTDASSHYKVPFSRTVYIEKTDFRLKDSKDYYGLAPGKSVMLRYAFPIKCTDVISGDSPDDIVEIRAEYDPLKTSKLKGVLHWIAEPAPGVEPLKVEVRLFEKLFMSENPAELEDWLGDLNPHSKEVIKDAYAVPSLATAVLGDKFQFERLGYFAVDTDSTPEKLVFNRTVTLRDSFGKAGPK

SEQ ID NO: 46129 - protein, 593 aa, Zea Mays
MTLASCVASCTRQSETNDVPCAISGKAVTKCDGCVPTEVRPTDLLDVLWILSERSKQHFNPKYRLKVCEQVIQVATSLINATEIPLNQLLHFIATIPREFTDYIGPLRVVVQKWFFQKEECSPGDTLLSKLIDFSATFVSQKRNEGSNVFDDEDVDAWEAEARRWARTLLLVTEEEEHLKRIFRFLEAYGYKLSEQCPSGDFIPIKFFIIVLSFIEELELRQRKLVCRSNTILRGSDTLNGLVLDDLNKMFTESLLLILENMVAFSKLSCSIFWLDVDNKDLPPSIKGKLGGPSQRRLATSITSSVLQGIWSMRCVSSVASWCNPYNSDDSVSSAFSVLWDFYLNVTHHSTIANEIGAELHLAAYEALAYVLAVLSTASSTQFLDFVEAKQTDQAHKFSLDILVTTFLDNINHLLTEGTLTRSRRAVLMTWKWLCMDSLLSISSCYSDNESQMKRLEPLFSDSTLRCIFLDIIESLENTGENSVLSILRCVRSVLRLLHLNEGNTIFSSLGISYEMMMQLAKSSWILHLNCNKRRVAPIAALLSAVLHPAIFCNLEMHQTNEKGPGPLKWWHSTKILKLNSLKTMKQDLRFPC

SEQ ID NO: 46130 - protein, 268 aa, Zea Mays
MDKAEFELWKSKLTDKEQNDATGFFTVIKRHDSLSSSSLTQSDGSDQTKTKDDLFIVPYSKEYRPFLEKAAELLEKASACSDSPSLKNLLRTKANAFLSNDYYESDIAWMELATFEAFVGIRDDTATSQVKLFGDQLQDLEKNLPMDNIFKSDSISAAPIRVINLLYNAGDVKGPQTIAFNLPNDERIVNERGTSMVMLKNISEAKFKHILKPIADACIREEQKEYVDFEPYYTHIVCHECCHGIGPHSITLPSGTSRIPFSIGGGKS

SEQ ID NO: 46131 - protein, 56 aa, Zea Mays
MYLQRLLCHALCHAIYMPACGFIQFKVQDYPFAFLNSEFQTSAGSSRFRSAVYIIY

SEQ ID NO: 46132 - protein, 336 aa, Zea Mays
MVGGGRRGGAAAEEVKLNTGNVFAALESLKKKKKGDKGRAAGPSSRKKHGAGAAQQQQEPPQKDVFWAPAPLTTKSWADVEDDDDDDYFATTAPPRPVWAAAAAAEPAKEEEDVEDAVRAALQEDVESDDEDLDDEDLDDGAEHEVEDAPAELAVKTVEALAAPPKDTERQLSKKELKKRELAELDAVLAELGLSGNSTSAAQDAEKEGANQAGDAEKKEDATVPSESKTSKKKKKKDKSSKEGRKETQEAAEGSEETASAGPDEEDTTAVDVKERLKKMASMKKKRSSKETDTGAKIAAAEATARSARLAAAKKKEKSHYNQQPVRENFMDNTTN

SEQ ID NO: 46133 - protein, 203 aa, Zea Mays
MKSGMLAAEATFKSLVEGSSMELYWENLKKSWIWEELHKARNYRPAFEYGLIPGMVLSALERYIFKGKSPYTLKHGRPDHEATDTANLHAPIQYPKPDGHITFDVPTSLYRSNTNHEHDQPPHLRLRDPTVPERVNVALYAAPESRYCPARVYEYISDEKGDPKLHINAQNCLHCKACDIKDPKQNIEWTVPEGGGGPGYTVM

SEQ ID NO: 46134 - protein, 198 aa, Zea Mays
MQDARKLPLMQYVVCLSITEAIKELCRAKGLPELDVRIKWPNDLYLKGLKVGGILCTSSYEPKVYNICTGVGLNVDNEKPTTCLNAALQEANHTSPILKREDILAYFFNKFENLFEIFMNHGFQVLEEQYYNSWLHSGQRVVVHDAHENKSGSVVTIQGLTPTGYLHAIGEDNKSYELHPDGNSFDFFTGLVRRKMEA

SEQ ID NO: 46135 - protein, 166 aa, Zea Mays
MRLPPPSTTAAAAAATVGAVLAAVALRRYLSASRHREPARVPMSAAAGATTLVVYGKSAQEQELLASAAGSVVLGEGDPSGDVAIALAYESAGFDAAAYMSALRARRFGRWMLWTPRIGSTQDLITRNFAKLPVGVVCVADVQFKGRDAGCTEVAPYAICCLPFDN

SEQ ID NO: 46136 - protein, 655 aa, Zea Mays
MILLLMLLLAAIFSPPTNVVSEAYANPGLSQVSESYFGSLKDQANHAPSLLTSDLDSQSKQHTNSLMKTPVSDNMPNDVPARQNSLGLWKYLDDDISLDDNPSSGILPTEQVTGEIPFQITEISSEWAYCTEDTKVLVVGCFHENYRHLAGTNLFCVIGDQCVDANIVQTGVYRFIARPHAPGRVNLYLTLDGKTPISEVLSFHYRMVPDSQNLAEDEPQKSKLQMQMRLARLLFTTNKKKIAPKLLVEGSKVSNLLSASTEKEWMDLSKFVTDSKGTYVPATEGLLELVLRNRLQEWLVEKLIEGHKSTGRDDLGQGPIHLCSCLGYTWAIHLFSLSGFSLDFRDSSGWTALHWAAYCGREKMVAALLSAGANPSLVTDPTHDVPGGQTAGDLAAGQGYHGLAAYLSEKGLTAHFEAMSLSKGKRSTSRTESLKRNTKEFENLSEQELCLRESLAAYRNAADAASNIQAALRERTLKLQTKAIQLANPENDASAIVAAMRIQHAYRNYNRKKMMRAAARIQSHFRTWQIRRNFMNMRRQAIKIQAAYRGHQVRRQYRKVLWSVGVVEKAILRWRKKRKGLRGIATGMPVAMATDAEAASTAEEDYYQVGRQQAEDRFNRSVVRVQALFRSHRAQQEYRRMKVAHEEAKVEFGRK

SEQ ID NO: 46137 - protein, 205 aa, Zea Mays
MTSIYVGNFHIPELIERARYNIMQSESMDKILERYERYSYAEKVLISAEYETQGNWCHEYRKLKAKVETIQKCQKHLMGEDLETLNLKELQQLEQQLESSLKHIRTRKSQLMVESISALQRKEENKVLQKELAEKQKDQRQQVQRDQTQQQTSSSSTSFMLREAAPTTNVSIFPVAAGGRVVEGAAAQPQARVGLPPWMLSHLSC

SEQ ID NO: 46138 - protein, 580 aa, Zea Mays
MGKRSSIGSKDALPAEVEAPAPAPAPPESTTEKQRKNSWEQEGRERDIRQGIDLATTLERIEKNFVITDPRLPDNPIIFASDSFLELTEYTREEILGRNCRFLQGPETDMSTVDKIREAIREQKEITVQLINYTKSGKKFWNLFHLQPMRDQKGELQYFIGVQLDGSDHVEPLRNRLSENTELQSAKLVKATAENVDEAVRELPDPNLRPEDLWDIYSRYVSPKPHKRYNSSWIAMEKIIKSGVKIGLKHFKPIKPLGYGDTGSVHLVELQGSGELFAMKAMDKSVMLNRNKVHRACMEREIYSLLDHPFLPTLYTSFQTPTHVCLITDFCPGGELFALLDMQPMKLFREESARFYAAEVVIGLEYLHCLGIIYRDLKPENILLQEDGHIVLTDFDLSFLTSSKPHVIKHSTSRRRRSKEYLPPSFVSDPATPSNSFVGTEEYIAPEVITGVPHTSAIDWWALGILLYEMLYGRTPFRGKNRKRTFHNILHKDLTFPSSIPVSPAAKQLIHGLLQRDPSSRLGSSAAANDIKQHPFFEDIHWPLIRCMEPPELDVPLKLTRKEPEQKVKPEEDIYSCSDY

SEQ ID NO: 46139 - protein, 389 aa, Zea Mays
MRSGRGKMATPPPPIRPAAALLLLVLAGVLASAASADLVISKADRRVDLTSHIVRVLASLKAENVGPDPVSQVLLPFPNIQAKNLAAIRAFGSEGKVKGQSTVLPIEVVQPSGAPPELTFFSALLPKPLEKGKTLYLDVLTVFTHSLQPFPEEITQAEAQLVVYQDSAHYLSPYPVKAQTLAIRLPGGRVESYTRHPNAKLVDSELKYGPFHDLPPFSYLPVIVHFENNNPFAVAKEVIREIEISHWGNVQITEHYNIAHGGARLKGEFSRIDYQSRPYVRGVSSFRHLIAKLPPRAHSIYYRDEIGNISTSHLWSDSMKTQLEIEPRFPLFGGWQTTFTVGYGLPLEDFVFYSDGKRFLNITFGSPLEEILIEKLIVKICGHCVWYSL

SEQ ID NO: 46140 - protein, 230 aa, Zea Mays
MADSAPSIPGVIASLQAYSTALSAFTAAWRAVETHASTLDSALAARLAGFSELELICSAMDGAGLRAYLTEHRDELKDPTRALDAALQVAPDPGLLVLSAAASFCRTLPEVAKSDGSVKASCRLLIALLDRLRAIGVKPSPEAREEARAVATDWKRGKRIGTETMFKQETFAFLHLVGVFGLVEDVGGTSEVLDLVVSISGRERAVDAFVVLGLDLDQHMPKLQTKFICF

SEQ ID NO: 46141 - protein, 569 aa, Zea Mays
MDAAGRGGPHRQRHRSVPQQPRFLIVLFLPPKNPFPEVGAATAFAGRDEQEDEMQLALCTECTKNYEREATLVKAEADAEGPRASLPGWLVLDRPPADQTPHEKYLTVLKRKWSRLCRKLHLCSDPGSPQCPWWSGSCSQPASKGKPSEPRFLGLDGLMGQHTSRRSPPSPSRSPRWAPSPPMGSGCQGVGTTLALASHLLSDSATSDSRAPGSGDGSAAARELEQRLRRNIPWQPRAIVAEIANAVVASRESDDGATGVWLYVKGSDHVATRRAVTVIAETRCGSADRVICADPSKFSSAERLCSDVVSRASAMGGKMVVVVVDDVENASRDVADCLVAASKSGSLKDRQSGQALDLSGCIVILLASKWTGGSSDQISLRLWAENEASSAALKRKTESPLRESKRARHDAGLGGLDLNLCAEDDPADEDDEALPSDITDEGDSSDTSEHGQPHGLLEALAARVVTLDNDDGDGDATASIRARLARAIGQGWTRVEETAVQMLAAASGQFLEDEFESWTSEVLEPAVALATVKNGGKGKVIVLGLGPCGESRETPGFMGSVLPSRVQVD

SEQ ID NO: 46142 - protein, 121 aa, Zea Mays
MQIVSHMALCFHFLFFSKTIRKLIFAFFFPLLLPFPFLTVYFHAAAGIHLRDVSFLVPHSLLHVILDDQVRSLPSQKHCCLSTFLCASNNTLHYIISFMHFCVIRHKCCFLEHTQAYASQL

SEQ ID NO: 46143 - protein, 399 aa, Zea Mays
MGRSPCCDKEGLKKGPWTPEEDQKLLAYIEQHGHGCWRSLPAKAGLQRCGKSCRLRWTNYLRPDIKRGKFSLQEEQTIIQLHALLGNRWSAIATHLPKRTDNEIKNYWNTHLKKRLAKMGIDPVTHKPRSDALGTGGGGGAAGAQHAKAAAHLSHTAQWESARLEAEARLAREARLRALAASASAPPQMPAAAAHRLDSPTSTLSFSESAALASVLQEAHGAAAAAAAAARAAMQPMQAYEEACKEHEQQQWGDHVVDVADAGFAAAGFTGLLLDGSLSQHDLRPAPATTTRDDEADAGLHETEEEKSYWDSIMNLVNSSSLPTTSVAVPAPEPAYPSSASLHTSVAMPALVAYPSSAPLQTPVAMPTVEAYSSSTSLQQTSVIAMPAPEAYSPAMEFC

SEQ ID NO: 46144 - protein, 78 aa, Zea Mays
MEAAAAAVRYGIVGVGMMGREHLHNLAHLATEVEREQSVRVRVTGLADPHQESLRLGLQLAAELGLPPPQNRHFAVMP

SEQ ID NO: 46145 - protein, 58 aa, Zea Mays
MGSKLANNIECEIFQVLLEEARESYREDIVMPLRSDNVEDISRNVGALTDWVNNWRPS

SEQ ID NO: 46146 - protein, 117 aa, Zea Mays
MAVGSGGGSRRARPNVLVTGTPGTGKTTTCSLLADAAGLRHVNDGWDADLECHVINEDLVCDELEDMMEEGGILVDYHGCDFFPERWFDLVVVLQTDNSILHDRLTEVTWVPNSPTT

SEQ ID NO: 46147 - protein, 207 aa, Zea Mays
MTGVSTGLLTGLRRVMEQQRISTAFCRQSRVSSSTVSFSDLDEKGDMEYDDNSPNSKRELRPQGVDPNKGWEFRGVHRAIICGKVGQVPVQKILRNGHTVTVFTVGTGGMFDQRVIGPKDLPKPAQWHRIAVHNDYLSAYAVQKLVKNSAVYVEGDIETRVYNDSVNDQVKNIPEICVRRDGMLIRTSFFPIMFIIETVFHISSFHM

SEQ ID NO: 46148 - protein, 154 aa, Zea Mays
MEALLFPFYDPSHHGIREEHPVFLGENQCCAGGMDFITMIFTLSAIPFDIMPTTIEQCVSVLKPGGLLLFRDYGLYDMTMLRFLPHQRVGFREYMRSDGTFSYFFSLDTVRELFRAAGLVELELEYCCVKSVNRKNGKTMRRVWVHGKFKKPPR

SEQ ID NO: 46149 - protein, 239 aa, Zea Mays
MGRGKIVIRRIDNSTSRQVTFSKRRNGIFKKARELAILCDAEVGLVIFSSTGRLYEYASTSIKSVIDRYGRAKEEEHVADPNTELKFWQREAASLRQQLHNLQENHRQLMGQDLSGLGVKGLQNLENQLEMSICCIRTKKDQLLVDEIHELNRKGSLIQQDNMGLHRKVNLIRQENAELYKKLYEKEAEGEVNRDSTTPYNFVVAEGANVPIHLELNIPLQENGVEQPVAPKLGLQLNQ

SEQ ID NO: 46150 - protein, 859 aa, Zea Mays
MAGGGGGARGSDRAGAARSPTTTTAIQSTIQSIKEVVVGHSDADILDTLRESNMDPNETAQKLLNQDPFHEVKRKRDKKKESAGQKSFADSTAQVEQNSQWMKPHTQKMENDQRTPKQGQMSGPTREFRVVRDNRFQHGVVENRPELGHKGSANVQMSDRRFDVSLFRAYGTRTNPMKLQGTFVESGRNRSPATTSGDQITHQNAMQNSNSDTTQGKRDAQGTTEKHVKPYLKNPQNEQHFPGSDPAHGSANVRIAGGTVGPAQRHVGVVNSTRQFAARSGSQMHAPSGSYANIQRGSFTSVGASGRYSAFMSRNIQQNQRPDTMFRGRPTVRSFVAQNTNRYHQGSTSNQKAVHPIKEWKPKSTKKSPTIDADNSIADATSPSASNCESANTLNVNELPEKISQTNLHEVEHVIIPEHLRVPEYEQTKLRFGSFTSGLDSEQVSASTPQDTEQPEHVQESVQQASEYDSLDAGPDDMDEQARSSQHLSTSTAEISLPPSEDSDRMSGQVENDDGLGLVQSDTPIGAADGDNTQITSTLTAFSAYSHEDPNMHTNNEAQLYGLVEPNVHPQVLASSSQGYPSENPEADNAVQVFRMPESNVHSQVLPSTSEALNPQIVSNSPVSISSQQQQHISQQQAAAQMYPQMHVQHFPNFMPYRQLYSPVYPMPMPNYSPNVPYPSNGNNYLQMPSGGSHLTAGSVKYGVSQFKPLPSGNPSGYGNYTHPAGFTMGSPGVIGATVGVDDVNRMKYKDNIYASTPQVETSDIWIQQAREMPPMQVPSYYNIPGQATPGAFVPNPANASFNATAQSSHVQFPGLYHPQQPPSIGFSVLCNLMQCDNLVRVLCNWVHLDDSLEQESTT

SEQ ID NO: 46151 - protein, 162 aa, Zea Mays
MAAAAADSDPAAAVADMSTCAHCCSLCKETIERVRWDLHKGEKCPQRIVACEYCEFELPAVDLHEHQDVCGNRTELCQTCRKYIRLCEWIGHEIQCHTSSNGSADTSRAIPERELRPPPPVRPARPARPAHASPHKRLLFTIAVTGIAVMVGSILFQRDESF

SEQ ID NO: 46152 - protein, 110 aa, Zea Mays
MDRARNTVPYKLKWFCRHIQSNSRERATTAAAGAAGTTSTSCSCFTTQAAPLHNRCHWNSSYGWLHTVPKGREFLAPVAMDLLCMSCCFLTGRVMPQEVYLCIITPRISA

SEQ ID NO: 46153 - protein, 215 aa, Zea Mays
MAAISSLPFAALRGAAEWRPSSTAAAVSGAVVLSARSRRGSRSVVRCVATTGDVPPTVAETKLNFLKSYKRPIPSIYSAVLQELLVQQHLMRYKKTYQYDAVFALGFVTVYDQLMEGYPSNEDRDSIFKAYITALNEDPDQYRADALKMEEWARSQNGSSLVDFSSRDGEIEAILKDISERAKDSWKLGFNLEISFDLDMVWSALLPSTARFALH

SEQ ID NO: 46154 - protein, 393 aa, Zea Mays
MTRVFWQSIKDKLIFPFLDLDIKYYDLGILHRDATDDKVTVEAAEATLKYNVAIKCATITPDETRVKEFNLKHMWKSPNGTIRNIINGTVFREPIICKNVPRLVPGWTKPICIGRHAFGDQYRATDAVLKGPGKLKLVFEGKEEQIDLEVFNFTGAGGVALSMYNTDESIRAFAAASMTTAYEKKWPLYLSTKNTILKKYDGRFKDIFQEVYEADWKSKFEAAGIWYEHRLIDDMVAYALKSEGGYVWACKNYDGDVQSDFLAQGFGSLGLMTSVLVCPDGKTIEAEAAHGTVTRHFRVHQKGGETSTNSIASIFAWTRGLAHRAKLDDNARLLDFALKLEAACVGAVESGKMTKDLALLVHGSSKVTRSHYLNTEEFIDAVATELRSRLGAN

SEQ ID NO: 46155 - protein, 447 aa, Zea Mays
MMLSNQLPMRLKEVSATILANVVASGARFESIPLDHNRQTLVSEDIVHNLLHLISNTGPAIECKLLQVLVGLTDSSTSVQNIVDAIKGSGAIVSLIQFVEAPQREVRMNSIKLLNNISPYMGQELADAFRGNFSQLRSLVKVIVDNNGISEEQAAAAGLVADLPMRDSVLTRRLLQDGAFATIIPKVLRIRQGEIRGGRFVNPFLEGLVRIVSRITFVLDDDPDIIVVACDYNLTSLFTDLLQMNGLDIVQIVSANALEKLSQQSKHLTKILPAPSPGLCFSIFPCLSQKTVATGVCRVHCGICSARESFCLLEGKSVEKLVACLDNNNEKVVEAALSALSTLLEDGVDIDQGVMVLCDAEGINPILDVLCENRNEALRQRAVWAVERILRMDEIAYEISGNQNVGTALVEAFRHGDYRTRQVAERALKHVDKLPNFSGIFSKMGAQ

SEQ ID NO: 46156 - protein, 552 aa, Zea Mays
MPRNSSAWSARNFLGTTSSGVCVTSWLNILENIESAGPLLVTLNPPRVPNHVLLKCHISHPIPSIAAAKANLQLNSIQGKRGIWFCGSYQGYGYHEDSVKAGKAAALGLLGRKCDLLSNPKPMVSSWTEAGARLLVARSLDQYITIGNFCILEEGGTTFSFGKACEKCHVKSAIRVHDPQFYWKAATEGDLGFASAYINGQISFVDHRKGLVNLVRIILANRGEFKRLSSTARKAWWSPLLGITGVSFAKYFLRHALRKNSVSKARKNISEHYDLSNDFFALYLDPSMTYSSGIFKVAEESLETAQLRKLDSLINKAKVEPGHHVLDIGCGWGTLAIRLVKQTGCKYTGITLSEEQLKYAKRKVKESGLEDRITLLLCDYRQLPAGDKFDRIISCEMIEHVGHEYMDDFFGCCEYHLAEHGLLVLQSIALPEELYDKMRMRPEFLKTYIFPGGCLPSLGRIVSAMSNASRLNIQHLENIGDHYYTTLMNWRDNFVANREKASALGFDDKFIRTWEYYLSYAAALFKSRTAIDYQIVFARPGDSKLPSYVAIA

SEQ ID NO: 46157 - protein, 306 aa, Zea Mays
MEKLVYFATIISLSMAALLVPLRVQCEEAARAAAARSCHAGTGASASAPAAAAAWKRSCGGGKAGKQQPQVEGMFVFGSSLVDNGNNNFLNGSGVRADYLPYGVDFPLGPSGRFSNGRNVIDALGELLGLPGLVPPFADPRTRRARAALRGVNFASGGSGILEHTGQGKVVSLRQQITNFESVTLPDLRAQLRGPAAAANHWIKGQDSFHKCYLSKCLFVIGTGGNDYLLDYFNPGNGTQGGPPLSEFTASLITKLSGHLQALGRRAEPAARCRGARRACCARSRGPSAATGRSTSSSTGCTRRTP

SEQ ID NO: 46158 - protein, 130 aa, Zea Mays
MLLPLLRSHPLLHHAARLSSPRTRLLLRRDAIPLARSPPIRMAASSGSGASSPASAPPAAVVHKSKIKFCPACGSPTKLAIPDGDEKMRAVCSSCGRVHYENPKMVVGCLVEHDNKVLLCRRKIEPAYGL

SEQ ID NO: 46159 - protein, 343 aa, Zea Mays
MITLLLPVMLYPLYVSGDGLMVMEVPEISPMSEYLSTHDVILSVDGLKITRTDDWIKILNQGTTAKSRDPEFLEGSHRYVATSSTKGYCVPDSWIDASKNLWQIRDKLPCPDELIAFEKVICNVSTILTEKTSIGSDQKEVEGKYCLIAKDVVKLRRCGNGWHMTEDDESSCACFEDEHCLVPVLNPGFSWIEVSYARPYSLRCLQKGGNLLSSHTANSNFGQSPCEGSFVYVGDLSSAARSVRLSRYRPRWALLLFIADIPYILENGLSSLLHASAALAVINCLPVYFLDGEAILETTLSYVAWFTPRLQRRILKVCSVVWTGLLVITFSSICYSTVLHYGV

SEQ ID NO: 46160 - protein, 321 aa, Zea Mays
MEVPEISPMSEYLSTHDVILSVDGLKITRTDDWIKILNQGTTAKSRDPEFLEGSHRYVATSSTKGYCVPDSWIDASKNLWQIRDKLPCPDELIAFEKVICNVSTILTEKTSIGSDQKEVEGKYCLIAKDVVKLRRCGNGWHMTEDDESSCACFEDEHCLVPVLNPGFSWIEVSYARPYSLRCLQKGGNLLSSHTANSNFGQSPCEGSFVYVGDLSSAARSVRLSRYRPRWALLLFIADIPYILENGLSSLLHASAALAVINCLPVYFLDGEAILETTLSYVAWFTPRLQRRILKVCSVVWTGLLVITFSSICYSTVLHYGV

SEQ ID NO: 46161 - protein, 156 aa, Zea Mays
MVRPRFHDFFSRGLSPLRHYWPVRGDRGMCRSIKHAVDWGNAHADRAQEMAGNASRFIREELTMDRVYDYMFHLLTEYARLLRYRPAVPRGAAEVTVESMIRGRRGLERQFMVDTLAASASGDGPCRLKPAYSPEELQALRRARADAVRQVEAWEI

SEQ ID NO: 46162 - protein, 105 aa, Zea Mays
MRIRRRPQPAASDLAASTAPQIPPPNAARNRGWLLAGEGEGEDEDREARMLRASADLAHESGASRRMALPQDDNAAAVLVVDRGGRSLGAPRGAADGRMRYADYI

SEQ ID NO: 46163 - protein, 1430 aa, Zea Mays
MWRDLKLFQEKAFPFLDSEYMLAEFIRGLLKAGKFSLARNYLGGTSAVSLSTEKAENLVIQAAREYFFSASTLSGNEIWKARECLNLLPNSKNVQAETDIIDALTVRLPYLGVTILPLQFRQVKDPMDIIRMVITCQAGAYLHFEEIIDVAKLLGLRSEEEVADVEEAIAREAVVNGDLQLALDICLNLTKKSHGAVWDLCAAIARGPPLDNLDTGTREKLLGFALSHCDDDSVGELLNAWKELHAQGTFEKLMITTATNPPNFLIDGSSITPLPVQSVQDILDLRDDNGHDRRSDLVGIVKDMLSKVCLDFSNGDTHNWESMLEENRKLLCFGALVLPWLLKLFSNEACDGEIMDHLTRRCRFSTKVKAATSIIYWLVINGLAPNDNIIMILAKSIMEPPIDEEFDVLGCSVLLNLMDPFNGVKIIEEELKRRESYQEISSIMSVGMLYSSLNNSKKECSTPEQRRNLLLHKFHEKFTSADTDDLDQVDMANTTFWREWKSKLEEDKQLADQARMLKQILPDIDTSRFLSGDVNYIKIVVYSFVNSVKMEKKHILKEAVRIAEAYGLQRTEVLLRFLACSLVSEYWDNNDILNEISEFREDIVSSAKGVIDMIYSDVYLEIDGYNKQRLSYIYGILSACHSYLKRTNEIELRYPVHVHTHKLEPFQYYKVLEEECKKVCFIDGLNFKNIAGLDNLNFEHFNDEVCKNIHASTVTAIADMVQSLVSMYVDVLAKGLISQQGVYKHYVLGLLASLEGRSEAQSNNTDYEKLQASLCEFELNYDSCREYIQALPATDISYIVRRYCTLCFPSNLARSHPQEPSWRKPLATLLEFWSKVVDDIPGDSIDACSYGRTDYLNSNRLSLCMRAFRQLLIIDEIALHQGWDAISMYVKDCLRNGKMMETPCFCRAMILSGCSFESVVEVYFGGQGQLGSENADPSNYLDLLELYNAATEKCLSDLSEESCEYRILLHNLLSSLSRSTGKHAGALEMVRSGVWGKLIRYSEDMQLESQLRVYALQLMQCITGRNLKSLPNEMVCQVEPWESWYEHGAGAAIADESINSSSSITGTLVALRSTQMVAAVLPDANITPENLATLDSAVSCFLKLSERASGVSVAVFEAVLEEWEQLFSPKEEHVAPHESPKETSDWSDGWDDGWEALPEELESPKNKQEGVLLSVHPLHSCWMEIIRKRVELGELHKVLELLDRASLKHSVFLEEEEAHSLVELVSALDCFMALKTVLLLPYESLRLQCLQMVEVKMREGIVSTSSNADDQELLALVLSSGTMQKIITEEAYSKFFSYICHLVGHLARSFQTDLLVQWNEATSKINRSLLFARVLFPCFVSELVLGGQYLLAGFVISRWMHTHPSLGLMDITETSVRCFLQGQVAQLDEVGGSDAALTDGEVCVRHTISTLQPKLVSLLQSALALSNKEL

SEQ ID NO: 46164 - protein, 396 aa, Zea Mays
MEYKARSTGTSGTSSKSFRDLYNMKYSSYLNDEPMPDATSEKEQGNEYFKQKKFTDAIECYSRSIGLSPTAVTFANRAMAYLKLRRFKEAEDDCTEALNLDDRYIKAYSRRITARKELGKLKEAMDDAEFAISLDPNNSELRKQYSEIKALHMEKMAKKVPVPAKRAVSGIDKTADVTSHPPTISQKDTIMEVDLPVRDAMKIKESASVKSNGGPGVIINGNNVQLQGRDANQKTGPEVSVQDLAARAASRYMAGTVKSIKTPKTAYDFEVSWRALSDDTAQQIQLLKSIPPASLPEIFKNALSAPFLIDIVKCAASIFRDAEALAVSILDNLARVPRFDLIIMCLSSMHKFELRKIWDQVFLAEKALADDQMEALRQLRGRYIPGGWQDSMLTSS

SEQ ID NO: 46165 - protein, 397 aa, Zea Mays
MEYKARSTGTSGTSSKSFRDLYNMKYSSYLNDEPMPDATSEKEQGNEYFKQKKFTDAIECYSRSIGLSPTAVTFANRAMAYLKLRRFKEAEDDCTEALNLDDRYIKAYSRRITARKELGKLKEAMDDAEFAISLDPNNSELRKQYSEIKALHMEKMAKKVPVPAKRAVSGIDKTADVTSHPPTISQKDTIMEVDLPVRDAMKIKESASVKSNGGPGVIINGNNVQQLQGRDANQKTGPEVSVQDLAARAASRYMAGTVKSIKTPKTAYDFEVSWRALSDDTAQQIQLLKSIPPASLPEIFKNALSAPFLIDIVKCAASIFRDAEALAVSILDNLARVPRFDLIIMCLSSMHKFELRKIWDQVFLAEKALADDQMEALRQLRGRYIPGGWQDSMLTSS

SEQ ID NO: 46166 - protein, 353 aa, Zea Mays
MAASTVTAVVAAEDEARQEAARDLRSPLSSPCEWFVCDEADARTRCLVIQGSDSLASWQANLLFEPTEFEGTGVLVHRGIYEAAKGIYEQVVPEVEAHLRRARAGRAPRLRLTGHSLGGSLAVLVSLMLLARGVVTPEALHPVVTFGAPSVFCGGNRVLEALGVGEAHVRSVAMHRDIVPRAFSCRYPGQAIALLKRLNGVLRAHPCLNTHRSLYMPMGATYILQPDSSVSPRHPFLPEGAALFRLDSERSPTALVASALRAFLYSPHPLETLSDLSAYGAGGAILRDHESSNYFRALSALARAPPRRRKQPEIVWQLPGVERLQQYWWPGIAGTVIPAPVAVLSNKELVSEA

SEQ ID NO: 46167 - protein, 455 aa, Zea Mays
MWLCGPIAGLVVQPLVGLYSDRCTARWGRRRPFILIGCMLICLAVIVVGFSSDIGAALGDTKEHCSLYHGPRWHAAIVYVLGFWLLDFSNNTVQGPARAMMADLCGHHGPSAANSIFCSWMALGNILGYSSGSTNNWHKWFPFLMTNACCEACANLKGAFLVAVTRFYVFQQVFLVMCLTITLFFAKEVPYRGNQNLPTKANGEVETEPSGPLAVLKGFKNLPTGMPSVLLVTGLTWLSWFPFILYDTDWMGREIYHGDPKGSNAQISAFDEGVRVGSFGLLLNSIVLGFSSFLIEPMCRKVGPRVVWVTSNFMVCVAMAATALISFWSLKDYHGYVQDAITASTSIKAVCLVLFAFLGVPLAILYSVPFAVTAQLAATKGGGQGLCTGVLNISIVIPQVIIALGAGPWDALFGKGNIPAFGVASGFALIGGVVGVFLLPKISKRQFRAVSAGGH

SEQ ID NO: 46168 - protein, 579 aa, Zea Mays
MGGSSGLVDWRGRPVNTKKHGGVRASIFIHALVLLSNVANIASILNLVSYLREEMHMDVARATTMASNFFAALQMFSIPAAFLADSYIKRFYTVLIFGPIEILGYILLAVQAHVPSLHPPPCVPGQETSTCESVSGSNLSLLLLGLYLIPIGDGAARACLPALGGEQFDTSDPVEQRQESSFFNWYTFSVSTGGFVGLVFIVWVENSKGWDVGFAVCALSVLLGMLIWIAGLPLYRNQLPTSSPITRILQVLVAAFKKRNVALPANPSELKQISQDDAGSLEILHRTDGFRCLDKAAVDTGRTGGWILCSITQVEETKIILRMVPIFLSAVLGYIPVPLILNFTVQQGNTMDTRLGALHISPATLFIIPTLFQMVILVVYDRFIVPFLRRITGYVGGVTHLQRIGIGFLSTIVATGVAAIVEASRKKVARDSGLVDATAGIPISVFWLTIQFFLLGIVDVTSFVGLLEFFYSEASTGMKSIGSSIFYCILGVSAWLGSLLIQVANRVTRHRDGTGGWLDGTNLNKGKLDRFYWLLAVLELVSLLVYVFFASRYVYGNDQRVVADEDNNTAPSDGTINVI

SEQ ID NO: 46169 - protein, 198 aa, Zea Mays
MPLSPPPPSSSPRQAAIQELRRGTQLAELLRQQVELIPEPNRRHAAAVNVGEISMAMESSLSILQSQMEHPFSEPEVMAAALTAHSDGGTSGERNGGPVARTRKVRVRHRPGRGRPAAGDELPMLYYKCGYSDDHKCPAKKYVQQQSNSYPPIFLVTLINEHTCDALFRDDEPIISSSSSGSSQVLDFTKASLSSPLH

SEQ ID NO: 46170 - protein, 221 aa, Zea Mays
MPLSPPPPSSSPRQAAIQELRRGTQLAELLRQQVELIPEPNRRHAAAVNVGEISMAMESSLSILQSQMEHPFSELTAHSDGGTSGERNGGPVARTRKVRVRHRPGRGRPAAGDELPIKEILTEAPENDRFHWRKYGEKNILYSEYPRLYYKCGYSDDHKCPAKKYVQQQSNSYPPIFLVTLINEHTCDALFRDDEPIISSSSSGSSQVLDFTKASLSSPLH

SEQ ID NO: 46171 - protein, 212 aa, Zea Mays
MAVGPVGMDTRGFRTHRIWIRVQKLTRGSYRVGYPKYIGSVYNNISTGYPIPGGYPMGMDTVMLERHRVHRDADGDLPAAVTAPLLAHPPSPAEPWPANFGSSEITDEEIDAASAACCRICLESESEPGDVLISPCMCKGTQQFVHRSCLDHWRSVKEGTAFSHCTTCKARFHLRVEFLEDDICRRMKFRMFVARDVIIIFLLIQAVWLCSL

SEQ ID NO: 46172 - protein, 253 aa, Zea Mays
MAVGPVGMDTRGFRTHRIWIRVQKLTRGSYRVGYPKYIGSVYNNISTGYPIPGGYPMGMDTVMLERHRVHRDADGDLPAAVTAPLLAHPPSPAEPWPANFGSSEITDEEIDAASAACCRICLESESEPGDVLISPCMCKGTQQFVHRSCLDHWRSVKEGTAFSHCTTCKARFHLRVEFLEDDICRRMKFRMFVARDVIIIFLLIQATIAAIGGMAYFLDKDGNFRNKFSDDWERFLSKHPVPFYYCVGICFLL

SEQ ID NO: 46173 - protein, 225 aa, Zea Mays
MRKIFPFGLFHLGGDEVYTGCWNTTPHVRQWMDERKMTTKDAYKYFVLKAQELAIKLNWTPVNWEETFNSFEENLNPLTVVHNWLGPGVCPKVVAKGFRCIMSNQGVWYLDHLDVPWEDVYSGEPLAGISDREQQKLVLGGEVCMWGETADTSDVLQTIWPRAAAAAERLWSQLEAISAQDVETTVLSRLHRFRCLLNHRGVAAAPVTNYYARRPPVGPGSCFVQ

SEQ ID NO: 46174 - protein, 464 aa, Zea Mays
MPVPMNTSYPDVVKFMRNGFALRFPLSIEYYPNIRECLAENMRAFHEEPRNSTGIREQILDILTFETLWFCVIEQLGSSNNGVKSVLINIIVRIIPYVLWGLKSAHVICRFVLMPLAVFVFLAYKYWKTRITIDAVEKFLRMQHMLVPMRYAYTNIIAITAHFRDKLGQGGYGTVYKGVLQPGEVHVAVKMLGNSNCNGEEFISEVATIGKIHHVNVVRLIGFCSEENIRALIYEFMPRGSLDKYIFSSEKTFSWDKLNEIALGIARGLNYLHHGCDMQIVHFDIKPHNILLDSNFVPKVADFGLAKLFPRDDSFVPLSAMRGTIGYIAPEMVSRSFGVISSKSDVYSFGMLLLEMTGGRRNADPHAGSSSQAYYPSLVYSQLSQGDANEISEGVDMHELEKKLCIIGLWCIQMKPQDRPTMSEVIEMLEAGIDSMQMPPRPFFCDDEGDSSYSTISELNTIEE

SEQ ID NO: 46175 - protein, 567 aa, Zea Mays
MGMSAASHLCAPSSLRALTVLFVLAAFVSDVEGRHHRHVCPHFSCGGLSNISYPFRRQGDPSGCGVQSYELVCTDTDATIRIGSGTYKPSCGYLAMTPLGGPGMPVPMNTSYPDVVKFMRNGFALRFPLSIEYYPNIRECLAENMRAFHEEPRNSTGIREQILDILTFETLWFCVIEQLGSSNNGVKSVLINIIVRIIPYVLWGLKSAHVICRFVLMPLAVFVFLAYKYWKTRITIDAVEKFLRMQHMLVPMRYAYTNIIAITAHFRDKLGQGGYGTVYKGVLQPGEVHVAVKMLGNSNCNGEEFISEVATIGKIHHVNVVRLIGFCSEENIRALIYEFMPRGSLDKYIFSSEKTFSWDKLNEIALGIARGLNYLHHGCDMQIVHFDIKPHNILLDSNFVPKVADFGLAKLFPRDDSFVPLSAMRGTIGYIAPEMVSRSFGVISSKSDVYSFGMLLLEMTGGRRNADPHAGSSSQAYYPSLVYSQLSQGDANEISEGVDMHELEKKLCIIGLWCIQMKPQDRPTMSEVIEMLEAGIDSMQMPPRPFFCDDEGDSSYSTISELNTIEE

SEQ ID NO: 46176 - protein, 695 aa, Zea Mays
MGMSAASHLCAPSSLRALTVLFVLAAFVSDVEGRHHRHVCPHFSCGGLSNISYPFRRQGDPSGCGVQSYELVCTDTDATIRIGSGTYKSSCPLPRWDYHARRTSRNRNLHRRRIEFSHDFSNSTPTMWVYAYFYPDWTSSNSYRQRVEFSHDTPFSSYMDYSGWAIFVNCSQPIENNDTDKYHIYEPVSCLSNSSFIYLLVTDYWYDDNVSAGDLEPSCGYLAMTPLGGPGMPVPMNTSYPDVVKFMRNGFALRFPLSIEYYPNIRECLAENMRAFHEEPRNSTGIREQILDILTFETLWFCVIEQLGSSNNGVKSVLINIIVRIIPYVLWGLKSAHVICRFVLMPLAVFVFLAYKYWKTRITIDAVEKFLRMQHMLVPMRYAYTNIIAITAHFRDKLGQGGYGTVYKGVLQPGEVHVAVKMLGNSNCNGEEFISEVATIGKIHHVNVVRLIGFCSEENIRALIYEFMPRGSLDKYIFSSEKTFSWDKLNEIALGIARGLNYLHHGCDMQIVHFDIKPHNILLDSNFVPKVADFGLAKLFPRDDSFVPLSAMRGTIGYIAPEMVSRSFGVISSKSDVYSFGMLLLEMTGGRRNADPHAGSSSQAYYPSLVYSQLSQGDANEISEGVDMHELEKKLCIIGLWCIQMKPQDRPTMSEVIEMLEAGIDSMQMPPRPFFCDDEGDSSYSTISELNTIEE

SEQ ID NO: 46177 - protein, 768 aa, Zea Mays
MEDPVAVPSSSLTDPAAAAAARVPGAVAAAPGVTSAPSALAPTQPPATAAAVSEAATPCQRQLFTVELRPGETTIVSWKKLLKEAGHTAAAPPVAVEPAFAAHAGPSGPAHPAENDPKDPTQPNRFNAVIEKIERLYMGKHSSDEEDLNDVPDDDQYDTEDSFIDDAELDEYFEVDNLKTKHDGYFVNKGKLEQIEPGTAANVAPKKRRRKDASSSYLESNHLGPIDYFDIGDVPEKSSARGTVQTGKQLVSSNVSSYGQYHEDNRVVKNKISGPGGAPKRKSSEFSGDAAARAKIIKDVSHAPLELRDMEKHKAAALPVDYAHKSKISETFDYAYPAYRDKGTSGQLDFQQRKISRENQGPSNRTYRKEKHGTNEYPGIAMATAVYSTQTMHPVVGREGSGTKPKGTRLERAIRDLQKIVAEYRPPTIDINEVDPNGQVAVKRRLPPEIKQKLAKANNGKIQEHELMNRLMGIVGHLVQRRTLKRNMKEMVESGISAKLEKADRFQRVKLEINEMIKERMATKSKVNEQDGSADDFQVANDERRALKTKYTMDTALEDKMCDLYDMYVEGMDEDKGPQSRKLYVELAELWPHGCMDNVGIKDAIYRSKERRRLLYSQQKVRSEERMKRKRLAATAKLPDGLAVAMQSGVAPQVAQPPITNPITYHTADYGQNPGLKYFDRARETSSSAIPDDGNRIAGEVKKKKRKPEYDPVDTQANLPRAPMPHGSEKQKPSKPADEASAGSLPSMATTQTVLGLPSVLGHNQQPS

SEQ ID NO: 46178 - protein, 463 aa, Zea Mays
MEDPVAVPSSSLTDPAAAAAARVPGAVAAAPGVTSAPSALAPTQPPATAAAVSEAATPCQRQLFTVELRPGETTIVSWKKLLKEAGHTAAAPPVAVEPAFAAHAGPSGPAHPAENDPKDPTQPNRFNAVIEKIERLYMGKHSSDEEDLNDVPDDDQYDTEDSFIDDAELDEYFEVDNLKTKHDGYFVNKGKLEQIEPGTAANVAPKKRRRKDASSSYLESNHLGPIDYFDIGDVPEKSSARGTVQTGKQLVSSNVSSYGQYHEDNRVVKNKISGPGGAPKRKSSEFSGDAAARAKIIKDVSHAPLELRDMEKHKAAALPVDYAHKSKISETFDYAYPAYRDKGTSGQLDFQQRKISRENQGPSNRTYRKEKHGTNEYPGIAMATAVYSTQTMHPVVGREGSGTKPKGTRLERAIRDLQKIVAEYRPPTIDINEVDPNGQVAVKRRLPPEIKQKLAKVAKVIGK

SEQ ID NO: 46179 - protein, 104 aa, Zea Mays
MSMSRYRDDKKRKGEIMKVYANDQIKTCVEFPECFVYEQSSTCKFLLCALVVIGRKTHVVGRGLMSTITMDVDTTARVDEFLVTTFVGPLVEEDLTRGPMNTLF

SEQ ID NO: 46180 - protein, 163 aa, Zea Mays
MRYYSREDAEDAVKYISGTMLDDRPIRVDFDWGFEEGRQWGRGRSGGQVRDEYRTDYDPGRGGYGKMVLRELEAQRELVDYGGSFQPNAPPPYERSERKRGHGDSHRNDRGDYQRKRYRNDDRSAPEESKRAPDSDPAEKNPRFREKGDSDEEEDDYDGKRRR

SEQ ID NO: 46181 - protein, 740 aa, Zea Mays
MEGTTISIEIDGEAICLDSVGDNEQEAAENGEMHQTIYTDENGEQVAFDNQEQGREEDLAGNGEEDRDHNSIIPSREELTEELRNKVAYSEEEAYRLYCDYGHRMGFSVRKGKQYYFTGTKTIRTKDYYCSKEGLKDDEQLTEANFNKPETRTNCKAMVRFRVDSEGQWRVIQIIPEHNHELVRPEEIHLLRSVRTLSVPKSGVLNAMVNAEIQAMHDNLHINEDGTECHSQLSIRSYTLLEPKECEALVGYFKRRTNEQCMFYWDVEVDQEGRMTNFFWRDGKSRVDYDSFRDVVIFDTSYLTNKYNMICAPFIGLNNHRQNVMFGCAFLLDESLTSYEWLFKSFLESVGGRPPETIFTDQNEFISKAIEVVLPGTRHCLCQQLIEKKLMSHLGSINDSGTLHSLFSKCMRECESEAELDETWAMMHHEYNMQEHPWLTDLYQQRHKWCSALHKDAFDGGIESMDRNESLNNVLSNIDDESASLSTFVLELDKLAGSWRKTESLEDIQCNQAAPECTVKHNRILQHAAEVYTHKVYKSIETDFLDGCSATSYQAAQCNETLHKFEFLLENSPNVSVVFLNTSTMELSCTCKKFETMRILCSHALNALVLKNVDRIPERYILNRWTKYARKGTYPFPVDEFAEQDRTEVAFVYRNRAMWFVYDLLTKSKSHHNTRKLILDALENGEKSLESMCDLKRLHMNTLGKEKDGSRVEKRKKKSTKQEKHSSISFHLHSSCFSND

SEQ ID NO: 46182 - protein, 341 aa, Zea Mays
MAAGSIVVDFPSMGAALCFPSLDSLLRDSASGFLAAVSNAPAPGAADLTNFHRVFSRVLSAYPDPPLEAVWFFSALSFHDRPDDLRSLLQLLSAFTASSPGTAKPLALLAPVVSELFHADKPRRETETLVEAVLSYISICSNRSAPSSTVGATADAVSLLPAFGELVKVWSVRYSRERCPFQVLFPLAGDEARRELMKEGCSVDYLAGVVLAEAFLLRLCLKVQNATGVPRSELQKELKIWAVSSIPVFQNHRFFGGKVIKGEQCHLSMLSQPQMFPIFSSSGLLFKLALVHSANQLPIHRNLLLSGLSTLKSRGSKCLETTVLVLWRGLLMMGSRMAMGT

SEQ ID NO: 46183 - protein, 277 aa, Zea Mays
MQQGCLALSCRRSSRSGQSAPSRSSRTTDSSSADDEILLRDVLYDSLILVDYSFINNGVGVDLLPIYVLRLVITLDAVNDARRKGDQGRAVSFINAFSTSNVPNFLIKWATFQAGSGALSKPIANTPQSIIKWLVDLEVKGLKVFGDYSSCIMERFAYDGVKNGHGNMIHSDADLFFFDKQSGREFMDTKGSEDEAVDEMETAGNNAFMAAAQSMKGVTDGMRKRKSCGYEDATAVKFVKYKVEDSSLKDYLSAANGISSGSEVENPQSDDEMEESN

SEQ ID NO: 46184 - protein, 292 aa, Zea Mays
MAAVASPALRLRPRAASTSATSSSAPPRCRFGSFSHSCFKFGRSFPVQRVNGSTMQHFGTLKAQVFSSTGDHDGRFHIKRTICFAATDKQEPVVSRYSDMPVLHEAESDFLILFFTEALFYGGVAIFVFLIDKVWRPLQQVAPKSYIWSKSRFFRISSVTTMVLSLIIPLLTMGMVWPWTGPAASATLAPYLVGLVVQFAFEQYARHRKSPSWPVIPIIFKVYRLHQLNRAAQLVTALTFSVRGTETTNQTLAIMNSLGALLTVLQILGVICVWSLSSFLMRFLPSSDIPDP

SEQ ID NO: 46185 - protein, 153 aa, Zea Mays
MPRPAAHACAVGVPQHPHRVACLQSRPHPLLLAQRDHQRLDVHRPARVHAVLRPHPGAPRPVLHQGVWYDWAPLLLRRPSSNQGRLALAPRTHDPLLLYPQRRAPPSCFWQRKPSPCGKLPTRWNAQPLVGSTQPLRDVTNSERLYAPHTSMR

SEQ ID NO: 46186 - protein, 156 aa, Zea Mays
MYFFYLEKHSRDLCLEDGDLNLTDLHWWINMQKKRFRRSWTSPTSVASLTPSSSATSGAMQAKVVDNGVRGGELAAQPGDEAIALVDEPGDGLGHGGAGGRRGDDGGGGGHRRASLTTAGRSIAQPAMPRSITTGNRRPDPLPSRTHSCPLSLRCA

SEQ ID NO: 46187 - protein, 198 aa, Zea Mays
MPRPAAHACAVGVPQHPHRVACLQSRPHPLLLAQRDHQRLDVHRPARVHAVLRPHPGAPRPVLHQGVWYDWAPLLPLLPSSPAPATELQPGTSSASAQDARPPAPLSSAPSPSVLFLAAKAQPLRQATYSMECPAACRIYAAPARRHKLRTVIRASHKHALNFSLSQPYRFLGVYGFPRQSGGITSRGLVCWRKMASC

SEQ ID NO: 46188 - protein, 335 aa, Zea Mays
MFLPEVPFEILVRKQIGRLLDPSLQCAQFIYDELIKVCPQCLISELQKFPALKKRLSEVVCSFLRDGLRPAETMITHIIEMEMDYINTSHPSFVGGTKVVELAKHEVLPPKTSASLSGRKDGTIVGSEIQLAAERSQKSRAVFARDAIRRVTSEQASVEAGNSQVGESSSKLPSIIPLKEPPITLKPSETEQDATEVAVVKLLIKSYYDIVRKNIEDAIPKAVMHFLVNHTKRDLHNFLIRKLYRENLLNELMRETDEVLMRRQRIQEMLEILEQAHRTLEEFPFEVDKLEKGYNLTEHATGLSKIHGVSGDSTNVIYTSSPNCYSPHRASHMVL

SEQ ID NO: 46189 - protein, 492 aa, Zea Mays
MVDKVKVVGAPGKRKNAFCGDSFGRMTAGGGAGAWLPRVSGQPADLEAASVMATESAVRLIGGTGARDWSKGFGAFDSSVGALSGEDLGFVDNDAGVYGGWSKSVPNRSGSAPPSMEGSLAALGHLIGQQSGSFEASLATLDNITDSSKSEEQVLADPAYFEYYGSKVNLNPRLPPPLISRESRRLMNRVGKAKEWRVVSQDNSNKDSIYIPRSTLSTHKEEPEDDKSPRLDLSSVEDAQIISSASNFQSQDFMLALEVMELDQKIDLVHELDGHVMRCVRDQNGNHVIQKCIECVPTEHIGFVVSAFQGQVASLSMHPYGCRVIQRVLEHCGGTSQSQCIVDEILQSACVLAQDQYGNYVTQHVLERGNAHERSQIIIKLAGQVVTMSQNKFASNVIEKCFQHGDMAERDLLIRQIVEQTEGNDNLLAMMKDQYANYVVQKILETCNENQRELLVSRVKGHMQALRKYTYGKHIVSRVEQLCGDGTAEPDS

SEQ ID NO: 46190 - protein, 316 aa, Zea Mays
MVLFELDPDIIRWGLHHLLPAPAGYSPHCRTQTTPTTPCTAFARPPHQPIGDMGTSSSVEIKVEHVDGVDNDAIIAQALQEELSNVAFAEASGPTSAADNQQHSAVLTQQWLRPRAVHVEPEAGTREEPFSTCSSPGDDNNVQDSQQCLIELMDNFSVIDGEVGKRLNNMVPVPHVPKTNGEIPSVDEAISDHQRLLDRLVVYGLVDLKVKGDGNCQFRALSDQFYRTPEHHRFVRQQVVKQLESHPEIYAGYVPMDYREYLKKMSKSGEWGDHVTLQAAADSYGVKIFILTSFRDTCYIEILPVVEKSRREVLAI

SEQ ID NO: 46191 - protein, 159 aa, Zea Mays
MADLSQVHCFYPAVSNRGWPRRNVDNVPSPPVCEEEGPLLRFLREVLHELPFLSSGCAGALPVPVAEAVPARVQAAQVQAGEGEQEETGLRKSGSAQLSCHLLLSCETLTGHCGFLFWKKIFVSCCLMRRGQLLDYALGSLFVSIALRFMSVLTYIKHI

SEQ ID NO: 46192 - protein, 187 aa, Zea Mays
MVRLPPPPPALPRPSLPCPLRTCAILETVHAAIGLVPTAPLLAFLQWGGRIHFILAVVRQIPEVQSSPSVFITFIAWSISEVIRYSHYALTTLKVCPAWLTYLRYTAFIPLYPIGVGPGEMWTMYQALPFVKKRDLYSGFFEKFSMSYRSFLVGVLVLYPFLWLKLYQHVFKQRKSKLGKGSRKKRA

SEQ ID NO: 46193 - protein, 438 aa, Zea Mays
MDAAKVAQKAWARTPLWKRAELLHKAAAILKEHKAPIAECLVKEIAKPAKDAVSEVVRSGDLVSYTAEEGVRILGEGKLLVSDSFPGNERNKYCLSSKIPLGVVLAIPPFNYPVNLAVSKIGPALIAGNALVLKPPTQGAVAALHMVHCFHLAGFPKGLISCVTGKGSEIGDFLTMHPGVNCISFTGGDTGIAISKKAGMVPLQMELGGKDACIVLEDADLDLVSANIVKGGFSYSGQRCTAVKVVLIMESIADAVVQKVNAKLAKLKVGPPEDDSDITPVVTESSANFIEGLVMDAKEKGATFCQEYRREGNLIWPLLLDHVRPDMRIAWEEPFGPVLPVIRINSVEEGIHHCNASNFGLQGCIFTRDINKAILISDAMETGTVQINSAPARGPDHFPFQGLKDSGIGSQGITNSINMMTKVKSTVINLPSPSYTMG

SEQ ID NO: 46194 - protein, 998 aa, Zea Mays
MQEINRGKVLAILGTDFDQYVMLPSEGARGGILISWKKHIKVTGLNRVDSYSISLQFQRNNGQSWWLTCVYGPQSNSEKILFLQELRHFRSICSEPWVIVGDFNLIYKVEDKNNDNINRSMMGRFRKFINDVGLIDTPLIGRKYTWSNHQSSPTLVRLDRVLCTTDWEALFPNHLLQSAASEDSDHCPLILGLNSMCSGKRRFHFESFWPKLEGFQEVVLEAWNSVNERSCPFLTFELKLKSTAKALQRWSAKKVGHVSSQLALAREILHQLEIAQDSRLLSPLEVWLLRGLKKHSLALASLKRTIARLRSRISWIKEGDANSKLFHMHARHRQRKNFVAKIVSGMNTFTDHGEKARAVDEFYFKLLGCKADRSLTVDLDYLGLPSHDLTDLDAQIDENEVLESIMQLPSDKAPGPDGYTGRFYKVCWPIIKTDVMAVIAAIWCRKFQQFGRLNTAFVTLIPKKEGAEEVKDFRPISLVHSIAKLVTKLMANRLSQRLHDLVSLRQSAFIKGRFIQDNFMLVQQTARLLHQQGQPRVLLKLDITKAFDSVSWPFLLEVLQRLGFGQIWRDILSGLLATSSTQVLLNGVPGNTIPHKRGLRQGDPLSPMLFILVMDILGCIVAKADEEGQLEPLSSKPLHHRISLYADDAVLFFHPRESEIHTVLGILNLFGEASGLKTNIQKSSVYPIRCGQDELDILNDWLPCELSSFPCKYLGLPLSLKKLSNNQLQPIIDKVADQLSGWKADLMTRAGRRVQVQYVMTGMLIYLVMAVDIPTGSLKAIDKIRKGFLWRGRKEVRGGHCLVAWGRVCRPLEIGGLGISSLKELGWALRMRWLWLRKTDPDKPWSSLPMQISNKIKAFFCTALLTEIGNGSSTLFWLDRWVHGKNIEDIAPRLLAAVPKRIRNSRTVLEALTDRRWLTDIKGALTVGVFADLLDLWDELQSVQLHSDREDKHIFRFANDGIYSAKAAYKGAGQQIVCRREVLAILTNVSCVTKSKKP

SEQ ID NO: 46195 - protein, 129 aa, Zea Mays
MQGSGALPGLTGTGRGGGFLPCGSLGKRTPAGRRGATSVRAVDGASVAAAASAAADSPLPPVQVTWQIAVGALAGVTPFVVAGVEFGKRIKKCQVCGGSGLVTKNDYYVRCQKCGGFLPWQSWRRFFTG

SEQ ID NO: 46196 - protein, 492 aa, Zea Mays
MDDIASEAPVGAFAIGPSTALGGAVALRVLLCGSAARLRHRLAAALRAALPVAAAWLHPRDNTRGILLAVCAVALLLRGRRGRAGLRARVQSAYRCKFWRNMMRAALTYEEWAHAARMLELEAAPRRASDADLYDEELVRNKLRELRHRRQEGSLRDIVFCMRADLLRNLGNMCNPELHKGRLQVPRLIKEYIEEVSTQLKMVCDSDSDELPLEEKLAFMHETRHAFGRTALLLSGGASLGSFHVGVVKTLVEHKLLPRIVSGSSVGSIMCSIVATRSWPELESFFEEWHSLKFFDQMGGIFPVVKRILTHGALHDIRHLQVLLRNLTSNLTFQEAYDITGRILVVTVCSPRKHEPPRCLNYLTSPHVLIWSAVTASCAFPGLFEAQELMAKDRFGQTIPFHAPFLLGMEERTVAPTRRWRDGSLESDLPMKQLKELFNVNHFIVSQANPHIAPLLRLKEIIRAYGGSFAAKNAETLFIGHASVHVKHEDIS

SEQ ID NO: 46197 - protein, 102 aa, Zea Mays
MSTDTQERAIHLGDVNSFAEVPRSVLQEAIMSNSLAKRVKTEKLSQGDSRISVKRTNTDEDILTKAQRLGAKRNLETSHFQRYSLVKVLETSTEEGNTSTNS

SEQ ID NO: 46198 - protein, 885 aa, Zea Mays
MMSFRSKDAHAQTRLNWPWRSQSPLSAQLLVDIPPEIELSDYRRLPSSRSESPSGLLHDEGVKEEPIPDLDIFFERLYEYFCAKGLRCIITKWIIEILNVLFMVCCIGFFFLFVDWDTLIHLKCGVEALESGEKPCDLMKAIKHDPLVPFTLPKMITVGSMVIMTAYGLTNFLKFFVQLRSTLNVRQFYYDRLKVNDLEIQTISWPKIIEKVVLLQKSQKLCVVRDLSEHDIIMRIMRKENYLIGMVNKGILSFPIHSCVPGAGPTGSHEHGRRNYLILPKSLEWTLNWCIFQSMFDSKFCVRKEFLTSPDVLRKRLIFVGIAMLILSPCLVIFPLVYVILRHAEEIYNHPSTASSRRWSNLSRWIFREYNEVDHFFRHRMNNSAVHSLNYLKQFPTPLVSIMAKFVSFVSGGLAGALIIIGFVGESILEGHIFGRNLLWYTIVFGTIAAISRKVVADELQVFDPEGAMCLAVHQTHYMPKRWRGKENSELVRREFETLFPYTIIMLLEEMASIFITPYLLISERVDDILRFISDFTIYVDGVGDVCSLSLFNFKKHGNRNYGSPFNALKGLRSSQGKMEKSFLSFQSVYPSCEPNADGKQFLSNLQKFKERQVRQQALAQYQALEASGFVAGTRGQRDDTFQQLHSDIHGHAEATLPPVYNLSPLGLLDTDQRMHPYILDWYYTCHPPHSDRAEGPQFDQAFPETGVSTSPPARETSEIEEVGDWDNELYERVQSHLGASTSSALFWNTPGKDHGTEENTNSNWWAHAPAYPSGPQGSFIEPPDFGNRYMTNPHSSNHSGGTSEGSTSDLEQSNSRSRSSWRSPQALSKTRYMDDSDIEEGLSLHFADVHQKDEDDRHLVVRDHQDPAPSGLPVRIIPRSSDPV

SEQ ID NO: 46199 - protein, 663 aa, Zea Mays
MMSFRSKDAHAQTRLNWPWRSQSPLSAQLLVDIPPEIELSDYRRLPSSRSESPSGLLHDEGVKEEPIPDLDIFFERLYEYFCAKGLRCIITKWIIEILNVLFMVCCIGFFFLFVDWDTLIHLKCGVEALESGEKPCDLMKAIKHDPLVPFTLPKMITVGSMVIMTAYGLTNFLKFFVQLRSTLNVRQFYYDRLKVNDLEIQTISWPKIIEKVVLLQKSQKLCVVRDLSEHDIIMRIMRKENYLIGMVNKGILSFPIHSCVPGAGPTGSHEHGRRNYLILPKSLEWTLNWCIFQSMFDSKFCVRKEFLTSPDVLRKRLIFVGIAMLILSPCLVIFPLVYVILRHAEEIYNHPSTASSRRWSNLSRWIFREYNEVDHFFRHRMNNSAVHSLNYLKQFPTPLVSIMAKFVSFVSGGLAGALIIIGFVGESILEGHIFGRNLLWYTIVFGTIAAISRKVVADELQVFDPEGAMCLAVHQTHYMPKRWRGKENSELVRREFETLFPYTIIMLLEEMASIFITPYLLISEVPKRVDDILRFISDFTIYVDGVGDVCSLSLFNFKKHGNRNYGSPFNALKGLRSSQGKMEKSFLRVSIHHVSQMLMANNSYLTSKSSKKGKYVNKLLHNIKHWRLQALWQALEVKGMIPSNNSIAIFMATLRPPCLLFIT

SEQ ID NO: 46200 - protein, 127 aa, Zea Mays
MTTTQLEGSKEDGDAKQGQGFLYVKVSMDGAPYLRKIDLKTYKNYKDLSTALEKMFSGFSTGKDGSSEYRKDGEYVLTYEDKDGDWMLVGDVPWEMFAGSCRRLRIMKGSDAIGLAPRAADKSKNRN

SEQ ID NO: 46201 - protein, 215 aa, Zea Mays
MAAVEVCVKAATGKPDTLGDCPFSQRVLLTLEEKKVPYEVKLVDLDNKPEWFLKISPEGKVPVFNGGDGECIADSDVITQTIEEKFPTPSLVTPVEYASVGSKIFPAFITFLKSKDASDGSEKALLDELQALDEHLKAHGPYINGENVSAADLSLGPKLFHLQVALEHFKGWKIPENLTNVHAYTKALFSRESFVKTKPSEEHVIAGWAPKVSHL

SEQ ID NO: 46202 - protein, 457 aa, Zea Mays
MHTQPIKMKRGLLVLWSLFYFSVANADTRNQAKQPLEFNQLRVSRKYVQGKQDSTPKNGTSPSVHRGSTSNQREQDKIVCMPGQTGVAEFDQYAGYVTVDAKAGRALFYYFVEAPQDPSNKPLVLWLNGGPGCSSFGSGAMVELGPFSVHSDNKTLYKKRHAWNRMANMLFIEIPAGVGYSYSNTTSDYYNTGHYIPELANLILSKNRATNVTSIKLKGVAIGNADLDDNLTLRASYDYYWMHAMISGKAYKAVKDKCGFNGTYTEDCQNAMDLATQEKGNIDDYDIYAPICQDASNPSKSSDSLVFGDPCTNHYVSSYLNRPEVQRALHANTTGLGYPWMDCSQQIFDNWKDSPETMLPSIKKLISSGTRIWLYSGDMDAVCSFISTQYVLDNLGLPIEAAWRPWRVDNEVAGYVIGYKGLVFVTVRGAGHMVPYYQPRRALALFSSFLEGELPPR

SEQ ID NO: 46203 - protein, 226 aa, Zea Mays
MAGITKRRTSPASTSSSSGDVLPQRVTRKRRSARRGPRSTARRPSAPPPMNELDLNTAALDPDHYATGLRVLLQKELRNSDVSQLGRIVLPKKEAESYLPILMAKDGKSLCMHDLLNSQLWTFKYRYWFNNKSRMYVLENTGDYVKAHDLQQGDFIVIYKDDENNRFEQRRQEMSRPPLYLKSMNTCTSLPHCQLHKRSMTMQAPSQQKLVCSRSCHRVTRYSTAY

SEQ ID NO: 46204 - protein, 285 aa, Zea Mays
MLYKYCEERGVAHKRISKLIVATGAAEVPKLDMLLRNAKENGVDDLQLMEGSEAMEMEPELRCLKALLSPSTGIIDSHSLMLSLLADAENLGTTISYNTSVISGHVGSNGLELHVCESKELQNYHEFVPTPHYARGCYFTLSQTKSPFSRLIYPLPEDGGIGVHVTLDLNGLVRFGPDVEWISDGGKDHVSCFLNKFDYSVNPNRCSVFYPVVRKYFPNLKDGSLEPGYSGIRPKLSGPGQPPSDFVIQGWDVHGVPGLVNLFGIESPGLTSSLAIAEHIVSKYL

SEQ ID NO: 46205 - protein, 396 aa, Zea Mays
MLLLRRLVRAGRSWGTEARGLASGAPREAADAVVVGAGVVGLAAARALAMAGREVVVVEAAPSFGTGTSSRNSEVIHAGIYYPPRSLKARLCVRGKEMLYKYCEERGVAHKRISKLIVATGAAEVPKLDMLLRNAKENGVDDLQLMEGSEAMEMEPELRCLKALLSPSTGIIDSHSLMLSLLADAENLGTTISYNTSVISGHVGSNGLELHVCESKELQNYHVGSHVNAQLVLLPKLVINSAGLSAVLLAKQFHGLDQEFVPTPHYARGCYFTLSQTKSPFSRLIYPLPEDGGIGVHVTLDLNGLVRFGPDVEWISDGGKDHVSCFLNKFDYSVNPNRCSVFYPVVRKYFPNLKDGSLEPGYSGIRPKLSGPGQPPSDFVIQVLSGVGCPWCSWTG

SEQ ID NO: 46206 - protein, 344 aa, Zea Mays
MGPPAMAFQALTLTPLPFSLHSSSRRVRVLAVAADQTPPPAPPSEPANSPSRLLRELAQRKKAVSPKKKHPPRRFILKPPLDDERLTRRFLSSPQLSLKALPLLSSCLPSAPLSTADRTWMDEYLLEAKQALGYPLAPSETLGEGDDCPARHFDVLFYLAFQHLDPSSERTRMRHVRNGHSRLWFLGQYVLELAFCEFFLQRYPRESPGPMRERVFALIGKKVLPRWLKAASLHNLVFPYDDLDKMIRKDREPPSKAVFWAIFGAIYLCFGMPEVYRVLFEAFGMDPDDESCQPKLRRQLEDVDYVSVEFEKRQLTWQDVAAYRAFPSLCATRHASVQRKYLGF

SEQ ID NO: 46207 - protein, 242 aa, Zea Mays
MLKKASAGRAAAATGRGDPAAPASRPSPTAKVAEGGACSARPASRLLSTRSVPSLFAESPMTTSPAASAPELLSRAPLRSGGSPGAAGLAGVLVAEEADERGSLLRNGRRVLRGTRLRVQLPPPPPIEFGVKNREAQLALLSPVQRSPARLARRRSEVEEELAGEDYTCVIARGPNPRMTHIFEDRVVESSTSTSSSTSCDGCNKDAALLLVLERGDSEFCIDQRKALFGGERAGGERAVTN

SEQ ID NO: 46208 - protein, 116 aa, Zea Mays
MEINPAHRKTSVRLSPMWAVSRSFLVVPARETRPVDRGWKISQPGLHANAKGTRLLVGVDLLRRPLVIDYPYIGLTWRRRASTILGPYTLSFRYLLNPKCSYYIIFCFCWCLFLFR

SEQ ID NO: 46209 - protein, 455 aa, Zea Mays
MPPPSPPASQVRTCDAGAAQSPTRGTVSEMARYFRSSNLASRVFERQLISPRPGATVNTIRQFYENLVPSYTIYDIDCPDYSFRKFTDDGKYFVAFSRNHQDLIVYRPIWLTYSCNEECDPHELPPKAKKFDSFFKQLYSIPLASGNEYICKDFFLYMECHRFGLFATSTAQSNESTATEGAIHGVPLIEKITFHLVRLEDGVILDEKAFCNDFINLAHSIGAYMYEDLLCIVSLRYQTIHILQIRDSGNLVEVRSIGAFCREDDELFLHSHVQRVQHLKKFYFHFQDYVDLIIWKVSRSTDQNLAFFAVYNMETTDIVSLHQNSSEELYALFEQFYDHFHANPQASSHGKFISSHSNDIHALDQLRVIKNKASSSSQLISAIDRHRHCTEHPIKFISVRQNVVKFKIKPGSDSGASDSRIKRISSFLFHPFFPLALSIQQTYMQPTVLNIHFRR

SEQ ID NO: 46210 - protein, 451 aa, Zea Mays
MPPPSPPASQVRTCDAGAAQSPTRGTVSEMARYFRSSNLASRVFERQLISPRPGATVNTIRQFYENLVPSYTIYDIDCPDYSFRKFTDDGKYFVAFSRNHQDLIVYRPIWLTYSCNEECDPHELPPKAKKFDSFFKQLYSIPLASGNEYICKDFFLYMECHRFGLFATSTAQSNESTATEGAIHGVPLIEKITFHLVRLEDGVILDEKAFCNDFINLAHSIGAYMYEDLLCIVSLRYQTIHILQIRDSGNLVEVRSIGAFCREDDELFLHSHVQTGYAGSFLPGIKQRLLSYIFCKTWNERVQHLKKFYFHFQDYVDLIIWKVQFLDRHHLFVKFGSVDGGVSRSTDQNLAFFAVYNMETTDIVSLHQNSSEELYALFEQFYDHFHANPQASSHGKFISSHSNDIHALDQLRVIKNKASSSSQFVKKMMTSLPYTCQSQSPSPYFDLSLFS

SEQ ID NO: 46211 - protein, 597 aa, Zea Mays
MENSGKFGSSPLLVGMMVSSLEKSFRLVDIGPNPENRVEAVKFRKFWGEKAELRRFKDGNIAESTVWECQSWEKHTIIKRIADYVLMKHLSLQKDDLIHVVDQLDFCLLVDGQDPVSSSGALLEAFDTIAKQLRLLDDIPLKISTVQPLDSAFRHTSVFPPEPHPLAYGRNSQRLPKFATTCIRSLEVMIQLEGSGNWPLDPVAMEKTKTAFLLKIGESLEDRGMFVSASENEVNVLTSGYSFLLKIFHERGLVMQKPVGDDKTQSVLSEDKMLFQRSQHSSMINGLHGRYQVYGPVVRLAKRWISAHLFSSFISEEAVELVVAHIFLKPFPFHAPSSRVAGFLRFLRLLSSFDWIFSPMVIDINNDFNLMDEKEINDNFMLSRKSYERNPHDIEPAMFLATSYDKTSEAWTKQSPSKSVLKRVAAYAKSSAELLTNLMLHGPSGEYTWECLFRTPMSNYDAVILLHQEKLCCPHHVLFPAENPDGKLVVWGKPSKDFCPYMPLNKGAVKGLHDAREKLLVNFDPTTYFLRDLKTFKLWYGSVGGDAVGLTWENPKKRGREEADEAAPEPTSILKEVGDVGKGLVRGVYLVKAPKFQ

SEQ ID NO: 46212 - protein, 743 aa, Zea Mays
MGTSVQVTPLSGAYGEGPLCYLLAVDGFRFLLDCGWTDLCDTSQLQPLAKVAPTVDAVLLSHPDMMHLGALPYAMKHLGLSAPVYATEPVFRLGLLTMYDHFLSRWQVSDFDLFTLDDVDAAFQNVVRLKYSQNYLLNDKGEGVVIAPHVAGHLLGGTVWKITKDGEDVVYAVDFNHRKERHLNGTVLGSFVRPAVLITDAYNALNNQGYRKKQDQDFIESLIKVLATGGSVLLPVDTAGRVLELLLLLDMYWDERRLQYPIYFLTNVSTSTVDYVKSFLEWMGDQIAKSFESSRANAFLLKKVTLIINKEELEKLGDAPKVVLASMASLEVGFSHDIFVEMANEARNLVLFTEKGQKIFALQFGTLARMLQVDPPPKALKVTMSKRIPLVGNELKAYEEEQERIKKEKSLKASLVKEEELKASHGSNTKASEPMVIDASSSRKSVNASHFGGNNDILIDGFVPPLTSVAPMFPFFENTAEWDDFGEVINPDDYMMKQEEMDNTLMLGPGDGLDGRIDDGSARLLLDSTPSKVISNEMTVQVKCSLVYMDFEGRSDGRSVKSIIAHVAPLKLILVHGSAEATEHLKMHCAKNLDLHVYAPQIEETIDVTSDLCAYKVQLSEKLMSNIISKKLGEHEIAWVDAEVGKEDEKLILLPPSSTPPPHKPVLVGDLKLSDFKQFLENKGWQVEFAGGALRCGEYIMVRKVGDSILKGSTGSQQIVIEGPLCEDYYKIRELLYSQFYLL

SEQ ID NO: 46213 - protein, 760 aa, Zea Mays
MGTSVQVTPLSGAYGEGPLCYLLAVDGFRFLLDCGWTDLCDTSQLQPLAKVAPTVDAVLLSHPDMMHLGALPYAMKHLGLSAPVYATEPVFRLGLLTMYDHFLSRWQVSDFDLFTLDDVDAAFQNVVRLKYSQNYLLNDKGEGVVIAPHVAGHLLGGTVWKITKDGEDVVYAVDFNHRKERHLNGTVLGSFVRPAVLITDAYNALNNQGYRKKQDQDFIESLIKVLATGGSVLLPVDTAGRVLELLLLLDMYWDERRLQYPIYFLTNVSTSTVDYVKSFLEWMGDQIAKSFESSRANAFLLKKVTLIINKEELEKLGDAPKVVLASMASLEVGFSHDIFVEMANEARNLVLFTEKGQFGTLARMLQVDPPPKALKVTMSKRIPLVGNELKAYEEEQERIKKEKSLKASLVKEEELKASHGSNTKASEPMVIDASSSRKSVNASHFGGNNDILIDGFVPPLTSVAPMFPFFENTAEWDDFGEVINPDDYMMKQEEMDNTLMLGPGDGLDGRIDDGSARLLLDSTPSKVISNEMTVQVKCSLVYMDFEGRSDGRSVKSIIAHVAPLKLILVHGSAEATEHLKMHCAKNLDLHVYAPQIEETIDVTSDLCAYKVQLSEKLMSNIISKKLGEHEIAWVDAEVGKEDEKLILLPPSSTPPPHKPVLVGDLKLSDFKQFLENKGWQDFSVERERIKYVEIQSLRKELLQVEFAGGALRCGEYIMVRKVGDSILKGSTGSQQIVIEGPLCEDYYKIRELLYSQFYLL

SEQ ID NO: 46214 - protein, 435 aa, Zea Mays
MHEHTRAWAWEATVRKVQHPQPVGRRRVSPMSAADDYETASSSSSAAGDVCEHVHGYMERGLPNGDFYTGQWRDGAPHGAGKYLWTDGCMYEGEWRHGKATGRGKFSWPSGATYEGEFKDGFMDGSGTYTGAAGDTYRGSWSMNLKHGSGKKSYANGDEYDGEWRAGLQDGSGRYTWRNGTEYTGQWCAGLIHGRGALVWSNGNRYDGGWEDGCPRGQGTFRWADGSVYVGRWTRDTPTGIVQQKGVYYPSPAASSPTARDPRDVFARDLPGFMGARPDSPSPRKSRASSVRAANGRASSASGLSNSSGGDRKYEKICIWESDGDITCDIVDGPALGDEAGTARRSVRTDDGGDDRGLPPPSPAPHVTQWVPPREVKRQGETIAKGHKHYELMLKLQLGIRHAVGKQGPIVLDLKSSAFDPKEKDAAQAVQGGCW

SEQ ID NO: 46215 - protein, 464 aa, Zea Mays
MHEHTRAWAWEATVRKVQHPQPVGRRRVSPMSAADDYETASSSSSAAGDVCEHVHGYMERGLPNGDFYTGQWRDGAPHGAGKYLWTDGCMYEGEWRHGKATGRGKFSWPSGATYEGEFKDGFMDGSGTYTGAAGDTYRGSWSMNLKHGSGKKSYANGDEYDGEWRAGLQDGSGRYTWRNGTEYTGQWCAGLIHGRGALVWSNGNRYDGGWEDGCPRGQGTFRWADGSVYVGRWTRDTPTGIVQQKGVYYPSPAASSPTARDPRDVFARDLPGFMGARPDSPSPRKSRASSVRAANGRASSASGLSNSSGGDRKYEKICIWESDGDITCDIVDGPALGDEAGTARRSVRTDDGGDDRGLPPPSPAPHVTQWVPPREVKRQGETIAKGHKHYELMLKLQLGIRHAVGKQGPIVLDLKSSAFDPKEKVWTKFPPQGSKYTPPHNSCDFRWKDYCPQDAAQAVQGGCW

SEQ ID NO: 46216 - protein, 656 aa, Zea Mays
MARTNWVADKMLDVYIYDYLVKRNLQATAKAFIAEGKVATDPVAIDAPGGFLFEWWSIFWDIFHSSTAKASSTSTAAAFIDHTAKQQQPIGAGTGAPPPHPLHDDIKPDVGMPQRTMPADPSSMYASGMMHPKPALLATGLNQGGVGSVPLKGWPLTVPGIDQLRSNLGVQKQLVPSSNQFQLLSPQQQLLAQAQTQNDLTRMGSPAPSASPNVRPDDPDYLMKLKMAQMQQSSGHRPMELQQPHQQNTRKRKPTSSGAANSSGTGNTVGPSPPSTPSTHTPGGGVPVASNVNILQKSSMICGVDATGGLASSSNQMDALDSFVDFDENVDSFLSNDDVDGRGMFAALEKGSSEHNTESLKGLSLSEVGNNRTSNNKVVCCHFSSDGKLLASAGHEKKVFLWNMDNFKMDTKIEDHTNFITDIRFRTNSTQLATSSSDGTVRLWNAADESGALQTFHGHRSHVTSVDFHPRLTEVLCSCDDNGEILFWTVGQTTSTHVLRVKQGGTGRVRFEPRSGQLLAVAAGSMVNIFDVEKQSSLPCPPKGHNSEVNFVSWDENGEYLASVSQDTVKVWSVSSGVCIHELRSNGNQYQSCTFHPRYPKVLIVGGYQTLELWSLSDNQRIPIQAHEGLIAALAHSPFTGMIASASHDRCVKLWK

SEQ ID NO: 46217 - protein, 201 aa, Zea Mays
MLAHEQKQQEPPQGESDSRSSESSRFIASEKGEKSATEEAAATAIPSSYLSLRSRTRIDPSRVLHRPPASSYPSPLPPPRARAGSHQTLGRQIRCDHPRWRPRRRPRGAAQGSGQGSGTSPAPPLAGGTGGWSWEPAAPSLRRPSETSSRKASATSASRTSATPATATVSFRHFIFAFHSGSSYWNIMQITKLQETLRKIF

SEQ ID NO: 46218 - protein, 305 aa, Zea Mays
MISIEQPWFTISNHQAAQQERSIFLSSLLPLLSEYDDLQPSVLDAQSIVSNLKVLFKHLQERLIVTEDRLRESRYQITPWHTELSNNTSNPVSTNPPAGKALSKSSLDIVSQMVYPHVQSPMSSPVQARGDWGAFGNKNHQDISNEVPIRNAGHDDKGGTSLSSRSQYRTDVPPQVSQGDSSAVHFDFETQSQNPPFKGLSRNDVLDGSDSAEAQNTQEPSTRWGLGDSSNLASGLEDANPSYPYLPTVLEEPGSSFSEAAEDDPLPGIEGLRITGEPFPGQELQAVGAPFRRRLSKFHRRSKAA

SEQ ID NO: 46219 - protein, 110 aa, Zea Mays
MQAVADEIVLVNVDPQKPPKAWNLVKLLDEFVSLGGKLSESFKDIREQNLQSALEQMQGWGPVKADSFALPNMPLPPDSFRGIRKRTSSITRWFSICVDDTSNLYVASFR

SEQ ID NO: 46220 - protein, 1138 aa, Zea Mays
MASTAATPEAGSNHSEDGTTVELPIVVTGSTSQESIDTPSTRYLLAPSHVSSSSFTADIELLWRLRKYLLLLGILAVGVTYNAGLTPPGGFWSKNTQGQSGHEAGDPVLRALFFPRHEVFFYCNATAFAASLVLIILLLSKNVARQRLWLRSMQLTMVLDLFSLMGAYAAGSCRAVKSSIYIWVLVLSVFTYIMIHILVFMKVVPRFVSEKRFVPKRLKDVARSVERWILSRCGVHRSEKNSSHEKDLEEARKFTLVLVTFAATVAYQAGLSPPGGFWAENDENKTPATSMLRSGNLPRYNTFVVCNSTSFVASLVTIILLLSPELSRHGIRSRAVTVCVVVDILGLVGAYAAGSCRSVVTSVSAVLVAVLVWICFAVLAGIFVNRSVAEWFGKKIKPDIMRCIDRFGRVFSSNHGRKRSRNPEGENSIASHQQTEESIKGEAEAETARVPEYQLPYHQLAPDIEEGECPGEQQSPGKQQPTNIEVVSISEHASVNEKQAENSSSVMCKLGSQSTDPNSAANEAMTETETENIQDANMEEQQSSLVDGLKTPTTVADQESTTVECLSDIAPNNHNGATNSFKEEKEASEQHLQANEIESFRTNNVARPVENGNVGMYEVTPRQDDGDVNAGANPTDEHLKKSRTYLLLLAILAVSLAYQSGLNPPGGFWTQRGSYIMGSSRGTKSSIYIWLLVCLVLVYVAVHVLIATHVIPEGCKKVVAQKIENFSCRYIWTKASFRNRGIDGNGSDCEAGQSQRSDADDKTWERRRNLLLMLAVLAATVTYQAGINPPGGVWSDDSSASGKPGDPILQHNNSKRYDVFYYSNSLSFVASVVITILLVNKESCEHGIKSYALRVCLVVGLVSLLIAYSAGSSRKARESIYLIVIAVAVLIALVIQVLLLSCTQDSLRGPTGQFIERLLQLLFGTDKAWHGDTSKQKESSGRPEKKVRKRHKYLMLLAVLAASITYQAGLNPPGGFWSDDNEGHVEGNPGLKPPGALWSDNKGHLAGNPVLLDINPRRYEIFFCFNSISFMASIVVVMFLLNKSARKKAVPLEVLHLIMILDLLALMTAFAAGSCRKFRTSVYVYGLVLGVVVYLVIAVLLSSGIAKCLRPMDRNRVSSQRSPIRAPTASTRILGDHA

SEQ ID NO: 46221 - protein, 94 aa, Zea Mays
MHGQFQFLSPHGPCIICSATRAYPKGSNSGSGISADIHESIVSVVISQPFLSNQINVCTCGRPRFWNSIEYSSASTRPNTFPDCKSSKSCCSFI

SEQ ID NO: 46222 - protein, 257 aa, Zea Mays
MSQEKYIDQNIGAQLQPQPSKVQCLPDTTQFQSMNVDAAPATYVQQDSKLTATPHEESCASESKVVKLLPLKVEVEPFKVAEPCTHQTDPVVVRPEAVQQQSMEIQCLLYATPNSQQTFGQQVLEPIVAPHEVSACKSNTVKTPLETVQMEVEAPLEAVQLEAEAFKVDKPEACRHLDKFCDQNARALVAEREDCTLMTEAVVALATDYSKENIPVLHENIQANVDASSLVEVLTQKLSSISLGEDNSNVALRSCSE

SEQ ID NO: 46223 - protein, 160 aa, Zea Mays
MCRPNERAHISFVVAVALLHMTCLCQYADCSLYRSYPSIPRCDFADNFFFIPGIAAPVFAGVYTAHSLLSRGNEAPSDEGTNESDTVQEETKPPETGNCEKRKVRVQLYKLQEAESQASLLESCLKSLCTVGLLLGYSVLLLYSPETMALGCGAEGWNAL

SEQ ID NO: 46224 - protein, 63 aa, Zea Mays
MHITRHVWSWTPTRCSQTPSWRRCSQCWSLLTRQSNLNYSFPARNGRRRNCSTMEDGGREAFK

SEQ ID NO: 46225 - protein, 571 aa, Zea Mays
MTTSSSGSIEAPANSRPGSFAFASTSTSTSTSFTDMLGGSTDAAGGASRYKAMTPPSLPLSPSSFFSNNPGGLNPADFLDSPALFSSSIFTSPTTNAFASQQFSWLATSGAEQSGKDERRPSSYPDFSFQTAPTTEEAVRTTTTFQPPIPAASLGEEAYRSQQQQPWAYQQQQPGMDAGSSQQAAPYGEPFQAASSDAATMAPHVPASGGYSHQAQQSQRQSSDDGYNWRKYGQKQMKGSENPRSYYKCTFPGCPTKKKVERSLDGQITEIVYRGTHNHAKPQNTRRNSSAAAQLLQSGGGDASEHSFGGMLGTPVATPENSSASFGDEEAGVGSPRAGGNAGGDEDEPDSKRWRKDGDGVGEGISMAANRTVREPRVVVQTMSDIDILDDGYRWRKYGQKVVKGNPNPRSYYKCTTPGCPVRKHVERACHDLRAVITTYEGKHNHDVPAARGSAALYRPAPPPGDNAGHYLGGAAGAAQTGMAYQLAGQQYGFGGQLGSFGLSGGAPAQSSGPSGSLALSSGFDNPMPMGSLYMSQSQQQGQHDAMHAPRAKEEPREEDMFFQQSMVYTD

SEQ ID NO: 46226 - protein, 240 aa, Zea Mays
MSSSSPSLLSSRLLSPAILFTKKPASLRSISSATARHGVRVVVAAASAAAASPVSAARVRPSAAEVARTVVELAASGTLSMVGPDGWPLGVGAHFVADSAGAPALCLSAARVAAPDAPASFHVEFRQSGARTPQCTMLGALTKPSDESVLKKLSTRWQKKFGEEIDQDLLYLISVDRILHMEDFNEAGHDGMWVVPSDYTSAEPDPLRNFAENIVEEFNNKNAEDVRRIYNIYVESDLQT

SEQ ID NO: 46227 - protein, 855 aa, Zea Mays
MRTIRGGRDGMAASAAPGSAGRQARGVAAAATGNAVFKSGPLFISSKGIGWKTWKKRWFILTRTSLVFFKSDPSTLPQRSEVNLTLGGIDLNNSGSVVVREDKRLLTVLFPDGRDGRAFTLKAESSEDLFEWKTALEEALAQAPNAALVMGHNGIFRNDTTDVYEGAIPNWGKKRPIKSIVVGRPILLALEDIDGSPSFLEKALCFLEKHGMKVEGILRQAADVEEVDRRLQEYEQGRTEFAPEEDAHVVGDCVKHVLRELPSSPVPASCCTALLEAFRLETKESQIKSMRAAISETFPEPNRRLLQRLLKMMHTIASHTAENRMTPSAVAACMAPLLLRPLLAGECEMEDDLDMNGDSAAQLIAAANAANSAQGIVTTLLEEYKSIFNDEHFRCSLSPDSQTGDSGSEESTDDETVDTKGNGFHDAENDVDQELDDAERMLSGKFTETSASACADLYDHKEVNGNSSDTELFVEDHTFESNVDLNDAPLSRLTENGKGPSNLMSAHETPLSVGEILLSLDAGIPLPCRAAEYSSKPNGTQQHVKRTNLWGWSNVRKGQRSELVDPSGEEELAIQRLEVMKNDLQIRIAKEARGNAILQASLERRKQALHERRVALEQDVSRLQEQLQAERDLRAALEVGLSMSSSQFSSSLSMDSKTKSELEEIALAEADVARLKQKVAELHFQLNQQRQHQYGSSVDANDHPQHLLNHLSQNIVQTGFDRSVAFCNQEKQRNEESLPSTSHWRSIKQHVLSHGSSRPFSRKHSSDTSLSDSTSVPAEGGPMLVNIPRTTKQGVEYGRPPSVSSSTLVELTTRLDFFKERRSQLMEQLHSLDLGHGSTSHGFPYKPSSPWNSPK

SEQ ID NO: 46228 - protein, 388 aa, Zea Mays
MEHTIVRAKSSEVGCSNVERKLRQLLDITEDEAYFHTRQSAFLYHLGVQTMPKTHHCLNMRLTVEYFKSGSNHVDQLNDQKLESPALHHYVMFSRNVLAASTTINSTVMNSQDSDHIVFHVFTDAQNFYAMKYWFDKNSYLESTVRVTNIEDNQKLSKDVDSLEMQQLWPTEEYRVTIRNHSEPFQRQMKTKYISIFGLSHFLLPDLLPGLNRVVVLDDDLIVQKDLSPLWNLDMGGKVIGAVQFCGVRLGQLKPYIADHNVDDDSCVWLSGLNVIELDKWRDTGITSLHDQSVQKLRKDSLKSQRLQALPAGLLAFQDLIYPLEDSWVESGLGHDYGISHVDIEKAATLHYNGVMKPWLDLGILDYKNYWRKYMTSGEKFMTECNIH

SEQ ID NO: 46229 - protein, 656 aa, Zea Mays
MKGHQHQQQSSSPLLPMPPPSKRRCSALAAAVPALVVCSTLLPLVYLLALHRPAGYGSDDRAAVVISTELAGLGARGSRHLENGGAMKHKLLKDVSKKVSGSDGVSAERSTRSRFSQDHAAKSKAKLKGAFSLLGLNNDTFKGKGPRTSKRFQLKDLSWRSKDTTVNGKENHDQETVHEENTKSCEHEYGSYCLWSTEHREVMKDAIVKKLKDQLFMARAHYPSIAKLKQHEAFTRELKQNIQEHERMLSDTITDADLPPFFAKKLEKMEHTIVRAKSSEVGCSNVERKLRQLLDITEDEAYFHTRQSAFLYHLGVQTMPKTHHCLNMRLTVEYFKSGSNHVDQLNDQKLESPALHHYVMFSRNVLAASTTINSTVMNSQDSDHIVFHVFTDAQNFYAMKYWFDKNSYLESTVRVTNIEDNQKLSKDVDSLEMQQLWPTEEYRVTIRNHSEPFQRQMKTKYISIFGLSHFLLPDLLPGLNRVVVLDDDLIVQKDLSPLWNLDMGGKVIGAVQFCGVRLGQLKPYIADHNVDDDSCVWLSGLNVIELDKWRDTGITSLHDQSVQKLRKDSLKSQRLQALPAGLLAFQDLIYPLEDSWVESGLGHDYGISHVDIEKAATLHYNGVMKPWLDLGILDYKNYWRKYMTSGEKFMTECNIH

SEQ ID NO: 46230 - protein, 56 aa, Zea Mays
MLLFYFHPSSDCWLMQIGWLLLFTKVLIMVVCLLSSFSSIYQSSNYGCVPSFNIFM

SEQ ID NO: 46231 - protein, 139 aa, Zea Mays
MCCAQSKVHFVALPATFACHDGGQIQLLPLGRPSSFHLPPSLVGARAPKVPVLPLPLLSFSSPVHPSCHNWATAAPALRQVPRSSSALPLLPSTPPPGDALDLIEWALFSPGLASCHGSTPRLLIPCCRSSEGEQNPSN

SEQ ID NO: 46232 - protein, 123 aa, Zea Mays
MGGGFIMGPLFLELGIPPQVSSATATFTMMFSSSMSVVEYYLLHRFPVPYAAYFTGVAFVAAITGQHCVRKLIAWLGRASLIIFILASMIFVSALTLGGVGISNIVHRVERHQYMGFESLCKV

SEQ ID NO: 46233 - protein, 374 aa, Zea Mays
MAAAAAVPDGVSSCGSTNMRRADHLPQLPIPLPCMGEPTAASRVSPGSSPARSEASRGAPCYNADAEPDPDPEPEPEASVGRSTQMLLAMAAMGGHGGHYGRRPASSYGSCAAWSAGSLTRHRPASPSPICSPANSHDGGGEEEEDREPHGGDDASSFVTPRVEEEQGRTRADFMNPSAMPRNIRLQTPRHPSLLDRRVEGANQMPPRFIHKTTPARFMRRVRSSRNFRQRVDALDATNEWRLPKVSEGDDEGGDKKDWQSNTVSSRVSSARDWNFESDGAYQGSNRSDRAFGDSDGENCPVEVQRTERWTPSSVLKPQGNLVHAKLVAWKDAQIAKLIENLKLCFEVTSSIHYWCYGVGMKTWTPAEKERSRY

SEQ ID NO: 46234 - protein, 206 aa, Zea Mays
MQYPQILLHSQAGRLLNLTTFCGWFGRSLYHALVVFFITICAYSDEKSEMQELSMVALSGCIWLQAFVVTMDTNSFTCPQILLIWGNFVAFYMINLILSTVPSLQLYTITFRLCSQPSYWISMALTVAVGMGPVVAFRYLKNLYQPSAVNILQQVEQRNGSIRTSGNLESAGANLTNLLTGSRKNRDSNYRPLLSESAESVSASGS

SEQ ID NO: 46235 - protein, 642 aa, Zea Mays
MALCNTVVPIKSNDGTVSYKAQSQDEEALVNAAAKLNMMLISKDTITAEICFNGSKFWYELLDILEFTSDRKRMSVVVKEGETGKILLLSKGADEALLPRACPGQQIQRYLEAVEMYSQLGLRTLCLGWRDLKENEYKEWSKNFQKASCSLDNREFKIAEVCNSLEQDLQILGVTAIEDRLQDGVPETIKLLRNAGINVWMLTGDKQNTAIQIGLLCNLITSGPNSQLLSISGKTEEDVLRSLERALFIMKNTSETKGLAFVLDGWALELILKHSKESFTRLAMLSKTAICCRMTPLQKAQLVAILKSVGYLTLAIGDGGNDVRMIQEANIGVGISGREGLQAARAADYSIGKFKFLKRLILIHGRYSYNRTAFISQYSFYKSLLMCFIQILFAFLSGLSGTSLFNSISLMAYNVFYTSLPVMTIIFDKDISETTVMQYPQILLHSQAGRLLNLTTFCGWFGRSLYHALVVFFITICAYSDEKSEMQELSMVALSGCIWLQAFVVTMDTNSFTCPQILLIWGNFVAFYMINLILSTVPSLQLYTITFRLCSQPSYWISMALTVAVGMGPVVAFRYLKNLYQPSAVNILQQVEQRNGSIRTSGNLESAGANLTNLLTGSRKNRDSNYRPLLSESAESVSASGS

SEQ ID NO: 46236 - protein, 732 aa, Zea Mays
MQSLLTGMSKCLIGKQIHLLIQLTISEDLGQIEYILSDKTGTLTENKMIFKQCCISDTLYGNDNGDALNDVRLVNAVSSNDPDVIKFLLVMALCNTVVPIKSNDGTVSYKAQSQDEEALVNAAAKLNMMLISKDTITAEICFNGSKFWYELLDILEFTSDRKRMSVVVKEGETGKILLLSKGADEALLPRACPGQQIQRYLEAVEMYSQLGLRTLCLGWRDLKENEYKEWSKNFQKASCSLDNREFKIAEVCNSLEQDLQILGVTAIEDRLQDGVPETIKLLRNAGINVWMLTGDKQNTAIQIGLLCNLITSGPNSQLLSISGKTEEDVLRSLERALFIMKNTSETKGLAFVLDGWALELILKHSKESFTRLAMLSKTAICCRMTPLQKAQLVAILKSVGYLTLAIGDGGNDVRMIQEANIGVGISGREGLQAARAADYSIGKFKFLKRLILIHGRYSYNRTAFISQYSFYKSLLMCFIQILFAFLSGLSGTSLFNSISLMAYNVFYTSLPVMTIIFDKDISETTVMQYPQILLHSQAGRLLNLTTFCGWFGRSLYHALVVFFITICAYSDEKSEMQELSMVALSGCIWLQAFVVTMDTNSFTCPQILLIWGNFVAFYMINLILSTVPSLQLYTITFRLCSQPSYWISMALTVAVGMGPVVAFRYLKNLYQPSAVNILQQVEQRNGSIRTSGNLESAGANLTNLLTGSRKNRDSNYRPLLSESAESVSASGS

SEQ ID NO: 46237 - protein, 318 aa, Zea Mays
MVAAAGRRRRRCAAAILLVLPVVAVLASSSAAADGSFITWDDLSTPSAAAVQGGVKAASGGGARELDTIVVAQDGTGHSRTVQGAVDMVPAGNSRRVKILVRPGVYREKVTVPITKPFVSLIGMGSGRTVITWNARASDMDRSGHQVGTFYSASVAVEADYFCASHITFENSAPAAPPGAVGQQAVALRLSGDKTMLYRCRILGTQDTLFDNIGRHFLYNCDIQGSIDFIFGNARSLYQGCTLHAVATSYGAIAASQRSSAEEDSGFSFVGCRLTGSGMLYLGRAWGRYARVVYSYCDLGGIVVPQGWSDWGDQSRTK

SEQ ID NO: 46238 - protein, 501 aa, Zea Mays
MAREEDGPQFVRWREEFVSQERGSRVVHYYLEDAAGVSHLAVIGTERSLRHMLYVVSEDFNAAWGCGGSADGGGAPPVFARKWRSRREVVDWLGSFLPVKALDSKFSKYGSFADNDIGSDGYGETNGFLHQNLGKDCSSDITWSGSFWTCSKQLRHYQAFCRNGTTISTHTFVLVLSEEQNRYLAYLEDMYEDKKGQKKIKVRWFHQNQEIACAIPPPPHPCEVFITPFTQVISVECVDDIATVLTRDHYEKCSHAMSIMTGIRFCSRQYSKNKFKYFDLRTLRGYFSQAVVRSMKFPAESEKDSEYCTPGKAKFPKQLERLYSKCLGTKICRSPQADSIPSYQILSNEQPPGKHLSIKFIVPQNQLKPTYNTGDRLEILSQDSGIIGCWFRCTVLKSCTNHNRLKVQYDDLQNADDSGRLEEMVPASALALPDKLGLRHQDRLRIRPRPQENSFVDGAALLPGTAVDVWQFSGWWEGVVVSLDNIVADSLQERTFSVRAS

SEQ ID NO: 46239 - protein, 299 aa, Zea Mays
MPSCLLPGIAPRPPPAALRSLLLRRSRMASSGPARAFQLRLNPLTGDSEWLVVDEAETEAEVAAPAPTHHKQLLAATSYLDMLNDASRNRAYRLAIDATVTDPTSRVLDIGAGTGLLSMMAARALAAAGGEGRGSVSACESYLPMGKLTRRVLRANGMENKVKVFHKRSDELGVGVELDSRPDILVSEILDSELLGEGLIPTLQHAHDMLLVKNPKTVPYRATTYGVLVESTSLWKMHDLHSNEANAEDGVRLIPSGTQIVLSVKSQQHAMQCDALADEIRLVGASVGFFWISLLLNCS

SEQ ID NO: 46240 - protein, 141 aa, Zea Mays
MRGSSRRPVAVVMAWVRRQPPKVKAFLAVVAGMAALVFIRFIVHDHDNLFVAAEAAHALGIAVLIYKLTKEKTCAGIALCCASATCSSFNIAQHCEQNLLGLLCLFGSSFSVAPVALDAKYQDCGAVHSSLCVCAGCCKVS

SEQ ID NO: 46241 - protein, 219 aa, Zea Mays
MVIEMKLLTTTKQQKAHVYKYRQREQASSGVAQQRRKRENGEGGADRQAPRARLAIHDSRTNSIKHGGATGGWRRCGGGGGGGRRRRPAWAEERRRGGVAAVGGAGGDGVDPGGDGDQLRLLGLLVGAEIVAGGVPGGAQLPGDGVGPGQGGGLVVGPRAAPHAAPRRARGLRRHGACRLRRPVLLPHRGGVVHGRRRPLPSGMAYDPLRTHLERRAAE

SEQ ID NO: 46242 - protein, 135 aa, Zea Mays
MIMRHSREVVVGVDPRTGAPVVRRDKVWNYTIADIALLAFGTNFPQISLATIDAIRNLGQLTAGGLGPGTLIGSMAFDLFLIHAVCVVMPRAGSKMKISDLGIWLVELFWSFWAYIWLYVILEVWTPRVITLWEA

SEQ ID NO: 46243 - protein, 698 aa, Zea Mays
MPELRSNTRQARLRSKKLDDLQPGEPLAKPVSPALPSARKRAPTRAARGRKGAAGRGVPPAPKPRRKGVDIVVLEADPACETPLKAFKGLEVAAAAPKNLPLKQVAEVGVPKMNGESGEKIVGAEDESTATPVPERVQVGNSPEYITDRKLGKGGFGQVYVGRRVSGGAARTGPDAYEVALKFEHRNSKGCNYGPPYEWQVYNTLNGCYGIPSVHYKGRQGEYYILVMDMLGPSLWDVWNSMGQAMTPNMAACIAVESISILEKLHSKGFVHGDVKPENFLLGQPGSPEDKKLYLIDLGLASKWRENNGHHVDYDQRPDIFRGTIRYASVHAHLGRTGSRRDDLESLAYTLIFLIRGRLPWQGYQGDTKSFLVCKKKMATSPEMLCCYCPAPFKQFLEIVTNMKFDEEPNYAKLISLFDGLIEAPASRQIRIDGALKVGQKRGRLVADLEEDEQPKKKVRLGSPAAQWISVYNARRPMKQRYHYNVADSRLSQHIEKGNDDGLYISSVASSANLWALIMDAGTGFCSQVYELSPVFLHKDWIMEQWEKSYYITAIAGSSNGSSLVVMSKGTPYTQQSYKVSESFPYKWINKKWKEGFHVTSMATAGNRWGVVMSRNSGFSTQVVELDFLYPSEGIHRRWESGYRITSTAATNDQAAFILSMPKRKPMDETQETLRTSAFPSSHVKVCRSHCYCPNYWS

SEQ ID NO: 46244 - protein, 880 aa, Zea Mays
MHNPRPGGGDIVEMSSSASAAGEATQNERVIPHSGSLSKSSARKSAGLEEPVTTPLSAPPPRASPSSAAMHALNGLMFISRAEGTVGWEAVERRFHELAENGLLHRSKFGECIGMKEVVFAGELFDALLRRSNISGDNIDKAELLKFWDQITDTSFNGRLQTFFHMVDADADGRMSEEKVRQTITQRASENKLSKITEQAEEYARLIMEELDPDKLGYIEVRNLERLLEDPSQLVSIGTAKDMRQMLRSQSLRPTPEPNPLRRTQYFLEDNWRRVWVVLLWLSICVGLFAWKFAQYRRRYVFQVMGYCVCVAKGGAETLKFNMALILLPVCRNTITWIRNHTGVGRVVPFDDNISFHMVVAAGIAVGAGLHVVSHLTCDFPRLLRATDAAYAPLAQYFGVPRPRNYWWFVKGTEGWTGLAMLVLMAVAFTLAMPWFRRGELALTDLLKRLVGPLKRLTDTLKLTDPLKRLTGQLKRLTAGPRKRPTDPLKPTDPLKRLTGFNAFWYTHHCFVAVYALLLVHGHYLYLTHKWYKKSTWMYLAVPMVLYACERLTRALRSRVRAVRIRKVGVYPGDVLSLHFSKPPGFSYKSGQYMFVNCADVSPFEWHPFCITSAPQDEYLSVHIKKQGDWTGELRNVFSRVCRPPTEGNSRLLRDGSANSLSLRFPKVRIDGPYGAPAQDYKQYDVVLLVGQGIGATPMISIIKDIINNMKQLDGDLEADAGSGLGSGGVDASSSSSLPSFRTQRAYFYWVTREQGSFEWFHGIMDEVAETDKKGIIELHNHCTSVYKDGDLRSRVIAQLQMLNQAKHNIDVISGTRVKTHFARPDWPNVYKHIAENHQNQRVGVFYCGGGPEPLKTLRELAKDFSRKTNTKFEFHKENF

SEQ ID NO: 46245 - protein, 586 aa, Zea Mays
MLRRPALQRRGDAGRGDDGVERAGHDGAAAGHAGQPRRRAGGPPDARVRGHQRRQEGERAARAGPAHQGVEPPAVQGGGAVAAGEPQRHRRRGRPPRGLRRERGGGGQLPQRRARAGRAHHDVVHAGGHQGRRPRAQGQPQRRRRRRQALRLRRGLRRPLPRRGGRARRRHHGVVKVPVKGASPGVRAGHAALSVGSKIYIIGGVGDKQYYSDVWVLDVANRSWSQLEVSGQRPQGRFSHTAVVMNNDIAIYGGCGEDERPLNELLILQLGSEHPNGRYNISTCKVLSNQWSQERRKFLQSETKDTGASNGETVQKRREAEIEQRNPFLRGLENSRAKRRKTDEARPSEAAESEQQEEHSLTLSQHSSPSQSDQEQNGGGAHKLSPSPNASVSALQPFARLKANDGAPSAPGRGGGGVSSRPALKTDQFLRTVAPQHHRQEVQFLSSDHKKPQPRPAPGPPLIGAEVHGTIDGAFDSGYLMTAVVNGQLFRGVLFAPGPGVTAPRPTVHHQILTSSAMPPQQRPLLAHAIPVHARPVPQATGFVLPNCVHRARQGFPAKAVKSEPERGGSDLHDVVLTLGGPGGGK

SEQ ID NO: 46246 - protein, 490 aa, Zea Mays
MNLVDVVQRLGIDHHFKEQIDTALKNIQGAEFNSSDLHEVSLRFRLLRQHGLWVPADQFDKFRRQEDGSFSSDIADDPKGLLGLYNAASLLIHGEEVLEEALLFARRHLESIRRGGGLHDSPYLSEQVGRSLKIPLPRTLKRLEAVSYIPEYSSADDTTYIHPEILELARLDFNLLQHVHQNELRTVTQWWKGLCDVIGPDYGRDRIVECYFWAFSMYYEEEHARARMILARLIMLASLLDDTFDDRATLQECRELNKAIERWDESDDISLLPECIQKFFLEVIRNFAEFEDELEAHEKYRVAYARKAYQLLSKSYLQEVEWCHQGYTPSFDDHVSVSTASAGIQVLCVGMLVGMGDAATKEVFEWMIGSNNRVVRACAEVTRFMDDMADFKRGKNKTDVATTVECYMKEQNVTGEVAFDKIGSFVEDAWKTLNQAALVGDRALLPVVQRVAGLAMSMMVFFHGKIDRYTDSEHLKETLEDLFVNHVPLC

SEQ ID NO: 46247 - protein, 77 aa, Zea Mays
MGGEMYMSALKKPFPLVPMVASQGIKIGSIKGYMEAGASAVVLSDAIFDSQLMRDGKFNEISELANLATLEALQFTK

SEQ ID NO: 46248 - protein, 132 aa, Zea Mays
MRPRAAPSEDRSSAWVIRFGYRTVKPEVRCKNSASAAHRLHGYTFLSPATSRNRTDSHGLRSVARPTLAEPPTLWLNCLRLDQILHELAGVHWWRDATNVVSTLLSGNRRPESYKGTCMWLIHDLPTVSLLW

SEQ ID NO: 46249 - protein, 356 aa, Zea Mays
MKLHRLGRTSFRAVKSKRDYLRHRRSFNWLYLSRLAALKEFAFMKALGDHGFPVPTAVDCNRHCVIMSLVQGYPLVQVKKLQNPDDVFDSILGLIVRLAEHGLIHCDFNEFNIMIDDDEKITVIDFPQMVSVSHRNAQMFFDRDIECIYKFFNKRFNLRSVKNEEQAGSENDDEGNSRPSFLSVEKGAGSLDKELAASGFTRKEKVDMDKYIEEVVEGHDSSSDDDNDEDSSDEPDCDLTPSDSDAPGTFSEEHGTSCSGENRLEIPPSDGNGVVMAPLESGIKTFSMEDDDNDDGSSEDADEEEDAELTKQLNKQRRKAIAAAHGRRRPTSSRNAYKDKGKGTMNSKMQRQACNW

SEQ ID NO: 46250 - protein, 945 aa, Zea Mays
MDNNGEKTTTIIHTLRDALLHFAVKSKKLASPLLEPFGRATEPTTVNDDELMALKSKLRRIRATLRDAESLSVTDCSVQLWLAELGDLENRAEDVVEELEYESRRSAQLEELKQDLLYAATTRKQRREVALLFAPPPARRLRRKIDDVWARYEEIASDRKTLRLRPGDGGCAPRPAASPLVPSSVLPRTERLHGRHGDVERVAALVLGDPDGGTSYAVVPIVGMAGVGKTALMQHVCGMETVKSCFELTRWVWVSQDFDVVSVTRKIVEAITRSRPECGELSTLHELIVEHLAGKRCLIVLDDVWDDNPSHWNSLTAPLSHCAPGSAVAVTTRSNKVARMVSTKVYHLKCLSDEDCWLVCQRRALPNSGANVHKELVEIGERIAKKCHGLPLAAEAAGSVLSTSAVWEHWNEVLNNDLWADNEVKNLVLPVLKVSYDHLSMPLKRSFAFCSLFPKGFVFDKDLLVQLWTAQGFVDAEGDCSLEAIANGYFNDLVSRCFFHPSPSHALSEGKFVMHDLYQELAQFVSGNECRMIQLPNSTKIDESSRHLSLVDEESDSVEEINLSWFCGHRDLRTFMFIARTEQNPEEMTFRTKIPSELITGFECLRALDLSNSNIMELPKSIGSLIHLRFLGLDNTAIQMLPESICALLHLQTIKLNHCSSLTQLPQGIKLLLNLRCLEIPHSGIKMPSGIGELTRLQRLPFFAIENEPAGCTIADLNELVNLEGHLHITGLNNLDGAQASIANLWNKPRIKSLTLEWSGVTNFSKSLCDPQGNAVSCISDSQHPAISATADQVLNCLKPHSNLEELSIKGYNGSFSRSWLGWLPLDRLASIELKDCRNCKEVPPLGCLPSLKHILIQSLPSVKLIGPEFFGNAGDTTSNIRSRICNVFPALKSLKFSNMEAWEEWLGVKSEHFPNLKYFSIVRCSKLKLLPKFTSEPKLKIRIR

SEQ ID NO: 46251 - protein, 118 aa, Zea Mays
MPRSDLIILTDPGSKISVNQGTATLLPVEGNYSRGNLMLQRIKTYIAFLEQKLVEFDRMERLNHFVLTDSDIAVVGDLGHIFKKYPHFHLAVTFRNNKGQPLNSGFVAVRGTRDGITK

SEQ ID NO: 46252 - protein, 73 aa, Zea Mays
MSRRQPVPAAAAKLEEGEHELSIVDALLEVLSGRCELRRTSFGSRRLYRRFSFTSMGAPPQGRRVRSSSLSAK

SEQ ID NO: 46253 - protein, 89 aa, Zea Mays
MDPKLLRHGNLRSIVLPPVPRLARASAAATASPRKIFLYERMEVSAGLRLPPVAAAASLLGCRSASVPPRAAASHSVRSVSRAVKSSCN

SEQ ID NO: 46254 - protein, 254 aa, Zea Mays
MYLFLLFSWKQGVSSQQTTEGTGVFGRFRFLNQRVSSQSEDSLSCHRIDLRTSTIKIDADENDLRFCFRIISPVKAYTLQAESGADQKDWIQKITGVIASLLNSPFPQQLSYGNVAAESNRSTSSVDSLSIEDNKSSEGHDDIFNLLRNIPGNDSCAECRSPDPDWASLNLGILICIECSGAHRNLGVHISKVRSLRLDVKVWEPVIMDLFHALGNDYANSIWEALLPKEDQGMWTNCFLPEIPIRIPLIFWKP

SEQ ID NO: 46255 - protein, 341 aa, Zea Mays
MVKPPPPPPTSTCTSDTPLPTPGGLLGSLSSSAHSLLAAARRSPVTTLVAAFFLLALFMYGEDVRTIAELSIDDYLYPDADFYNVSALPPLALPPATCDLSRGRWVFDNVSLPAYREKDCTFLTKQVTCLANGRPDDLWQYWKWQPNECSLPTFDARRFMEAMRGKRLMFVGDSLNRNQWESLVCLVQPILSKGRKKIVKRGSLTVFHAKEYRATLEFYWAPFLVESNSDNPKIHSIEHRIIRPERIEGHAKYWRGVDYLIFNTYIWWMNTADMKVRRPNSRYWSEHDEVPRIEAYGLVFKTWSDWLNDNIDPDRTLVFFMTISPLHISHITGGTRTGSGA

SEQ ID NO: 46256 - protein, 938 aa, Zea Mays
MKSLFKSKIRWQHRSNDPASPSGQPQPQPQQALGPPSPSPSSSPSSAAPLSVSTAATSSPSSPPSAAATPTGAGAAAAAGAGAAGEDYIASEEEFQMQLAMALSASSNSDCVGDLDGEQIRKAKLISLDRFAAHRDEGHTAESLSRRYWDYNFLDYHEKVIDGFYDIFGSMESSRQGNMPSLADLQTGIGDLGFEVIVVNRAIDSTLQEMEQVAQCILLDFPVANIALLVQRIAELVTDNMGGPVKDANDMLTRWLEKSTELRTSLQTSLLPIGCIKIGLSRHRALLFKILADSVGILCKLVKGSNYTGGDDDDAINIIKMDNEREFLVDLMAAPGALIPADILSWKGNSLNSNRKLGLSQTAGSSSTVGANMGPSVLPLEPKGDQLPLFSSGDWISESGSGYGAAETAASTQTSSGATSSVPAGSAFDSSWMLINHDQSDGPSTSAGTSSQQKVVPQNEHPRNLNRLPDLQEIPESKNLFADLNPFGDTKSKKTSVPFKGPDQRNNELQKRRENIVPNGGRPQQRLVMKNWSPYNDVSNNKQYNYVEDSFARRNVGNNAASSSSQITQQAARSNLNSGLRNDASYHNYDSIMAGTSATNITSTAETGKVPERVLRGDLDKGQTNYRLQDQHVVGQPPQERLPWGNPAEGRVPMNRFQNQAKQHMGNIDTKQDHKKLLPDPKKSPLDRFMDTSLPSRNLDVRSQRLDFDDVSECEIPWEDLVIGERIGLGSYGEVYRADWNGTEVAVKKFLDQDFYGDALDEFRSELLLYCLIYGCTLSDKVRIMRRLRHPNIVLFMGAVTRPPNLSIVSEYLPRCDVYSFGVILWELATLRMPWSGMNPMQVVGAVGFQDRRLDIPKEVDPLVARIIFECWQKDPNLRPSFAQLTSALKTVQRLVTPSHQETQSPHPANAGAACRLSAPGGGRHSAVCDKDPVVGYV

SEQ ID NO: 46257 - protein, 323 aa, Zea Mays
MGISSKWIKSLVGIRKQEKAQNAEKQEKGWNAESSETKHSLDPGAALAVEEITVQSEALTDNKSAQMVSNSFFSDSTPLDVHISQAEHHSNEDLAATVVQSAFRAFLARRALRALKGIVLLQALIRGHSVRRQTAETLQCMQALVKAKARVRARQVRVALENQVARKKIPEQDDHENHVREVEGGWCGSIGSMEEMQAKALKRREAAAKRERAMAYALTHQRQAGSKQQNSLSLQGLELGENHWESNWLDRWMAVRPWENRLLDCNAKESLPTHEDKDEEANSQITPKVGRESGKGPTRRNSLNRSAPKARADSPNQGDELEA

SEQ ID NO: 46258 - protein, 1073 aa, Zea Mays
MAPSAAAPGISEAEGAPRMAKFLCSFGGSILPRPLDGCLRYVGGETRIVILPRDISYADLAARMRDLYKDADTIKYQQPDEDLDALVSVVNHDDVVNMMEEYDKVTATGEAFTRLRIFLFSQQLDDNAASVAVHYNVDERETERRYVDALNSLGDVRSPSSPVSVEQLFGIGGNDSGIPDFAGLRHLNVPRPSHGQRYGEMDSPWSPAYVSPSQYRVHDPRDFPISPSSARFQVGAEDFDDRIPDDFVRQSPKYHYYEAQSPSHMDNLVWLPPGAVIQQNAGFPGDLSKHNKFLDGNSGCDHCGSLFHKGQGSVTDPIYMNPRWTRPVQQHFDQPSMINDYPGHHANSCPDYCRPGEHYAGGQDVRLENGVYVKEQNGGHTPMLYNESRPHDRVWYAHTNQSHQRYEDPRLHYPTNDRVIEPYIVDASSVNSAFAPNKVYEMHSASLGHSSSSHESPHYFHGSSELINDAYHNQQVGGSGSYVQPAGSEESPGQHYNHFSAYGADSFYQMQQNLPPIQSLRRRANSPVHTASPYDSPHLPIPNGSINMNSVRNTGDASPRIAGLIGYDRMPNPFTPPNGSILYRVGGHDVPAAMENTSAFGPRSNPTAAQYVQPFIAPESIQHQPGVPLREVYPERAYPEPMPSSYADGKVAVSALPLTDQLFRLDINTMKKLEGQDDGNSTRNVNETTLLHAVDEPSTLPHHVGSVHEVDPKQEKLTEKESRQKQHEAGATALQECEDISEDMLNFLPELIASVKKVTLEDAAETQIAQSDANAAVSPVPDDDDNGKKLDEATAGNTNANQDLDLQGSLDRQKSFKIESTTAEAEALSKGLQTIKNDDLEEIRELGSGTYGAVYHGKWRGCDVAIKRIKASCFAGRPSERERLITDFWKEALILSSLHHPNVVAFYGVVRDGPDGSLATVTEFMVNGSLKQFLRKKDRTIDRRKRVILAMDAAFGMEYLHGKNIVHFDLKCENLLVNMRDPQRPICKIGDLGLSKVKQHTLVSGGVRGTLPWMAPELLSGKNNMVSEKIDVYSFGIVMWELLTGEEPYSDMRAAEIIVIQRRDRPSLIYLKG

SEQ ID NO: 46259 - protein, 1113 aa, Zea Mays
MAPSAAAPGISEAEGAPRMAKFLCSFGGSILPRPLDGCLRYVGGETRIVILPRDISYADLAARMRDLYKDADTIKYQQPDEDLDALVSVVNHDDVVNMMEEYDKVTATGEAFTRLRIFLFSQQLDDNAASVAVHYNVDERETERRYVDALNSLGDVRSPSSPVSVEQLFGIGGNDSGIPDFAGLRHLNVPRPSHGQRYGEMDSPWSPAYVSPSQYRVHDPRDFPISPSSARFQVGAEDFDDRIPDDFVRQSPKYHYYEAQSPSHMDNLVWLPPGAVIQQNAGFPGDLSKHNKFLDGNSGCDHCGSLFHKGQGSVTDPIYMNPRWTRPVQQHFDQPSMINDYPGHHANSCPDYCRPGEHYAGGQDVRLENGVYVKEQNGGHTPMLYNESRPHDRVWYAHTNQSHQRYEDPRLHYPTNDRVIEPYIVDASSVNSAFAPNKVYEMHSASLGHSSSSHESPHYFHGSSELINDAYHNQQVGGSGSYVQPAGSEESPGQHYNHFSAYGADSFYQMQQNLPPIQSLRRRANSPVHTASPYDSPHLPIPNGSINMNSVRNTGDASPRIAGLIGYDRMPNPFTPPNGSILYRVGGHDVPAAMENTSAFGPRSNPTAAQYVQPFIAPESIQHQPGVPLREVYPERAYPEPMPSSYADGKVAVSALPLTDQLFRLDINTMKKLEGQDDGNSTRNVNETTLLHAVDEPSTLPHHVGSVHEVDPKQEKLTEKESRQKQHEAGATALQECEDISEDMLNFLPELIASVKKVTLEDAAETQIAQSDANAAVSPVPDDDDNGKKLDEATAGNTNANQDLDLQGSLDRQKSFKIESTTAEAEALSKGLQTIKNDDLEEIRELGSGTYGAVYHGKWRGCDVAIKRIKASCFAGRPSERERLITDFWKEALILSSLHHPNVVAFYGVVRDGPDGSLATVTEFMVNGSLKQFLRKKDRTIDRRKRVILAMDAAFGMEYLHGKNIVHFDLKCENLLVNMRDPQRPICKIGDLGLSKVKQHTLVSGGVRGTLPWMAPELLSGKNNMVSEKIDVYSFGIVMWELLTGEEPYSDMRAAEIIGAIVNDSLRPQIPSWCDPEWKGLMESCWSSDPAERPSFTDISQRLRKMAAAMNVK

SEQ ID NO: 46260 - protein, 534 aa, Zea Mays
MISKPLPQHFTVLVRAIPVSDGVSVGDAVDKFFKEYHASTYLSHTIVRQTGKLRRLLNDAESICTKLTNLNHVRRSTGDPPRKLGLFSRNDLVGEYQKRLEDLEENVRMEQSDATRRQEIPAAFVSFRSRYSAANAVYIRQSDNPTEWQTEEAPDPHDVYWPFFSTSFMERWIAKFVVFVASVLLILVFLLVVAFVQGLTYLEQLEKWLPFLRNILEIAVVSQLVTGYLPSVILHVLSSCVPSIMKLFSTMQGFVSVSGIEQSACNKMLRFTIWTAFFANVLTGSALVQFEIFLNPKELPSKLAVLVPAQASFFIAYVVTSWTSITSELTQITALFCHLWGKCAKCCKRDYSKAPSMPYYSEIPRILLFGLIGLAYFIVAPLILPFVLVYFCLGYFIFRNQLFNVYAPKYDTGGKFWPVVHNTTIFSLVVLHIIAIGVFGIKKLPLASSLLLPLPPLTLLFNEFCRNRFLPIFEAYSTESLLKKDREEQSKPDMAEFFSNLVTAYCDPALKPFQRASNSDERTAPLLASLSSSR

SEQ ID NO: 46261 - protein, 52 aa, Zea Mays
MYVCMWSERKRPKSLISPPSDTQFIPARSLIISRHAMLPRPCACAGSHRDSQ

SEQ ID NO: 46262 - protein, 171 aa, Zea Mays
MEAKQRPRHGGERRPPPATDGGEEYDPWTAWLYKPRTISVLLVGACLLIWASGALDPEGTAAHSSVTSIKRGVWAMIAVFLAYCTLQAPSTILIRPHPAVWRLVHGLAVVYLVALTFLLFQNRDDARQFMKHLHPDLGVELPERSYGADCRLRHCLMNLLLPISLGGGAKL

SEQ ID NO: 46263 - protein, 145 aa, Zea Mays
MGASGLAASSNGGNKWAKAANEEATMTVVAVESDEPRTESPLERGTIIYNLLVTLPFPSGLISRLRRAFLLCRFTTDLVSRSSLHMLQLLVQECLRSAIDLSSAQVAATTDNRPPAHCFTFGDESTTGQLPLPKVRCSSIRRPLR

SEQ ID NO: 46264 - protein, 236 aa, Zea Mays
MGASGLAASSNGGNKWAKAANEEATMTVVAVESDEPRTESPLERGTIIYNLLVTLPFPSGLISRLRRAFLLCRFTTDLVSRSSLHMLQLLVQECLRSAIDLSSAQVAATTDNRPPAHCFTFGDESTTGQLPLPKLEVSILRPLVWSGMEHPSVFDRFNYDRAYAPLCKHVDHQSYIPGFQVDQTEWIQSCSKLASCVNKQAPSATRFMGMQQSLGIQPTQLGKDAPAAGVARRVSA

SEQ ID NO: 46265 - protein, 150 aa, Zea Mays
MLSGHAVTLSERSASGTRLIEDVACEAGDEEEADAAARVVYRASFQELMPNYLQYDTIIWALISLLLVLAWGIGLLLLLYLPYKRYVLKKDILSRQLFVTESKIVYKVLATRPSYMPFMGIVKKEIKVPLHLIVDVIIEQGELCIPIYPT

SEQ ID NO: 46266 - protein, 741 aa, Zea Mays
MFLAGRQADAPQEALQVLDIVLRELPTARYSPVGRSFYSPNLGRRQQLGEGLESWRGFYQSIRPTQMGLSLNIDMSSTAFIEPLPVIDFVAQLLNRDISVRPLSDSDRVKIKKALRGVKVEVTHRGNMRRKYRISGLTSQATRELSFPVDDRGTVKTVVQYFMETYGFSIQHTTLPCLQVGNQQRPNYLPMEIVEGQRYSKRLNEKQITALLKVTCQRPQERELDILQTVHHNAYYEDPYAQEFGIRIDERLAAVEARVLPPPRLKYHDSGREKDVLPRVGQWNMMNKKMVNGGRVSNWACINFSRNVQDSAARGFCHELAIMCQISGMDFSLEPVLPPVTARPEHVERALKARYQDAMNILRPQGRELDLLIVILPDINGSLYGDLKRICETDLGLVSQCCLTKHVFKMSKQYLANVALKINVKVGGRNTVLVDALTRRIPLVSDRPTIIFGADVTHPHPGEDSSPSIAAVVASQDWPEVTKYAGLVSAQAHRQELIQDLFKVWQDPQRRTVTGGMIKELLISFKRATGQKPQRIIFYRDGVSEGQFYQVLLYELDAIRKACASLEPNYQPPVTFVVVQKRHHTRLFANNHNDQRTVDRSGNILPGTVVDSKICHPTEFDFYLCSHAGIQGTSRPAHYHVLWDENKFTADELQTLTNNLCYTYARCTRSVSIVPPAYYAHLAAFRARFYMEPDTSDSGSMASGARGPPPGAARSMRGAGSVAVRPLPALKENVKRVMFYC

SEQ ID NO: 46267 - protein, 2169 aa, Zea Mays
MSSKWRSLQHRHRYTYTSIVFPKHYLEALTLVPAEISSSNFFVRLSNLISLTSTYSQVVVVKDLASAYVQFLSTTGTPDEAVLAATKLYLEILFLENSLPLHRTLISVLAKCKKFSTVISGCFALLCEEYGGSGSKAKKRFMVSRAALSLIGYPKLGFLDEAVERCAEIMALDVVDGLDGVTKDIGEGSRPSPVVMEQCQEAMSCMYYLLQRYPYKFIGLDKASSVFKSAVRTILSVLKSSAFSRDCLVASGVSFCAAIQVFMSTEEISWFISQGLFGIYANHEDRKNQSVHNVFSDFDLCEQIRDLSVLSRLCLLRGILTSIPRTVLNMHQLHSSGPLWTVLYDGILPELCKHCENPVDSHFNFHALTVTQICLQQIKTSVSSDITDFSGDYKPFSRDVVNRILGIIWRNLEDPLSQTVKQVHLIFDLLLDIELCIASEDREHNNNLFLCNVANDLLRLGPRCKGRYVPLASLTKRLGAKSLLTLKSNLLSETAYAYIDDDVCCAVTTFLKSFLETLRGECWNDDGVELGYDAFRALCLPPFMRGLVSGNSKLRSNLNTYALPALIEVDAESIFTMLGFISIGPSTNETKLDVVLKNDQCIAALVSLLKVSRNLALVEGDIDLDPDELSQIQQMDSKGAAVISVKGIKVTVPFNWFALALTHSDESLRIDAAESLFLNPKTSSLPSSLELSLLKEAVPLNMRCSSTAFQMKWTSLFRKFFARVRTALDRQVKQGSWIPSLTSSVKGAGSIDTSKATVVKRAEDLFQFMKWLSSFLFNSCYPSGPYERKTIAMELILTLLDVWPICRSEGKIDLYPYNDSIILPDSTISFVGSIIDSWDRLRENSFRILLQFPTPLPGISLSTSINDVIRWAKKLVLSPRVRESDAGALTFRLIFRKYVLQLGCILVFSKESDCLECYTQSMNGDTEVTSQNPVAQYISSLIQWLCIVVEEGERDLSEACKKSFVHGVLLTLRYTFDEMDWNSEVVQSCISEMRYLVEKLLQLIMRVTSVALWVVSSDALSLPYDMDDMIDDGSFLSDIYDDQPTTTSEREEKNAKPGSNGKPAEQVVMVGCWLAMKEFHAIVALQVSLLFGTIIRKIPLPGCSHSASSQNGLPDSIEETSISEEILDVGQLKMMGDHFLQVLLKMKHNGAIDKTRAGFTALCNRLLCSNDSRLCKMTESWMVLLMDRTIAKGQTVDDLIRRSAGIPAAFIALFLAEPEGTPKKLLPRALEWLIEFAKNSLANFQKDSNQRSGVMKELLESQSETTSVYSNGNLSKGRDEGVVPTVHVFNVLKAAFNDANLATDTSGFSAEATIVAIRAFSSPYWEVRNAACLAYTALVRRMVGFLNVQKRESARRSLTGLEFFHRYPALHPFLSSELQTTTEQLADGVSSNLESHITKAIHPSLCPILILLSRLKPSPISCGTDDSLDPFLLLPFIQRCATQSNYRVRILASRALTCLVSNERLQYVISDILDNLPRGSHKAMAHSVQHTDPAISANMGKANVLLLSKSFNSIHGLLLQLASLLDNNFRGLTDGSMKDQIIGLLLEVLSRCSWLGCTKLCSCPIVITSYLRVLDLMLDVARTGKSRHTEVIQALLLELTSQCLSNTASTQYAFHDPTRIELKQQATESFLSCVGLSKKTDETNDDDVQLQILGEPTLEMPRVDYSLHEVHKEILSCLTDPSYDVRITVLKRILWLTKSIRHGYADNILHQWAGVNLQPALMERLFVEEHPKCLYYNLKIIFSWNMEFPFNNGEDSSTLLSLWDRLVHLNSTMSHAKTREIVLCCMGMCMKLFTKQSRGGISMDCLKTSEISASFVRINEGDGLSDAMLRLNLFVTLVKNQSEPSESMNARRAAAEAIVASGLLEEASYVASSVSNMYSPSEFDEDHTKEKCMEDSVFEFVSLYTCKILDLWFVCIQLLEDEDAYLRQKLAKDIQKIIAKGSANTFCDDSTPLQVDRVIELSLDYLTSLFGLWLKYVEFLLRIVLGTGNALNSRGDLVRQIFDKEIDNHHEEKLLICQICCSNIQKLLNSKCQMEAGAETKLFLQNWREIFLKQLTSLTGGYIEKEGKNDWIGGIGNHKDVFISVYAVLLGLYALTQSGSLDQLEDHCAVYLQEFANLERSITPFLKNPLISNLYALVKLSHERFISSDKPEDQVGDSGSSFDPYFLIR

SEQ ID NO: 46268 - protein, 234 aa, Zea Mays
MPCAIRRRRRCSPLSPTSSPRRRSSMKRRSTGSSASRASSSGGRWPIGCGATTGRFWSRPTSPRRAGSARRRRRRSARRGAAPSWRSVWRASAARRRRGRPRRSPSRPPRSPCTRSCSRPRPRRGRRSRSSPPPPPRATPARRSRRRRRSWTLAAPGRRQTTRASPAASGRPPWCSSPAGTCPSAASASPPATPTPPCRAPCACACGRGAWRPSSAELSPPLIIDHPAVHLVSR

SEQ ID NO: 46269 - protein, 176 aa, Zea Mays
MYERTEQYELADELLDRITKRFKTSCKIWLCRIQFALKQGKDVEYIKAIVNRALLSLPHRKRIKFLSQTAILEFKCGVPEEGRSRFELILREYPKRTDLWSVYLDQEIRLGDVEVIRALFERRVACLTLPPKKMQFLFKKYLNFEKSLGKDNERIQLVQQKAIEYVQSSLPSQDNS

SEQ ID NO: 46270 - protein, 263 aa, Zea Mays
MFVLFLLVYLNFFGCISLSSSSTTVSPVFRALKTIIPREEEEKLNVWVAYFNLENEYGSPREDAVKKVFQRALQYCDPKKLHLALLAMYERTEQYELADELLDRITKRFKTSCKIWLCRIQFALKQGKDVEYIKAIVNRALLSLPHRKRIKFLSQTAILEFKCGVPEEGRSRFELILREYPKRTDLWSVYLDQEIRLGDVEVIRALFERRVACLTLPPKKMQFLFKKYLNFEKSLGKDNERIQLVQQKAIEYVQSSLPSQDNS

SEQ ID NO: 46271 - protein, 458 aa, Zea Mays
MQEPKAGILKPAFTILLDRDKKSILLLIRGTHILGYAHFGMVAAARWIAKLSGPCLAQALQMYPDFKIKVVGHSLGGGTAALLTYVLREQKEFASTTCLAFAPAACMTWKLAESGVHFITTVINGADLVPTFSAASVDDLRSEVTASAWLNDLRHQIEQTRILSTFYRSASALGSRLPSMANAKARVAGAGAILRPVSTGTQVVMRRARSVAQAAWTRPALQLSSWTCIGPRRRNNISTSTVTSEEIIASTGGGSESTSLLTETTAETTETVTSEAVSEVVQSSVSVAVDAVDLVDDKGDSDDDIVDHHGDEDRMTDVELWQQLESELYRKREGEEDDIAEEMAESTIAEEVGGVAEDVLSETKEVHRFYPPGKIMHILFSSREEADRGEEPEDDVTDGEAQSSIGIFLTPRSLYGKLRLSKMMINDHYMPIYRRNIEQLIAELEKDSSDQIGCVRCS

SEQ ID NO: 46272 - protein, 164 aa, Zea Mays
MRCFTAAPNVEDSYPERPGEPDCPYLLNNRCKFKSKCKFNHPKDMVNALGTGTNNESLIADSAVLPVRPSEPICVFYAKTGKCKFGAICKFNHPKDIKTSPLIAKETIYTATTDAADAPTEACNAKGLPIRQGEVDCSFYMKTAANMVLFVASTILIGQGQLRI

SEQ ID NO: 46273 - protein, 293 aa, Zea Mays
MMMETPQIEMGGFKVNSPQVPNGVLRPTVSSSWNSRGTVERALKSIRIVIFTSKLNLLMPFGPASIILHFTTRRHGLIFLFSMLGITPLAERLGYATEQLAIYTGPTVGGLLNATFGNATEMIIAVYALKNGMIRVVQQSLLGSILSNMLLVMGCAFFAGGVVHRNKDQIFSKATAVVNSGLLLMAVMGLMFPAVLHFTHSEVRQGASEVALSRFSSCIMLVAYASYLYFQLSGRSNIYSPIGSEEAPIEDIAEEDEEAEIGMWEAVTWLAVLTLWVSFLSEYLVNAIEHLIH

SEQ ID NO: 46274 - protein, 298 aa, Zea Mays
MIIAVYALKNGMIRVVQQSLLGSILSNMLLVMGCAFFAGGVVHRNKDQIFSKATAVVNSGLLLMAVMGLMFPAVLHFTHSEVRQGASEVALSRFSSCIMLVAYASYLYFQLSGRSNIYSPIGSEEAPIEDIAEEDEEAEIGMWEAVTWLAVLTLWVSFLSEYLVNAIEGASDSLNLPVAFISVILLPIVGNAAEHASAIMFAMKDKLDITLGVAIGSSTQISMFVIPFCVVIGWMMGQRMDLNFQLFETATLFITVLVVAFMLQDGTANYLKGLMLILCYLIVAASFFVHVDPQSSDG

SEQ ID NO: 46275 - protein, 907 aa, Zea Mays
MVAMEGKGDASVTPVRTSDRLRQRPKYYARGYMYYNPAMRKKVKSKKRTAASQIAKKLLRKPAARPPPADCVAANLRRSTRKRRISVNLEGYDTDSSSMEDDDLMRPRYRSSKSKGGNNAAHNEVSARPKRQKLSNSIPRREGLRPRRSLRGQRLHPYHESEDDQESSDEQGAEDQRENGNEIEEDVGDEEEVDGGDEAEGDGDDEDGEEEQEGRRRYDLRERSEVRRPSPRKEGKHRPQSPRRVLVHGIGPKNSKYLKKGGSRMHKRPRFSLPDDSDDSLLVDEPDEGPSMPWMRSGRGSMPWLMGGLDMHSPAAWGLSVGASGWGHQGDTSTSLMPGVQTAGPSSKGGADIQPLQVDENVSFKDIGGLSEYIDALKEMVFFPLLYPDFFANYHITPPRGVLLCGPPGTGKTLIARALACAASKAGQKVSFYMRKGADVLSKWVGEAERQLKLLFEEAQKNQPSIIFFDEIDGLAPVRSSKQEQIHNSIVSTLLALMDGLDSRGQVVLIGATNRIDAIDGALRRPGRFDREFYFPLPGYEARAEILDIHTRKWKDPPPKELKMELAASCVGYCGADLKALCTEAAIRAFREKYPQVYTSDDKFVIDVDSVSVEKYHFLEAMSTITPAAHRGSIVHSRPLSTVIAPCLKSHLEKIMEHISDIFPFLSSIDFSKFSALSYGSSIPLVYRPRLLICGGESVGLDHVGPAVLHELEKFSVHSLGLPSLLSDPSAKTPEEALVHIFGEAKRTTPSILYIPQFHLWWDTAHEQLRAVLLTLLNELPSNLPVLLLGTSSVVFTDLEEECASIFSSRNVYQVDQPSFDDRLRYFSILFESLLSFQMEESRNKSKKQKSAIDLPKAPKEVEGPKVSELKARAEAEQHAVRRMRMCLRDICNRGWTLDSTLPGQHL

SEQ ID NO: 46276 - protein, 1200 aa, Zea Mays
MVAMEGKGDASVTPVRTSDRLRQRPKYYARGYMYYNPAMRKKVKSKKRTAASQIAKKLLRKPAARPPPADCVAANLRRSTRKRRISVNLEGYDTDSSSMEDDDLMRPRYRSSKSKGGNNAAHNEVSARPKRQKLSNSIPRREGLRPRRSLRGQRLHPYHESEDDQESSDEQGAEDQRENGNEIEEDVGDEEEVDGGDEAEGDGDDEDGEEEQEGRRRYDLRERSEVRRPSPRKEGKHRPQSPRRVLVHGIGPKNSKYLKKGGSRMHKRPRFSLPDDSDDSLLVDEPDEGPSMPWMRSGRGSMPWLMGGLDMHSPAAWGLSVGASGWGHQGDTSTSLMPGVQTAGPSSKGGADIQPLQVDENVSFKDIGGLSEYIDALKEMVFFPLLYPDFFANYHITPPRGVLLCGPPGTGKTLIARALACAASKAGQKVSFYMRKGADVLSKWVGEAERQLKLLFEEAQKNQPSIIFFDEIDGLAPVRSSKQEQIHNSIVSTLLALMDGLDSRGQVVLIGATNRIDAIDGALRRPGRFDREFYFPLPGYEARAEILDIHTRKWKDPPPKELKMELAASCVGYCGADLKALCTEAAIRAFREKYPQVYTSDDKFVIDVDSVSVEKYHFLEAMSTITPAAHRGSIVHSRPLSTVIAPCLKSHLEKIMEHISDIFPFLSSIDFSKFSALSYGSSIPLVYRPRLLICGGESVGLDHVGPAVLHELEKFSVHSLGLPSLLSDPSAKTPEEALVHIFGEAKRTTPSILYIPQFHLWWDTSSTFFMLQAHEQLRAVLLTLLNELPSNLPVLLLGTSSVVFTDLEEECASIFSSRNVYQVDQPSFDDRLRYFSILFESLLSFQMEESRNKSKKQKSAIDLPKAPKEVEGPKVSELKARAEAEQHAVRRMRMCLRDICNRILYNKRFNVFHFPVLEDEVPDYRSIIHKPMDMATVLQRVDSGQYLTRAAFIKDIDLIVSNAKTYNGDDYNGSRIVSRACELRDVVQGMLSQMDPSLVSFCDKIASQGGPLQAVDDEDRAILQAAPVAQLVSGTRISARLRNVQPEVNLSQSYEVLRRQKKSAENEQSMTRDEKSPEDVDLSKPTDAEEAAKEPESNGTTKEANDSPAKEPEVSTSPEPMESDNGKIAAATGDDLLEQLEALKQRFMELTASYGVPQLERLYSKIMKGAIELTSKESNEDHRRLVVRYLWTFVENSNNF

SEQ ID NO: 46277 - protein, 434 aa, Zea Mays
MFGGQDETSDDLETVIDKEDNVFVMSNRKTKYPTLQLDLRLIKDLVIIIVSATGGGIMFSFMGQPVIVGYLLAGSLVGPGGLNFINEMVQVETFAQFGVVFLLFALGLEFSLTKLKVVGPVAVLGGLLQIVLFMFLCGLTAALCGAKSSEGVFVGAFLSMSSTAVVSKFLVEKGSTNTLHGQVTIGTLILQDCAVGLLFALLPVLGGASGIFGGVMSMAKLLLVLSVFVAVTYMMTWSIVPRFLKLMIQLSSQCSDYCGLSLELGSFLAGVMISTTDFAHHTMEQVEAIRNLFAALFLASIGMLIHVKFLWNHVDILLAAVILVIIVKSIVVAIVVKAFGYSMRTAFVVGLSLAQIGEFAFVLLSRASHLHLVGGKMYLLLLGTTALSLVTTPLIFKLIPVVMHLGILMRWFPSENSMQSEEKAVMLEAHNRSL

SEQ ID NO: 46278 - protein, 347 aa, Zea Mays
MSSTTTSPPPPAAGDHPRVLLRGFLSRETCKELEFVHRSCGAAGYRPSVISTSLPHLAATGCGHLLLPFVPVRERLRDAVESFFDCHFDLFIEFTGLISWCKGASIGWHSDDNKPYLRQRAFTAVCYLNNHGEDYKGGILQFQDGDPSCIVPVAGDVVIYTADTRNVHCVNESGFDIRCARVHILGFSFHSSSGECNISASPAEDDPIELLGKQLRLGRGDDVFEKIFSNSLHALQVVQFYYWKKHELAARREQSVVSSGTVCCPVTHHSKGTELPLPCNHALAQTIFGSYNTEEIVQWNDFALAVAMWEKYSEELKKQLLTFLPYWLSNETIYVVDTSELQRAEPI

SEQ ID NO: 46279 - protein, 1536 aa, Zea Mays
MCSDMDQRDHHATREAAPEANGYHHSPHGVDQSQVVDADKHINHHSTDDNAPSSASGHRHGGISRHASTSSVDDRSIKSGDDSDGAESTNGRSSNTEISFLENDTVWIPPQAADKEDEAQSFATSIAYDDDDDDYSDGIKWGQSSFPSPGKQHDAGTSNHREVREKAMLEAMNGQLKILVSRFLASVGIPSSNEEASDSWLDIVTSLSWEAALLIKPDGSMGKEMDPGSYIKVKCIASGTRRQSEVIKGLVFKKNAAHKHMPTNCHNPRLLLVKGVLGHSDVGLSSFNSMGQEKDLLERAIGKIMEICSPNVVLVEKTVSRNIQELLLKEEVLDKPKLKQCDYFHIGKFTEEHNNASEGGKMTSKTLMFLEGFPCPLGCTILLKGANSEELKKVKQVMHFTVFAAYHLILETSFFEDQRVFLNDSTTKETSATATEGTYGVAALSGPIPNFPSHDDSPALRLFHATSNSYADVNKPLISPRNVDKFSAVSSSSSNDLEQGANVRSNNAERLTLPVQGPLRKLFADMLCHQNIYLPVTSLQEANDNRKEVRVESSQETVSNGFHRPKTGESVISIENGESINDAQTQEITQAIMPTGSSVSDKDAESPVMGDNGAHSTTSIIIKEKHADGDQADDALDSHSILILMSSQCTEKQVICEQSHLTRIKYYGSFDVSLGRYLQDILQNQQKLSCSSCGEPPESHMYSYTHRNGNLTVLVKRLVPKHYLPGESEGKIWMWTRCSRCDHEHGVSKPTPRVLISAEARNLSFGKFLELSFSSHSAARRLSICGHLVNRDCLRFFGLGSKVAMFRYSPVEIYTTCKPQPTLQFVNPIRQDWFEGQRRNVHAKSMALFSGVARFLQNLKNEHPDAITLAVNCGLTLPVKDFTELEELLIKEKAQFESSLDKATDENGKPFGSVHGVLNINWYYQDLLLKLYIWDRRLYQLFYCKSVQLESCSNYKNPAGTVDGNCDDNFGVDKKIGEITSDEITAALGVSSTMESASNKLDHQSGDTTALLLHKSQEAGHSEFPCNGGSKAEESSIAHGQIKVDGTTETTNDPCFEISNDMEVQANLTVADPIPMEQERCSTPQQFKYPYWDDRERWIWNSFSESQMAYRDDIEIGYLGKFELINNYLPHYLSPLFEQHDDSYSPQFAVGPGSNILCIMEDEISSIIARALAISDERHHLIDLKFENGMDYSKGEYAKAIEKSFSFLSESSFSSSPWSSTDSEASLSSLSSFSSDDFSGYDSSSLLSPMHPEMTVNGKVTLKDKYSVTVVYDNQFFALRKKCCPSELAYITSLSRCKKWNAQGGKSKAYFAKTTDDSQTCLAKILGIYQVKQIKHGKEVKIDLMVMENLLFGHNISRIYDLKGATFSRRITDSNDHDTVYLDQNYVEDMGFSPIYIGGRTKHLLQRAIWNDTAFLTSVNVMDYSLLVGVDKEKHELVFGIIDYLRQYTWDKQLETWVKTSLVVPKNVLPTVISPKEYKKRFRKFMAKYFLSVPDTWSPDNPSKPCKSLGQSNRKLAEVQNGDNLSEHPNEVEGCA

SEQ ID NO: 46280 - protein, 1411 aa, Zea Mays
MCSDMDQRDHHATREAAPEANGYHHSPHGVDQSQVVDADKHINHHSTDDNAPSSASGHRHGGISRHASTSSVDDRSIKSGDDSDGAESTNGRSSNTEISFLENDTVWIPPQAADKEDEAQSFATSIAYDDDDDDYSDGIKWGQSSFPSPGKQHDAGTSNHREVREKAMLEAMNGQLKILVSRFLASVGIPSSNEEASDSWLDIVTSLSWEAALLIKPDGSMGKEMDPGSYIKVKCIASGTRRQSEVIKGLVFKKNAAHKHMPTNCHNPRLLLVKGVLGHSDVGLSSFNSMGQEKDLLERAIGKIMEICSPNVVLVEKTVSRNIQELLLKEGVTLIFDLKLNRLQRIARCTGSPIISFSEVLDKPKLKQCDYFHIGKFTEEHNNASEGGKMTSKTLMFLEGFPCPLGCTILLKGANSEELKKVKQVMHFTVFAAYHLILETSFFEDQRVFLNDSTTKETSATATEGTYGVAALSGPIPNFPSHDDSPALRLFHATSNSYADVNKPLISPRNVDKFSAVSSSSSNDLEQGANVRSNNAERLTLPVQGPLRKLFADMLCHQNIYLPVTSLQEANDNRKEVRVESSQETVSNGFHRPKTGESVISIENGESINDAQTQEITQAIMPTGSSVSDKDAESPVMGDNGAHSTTSIIIKEKHADGDQADDALDSHSILILMSSQCTEKQVICEQSHLTRIKYYGSFDVSLGRYLQDILQNQKLSCSSCGEPPESHMYSYTHRNGNLTVLVKRLVPKHYLPGESEGKIWMWTRCSRCDHEHGVSKPTPRVLISAEARNLSFGKFLELSFSSHSAARRLSICGHLVNRDCLRFFGLGSKVAMFRYSPVEIYTTCKPQPTLQFVNPIRQDWFEGQRRNVHAKSMALFSGVARFLQNLKNEHPDAITLAVNCGLTLPVKDFTELEELLIKEKAQFESSLDKATDENGKPFGSVHGVLNINWYYQDLLLKLYIWDRRLYQLFYCKSVQLESCSNYKNPAGTVDGNCDDNFGVDKKIGEITSDEITAALGVSSTMESASNKLDHQSGDTTALLLHKSQEAGHSEFPCNGGSKAEESSIAHGQIKVDGTTETTNDPCFEISNDMEVQANLTVADPIPMEQERCSTPQQFKYPYWDDRERWIWNSFSESQMAYRDDIEIGYLGKFELINNYLPHYLSPLFEQHDDSYSPQFAVGPGSNILCIMEDEISSIIARALAISDERHHLIDLKFENGMDYSKGEYAKAIEKSFSFLSESSFSSSPWSSTDSEASLSSLSSFSSDDFSGYDSSSLLSPMHPEMTVNGKVTLKDKYSVTVVYDNQFFALRKKCCPSELAYITSLSRCKKWNAQGGKSKAYFAKTTDDRFIIKQIKKTEFESFIKFAPDYFKHVYHSLDTGSQTCLAKILGIYQVIISRARVGFVSFYCFLSHVD

SEQ ID NO: 46281 - protein, 305 aa, Zea Mays
MPSTSLAVPTGAVGVAGSRRYPFISNRSASSAPRLRRAPRLVMVSASASLEALIFDCDGVILESEHLHRQAYNDAFANFGVRCPPGSADLLYWDEAFYDNLQNRIGGGKPKMRWYFGENGWPPSKIFETPPSTDSDKEKLVDIIQDWKTERYKEIINSGTVKPRPGVLQLMDEVKDAGIKLAVCSAATKSSVIMCLENLIGLERFNGLDCFLAGDDVKLKKPDPTIYITASEKLGVESKNCLVVEDSVIGLQAAKGAGMSCIITYTPSTASQDFKDAIATYPDLNNVRKLLLLDSKVSCFPQRIH

SEQ ID NO: 46282 - protein, 285 aa, Zea Mays
MMGSISQNIREGLLEVFYGVYEKDPDKVLQAMVQMGVLVPTGDMTAVRRTAQFFLNSFQERLAAQRKEREMATAELGFKKQLTKEEKFEKRKQRLAAIGEDLLAIAADQPFRFPATFTFVVRAFSVLDGIGKGLDPRFDITEIAKPYAKELLRFNDAGVEIVVKDAKKRWERQSRAFYNLFRQPDRVEKLAQIIERLEQGELKLRVRTLESERAFQRVAAVQKTIGYGVAAGSLMNLATMLYFNSIRGPATIAYSLCAFFGLQVLIGLVKVKKLDRQERLITGTA

SEQ ID NO: 46283 - protein, 145 aa, Zea Mays
MHSCWISSLWSKKKKRFQVLIRQRQRSPSAAQRNTAHTYIQMGSDFRGAFSRHHHRPRHWVQEVPRSRRQPHREDRAQPRVVHGHQRAAQGPGARELHRPRGRRAGRAWPTVPTAGVHRRLRPGTWDAGSGASDSAPFWRQQWFT

SEQ ID NO: 46284 - protein, 213 aa, Zea Mays
MAMTVIRLAAIRPPSASSSAASPSLWPPARLRLRVRCRAGGDGGMKKEEGEAEAPESLFARELRRRGMAPGAAAPAGASKEAEEGAPEAGAKRGVAATEFERGAAADGQRERSMALNSEGLEGLVPRAKLLLSLGSTFFLAFGPLILVTVSLFAVLYVTLDRVLYTMQARRRCRRHRTLIHTSYWRTRGSAGPPQMCSEHEQCKNQCIIDYKK

SEQ ID NO: 46285 - protein, 200 aa, Zea Mays
MPPSPPTPAAPKTIADFFARPAKRLRAAPAASLSSNSSPSSLSPEQRRRADTNLALARARRNLRLAESKAQASGGAPKLEELLVEETWAEALRGELRKSYALELCRFVAHERLHGPLPVYPPPHLVFHALNATPFDRVKAVIIGQDPYHGPGQAMGLSFSVPEGIKIPSSLGCSYAQYRPNCEGASSQLTCQERMGAVYG

SEQ ID NO: 46286 - protein, 106 aa, Zea Mays
MAFYPIPSPFLSRRFPEREKGCPSARNLAAPPRAHDCVLLGEIKGARVCRRGSLSTSVVCGGRKSTRLLGISRRRSFPSRRRGQPCAHRLLWYHWTRRMKDVVMSS

SEQ ID NO: 46287 - protein, 512 aa, Zea Mays
MLRRRRAPLLLAAAAAGAALAATSPSGENGRSVASALHQGIARSSRSVYTIGFVMADYKYSLRGLDAGSADYRVKLSKVHLRSAKKLLKLCEVNGGFYVKAGQYVSSLRQVPKEYSSTLSCLQDQATPSKFQDIKAVIEQNFGKELYDIFLEFDEHPIAAASIAQVHRGRLHNNQDVAVKVFPDYKFDRILIEFEKSMTMELDFTREAKNSERTASCFRKNSVVKVPYVFWQLTTREVLTMEFCYGHKVNDLDFLRKTDISPTKVAKALIELFGEMIFVHGFVHGDPHPGNILVSPEGHGKFSLVLLDHGIYRELDQKFRLDYCRLWKALILLDSNKILELGEQFGVGKYAKYFPVIFTGRTIESKSALGTQMSGEEQRRLKEDLNSLGMDDISSFMESLPPDFYVILRTDGLLRSILGNLGAPRHVRLLTYARCAIHGLEKQHKMESDVQLCSGAIRRMFLNVKTNVSYLRLRVIIEIAVLLAKANGAKQKVVNKLRQMLQETSQGFHRRM

SEQ ID NO: 46288 - protein, 655 aa, Zea Mays
MMILVFPLRYGVELVYKKQPLIRARGVSYCKNLLSPRFEHSEASNGEFSENLDKTYYVYLPPELCLVHPLPGSLVRGAQRLPSIMRRVESMLLAIQLKDIIGYPVPANKILEALTAASCQETFCYERAELLGDAYLKWVVSRFLFLKYPQKHEGQLTRMRQQMVSNMILYQYALNKNLQSYIQADRFAPSRWAAPGVLPVFDEETRDSEPSIFDEEFTPSSELQKNLYDDYDGDSMQEDGEIEGDSSCYRVLSSKTLADVVEALIGVYYVAGGKIATNHLMKWIGINAELDPQEIPSSKPYNIPESIIKSINFDTLEGALGIKFQNKGLLVEAITHASRPSSGVSCYQRLEFVGDAVLDHLITKHLFFTYTDLPPGRLTDLRAAAVNNENFARVAVKHKLHVHLRHGSSALETQIREFVKDVQEELSKPGFNSFGLGDCKAPKVLGDIFESIAGAIFLDSGCATSVVWKVFQPLLDPMVTPDTLPMHPVRELQERCQQQAEGLEYKASRTGNVATVEVLVDGIQIGVAQNPQKKMAQKLAARNALVVLKEKETAAKKDTEKDGEKKNGSQFTRQTLNDICLRRQWPMPQYRCINEGGPAHAKRFVYAVRVNTSDSGWTDECIGEPMPSVKKAKDSAAVLLLELLNRNYRGKPDGK

SEQ ID NO: 46289 - protein, 355 aa, Zea Mays
MGIAVVALHTMPGAFTTHSPASILSLRPDFTRINSRTNSVPNARTLQGVLRIPRLRSVRRLCQRIDDRVTEGNGPWVKDAMNNASQVLGDISVLGQAVSGNGGLNGSAAKTPPQRRKSSSVEDEAWELLQESMVYYCGSPVGTIAANDPNDSDPVNYDQVFIRDFIPSGIAFLLKGEYEIVRNFILHTLQLQSWEKTMDCHSPGQGLMPASFKVRTIPLDGDEDATEEVLDPDFGEAAIGRVAPVDSGLWWIILLRAYGKCSGDLSVQERIDVQTGMKMILKLCLADGFDMFPTLLVTDGSCMIDRRMGIHGHPLEIQALVIPQWRILANITVAAHSGMHQDEQTRTCCQSYRSS

SEQ ID NO: 46290 - protein, 106 aa, Zea Mays
MTTPRRHADPSPSPSPSSPPQLLSRLRSGASSFLARQYSTGKGGDNTGPSKPKGGGSSAPRHLRPGFVDPSSWKHFDSRAVGIKPGAIHTDAWAVLKKLRREVECG

SEQ ID NO: 46291 - protein, 95 aa, Zea Mays
MRARNVCVASVDLFSQNSAVATAAREDGIQCVTLLTYLAAAQIYRTNRSRHYRVMVLDNAHHSTPAGVSCSAADGVRDLDLAKASVDTDAQHTLF

SEQ ID NO: 46292 - protein, 316 aa, Zea Mays
MSVSLSRRQVRLLSHQSDSPPSGTHPLLLPVTGLYKREGIICRPFFTTLLGIKDMKAVPLPRPRAATRRRAWMLAVAAFIFVALVWAYLYPPPRYTSPVRDWLPGRLPAEPAREFTDEERASRVVFRQILTTPPVRSKNSKIAFMFLTPGTLPFERLWEKFFEVTWGTISMVDAERRLLANALQDMDNQHFILLSDSCVPLHNFDYVYDYLMGANLSFIDCFYDPGPHGNFRYSKNMLPEVTEADFRKGSQWFSVKRQHALMIIADSLYYTKFKLHCRPGMEDGRNCYADEHYLPTVFHGSGTRKLTGQRMSLSSF

SEQ ID NO: 46293 - protein, 562 aa, Zea Mays
MALARLRLLDRYGLLSPALSATALRSLGDLRALCTLSTTLRSGAGEDEIERIRREFDDAKRNYLSIPAAIKDMPKMNPQGIYVNKNVKLDDLQVYGFDYDYTLSHYSEHLQCLIYDLAKRHLVNELKYPESCLQYEYDRTFPIRGLYYDRLKGCLLKLDFFGSIEPDGCFFGRQRLSLSEIKELYGTRHIGRDQARHLVGLMDVFCFSEACLIADIVQHFIDAKLEFDPSYIYEDVNQSIQHVHRSGLIHRQILSEPEKFLIKKSQVFRFLKMLKEKGKKLFLLTNSPFYFVDGGMRYLLEDQHFDGNSWRELFDVVIAQANKPTFYNSDHPFRVYDTQKDTLTFTAVDKFLPDQVYYHGCLKSFLQITKWKGSEVIYFGDHLLSDLRGPSKAGWRTAAVIRELEDEIEIQNGDSYRFQQIGTVRGNCSCRTVDRYNLKGTVGACLAKLSIIHDLLGKVHAAVVSTEKGQVYKALLNELNAERRQCRSGMRDLFNTSFGATFLTDTGRESSFSYHIHQYADIYTSKLENFLSYAPESWLHPPHDIKIMPHNAKVPASLFSTS

SEQ ID NO: 46294 - protein, 379 aa, Zea Mays
MSSEPSAGGDLFAQQFSLLTTDKKLELSEGPSLQQKSYTSVANGMSGVLELSEASIESSGAKAAACGTLSVLSSMSNKVYNDQGTPAAFRVPAGAVIPFGSMEDALKKSGSLKSYTNLLERIETAQIENGELDSLSSKLQATVSLLSPSEEIIESLKKTFDQNVRLIVRSTANVEDLAGMSAAGLYESIPNVSLSDPRSFGAAVGQVWASLYTRRAILSRRAAGVPQRDAKMAVLVQEMLQPDLSFVLHTISPVDHDPKLVEAEVAPGLGETLASGTRGTPWRLSCHKLDGKVTTLAFANFSEELMVLNSGPTDGEMSRRTVDYSKKPLSVDATFREQFGQRLAAIGQYLEQKFGSAQDVEGCLVGPDIFIVQSRPQPQ

SEQ ID NO: 46295 - protein, 248 aa, Zea Mays
MFCLRGYWSPSLAPVREGPVRHHIKFNSVVVCGARGPRPRYPRVWKTRKKIGTISKSQKLVECVIKWMFNKGQGKTMGSYYTLLNALIEDGRIEEAEELFGMVFSRYMEGLPRTFFMRMISFYYSVEAYDKMFEIFADMEELGVRPDGSIIRMLGDVFQKLEMMDKYEKLKKKYPPPKWDYRHIKGKRIRIRVYPDSNPEVAAKGDPDTDELEELESTHLNNELDEAASSGLDRSVLDDAASGDLEYM

SEQ ID NO: 46296 - protein, 264 aa, Zea Mays
MILDKPLADIGGKGLFTKEIDDALLQGRIDIAVHSMKDVPTYLPEGTILPCNLPREDVRDAFICLTANSLAELPAGSVIGSASLRRQSQILYRYPSLKVVNFRGNVQTRLRKLKEGDVSATLLALAGLRRLNMAENATAVLSVEEMLPAVAQGAIGIACRSNDDKMMEYLSALNHEDTRLAVACEREFLAVLDGNCRTPIAAYAYRDNDGNCSFRGLLSSPDGSKVFETTRSGPYSFDDMVEMGKDAGHELKAKAGPGFFDSLQ

SEQ ID NO: 46297 - protein, 267 aa, Zea Mays
MAGRYDGNPFEEEDVNPFSEQARGKAGGQSNFGGGAFYMPNTRNMPPASNSRLSPLPPEPADFSATVDIPLDSSKDLKRREKELQAREAELNKREKELKRREEAAARAGIVIEEKNWPPFLPLIHHDITNEIPSHLQRMQYVAFASFLGLVCCLFWNVIAVTTAWIKGEGVKIWLLAIIYFISGVPGAYVLWYRPLYNAMRGILPAIDLISVNALVGIFYFVGFGLFCLESLLSIWVIQQVYMYFRGSGKAAEMKRDATRGAMRAAF

SEQ ID NO: 46298 - protein, 301 aa, Zea Mays
MWVLRSLLRAASPSLRHSSGRFTARGEALSAALGSAPAPAGLLAVRPRAEGGWRRAMSTKGRTMRTKVEKRMARETGRTQRELRRAVKLRKKLMTEDEKFIYNLRRAKKKVALLLQKLKKYELPDLQAPRHDPELLTAEQLQAYKKIGFRNRNYVPVGVRGVFGGVVQNMHMHWKFHETVQVCCDNFPKEKIKEMAAMLTRLSGGIVINIHNTKTIIMFRGRNYRQPKNLIPFNTLTKRKALFKARFEQALESQKLNIKKIETQLRRKGINPEDPVAMASIQRVASTFFRAIDEQQGSSQR

SEQ ID NO: 46299 - protein, 65 aa, Zea Mays
MHAFLTWHLDFFCLLLLLVFVLLYYYCYLLLRNSGVRRERAWLGDSLPHAFIGEGFFYDVAVVGQ

SEQ ID NO: 46300 - protein, 873 aa, Zea Mays
MSPFVLAVVSVAFLSLRFLQAHGSGLLLSCGSNSTVDADGRRWIGDITPEGNFTLSSPGLAASLVGKSSSDEIFGPLYSSARFFNAATWYTISVLPGSYCVRLHFFPSTFGNLSANNSVFDVTANDFKLVSKFNASEEIAWRASVSNSVTSAVVKEYFLVVGARGLSIEFDPRPGSFAFVNAIEVMLTPDNLFNDTVSKVGSPVTQLPLGLRGRGVETMYRLNIGGPALKSPSDQYLHRPWYTDEAFMFSTNAAQTVSNASSIVYVSSNESTIAPIDVYETARIMGNNMVVDKRFNVSWRFYVHPNFDYLVRLHFCELVYDKPSQRIFKIYINNKTAAESYDVYARAGGINKAYHEDFFDNSTQQADTLWLQLGPDSMASASGADALLNGVEIFKLSKDSDLSYVLGHIDTGNQMDSSKGGKIKGLWEELGIGSASFVAVTSVVLFSWCYIRKKRKAVNKEAPPGWHPLVLHEAMKSTTDARAASKSSSARNASPIGHRMGRRFGIAEIRAATKNFDESLVIGTGGFGKVYKGEIDEGATVAIKRANTLCGQGLKEFETEIEMLSKLRHRHLVAMIGYCEEQKEMILVYEYMAKGTLRSHLYGSSLPPLTWKQRIDACIGAARGLHYLHTGADRGIIHRDVKTTNILLDDSFVAKIADFGLSRTGPTLDQTHVSTAVRGSFGYLDPEYFRRQQLTQKSDVYSFGVVLFEVACARPVIDPTLPKDQINLAEWAMRWQRQRSLEAILDPRLDGDFSPESLKKFGEIAEKCLADDGRSRPSMGEVLWHLEYVLQLHEAYRRNVVESESFGSGELGFADIPSFFSLPHVIREGEEEHHHRSKKPSSIREELDTHYQPPHPSQQKEDTEVSRVSLTTV

SEQ ID NO: 46301 - protein, 358 aa, Zea Mays
MATGGKSAAPQPPPAASSSSERALESVHFSSGNPRIEETRGVVVLHPDPPAAASWSHVPLGRKPRVCVLAVPNHMTYADFCRFCGAFVPHTLEMRIVRTDGAEDQYSVLINFDTQSSTDSFYKHFNGKQFSSLEGGVCHVRFVEEVHYTELIEHAHTSVTNLAEQPTCPVCLERLDQDPGGILTTICNHSFHCSCISKWTDSSCPVCRYCQQQPEKSMCSICGTSENLWICLICGHVGCGRYKGGHAIEHWKETQHCYSLELETQKVWDYAGDNYVHRLIQSKTDGKLVEYNFHGDHTAESTCSLCSGDAAMDEALLNSKFEAIVEEYNDLVTFQLEKQRNKSRRKLRKKFLLLLRKP

SEQ ID NO: 46302 - protein, 389 aa, Zea Mays
MKAVGYSPYDSSAQNRGLRGRSFSGNVVASAGAFPYMRANNDLESEIHRVEQDAYTGILRAFKVQSDAISWEKESLITELRKELRVSDEEHRELLNKVNEDGTIRRMRELRQAGGSPSGLHHGNMVLYGAEPGSTTKRQRASHSIPLQSAGLQSPMMPSHSVSSAKWGPLQARGTKARTPIPLALPSVDPSSLINHKVYTRWPEDNNFYEATITRYNPVTGEHGLVYDMGTQAESWESVRLCDMAPEDIRWGFDGHLSNRDVWSPSGPMLMRHMTNNGAMAGSIKGRGRLSINETIKDYAPPENGTNRNFDHVDIPNTGSVVMEVKRVLFNPNMPEIEKARKLLKDQEQSLLDAIARLDEASDSDNVFRVMNSDTLHLEGERSGPTRRG

SEQ ID NO: 46303 - protein, 294 aa, Zea Mays
MASHRHFLRLLEDPFSPFPPPPPSSSSCPFLLDGVSDYPSPFPAASPFPDLDDLLLPPAPALDPFLAFTPTPLILRDLTNRVAALEVAVATARRRPGPPATRKRTYVTEAGGRKVKWTSVEKPRAGERTLKWEAEIKSPDDDGFDRKWKWEAKGGSSAASARKLKWGAAVKGKGCLEPWSQAYTWEEDFTASDSDKEEEERAADKNKAKKITMNKNEKKEVKAVKKEKKCPFATVKIEEISEDNDAGCVAIKKAFAKGNGKGKRKELSPQDAALLIQMTYRAHLAHRSQAPHCA

SEQ ID NO: 46304 - protein, 1114 aa, Zea Mays
MVSQAPVAGASLAASLCKKSNRVARVLAYALLEWILIALLLANGVFSYLISRFAAFFGLAPPCALCSRLGVDSLFETRPPHHRGAEPLRRLLCDAHAAELSRLGYCSAHRRLADAGDMCEDCAAAAAPGKALLSWMGRSELGERDLACACCGVALESGFYSPPFLLTTSAPRGSDCGLKQEEEAAMPNGDVVVVSKEGPVIELFDDKPFVEDDSIGVLAAEVVANVERPVALESIDSLVVTMGTVSSQSGGEGKEAVDHGVVRQNNVDMENTVSSNEEKIMPSDDKVDVVDRLIDEQIVAVVLVPACIEATLDGGINADKTVDAFADHQSLEDDSGLEVKDQKISFEDEVFEGEQAEQVTQQQELCAMPTDPSDHEFVERLDRSTELEHFPLAESKHKMNSMPVEASKHVAVTQIEGKQVQQAEVNQELDSIPKCSREHADEELQGERTAQAGLEQECDSVPIDYGEHGSLTSYAHTDDEQDEAMQKVTSVTRIEEKQVQQAEVNQELDSIPKCSREHADEELQGERTAQAGLEQECDSVPIDSGEHGCLTSYAHTDDEQDEAKQKVTSVTRIEEMQVQQAEVNQELDSIPKRSREHADQELEVERTAQAGLEQECDSVPIDSEEHGCLFSYAHTDDEQDEVKQKVTSETADVLHYAADTFNVNTNSWKDIEEDSTEAALTAIHQICYEPLTSIVKFSLDHSVSEEDREPDTPTHIEGICDSQELLDSKAVVSDAKSVDSSVATLSTDLESTELVSVDQLKSALASTRKSLNTLYSELENERNAAAIAADETMAMINRLQEQKAAMQMEAIQYQRLMEEQSEYDQEALQRLNELVVKREKEKQDLERELELYRHKVHLYEVKVRKLSRHKADDQNGSSSTSSSAEDSDDLSQSFYEGDESSHGINGSNGSIPTDVVLQETARHLVTLDGSLADFEEERLSILEQLKVLEDKLFDLDDEESDNMKHFSEENHLSGASNGFSDDDSCFKLHDKRKNVTYRGKKLLPLFDDATVEAGNVPQGNDAQHSTEVTLDLAREQHKLAIANEIDQVHERLHALEADREYIKQCVRTLKKGGKGFDLLQEILQHLRDLRRIEQRASARNSGELSPHYLHHHTD

SEQ ID NO: 46305 - protein, 51 aa, Zea Mays
MGGSQEGWDIPRAPAKDHNFLPSPAMGKTHCQLIFLSRLKMKKLWKLHTPM

SEQ ID NO: 46306 - protein, 723 aa, Zea Mays
MAEDAPPAAPVMTPEEVQAETELRMRDIGQRFGAIPEDPDELLRLLEEAEIWLSRVDQSPPESMYNALRPTMAVLITNELLEHPDPNVKVALTSCLTEVTRITAPEAPYDDDVMKDVFKRVVETFAELDDMNSPSFARRVSILDSVARVRCCVLMLDLDLDHMILDMFRHFFKTASTKHSEQVTHCMEIIMMFVIQESDDVHAELASFLLQNLTKEAQETLPASFGLAERVLGLCRDKLKPVFHELLKATLLDEYSNVVTMLFQDASDAGENNVDASGKDMAAEGKLSEKSVSDESRQETSKVDRNVNCLGQEGTSPSSTPTTAISNGGAPIDNVKSPDEPDSSKQKQELTSGDEQTPDSSKQKQELTSGDEQTPNSSKQKPELTFLDKQTKSSEQLVSCDVEVQEPVTVGTEKLSDINSKKDHKLGSSTGSEMTEQPKVVKDNESLVASELSPETNDGDKKQLTESGNITADESSKPIDTKPASVKPKRGRPPAAKSQEKKPVGKKQASNLKSPKLDPVTDSVGRATRQLNNDVAKSSSTKAVDGESGKKQHKTSMKFQKEDAASDKDTDDDISLKEMVSPTRIDKSKGQQEDRGTSSKRKRLLEAQDTPVSKKNKMLDKNLIGSRIKVWWPDDKMFYAGVVESFDASSKKHKVSYDDGDVEVLALKKERWEFIAEEQGADPDVASNMPRGRKAKGSSVQQMEGKTGTPQSQTEGKKCREGY

SEQ ID NO: 46307 - protein, 163 aa, Zea Mays
MQTGQFKSAPDAVRLIVAKEGFKGLYAGYGSFLLRDLPFDAIQFCIYEQLRIGYKLVAKRELNDPENALIGAFAGAITGAITTPLDVMKTRLMVQGQGNQYTGIVSCAQTILREEGPKAFLKGIEPRVLWIGIGGSIFFGMLEKTKSMLAERRNRELRAVKDE

SEQ ID NO: 46308 - protein, 760 aa, Zea Mays
MTLQALTLYPASLSREQKRQRIARTEVSSSQPVENVNQFKTCRCGEGDPNSTSETGDSPPASCPNCQVLKSGHLLLSSKGIGWTSWKKRWFILTRASLVFFRSDPNVPPPRGAEPIVTLGGIDLNSSGSVAVKEERKLLTVFFPDGRDGRTFTLKAETTEDLNEWRNALESALAQAPSVANTMGQNPIFSTDVAAEPAEAPAEQSEDSSVIGRPAEFALVDADGSPSFLEKALKFIEDHGVKVEGILRQSADVEEVKRRIQDYEKGKNEFSPEEDAHVIGDCIKDLEEGSCSSDAYTESEDDDVDKEYSTDNDINDDDDGSYDSGEDDIEEDLDYSDDSEHDSKINTNVKDGKVKNNISETAEVAQAKGASHMETNSQSNQKQESCGPNGSKDRILRSTSRSSSSREKSMEKSCSSAHRGKRTLWGRTSARKDLSTEEIECCSDDESLIEKLESNKVDLQSKIAKEAKENAILQSSLEKRKEELHERRLALEKEVENLREQLQKERSLRTSLESGVMNLRRGQVSLPSTTDSKTKADLEEVATAESDIINLKQEVSDLRGQVSGQQLCCESCNKRLLNTDRLGGPESSSVAASPTIGSDSASGMVKKEQKTFQGDIEQSRKQTAQDSPSSTDKPGHEAVGGSSQRAPQRRQSIAREGQDGWSSSSSNSKWNLAQKQYSNSPLIRGLHGSSRLEDFGGSIPPAASSALVKLTNRLNFLKERRALLASEMQSLDLGRPPAAAAAPSAKSPTPKGHERKKSRD

SEQ ID NO: 46309 - protein, 1409 aa, Zea Mays
MTLQALTLYPASLSREQKRQRIARTEVSSSQPVENVNQFKTCRCGEGDPNSTSETGDSPPASCPNCQAAGAPCERVLAQADEPGRSCAQTGVAANLQGGLDGRWCGLRHGGWLGASWFGCRDQRCTRRGQRRRRAGSGGGLGGDPLLLPLGNLSPTALDGPRPVRFIGRSRMIDRAELELRHALIVNVVGQEGTGCATKVREVLASRFGLDADALRLRRAAPGSFLVLFPSEELAVRVISEGSSLLVPPLRLHVKRWTRQAFASGGSVLSSLIDVELHGIPAHLWGLETAEVLLGPYCLIQGLHPVSIGGEDLSVIRLRAWCRSPVGLPEVLDLHAVEPAVLDENGVWIPRSLVFPVIVKIIGSEGVLEEELPPPPPDPSDDEPEQGRRARQMRRLGDQTFALDFGPVDAPTLPCVAVEELAAPGVLALYDDVVPDYSPDGATVVLAAGLREDSILAVSFVDSVSSARWNLKPPIFKVYSRRLRPSNLDDQDGTLVQSALDNSMVISSPLCEFQCLVTKPVDALLPTPRFPKRRKKPLPSNFIPRRSRRVAKFPPELGSEAAAQDARKYAKLFVSGLCSIHIAALAALFGWTVLKSGHLLLSSKGIGWTSWKKRWFILTRASLVFFRSDPNVPPPRGAEPIVTLGGIDLNSSGSVAVKEERKLLTVFFPDGRDGRTFTLKAETTEDLNEWRNALESALAQAPSVANTMGQNPIFSTDVAAEPAEAPAEQSEDSSVIGRPAEFALVDADGSPSFLEKALKFIEDHGVKVEGILRQSADVEEVKRRIQDYEKGKNEFSPEEDAHVIGDCIKYVLREMPSSPVPASCCTALVKAYRSDKARRLDEISRVIYEVFPEPNRQLLQRTLKMMQIVESHKAVNRMSQSALAACMAPLLLRPLLLGECDIDNEFSMGGDSSFQLLQAAAAANHAQAIVIIMMEEFDQIFDDLEEGSCSSDAYTESEDDDVDKEYSTDNDINDDDDGSYDSGEDDIEEDLDYSDDSEHDSKINTNVKDGKVKNNISETAEVAQAKGASHMETNSQSNQKQESCGPNGSKDRILRSTSRSSSSREKSMEKSCSSAHRGKRTLWGRTSARKDLSTEEIECCSDDESLIEKLESNKVDLQSKIAKEAKENAILQSSLEKRKEELHERRLALEKEVENLREQLQKERSLRTSLESGVMNLRRGQVSLPSTTDSKTKADLEEVATAESDIINLKQEVSDLRGQVSGQQLCCESCNKRLLNTDRLGGPESSSVAASPTIGSDSASGMGDIEQSRKQTAQDSPSSTDKPGHEAVGGSSQRAPQRRQSIAREGQDGWSSSSSNSKWNLAQKQYSNSPLIRGLHGSSRLEDFGGSIPPAASSALVKLTNRLNFLKERRALLASEMQSLDLGRPPAAAAAPSAKSPTPKGHERKKSRD

SEQ ID NO: 46310 - protein, 419 aa, Zea Mays
MTVDSSNTTALNTAATQGHMDVVRLLLEVDGSLALIARSNGKTALHSAARNGHVEVVRALLEAEPSIALRTDKKGQTALHMAAKGTRLDLVDALLAAEPALLNQTDSKGNTALHIAARKARHEIIRRLVTMPDTDVRAINRSRETPLDTAEKMGNTDAAELLAEHGVQSARAISPCGGGGGGNKQARELKQQVSDIKHEVHSQLEQTRQTRVRMQGIAKRINKLHEEGLNNAINSTTVVAVLIATVAFAAIFTVPGEYVQDPGSLAPGHDLGEANISHQTAFIIFFVFDSVSLFISLAVVVVQTSVVVIERKAKKQMMAVINKLMWVACVLISVSFLALSFVVVGRTERWLAVSVTIMGATILVTTIGTMLYWVIAHRIEAKRIRTIKRNTLTHSRSFSCSGMSEGEWVDEDFKRMYAI

SEQ ID NO: 46311 - protein, 603 aa, Zea Mays
MATTTTAGRNNGEGEQKRWREKGGFKTMPFILGNDICDRFATAGFGANMITYLTQQLHLPLVEASNLLTNFGGTSSLTPILGALAADSFAGRFGTIVAGSVFYQLGMLGLVVSALLPSLRPAPCPGAPAACQRASGWQLAALYLSLLCTSVGSGGLRPCVVAFGTDQFDREPGEQQVTAEAAGEVAERKRRYFNLYFFTMGVAALLALTVVVYIQDNVGWGWGFGIPAVAMFVSIVVFVVGYPLYVRLKPGGSPFTRLAQVAAAAFKKRHVAVPEDAGMLYQDKELDAFISTNGRLLHTDQLTFLDRAAIVTPGDISASGQPDLWRLSTVHRVEELKSIVRMLPIWSAGIMLATAGSHNGTFTILQARTMDRHITRHFEIPPATMSIFGTAAMLVSLALYDRAFVPLARRVTGLQSGITYFQRMGIGLAISILGVASAALVETKRRDAAADNGFLDNPDAVVPISVFWLVPQFAIHGVASAFSSVGHMEFLYDQAPESMRSTAAALFWLASSIGHYLGTVLVTVVQRTTRGRGDWLQDNINRGRIDNYYWLVTCLMVLDLGYYIVCFHFYTMKPLEMADEQDDHDEECELSTVPKNGIGAGVV

SEQ ID NO: 46312 - protein, 96 aa, Zea Mays
MESPPGATNLIPLNEIVVDINGTFVPSLSAPAPTNTGFSLTIDEVDNTWLEAPPAAEAPPSLVTPQEHGHLVIKRSLDCLSHLTKNDFEGISPDLR

SEQ ID NO: 46313 - protein, 413 aa, Zea Mays
MSRMAPPSPPQSLKPPTLPFSPPKKPPPMPVYKDLHFNRDLSATKKLQAGVDLVARLLGVTLGPKGRNVVLGNKYGPPKIVNDGETVLKEIELEDPLENLGVKLVRQAGARTNDIAGDGCTTSIILAQGLIAEGMKVLAAGINPVQVARGIEKTAAALVSELRLMSRVIEDHEIAHVAAVSAGNDYAVGNMIYDAFQRVGRQGMVRIENGRGTENSLEVLEGMQFERGYLSPYFVTDRGNMTVEFTDCQILLVDKKITDASEIIRILDSAVKENYPLLIIAEDVEEQAMADLIKNKLKGTIKVAAVKAFSFGEQKTQCLDDIAIMTGGTLVRDDMGHILEKAGKEVLGSASKVVITKDSTLIVTDGSNRRAVEERVAMIKGQIEVELFQSYLEFVCYIYHVCITTGSCKVFYF

SEQ ID NO: 46314 - protein, 666 aa, Zea Mays
MKALGAHVVDLLRGPHLLRAAVLAFAVAVAFLVGYHWPNAYPRLVFFSSASSSLASRSSRSPAVALSPNSNISFEPSLIPTPTTPPASPAPNACPPPSLPPPTPAPPPPLLPPPPPARLGIVGEDGAMQDDFDIGSVGANDTDLASDETAPQEPSNGGASGGPPRVRIGRFLVCPESMREYIPCLDNEEEIKRLPSTERGERFERHCPAQDKGLSCLVPVPKGYKAPIPWPQSRDEVWFSNVPHTRLVDDKGGQNWITKVKDKFRFPGGGTQFIHGANRYLDQISQMVPNVAFGSHTRVVLDVGCGVASFGAYLLSRDVLTLSIAPKDVHENQIQFALERGVPAMVAAFATRRLLYPSQAFDMIHCSRCRINWTRDAQPVYKHEQAQQEAWKEMEDLTTRLCWELVKKEGYIAMWRKPLNNSCYMNRGPAVKPSLCDADDNPDVVWYVSLKACISRLPENGEAPPPVQWPARLMEPPKRLQGVEMDAYPSKNEIIKAETKFWEDIIDGYIHVFKWRKFKLRNVMDMRAGFGGFAAALISRKLDWWVMNVVPVNEPNALPVILDRGLLGVAHDWCEPFDTYPRTYDLLHASGLFSKEQKRCNISSILLEMDRILRPGGKAYIRDRREVIQEIKEITSAMGWRGTIRDTAEGAYASRKVLMCDKPMVR

SEQ ID NO: 46315 - protein, 417 aa, Zea Mays
MKALGAHVVDLLRGPHLLRAAVLAFAVAVAFLVGYHWPNAYPRLVFFSSASSSLASRSSRSPAVALSPNSNISFEPSLIPTPTTPPASPAPNACPPPSLPPPTPAPPPPLLPPPPPARLGIVGEDGAMQDDFDIGSVGANDTDLASDETAPQEPSNGGASGGPPRVRIGRFLVCPESMREYIPCLDNEEEIKRLPSTERGERFERHCPAQDKGLSCLVPVPKGYKAPIPWPQSRDEVWFSNVPHTRLVDDKGGQNWITKVKDKFRFPGGGTQFIHGANRYLDQISQMVPNVAFGSHTRVVLDVGCGVASFGAYLLSRDVLTLSIAPKDVHENQIQFALERGVPAMVAAFATRRLLYPSQAFDMIHCSRCRINWTRDDYLELEATLLGQHNLFISMNRPNKRHGKRWRTSLPDFVGSL

SEQ ID NO: 46316 - protein, 678 aa, Zea Mays
MKALGAHVVDLLRGPHLLRAAVLAFAVAVAFLVGYHWPNAYPRLVFFSSASSSLASRSSRSPAVALSPNSNISFEPSLIPTPTTPPASPAPNACPPPSLPPPTPAPPPPLLPPPPPARLGIVGEDGAMQDDFDIGSVGANDTDLASDETAPQEPSNGGASGGPPRVRIGRFLVCPESMREYIPCLDNEEEIKRLPSTERGERFERHCPAQDKGLSCLVPVPKGYKAPIPWPQSRDEVWFSNVPHTRLVDDKGGQNWITKVKDKFRFPGGGTQFIHGANRYLDQISQMVPNVAFGSHTRVVLDVGCGVASFGAYLLSRDVLTLSIAPKDVHENQIQFALERGVPAMVAAFATRRLLYPSQAFDMIHCSRCRINWTRDDGILLLEVNRLLRAGGYFAWAAQPVYKHEQAQQEAWKEMEDLTTRLCWELVKKEGYIAMWRKPLNNSCYMNRGPAVKPSLCDADDNPDVVWYVSLKACISRLPENGEAPPPVQWPARLMEPPKRLQGVEMDAYPSKNEIIKAETKFWEDIIDGYIHVFKWRKFKLRNVMDMRAGFGGFAAALISRKLDWWVMNVVPVNEPNALPVILDRGLLGVAHDWTYDLLHASGLFSKEQKRCNISSILLEMDRILRPGGKAYIRDRREVIQEIKEITSAMGWRGTIRDTAEGAYASRKVLMCDKPMVR

SEQ ID NO: 46317 - protein, 311 aa, Zea Mays
MLFVIIAGSYIGFQTGWVGYKVAGGFFPYGANGMLAGSATVFFAYIGFDSVASTAEEVKNPQRDLPLGIGTALSICCSLYMLVSVVIVGLVPYFAMDPDTPISSAFAKHGMHWAMYLVTTGAVLALCSTLMGSILPQPRILMAMARDGLLPSFFSDVHKTTQVPVKSTVVTGICAAALAFFMDVSQLAGMVSVGTLLAFTIVAVSILILRYVPPDEVPLPSSLQASFRLSQENDEEKLRGTLGDDDHEQGSAEISDVVVEPITDPLIEKQLYASNLSEAKRRKTAACSITSVCIGVLILTTSASATFLPSR

SEQ ID NO: 46318 - protein, 226 aa, Zea Mays
MLKDTLERKKLGSHANKDTSAGNSFGFYDTQQFQQNILGGTDFFPIVTTAQVQDSLMLPKVDRPMEPNNGNFVAPANQVWFSAASREPSHSGSSTAMTTHSAGFEMCDELPPAAQAMSVCESTRKNAANGTTDCKSKGKEYRERVQKDNLKDGRKKAALTRIGSISSEQAADNGDPTKKRRVERSRKKDSEQTKQIEELQKQNEDLAEEKERLVEEIERIVSDPNT

SEQ ID NO: 46319 - protein, 193 aa, Zea Mays
MSTAAPAPGSTATVRVSNIPASAIAAELLAFFDSAVTIAGATFACEIVAAHRGWLSRGHGFVQFDSSAAATHAIDLASSGRLPPFLGSCLSVSPARADLLPRAPDLSLRAASASLILGNRVAERELEVAYSCDGVRAEVIPRMRRVDLYLKHDSQSYKLEVLFEDINECFGCHLDGTGAILLQLQYSLGTFLM

SEQ ID NO: 46320 - protein, 109 aa, Zea Mays
MQELFINSSADGSLAMEATTCMNETHPGDDSDFNDDVCSDFSNYPQPVHDLAPTRRGSTSEEERGTKESHNKGMYLAHKDQKGMRGFLSAASDITFESWVLKHLSDLDL

SEQ ID NO: 46321 - protein, 226 aa, Zea Mays
MGVKEMYLQYYNSYNQYLRRRRDRARRLLSKPIKFFNEMQELFINSSADGSLAMEATTCMNETHPGDDSDFNDDVCSDFSNYPQPVHDLGDDSDTLQSPNHHPSQSVDHSSSSSGLKRPQGEGVPAKRNVEPKSRTTKVVDELSATLVELQNDLKKPPPPVPMPFVNPDAILWQRLENMTITTDQKLMVGMYLAHKDQKGMRGFLSAASDITFESWVLKHLSDLDL

SEQ ID NO: 46322 - protein, 162 aa, Zea Mays
MHASKFRLGSLLIACWVGRATRTTRRARVTQEVARRRPPRRRRGTRWPWWRQRRRRRRTSRWGRRRRRSTSSASSSPSTTTPARCLTCWMPGARCSRTSPPTSRTASARSTRRGWSGGRRRSGSCAPATSPTSRPAPSSTTPSCTSSTPSATNRSPNPSRPQ

SEQ ID NO: 46323 - protein, 256 aa, Zea Mays
MKKMLDCSWLQNSLDPVDGNDKKSDYYWTDVTNTYNSTTPSNRRRNRNQLKIRWDRVKKPLSEFHGCWVRTTRVFQSGQSDDQRTDNALQLYASEHNGKPFLLQHIWRVVRHERKWAAYVDKLINAKDNRATPSPVVNVEDSPTKRPTGKKKAKEERFGKRKAPEAISAIGEKLEKFIEASSKVEKMAQVQQCLADKKLEVAKINHKAAQEQTKCKMIDLYKDLLCGSTAGLSEEALAERSKALECMRLSLFAPDN

SEQ ID NO: 46324 - protein, 247 aa, Zea Mays
MHVNKEKAAASSSLQSQARPEERLLARCPRPPNGSSTTSHKAAAARDERLYTVHFDVRVPAHQPPAGICDAGAGRQKIVSGSSWQNLPATSAAAAAAAQHVRYLHPQMARPPATPRDATPYSFPHFPYSRGSLPPAAALQQMPQYVCGPAYGLRPASSSAMMMKQLQQPMPTQQQHQQMWQYHVSQYQPRPDATLSPAAAWHGISSSLRPMGMLAPPEMPSPPRPPQMELFCAPYQGGRQPQQLRLM

SEQ ID NO: 46325 - protein, 334 aa, Zea Mays
MADMERREEKEKKPVVGRQQARRHAIGSGSTPSSPPPPTAAAGYSGKEMRGEEHRAALRQKRLKKAKCFKWRPSKGDMDSKVEAGGAGSGQVCDDAVLCSLSTASFSGLVSWQRVRTLGKVAEGCDAADPPVPRKLRSAINKRAGRFASAPSRHVKKRRHLSAISAQISSVGQETRSNGSSLFTEQEEAIADVLLSLSQVPSHSEVTADKAVADSSNTNDASTSFSKGPTKEDDQTAELPSAANELASQCACINKAVEQSNIVPNADPVAAAANQSSNSIPLLSANEQMQDLSMETAVNLPSPSKDTSINSTMNCSLMIANVTLHRSQRLLFGW

SEQ ID NO: 46326 - protein, 689 aa, Zea Mays
MADMERREEKEKKPVVGRQQARRHAIGSGSTPSSPPPPTAAAGYSGKEMRGEEHRAALRQKRLKKAKCFKWRPSKGDMDSKVEAGGAGSGQVCDDAVLCSLSTASFSGLVSWQRVRTLGKVAEGCDAADPPVPRKLRSAINKRAGRFASAPSRHVKKRRHLSAISAQISSVGQETRSNGSSLFTEQEEAIADVLLSLSQVPSHSEVTADKAVADSSNTNDASTSFSKVCCVISYAGPTKEDDQTAELPSAANELASQCACINKAVEQSNIVPNADPVAAAANQSSNSIPLLSANEQMQDLSMETAVNLPSPSKDTSINSAQKHHELQFDDSKCHPAQKPEAPLWLVNSDQSEGVLLHEREKAKNNSAQEIVPLVQTLLPCTPAGYLVKPSSSKLAAPANTISESANFTTPGNQNKHPVLRNVGAPKAWKRSITHVYVSHVIQMHVNKEKAAASSSLQSQARPEERLLARCPRPPNGSSTTSHKAAAARDERLYTVHFDVRVPAHQPPAGICDAGAGRQKIVSGSSWQNLPATSAAAAAAAQHVRYLHPQMARPPATPRDATPYSFPHFPYSRGSLPPAAALQQMPQYVCGPAYGLRPASSSAMMMKQLQQPMPTQQQHQQMWQYHVSQYQPRPDATLSPAAAWHGISSSLRPMGMLAPPEMPSPPRPPQMELFCAPYQGGRQPQQLRLM

SEQ ID NO: 46327 - protein, 534 aa, Zea Mays
MAAASSAPFFGLGDTQMQPQQGSSSSLQQNSTAAPGAAAVPPPKKKRNQPGNPNPDAEVIALSPRTLLATNRFVCEVCNKGFQREQNLQLHRRGHNLPWKLKQKNPREARRRVYLCPEPTCVHHDPSRALGDLTGIKKHYCRKHGEKKWKCDKCSKRYAVQSDWKAHSKTCGTREYRCDCGTLFSRRDSFITHRAFCDALARESAQMPPLGAGLYVGPGSMSLGLSQIHGFADQAQSSSAAAAPQFDHIMPSSSGSSSMFRSQASASSPSYFLGGSAPPAAAQDFSEDGSQGSQGPLLHGKAHFHGLMMQLPEQQHQPGSSNAAVGANGSNILNLGFFSAGNSGGTSGSLQDARIAIQDQFNLSGSGSGSAEHGNNVMVASIGSHLGRGFPSLYSSSPSAGMAQNSATALLMKAAQMGSTTSSTTHNNHNGPTTTSTLLRATGFSGATGSGQLGTTGGRAAAGEEGAASHEAHFHELIMNSLAGGGFSGTAGFGGGVDDGKLSTRDFLGVGRGAATMAPPGLHMGALDPAQQMK

SEQ ID NO: 46328 - protein, 286 aa, Zea Mays
MLCFACYLTYLQNEAQHSTAQGTNDRAQGLHVLPGEAFVRRAHVWLCGANKADSKVFSRAILARTVACIPVDDGVLEIGTTEKVEEDIFLIQHVRNIFVDQHGAHIMPTTLSGYSTSTPTTQLNHQPFQTKTGISLNLGDEHNSEMEDDDDGRIDLENNTENDSTRRHLPQDASVGNELETLNAESSGPMLIANLTAQDEYCPLHRFHSEDLSSKYLQSSGAEDQAAVAENAHYIKTVLTILRFNACRQTQAGLLKHRQNLPGTLQELAILKMELEAQRNKQHVDP

SEQ ID NO: 46329 - protein, 207 aa, Zea Mays
MANRTDPLAKSIHGTNPQNLVEKIVRSKIYQSTYWKEQCFGLTAETLVDKAMELDHTGGTYGGNRKPTPFLCLALKMLQIQPDKDIVVEFIKNEDYKYVRVLGAFYLRLTGTIADVYQYLEPLYNDYRKIRHKLSDGQFTLTHVDEFIDELLTKDYSCDTAMPRIQKRWVLEASGTLEPRRSALEDDFEEEEEDKEEQPMEIDEPNG

SEQ ID NO: 46330 - protein, 57 aa, Zea Mays
MAWELIEVPGNLNPSLKDSSVDVVAAKIDPKLANTLIRQLSQVCPLENLRHVKRVRR

SEQ ID NO: 46331 - protein, 412 aa, Zea Mays
MAWELIEVPGNLNPSLKDSSVDVVAAKIDPKLANTLIRQLSQVCPLENLRHVKRVRRRTECGGKSELSIILCVSTGSETCNIQFSEDLQKIVDTYQLSPFTAKVARCCATSKEEWEEQCKLWPTSYHPAHDLGIVRGFQEEELPSIFNCMKAAIQLSKAGNAAIIVDPSSMQIVAKATDHTHKHDTAEEGNTFSEANADVTCPWNTSTDDDNNLSLPGSFLPKLNSLNMEIPCINPWGWMKKRTCEQKPSPWDGCSAWHPLRHAPMAAIENAAERDRTMFPSSISITKPDSDGSPENCCDNEPAKRLKTDTKDNEKPASESSGGDLFETSRPYLCTGFDIYLVWEPCTMCAMALVHHRFKRVFYAFPNPVAGALGGVYRLHGERSLNHHYNVFRVSVPEAYLNGLNCYSKEC

SEQ ID NO: 46332 - protein, 1165 aa, Zea Mays
MPPSPSPRTSRSPAQETYQKRTNSFRNVLPAKSKDDELALFSDMQKVETDNFLLEPSVDFDDSMKKLRYFPEVKLGVNIPAHGESHELLNTDGDKNDYEWLLTPPETPLFRSLDDEENQSITQVSRGRAQSKPIQISRSSMVDNNQRASRSSASSSRLSPSPCSMGRTRSSSSASRSSPPLAETQTPSRRLSTPPIAKTLTPPRRSPSPVSRRMSTGSSGPTLNGTRGASPVKSNHRSSSPKLHGWQSNVPGFSFDAPLNLRTSLTDRPVCRSRGGSPSSFSGLEKGSRGRRLSMSPTPPRRASSSHSIERDRMSSYSKASATSSGEDDLESMQSVPISYSSSPVVKKSLVVMKTRTIASSKNLSKKLTPSSVPKRSFDSALWLMDHRKAPQDRFRPLLSGAPANTFGAGNGNDVHKPMFSHNSSLTTSSTASSYHGATFGSYMHGSQEQHDFAGEWEADDISQGHEDIFMFDKLDELNEDIHYKSMESTDNSLVIVKHLVSGRQDLEGSRRPNQSLCHSTDISHVSFKATCSRCGKFFDAMDVDEEGVYCDACATKDGNILTSPIVQTIGEENQQYGKTANLKPCIASDSPVPTDCEIYSKEVSLDHQLVNNESYADCLDQAPPIHSMGHTPQEMLLGQEENIDAEHRNKHVGDSLGNTNDNSFHRSSVDECEQTEPTSVGQDLFIIDQMNNHNRGLSQCNENVSESVTCDNSHQLGSTTYQNPKLETTEDTGISVLLVPKPNSNKWPNMLCSEPYYARDGVSMMKRSFGLGSSSAASSSDLGSSRQSIICFERLRSGKKGDFEKSQISSTISCQSIASVSDMSICSSSASLCPQSDAVGDSCFPIDTLESGTSGTLISSQENDDAFCKDTLPSAMECPSSSQFIADDDSPGDMKIQSYLSEVGYTTVENHSACRMTDMDCTSTNMYSLDTEMPSDTLESSGPVESSMPETEEDAYTISQCNKGSAPEHSSDENNFDNIQMQSEIVQGSAEENRLDDCCMSAISEEDVLISGQEDDIRNLPNDELCAEVEGPRKQIQRCFTLEEAADTILFCSSIVHDLAYKAATIALENKKEPKFVDSIRPTVAIVRGSFAKEESLPKLPHRRTPNRKVKRKRLEGETTTTETTEKDVVANDSPPVCSASGITRNSDNMKPPKLESKCNCIIM

SEQ ID NO: 46333 - protein, 80 aa, Zea Mays
MFGTRLFLQRTGMTAILLKKMLTSDTLTLRNRHMEGDSSQAYGLLFLGFLSFLPGFYETRVAYYSWRGAPGYTFASIPDY

SEQ ID NO: 46334 - protein, 102 aa, Zea Mays
MSMPNGLARRALTYQTDTLLLLLLGTSIAKDLVVRNDRGWGMLNLVAGLLESTTTIISGSRQPFVMETVKADDAAKLGLISGKHLLFDTSIQEVCFWKHLQC

SEQ ID NO: 46335 - protein, 307 aa, Zea Mays
MEADSMVAMGCGGFYWQSPPRFLLEPLDLADIVDSSMYVPTNEADEPVSGLCSSNRPAEDYSSSAEGANSCSAAVVPSPPPPPGVTTTTTRNMDMERTRRRKLNERLYALRSVVPNITKMDKASIVRDAIAHIEHLQEQERRLLAEISVLQSSDDGTAAAAAVKTEDAAATGGAAYDVDSVPWRKKPRAVPLPSVYFTDNPTSSISSSPPVRILEVQVSQAGERVAVVSLWCSRGRDAVGKICLALEPLRLRVVTATITARGDTVFHTLFVETGETGGARLKEAILAALARLNVLANADQVVHELLG

SEQ ID NO: 46336 - protein, 163 aa, Zea Mays
MDRELSPRGNAPGRGSGGASSSKHKNGGGGKKPIKVLYIANPMRVQTSAEGFRALVQELTGQHADPSKYSPGDLDSGAAAQGLSPRARVADVSSETIVASHSPGSKAAPHGGDYYDVEEDEDDVFRSPHMLLENNYTVFSPPTLLYDHHPHSKTLAPPPPPRD

SEQ ID NO: 46337 - protein, 83 aa, Zea Mays
MDVHDDLDVFLRTETQGNKYLAVSITKETASLLLHAAISYSLAYSVTIKLVTIQWTGNSRGPLIDSYDHVIGVNTTTLTRKGW

SEQ ID NO: 46338 - protein, 88 aa, Zea Mays
MQLQLLLAIQGNAGPIIPIVQSMDLVIFPALDIRVKNVAGTYSLEHKGENYLFAHQTRLLLFQKKVIFKRILNKMTRCLGLVGRTFFE

SEQ ID NO: 46339 - protein, 109 aa, Zea Mays
MDVHDDLDVFLRTETQGNKYLAVSITKETASLLLHAAISYSLAYSVTIKLVTIQWTGIFTTTIHFTVHTFPAEGCFQGFHFNIEPISIKHGILFGNRCLWWCHGPVRPL

SEQ ID NO: 46340 - protein, 675 aa, Zea Mays
MASRIKEDERHEKIIRGLLKLPANKRCINCNNLGPQYVCTNFWTFVCTNCSGSHREFTHRVKSVSMAKFTAQEVAALQEGGNERAREVFFKEWDPQRNGYPDSRYTGERSTDRPPRAKDDKDEYSENRRSDGNWGGSRSPPNGSYSDRQNYSGRSDDRNSRYSYGDRSPGYDQNDYKRSPRYFEVGDNRSGKITPIQGFEDRRFSEPRKRDSGSPDFQKEADGSSPVVRPVRDILGDNAPQLRVGEPSKPATEPAKPTVVRPIDPPKPSVVRPIDPPKPNGTRAIDPPPLTKTISSASSIGSAEGTSEQTKVASAVSLIDFSADPEPESTAPPQPAPMTQQPPVNAVAPQPVLEQRKSAPSVSGGDWASFDAFGQQQTPQTSSSVNPLESALAQLSFSEAPSAPNVSAYPVSLDPTLKANDGGYSSVLDQSHSLFDAPFGISGNQASTVMSGQETSVQQSSIAAPTAGLPSQATANQQGTSGIQGAASSTDSKFSGRKELPADIFTALYPPSTPMMPGWQRAPHFGMGYAMQYPPGVFQGMQAYPQPTYQQPVYSQHAYSHPQPVKASNPFDLGNGPAPTQAHMPPSGPPGVLAGPAPQTLISNSSFGVPPQQPHQLYQSAAHPSHFMMQQVPNSMPMPEQQPNSMLVTQQGLGYLQPNTPPPSYGSVGGSNPFG

SEQ ID NO: 46341 - protein, 228 aa, Zea Mays
MQSLRMLLFGSRSSEKYIREMKVDKHAVGGCGGIIGRKKGAVAMYINFSGIRMVFVSCHLAAHEHKVEKRNAEFQHISQSLFARYGAPTPYAQSADITVWLGDLNYRLQGISSTPARKMIEENRQSKLRGRDQLLQEAEKGQVFSGYCEGTLSFKPTYKYDVGGSVYDTSYKVRVPSWTDRILFKVGQSSGLDAVLSSYESLDCVRSSDHKPVKAHLCLKVRSDGDAD

SEQ ID NO: 46342 - protein, 209 aa, Zea Mays
MQCYAAWYAHVPGLKVLAPYSAEDARGLLKAAIRDPDPVVFLENELLYGESFPVSAEVLDSSFCLPIGKAKIERQGKDVTITAFSKMVGYALQAADILAKEGISAEVINLRSIRPLDRATINASVRKTNRLVTVEEGFPQHGIGAEICMSVVEDSFEYLDAPVERIAGADVPMPYAANLERMAVPQVDDIVRAAKRACYRAAVPMAATA

SEQ ID NO: 46343 - protein, 688 aa, Zea Mays
MAPTAVDPGPSDHLLAPAPAAMAGGGDGGDGQMEVVFNVSSSDTDSDDLGAGGGKRSRPVAGQGGGRDREDKKARILAAAATVPAGFLEPLSPVRLLPPPAPGRSVTKQFWKAGDYVGKPDHLLAVVAAQHSDSGMDHVRVHPKFLHSNATSHKWALGAFAELLDNSLDEVVHGATYVNIDMIESKKDGTPMLLVQDNGGGMNPDKMRHCMSLGYSAKSKVKNTIGQYGNGFKTSTMRLGADVLVFSCSRGIEGTRPTQSVGMLSYTFLRSTNRDDIIVPMIDYEKENEWKRKARTTLTDWCMSLETIIQWSPYSTEAELIQEFGSIGEQGTRIIIYNLWEDDEGELELDFDADANDIQIRGVNRDQNKIKKANQFPNSKHFFTYRHSLRSYASILYLMLPDNFQMILRGKKIDHHNIINDLMLKKQLTYNPTVGDGLPKDMHVAAKVTIGFVKDARQHIDIQGFNVYHKNRLIKPFWRVWTSAGVAGRGIIGVLEVNFVEPAHDKQDFERTNCLARLEARLNRMQKKYWSDNRHRIGYGTNDASTDSVKRKTGSWKSGYLQTIRSDGRSCSNTTNNIMNASMSSPETSKLSGPNREFSSTTVCQHRAEKSANTIRSERSVLHGLSNTDGGKTETANAPSKSTSPILRTSLPPTPNEGKRSERIAAKYQSKNLDGAGIIIKGTANRAG

SEQ ID NO: 46344 - protein, 289 aa, Zea Mays
MNSLAFPSCPSALTPASTTAPASSPFPSPRIKIRCPRQEDAAHYHLRLRDRSSSQTVIVAMAAAAPASSVKEVLPSPLTSASEPPPLFDGTTRLYVAYHCPYAQRAWIARNYKGLQDKIKIVAIDLADRPTWYKEKVYPENKVPSLEHNNQVKGESLDLVKYIDSNFEGPSLLPEDPSKKQFAEELLAYTDAFNKALYFCIVSKEDVSEEAVAALDKIEDALGKFNEGPFSLGQFSLIFYSNIKNYDITKGRPNLQKFIEEVDKIDAYTQTKQDPQFLLEQTKKRLGIA

SEQ ID NO: 46345 - protein, 444 aa, Zea Mays
MTKAATLYGSKTQSDALRPGPLRPANIIRNKFPTYKNGSNGIVIKLADGPEMPPLKEIVAKETADLLDRRQRLSVRELAMKFEKGLNTATLLSNEVKWRQVALLERDILLKNLKCVLESLRGRVTGKTKDEIEESISMVEILAVQLSKREAELLQQKEEVTKLAKSLKQASEDAKRIVEEERANAHTEIETAKSSVQRVQQAVQEHEKMSQNTGKQDMEELKKEVREARRIKMLHQPSKAMDLENEIRILRNTFAEKSKDCVNLLKELEMHKRLKENGTIPSFDLEGLQCLGSMLRIVGLSGTHMDLSNISIQWFRIHPKESNKEIISGATRPVYALEPHDVGRYLQAEIDVGGEIAVAKTAGPVDPDAGLVDYVETLVRKPETEFNVVVLQLNGIDLPKESVHVLNVGRLRMRLTKGNSVVAKEFYSSSMQIILAGPGDKTPW

SEQ ID NO: 46346 - protein, 379 aa, Zea Mays
MVVCMLIAFTLATRWFRRSLVKLPRPFDKLTGFNAFWYSHHLFIIVYISLVIHGECLYLIHDWYKRTTWMYLAVPVGLYVGERTLRFFRSGSYSVRLLKVAIYPGNVLTLQMSKPPTFRYKSGQYMFVQCPAVSPFEWHPFSITSAPGDDYLSIHVRQLGDWTRELKRVFSAACEPPVGGKSGLLRADETTKKALPKLLIDGPYGSPAQDYSKYDVLLLVGLGIGATPFISILKDLLNNIIKMEEEEEASSDLYPPIGRSKAHVDLDTLMRITSKPKRVLKTTNAYFYWVTREQGSFDWFKGVMNEIAELDQRNIIEMHNYLTSVYEEGDARSALITMLQALNHAKNGVDIVSGTKVRTHFARPNFKKVLSKLQFWHRN

SEQ ID NO: 46347 - protein, 485 aa, Zea Mays
MRGGGGPGVGTPGRPRWGSGATTPRSLSTGSSPRGSDRSSDDGEELVEVTLDLLEDDNIVLRSVEPAAAAAAPAPPRRHPDPTPSSSAAPSRSRSPAMRRTSSHRLLQFSQELKATASRAKQFSQDLTKRFTRTQSRANLAGEPPAAAPSGIDAALEARAQRRRRAQLDRTKSGAQRAIRGLRFISGGNKASNAWIEVQANFDRLARDGYLSRADFPKCIGMTESQEFAMELFDTLSRRRQMQVDRINKDELREIWQQITDNSFDSRLQIFFDMVDKNADGHITEAEVKEIIMLSASANKLSRLKEQAEEYAALIMEELDPEGLGYIELWQLETLLLQKDTYVNYSQALSYTSQALSQNLAGLRKRSPIRKISSTLNYYLEDNWKRVWVLAVWIGIMAGLFIWKFIQYRNRYVFDVMGYCVTTAKGAAETLKLNMALILLPVCRNTITWLRNTKAARALPFDDNINFHKGTTLYVIFHGSLVHQR

SEQ ID NO: 46348 - protein, 671 aa, Zea Mays
MATPTALSTSLPYLPPRRVISFPSAAAVSLPVTSRPARLRDSRLAAAATSASEVLESTNGAVPTAAKDGAWRGYGREYFPLAAVVGQDAIKTALLLGAIDREIGGIAISGKRGTAKTVMARGLHAMLPPIEVVVGSIANADPNSPDEWEDGLADQIQYDSDGNVKSEIVKTPFVQIPLGVTEDRLIGSVDVEASVRSGTTVFQPGLLAEAHRGVLYVDEINLLDDGISNLLLNVLTEGVNIVEREGISFRHPCKPLLIATYNPEEGSVREHLLDRIAINLSADLPMSFDDRVEAVDIATRFQESSKEVFKMVEEKTETAKTQIIFAREYLKDVTISTEQLKYLVMEAIRGGCQGHRAELYAARVAKCLAAMEGREKVFVDDLKKAQAQRRRGKAGRAKNVIFSEDRGRYIKPMLPKGPVRRLAVDATLRAAAPYQKLRREKERDKTRKVFVEKTDMRAKRMARKAGALVIFVVDASGSMALNRMQNAKGAALKLLAESYTSRDQVSIIPFRGDYAEVLLPPSRSIAMARKRLEKLPCGGGSPLAHGLSTAVRVGLNAEKSGDVGRIMIVAITDGRANVSLKRSTDPEAAAASDAPRPSSQELKDEILEVAGKIYKAGMSLLVIDTENKFVSTGFAKEIARVAQGKYYYLPNASDAVISAATKTALTDLKSS

SEQ ID NO: 46349 - protein, 556 aa, Zea Mays
MATPTALSTSLPYLPPRRVISFPSAAAVSLPVTSRPARLRDSRLAAAATSASEVLESTNGAVPTAAKDGAWRGYGREYFPLAAVVGQDAIKTALLLGAIDREIGGIAISGKRGTAKTVMARGLHAMLPPIEVVVGSIANADPNSPDEWEDGLADQIQYDSDGNVKSEIVKTPFVQIPLGVTEDRLIGSVDVEASVRSGTTVFQPGLLAEAHRGVLYVDEINLLDDGISNLLLNVLTEGVNIVEREGISFRHPCKPLLIATYNPEEGSVREHLLDRIAINLSADLPMSFDDRVEAVDIATRFQESSKEVFKMVEEKTETAKTQIIFAREYLKDVTISTEQLKYLVMEAIRGGCQGHRAELYAARVAKCLAAMEGREKVFVDDLKKAVELVILPRSILSDNPQDQQQEQPPPPPPPPPPENQDSSEDQDEEDEDQEDDEEENEQQDQQIPEEFIFDAEGGLVDDKLLFFAQQAQRRRGKAGRAKNVIFSEDRGRYIKPMLPKGPVRRLAVDATLRAAAPYQKLRREKERDKTRKVFVEKTDMRAKRMARKAGHICCGR

SEQ ID NO: 46350 - protein, 727 aa, Zea Mays
MADDQSVVGRRRIYYDPIGNEALICSDSDEEIPEPEEEKHFFTEGEDQLIWRATQEHGLNREVVNVLCQFIDSTPSEIEERSEVLFEKNEKNSGSSDKIERQLSLDKTMDAVLDSFDNLFCRRCLVFDCRLHGCSQNLVFPSEKQPYSFEPDENKKPCGRQCYLRWREGFQEIHDVGLSGCATYNMESGTVSHKVDVSIMSESEDSNREKGNIRSMTLVGTSGSKIISSVSAEESTTPPSADTSETENASSDMPPSSLRKYKISKRGPRYRERSPGKRQKVFTYDISFASNILNKLSIPEIRDTRLESREPGGDKLQILDESTKKTSSKDICGESPITTTENVGRESKKVSSTKNFLEHTLSCWSALERDLYLKGIEIFGKNSCLIARNLLSGMKTCMEVANYMYNNGAAMAKRPLLNKSISGDFAETEQDYMEQDMVARTRIYRRRGRNRKLKYTWKSAGHPTVRKRIGDGKQWYTQYNPCVCQQMCGKDCPCVENGTCCEKYCGCSKSCKNKFRGCHCAKSQCRSRQCPCFAASRECDPDVCRNCWVSCGDGSLGEPPARGDGYQCGNMKLLLKQQQRILLGRSDVAGWGAFIKNPVNKNDYLGEYTGELISHKEADKRGKIYDRANSSFLFDLNDQYVLDAYRKGDKLKFANHSSNPNCYAKVMLVAGDHRVGIYAKEHIEASEELFYDYRYGPDQAPAWARRPEGSKKDEASVSHHRAHKVAR

SEQ ID NO: 46351 - protein, 156 aa, Zea Mays
MQKAAVEVRCSYTGEFELLLCSVKIATPLRIMRPAYRLTGPHSPLPKGHISMDFSGNWYLQVLLSDILTKTAGRSVAVRWRLDAPPSPSPHEASWQLPVPPHCHGMGAWQHPLHLSSTAIWSCRVHVETAHRSRWVDLSVLLTRIACPTSRVLYYL

SEQ ID NO: 46352 - protein, 326 aa, Zea Mays
MTGKKAPVPPPPPPQAPKPPGVVPPPPPPSSKISNAPAPPPLLGRGRGNTTGPTKGRGIGLAQQSNPPKKASLKPLHWVKVTRAMQGSLWADAQKQGNQARSPDIDLSELESLFSTAVVTSTSEKGATRRGSAINKPEIVHLVDMRRANNCEIMLTKIKMPLPDMINAILALDTSVLDNDQVENLIKFCPTKEEIEMLKGYNGNKEMLGKCEQFFLELMKVPRVEAKLRVFAFRITFSTQVDELRTNLTTINDATKEVKESLKLRQIMKTILTLGNALNQGTARGSAVGFRLDSLLKLSDTRSRNNKMTLMHYLCKFHGKPTLLFA

SEQ ID NO: 46353 - protein, 230 aa, Zea Mays
MVVDSALGVGSGIHHYDTNKISSLSEYAEPLTSYLKGLGDAEKVILVAHDLGGACVSYAMEMFPSRVAKAVFLCAAMLANGNSALDMFQKQMDTNGTLQKAQEFVYSNGKDRPPTAINIDRASLRDLLFNQSPSKDVSLASVSMRPIPFAPVLEKLVLTAENYGSVRRFYVETTEDNTIPLPLQQSMCGANPPEKVLRLKGADHAPFFSKPQALHKTLVEIATMPHVRAS

SEQ ID NO: 46354 - protein, 319 aa, Zea Mays
MEKLHGSESLPCCKENIGTVRQPKPDPEHVDNRMSVARLGLDLNTVDSSDAAELNPFFPYKKLGQSKVSDPSECGSTTAATAESESHRKWREMKRNGFLSSSHGNAVVPRPRGRPPKRKKDDEFKRSTSTQHGQANKSVKVAAPSGLLSGLNPGIINHVRNSKQVYSIIKAMVHSERLENEKQPAFTSQTGGRGREASEGIQDEKYGAGFKKCHMLMKDNNAVFHQALPTTSQFLAQDGDRLKLQLSSAVTMSSDRACSTSADDPATNHDYMTVLSVKVVGITASGHQGTPCCFKAQQEESQKCSSYRIALPNLDRIFI

SEQ ID NO: 46355 - protein, 158 aa, Zea Mays
MEGPTPPSLSPRGCSKEGNSDPAIPAPALSRHLRAAAPRKEGPTPPSPSPRGCLPLSPSPRGCSKEGRSDPAIAIPARPVERHQPHKSGLAPPATIGSVEHLMPTTVSRRLHGSESSVPAHQGHHGLDDDGNKVKVVITTQGSRRSRRTLGTSASSTR

SEQ ID NO: 46356 - protein, 157 aa, Zea Mays
MEGPTPPSLSPRGCSKEGNSDPAIPAPALSRHLRAAAPRKEGPTPPSPSPRGCLPLSPSPRGCSKEGRSDPAIAIPARPVERHQPHKSGLAPPATIGSVEHLMPTTVSRRLHGSESSVPAHQGHHGLDDDGNKVKVVITTQEKIIFYDSEKLCEASI

SEQ ID NO: 46357 - protein, 164 aa, Zea Mays
MFNFDYKGSDYRAQFQIGNNAFYGANYIQSVTPNLSMGTEMFWLGHQRKSGIGFACRYNTDKMVGTLQVASTGIVALSYVQKISEKVSLASDFMYNHMSRDVTSSFGYDYLLRQCRLRGKIDSNGVVAAYLEERLNMGVNFLLSAEIDHCKKNYKFGFGMTVGE

SEQ ID NO: 46358 - protein, 869 aa, Zea Mays
MGSQPPASRAALEHLATLDPAALAGLPVSSPLTVRSAAVSAHLLYLGTGGGKLLLFSLQDPSTPEFLRLLPIGATLPVSAIVPLPSVARLLVLADGLLLLADPLLSRPVRRLGSLRSVTAVAARRVVLADPSSCSVAISVGKKLLRVDFTLHDADELDVQTREIASVEGVKALAWVDDSVFVATATGYSLYSSTNGQGVDIFSLPESAGHPRVKPLSGGDEVMLLVDNVGVVVDRFGQPVGSSLVFSTTPDYIAEVFPYVIVAGDSKVDVYRRRNAAHLQTIPVARTGQGVLIVAGDDDGIDTELVVIATTYKVFCYRKVSALEQIKASLRRKNYKEAISLLEEFESDGEISKDMISFVHAQLGFLLFFDLRFEDAVNHFLLSETMQPSEVFPFIMRDPNRWSDLVPRKRYWGLHPPPKPLEEFIDDGLVTVQQALFLKKAGVDTVVDEDFLSNPPSRADLLELAIRNIIRYLCASRMKNLPSPEMEGVDTLLMYLYRALHLVDDMYNLASSQNSCIVDELESLLDDSGHLRTLAFLYGSKGMCSKALSIWRVLARNYSAGLWKDLSENDSCGTLVTKRSGEEIAAVEAAKILKALSDEDLVLEHLGWVADIDQDLAIAVLTSETRENQLSPEKVVASVDAEKVVIHQRYLQWLIEGQGCDDPHYHTSYALSLAKSAIEAVDMESKYRGKDDSEIDSDAQFVYSVRESLQLFLQASDLYDPEDVLDVIAESELWLEKAILYRKMGQENIVLQILALKLEDSEAAEQYCAEIGRDDAYIQLLGLYLDPQNGKEPMFTAAVRLLHNHGESLDPIQVLEKLSPDMPLQLASDTILRTLRARVHHHRQGQVKLMRDAVLPVEFLCSYMILCMF

SEQ ID NO: 46359 - protein, 501 aa, Zea Mays
MAEYRLGLQLHGHTDDVRGICVCGDAGIATSSRDRTVKFWTRNPEKESEYVLSKTLAGHSSFVGPLAWIPPSDRFPEGGIVSGGMDTFVFLWDLQKGEVAETMKGHSSQVTGLAVDTNGDIISSSMDCTVRRWRNGNAIEVWEAHKVAVQTVLKLPTGELFTGSSDSTIKLWKGRTCLQTFSGHADTVRFLASMPGLGILSASHDSTVKLWALSGQPLLDMIGHSSLVYSVDAHSSGLIASGSEDRSLKIWKDGVCVQSIEHPGCIWDAKFLGNGDIVTACSDGTTRIWTADSNRFCSDEEIAAYTDLISQYTLSRKTVGGLKLMDLPGVEALQVPGNSDGQTLIVREGDNGVAYSWNSAELKWDKIGEVVDGPGEAAQGQVHDGVRYDFVFNVDIGDGEPIRKLPYNRSDDPYTVADKWLLKENLPLTYRQQVVEFILQNSGQNNFVPDPSFRDPYTGANAYVPGQPSSSSNGNTPEPIFKHIPKIWCWRLPHEWGLGKE

SEQ ID NO: 46360 - protein, 530 aa, Zea Mays
MAEYRLGLQLHGHTDDVRGICVCGDAGIATSSRDRTVKFWTRNPEKESEYVLSKTLAGHSSFVGPLAWIPPSDRFPEGGIVSGGMDTFVFLWDLQKGEVAETMKGHSSQVTGLAVDTNGDIISSSMDCTVRRWRNGNAIEVWEAHKVAVQTVLKLPTGELFTGSSDSTIKLWKGRTCLQTFSGHADTVRFLASMPGLGILSASHDSTVKLWALSGQPLLDMIGHSSLVYSVDAHSSGLIASGSEDRSLKIWKDGVCVQSIEHPGCIWDAKFLGNGDIVTACSDGTTRIWTADSNRFCSDEEIAAYTDLISQYTLSRKTVGGLKLMDLPGVEALQVPGNSDGQTLIVREGDNGVAYSWNSAELKWDKIGEVVDGPGEAAQGQVHDGVRYDFVFNVDIGDGEPIRKLPYNRSDDPYTVADKWLLKENLPLTYRQQVVEFILQNSGQNNFVPDPSFRDPYTGANAYVPGQPSSSSNGNTPEPIFKHIPKSGMLSFETAQFDGILKKVAEFNSKLSSDSSCTPTHVTCTEKYIV

SEQ ID NO: 46361 - protein, 249 aa, Zea Mays
MATACPPLSLPSTSLFRGRSARAGPRRRQLTAVRCSAVGEAVVEEASPRTAEEPLLVSAIRGRKVERPPVWLMRQAGRYMKSYQLLCERYPSFRERSENVDLVVEISLQPWKVFKPDGVILFSDILTPLPGMNIPFDIVKGKGPVIYDPLRTAAAVNEVREFVPEEWVPYVGQALNILRQEVKNEAAVLGFVGAPFTLASYCVEGGSSKNFTLIKKMAFSEPAVLKRSLFHMNTVLLSTITLKRICGCM

SEQ ID NO: 46362 - protein, 435 aa, Zea Mays
MAPASSSSAGVACLVLLLLLLLAGASAAHGSFQARRALSVQRSLHVCPDDPARFLVQTADPSAGCLILHGGSDLFHGSTIRTVEYVFGQGNLTVDHLRNFADSLAAAKDITINQIFLPADVQQKIDVVEEKLNSSAGVFSTRLQENSRKIKGVLNHMEHELFAVAAVMAGLSILGFLFSVLGLRFLVSLLVIAAWILLTNTIISSGLFLLLHNVVADTCVAMGDWVAHPQAHTALDDILPCVDVATANESLYRSQEVTSQLVALVNNVVVNISNRNFPPGLRPLYFNQSGPLMPVLCNPFNPDMSPRRCAPGEVDFGSAAREWKRFECQTTGPPGSELCATPGRVTPAAYGQMTAATSVSKGLYEFSPFLVQLQDCSFVRETFTSITNYNCPGLEQYSRDVYVGLVVISAGVMLSVVFWMVHTRHRRRRAMRKQL

SEQ ID NO: 46363 - protein, 1226 aa, Zea Mays
MAEDAHELFDSSPPREEGSDEQLAAVPLGDEAGVVEEEEASDPGMSTSMPATPATPYEPPPRPRRPPGVPADAPLEVVRAVEEAIAGGADLLREVVSQEQGELAHSVVDVLLGTMGGVDEAGDATGTGAPPTVMISSRAAVAAAELLPYLPEDDEPSPRTRTALGLHAALRACTRNRAMCSSAGLLAALLASAEKLFVEMDQGSRWDGTPLLQCIQMLGGHSLSVKDLHSWLDLVRKSLGTSWATPLMLALEKAMGSMEAKGPAVTFEFDGESSGLLGPGDSRWPFLNGYGFATWIYIESFSDTLSTATAAAAIAAAAAATSGKSSAMSAAAAASALAGEGTTHMPRLFSFLSSDNQGVEAYFHGQFLVVESVGGRGKKASLHFTYAFKPQCWYFVGLEHTNKHSLLGKDDSELSLYVDGSLYESRPFEFPRISKPLAFCCIGTNPPPTIAGLQRRRRQCPLFAEMGPVYIFKEPIGPDRMRRLASRGGDTLPSFGNGAGLPWKATNDQVKSMAEESFSLNNGIGGSLHLLYHPSLLTGRFCPDASPSGSSGTHRRPAEVLGLVHVSPRVRPSESLWALAYGGPMALLPLTIGNVHVDSLEPAPGDLPSSLATISLSAPVFRIISQAIQHPGNNEELCRTFAPELLSRVLHYVLQALPKLESGEEVLTDEELVAAIVSLCQSQRNNHELKVQLFSSLLLDLNLWSSCNYGLQKELLSSLADMVFTESACMRDAKAMQMLLDGCRRCYWVIQEPDSIDNFAFTGTKRSLGEVNALVDELLVVIELLLGAASSTAAADDVRCLIGFIVDCPQPNQVARVLHLIYRLNVQPNISRANLFSQSFITSGGVEALLVLLQREAKVGNKNILDHSSASENNVPKDGSSNRKADSADTSCQVDENQSAERHETVFHEEAIEHEATNAKDMLDSNIGSKVPGSENGLLKNLGGISFSITSDNVRNNVYNVDKGDGIVVGIIHILGALIGSGHLKFDSGAGSANIPGGSQTTLNEEGNTMSEDRVSLLLFALQKAFQAAPRRLMTANVYMALISAVINVSSADESLNLYDSGHRFEHIQLLLVLLRSLPYASRAFQARAIQDILFLACSHLDNRTTMTSISEWPEWILEVLISNHEMDTKKNADGVSIGEIEDLIHNFLIIMLEHSMRQKDGWKDVEATIHCAEWLSIVGGSSTGDQRIRREESLPIFKRRLLGDLLDFSARELQVQVIASHRPHQ

SEQ ID NO: 46364 - protein, 674 aa, Zea Mays
MGGPVKDANDMLTRWLEKSTELRTSLQTSLLPIGCIKIGLSHHRALLFKILAYSVGIPCKLVKGSNYTGGDDDDAINIIKMDNEREFLVDLMAAPGALIPADILSWKGNSLNSNRKLGLNRTAGSSSTVDANVDPTVLPLEPKGGQLPLFSSGDWMSDIDSGYEAAEIAASTQTSSGVTPYLCSAGSVFGSSWMLVNHDQSDGPSTSAGTSSQQKVVPQSEHQRNLNRLPDLQEIPESKNLFADLVPSGDNKSKKTSVPFKGPDHRNNELQKRRENIVPNAGRPHQRLVMKNWSPYNDVSNNKQYNYVEDSFARRNVGNNAAPSSSQMPRPAARSNLNSRLHNDASYHNYDSIMAGTSAMNITSTAETGKVPERVMRGDLDKGQTNYRLEDQHVIVQPPQGRLPWGIPAEGSVPMNRVQSQAKQHLENMDAKQDHKKLLPDPKKSPLDKFMDTSLPSRNMDMRSQRLDFDDVSECEIPWEDLVIGERIGLGSYGEIYCADWNGTEVAVKKFLDQDFYGDALDEFRSEVGGDQNMHQAGGMGRSLELLLIQFLMPDNDTRRQAEEQIRRLARDPQVVPALVHHLRTAKTPNVRQLAAVLLRKKITSHWPKLPPDSKASLKQALIDSITLDHRFFAKYLSPILLRMSALESARFQFTQIVHLAICLRNTLSVFSTY

SEQ ID NO: 46365 - protein, 59 aa, Zea Mays
MGAADGATNVCLQARQEGAEPEMGRCWCCCRYLKLLCLSWPSGEDRSTGQEVVGFRDCQ

SEQ ID NO: 46366 - protein, 442 aa, Zea Mays
MRLKRHRICVDDFDLLTIIGKGAYGQVQLCREKSTGNIYAMKKLKKTDMLVRGQVEHVRAERNLLAEVGSHCIVKLYYSFQDAEYLYLIMEYLPGGDMMTLLMREDTLTENVARFYIAETILAIESIHKHNYIHRDIKPDNLLLDKNGHMKLSDFGLCKPIDCSKLSTLNENEPMTDENLRESMDIDHSLSDTANGRRWRSPNEQLQHWQNNRRKLAFSTVGTPDYIAPEVLLKKGYGLECDWWSLGAIMYEMLVGYPPFYSDDPLVTCQKIVHWRSYLNFPDNPRLSLEAKDLICRLLCDVDHRIGSGGADQIKAHPWFRGVEWDKLYEMEAAFKPLVNDELDTQNFMKFPDLNPAPARASSGASRKMMLNSKDLSFVGYTYKNFEAVKGLHQFADLQRSSSFTRHSAGSPSDTADMDASMEANGTDTHMRTGSAGDPMAP

SEQ ID NO: 46367 - protein, 590 aa, Zea Mays
MFSWSRKQSSSGSSSGRRRGGADASMDSSSRGGGGSGSRGRSPRLDRRNAVKRIEYEASAGASASWSSSSSAEQQRSPGLRPSRSLDLAPGADLRISGSVEGEVDELCRSLGLSGPEDFAVPVAAWEARKSRSNSDLLPRSRLDPSTPADETSPIARAVSAPGAQPTRSFPAPIPEESLHSSPASTATESAEEPTVAAPEESPNAAPASAVVAPVGGLPLPSPRRGGGESFAPRDQGSELGLGGSVDSRCNSDKEEENDVEDGDAAVEGELKELRIGETFEGFTGTSSLSTTNDDDASSTTTEAMFIISPNGKFKRNIKSWMRGALLGSGSFGMVYEGISDEGAFFAVKEVSLLDQGSNAQQSIVALEQEIALLSQFEHENIVQYYGTDKEESKLYIFIELVTQGSLSSLYQKYKLRESQVSAYTRQILNGLVYLHERNVVHRDIKCANILVHANGSVKLADFGLAKEMSKINMLRSCKGSVYWMAPEVINPKKMYGPSADIWSLGCTVLEMLTRQIPFPNVEWTNAFFMIGRGEQPTIPNYLSKEAQDFIGQCVRVDPESRPSASQLLEHPFVNRPLRASFESSSPPAI

SEQ ID NO: 46368 - protein, 61 aa, Zea Mays
MVLLARLPRSVMFAGSRTREKLQFGCIRSSSQSESSSDFVSSKKANLFCVQLGTHDVGASC

SEQ ID NO: 46369 - protein, 772 aa, Zea Mays
MKLSETGKQSVLSSEVKSDEESLEFDVVKEENMLLKDEMNFLKGKLIEITETEESLFKLEKECALLNASLRELECTSTSAQSDVLKLGPLQQDAWWEKVENLEDLLDSTANQVEHASLTLDGYRDFQDKVDKLKASLGTTNVSEFCLYLVDILQQRVKSVEERFQACNHEMHSQIELYEHSIVEFHGTLSKLINESEKKSMEHYAEGMPSEFWSRISLLIDGWSLEKKISINDASMLREMAWKRDNRLREAYLSSRGMEERELIDSFLKMALPGTSSGLHIVHIAAEMAPVAKVGGLADVISGLGKALQKKGHLVEIILPKYDCMQHNQINNLKVLDVVVKSYFEGNMFANKIWTGTVEGLPVYFIEPQHPGKFFWRAQYYGEHDDFKRFSYFSRVALELLYQSGKKVDIIHCHDWQTAFVAPLYWDVYANLGFNSARICFTCHNFEYQGIAPAQDLAYCGLDVDHLDRPDRMRDNSHGRINVVKGAVVYSNIVTTVSPTYAQEVRSEGGRGLQDTLKVHSKKFVGILNGIDTDTWNPSTDRFLKVQYSANDLYGKSANKAALRKQLKLASTQASQPLVGCITRLVPQKGVHLIRHAIYKITELGGQFVLLGSSPVQHIQREFEGIADQFQNNNNVRLLLKYDDALAHMIFAASDMFIVPSMFEPCGLTQMVAMRYGSVPVVRRTGGLNDSVFDLDDETIPMEVRNGFTFLKADEQDFGNALERAFNYYHRKPEVWKQLVQKDMKIDFSWDTSVSQYEEIYQKTATRARAAA

SEQ ID NO: 46370 - protein, 617 aa, Zea Mays
MADAAEMVRLLYLQTPPRPLLPQFAVHTHRPQSLLRVSPRFRPPIRLRCRALDASRPVAVEGERDEEDGLEDEEESYFSVTSSGLSEVDYLGESTRGDLNVRRERLEALGNSKSTLHGPIEEIAWKEAGEAETLLHDLGIADPFSVRHSPRGIFCTRTLNLRSISAWEGRAYDYGMDNLKSMGFPVDDLKFDPDLVIRGLVIDKEKGNLVKADRFGYIKRAMHGTQMLSTRAVSEIYGRELVDLRKEIRWEFLNTLFSVSEAVMFMQMVDKLDQGLVPAELGPLDYKGLYNAVSKALFRAHVEGQLKREIMAEPDRFVEPDPELPLALLDQKEAGKKLLLITNSDFHYTNKMMNHAFNRFLPNDVGWRDLFEMVIVSARKPEFFQLSHPLYEVVTDDGLMRPCFKVNSGGLYSGGSAQMVEKSLDIHGDEILYVGDHIYTDVSQSKVHLRWRTALICRELEDEFNALVKSHDQKEKLVTLIQQKEIVGDLFNQLRLALQRRSNSRPAQTLAATCMDDQELTESMQKLLIVMQRLDEKIGPMLEADGELFNKRWGWLSRAGLWDKSHLTRQIEKYADIYTSRVSNFLHYTPFMYFQSQEQTLAHDAHSYSGGKDIKVH

SEQ ID NO: 46371 - protein, 151 aa, Zea Mays
MSANDGAGDTKMRAIVVVEEGEMSAPAATPKQGKCCEYTLDGSVDMKGRPAVKGKSGGWLAGALILVNQGLATLAFFGVNVNLVLFLTRVLGQSNGDAANNVSKWTGTVYMFSLIGAFLSDSYWGRYKTCAIFQAIFVLELPRLSSSIHLV

SEQ ID NO: 46372 - protein, 372 aa, Zea Mays
MTGSAASLGLRSGSYGSLAAAAVVGSGGRKAGATACRTLRVEKERLHRALRLVGRRRTGVLLLLAVASAALFCSLFAVVKDDANSTSIVNNYEVPNAIQKSVYPSRTRPLMMSGNQESTSVVNKIDFPNRLHLSFANFTHPCEGFSVPPPLVDKKRTGPRPCPVCYVSVDQAFALMPLQASPSPVLKDLNYVSEDGVTANLSNQGSGFGGHPSLDQRNDSFNINESMTVHCGFVRGKKPGQGTGFDIKDDDLLEMEQCHDLVVASAIFGNYDMIQHPRNISDFSKANACFYMFVDEETEAYVKNSSSLYNNNKVGLWRLVVVRNLPYEDPRRTGKIPKLLLHRLFPNVRFSVWIDAKLELVVDPYLLLERYS

SEQ ID NO: 46373 - protein, 125 aa, Zea Mays
MQIRCMGHDHQWAFAEHREASAPAARRRKGTPPVPKFPKTVPPRRTESQRLRDWKRPRVPAMERDVVLSAPEAAGSSSSPASSSYSSFAETRVICRVCQKQFAQYTCPRCNARYCSLSCYKACSR

SEQ ID NO: 46374 - protein, 982 aa, Zea Mays
MMDMRRHSVSVDAPLSRTLVQLKRVRSLRDPATNSMSKYASPSDHMIWETASSNGVTPELGRSAHHHLVGEDEDVGAEPTTMGSERSFRGPSARTASYRKSSAVRIRGLNPPRSKQVHRVRQDGHRKSLDSNHSNHSSIRQLADNMVSNVDADKEEGEVNSYERPKLAMPDKSDEEVKMPGCSKSRSKSSAAMSRVGSPCMSASEARSVGSRRSTLGHGTEDTRLRSNDVVGSNFSGCGISYCWSGASKYRELYSDSDGPDQPLLSTDGIEAAFQGNVPYTETLRCLSQKFRPRSFSELIGLNVVAQSLLYSTCKGKVAPMYLFHGPRGTGKTSTARIFAAALNCVSLEEQRPCGFCKECVILFSGKSRDVKELDAAKMDRLGRVKALLKSASLVPYSSRFKVFIVDECHLLREDAWSAILKSLDEPYRHTVYIMITSDIESLPRASITHCQKFHFPKIKVADIVYRLERICIEEGLEFDHDGLYFIAAKSNGSLRDSEIMLDQLSLLGKKVTISLVHELVGSVSDDELIELLDLALSSDTTNTVRRARELMGSAIDPLQLVSQLANLIMDILSGRCQSAVTEVSKSFLGRYALSEVGIKKLRHALKILSETEKQLRTSRNQATWVTVALLQFSTNEPNPVAETNDMHAHSVTGYTDDWVSKVHSSANFCQACNSSKSNCSERHCRRLKLENIWRRAIGKCRSRSAKSFLRKEGFLSSVHVTEELAIAEVGFEHPDHLSRAEKMQSLIESSLQHVLGCNVEIRFKLVPCPVSKDARLKRQPFSFLNCSGRKQELSDSVVTDEDEAARGPGARETPLKGYTSSQQESPYTMRRVDSKPTTVHGCEDDARSTLTSSRSTADDLTRTCRSETGYPKGVREQGRSDGTQQEPDLQPNCFSRTLKLQKKLLSSGAAHTICLRVQPHNKMDFLPKKEFDTYFCAYEPYEQCPRSDSRATYSSRDDDLWSKNSRFGSNLLCWRAPKQSM

SEQ ID NO: 46375 - protein, 206 aa, Zea Mays
MTPSKPPGKRRRSAPPPRLPSPAPPVALSPPGFVADRAEAAARVERLLRYQFCDRALLEEALTHQSFSDGALSYQRLEFVGDAALGLAFSNFLYLTNPTLGPGALSTLRAANISTEKLARVAVRHDLYPLLRRKCPRLDLLVGQFIESVKQELMHDLATAPYGGSVVKAPKVLADIVEAIAAAVYVDCKFDLEKLWKIRKRRWPCT

SEQ ID NO: 46376 - protein, 234 aa, Zea Mays
MAHRGHLDGLTGQAPALMRHGSFAAGSLSSRSPLQSSSTLEMLENKLAMQTTEVEKLITENQRLASSHVVLRQDIVDTEKEMQMIRTHLGEVQTETDLQIRDLLERIRLMEVDIHSGNVVNKELHQMHMEAKRLITERQMLTLEIEDVTKELQKLSASGDNKSLPELLSELDRLRKEHHNLRSQFEFEKNTNVKQVEQMRTMEMNLITMTKQAEKLRVDVANAERRAQERIYGT

SEQ ID NO: 46377 - protein, 315 aa, Zea Mays
MRTMEMNLITMTKQAEKLRVDVANAERRAQAAAAQAAAHAAGAQVTASQPGTAQATTVSAAAATDSYAGAYTSYPPAYQQGAQAGAYQQGAQAGVYQQGAQAGAYQQGAQAGAYQQGGQDGAYQQGAQAGAYQQGAQAGAYQQGAQAGAYQQGAQAGAYQQGAQAGAYQQGAQSGAYQQGAQAGAYQQGAQDGAYQQGAQDGAYQQGAQAGAYNYAYDAGTAYAYAGYSGYPVAGYAQSAVPNYSYAAPPQPTSSGAATNAAGGQYGAVGSAGYPTGQVQPSSGTANAAQAPPPPPPPAAPYPPSTYDQTRGAQR

SEQ ID NO: 46378 - protein, 650 aa, Zea Mays
MVGGLVLSQAQTHQAATPRTAAPAPAPAQALEKRPRDQAQPCGTVAAAAAVSVSAPSLDEVRKVHARHIKLGLDRCPRYARPLLAACAVSGWPGGMELAASIFESLVEPEAFDYNTLMRGHVSGGGGDRDPAAALRLYIDGLEAGVSPDSYTFPFVLKACAQLAALQEGRQLQAHIVKLGFQHDEHVQNSLISFYGKCGAPAMARLAFDRVEAEERTTVSWSALLAAYTKAGLWGECLASFGSMMLDGWRPDESSMVSALSACAHLGSFDAGRSVHCALLRNTARLNTIMLTSLLDMYAKCGSIEKAAAAFDAMDDKSAWAYSAMLSGLALHGDGRKALQVFDAMVREGHAPDAAAYVGVLNACSRAGLLEDGLRCFDRMRLEHKVAPNALHYGCMVDLMARAGRLDDARALIGTMPTGPTDTAWRSLLNACRIHGDLDLAWHALQELRRLGAANAGDYVIVADMHARAKNWTAAAALRTEAVDSGLAQSLGFSAVEVRGELHRFVSQDMAHPRTRDIYEMLHQMEWQLRFDGYKPDTSEVALDAGEEEKGRVVAAHSQKLAMAFGLLSTPEGAPVRVVTNLRMSKECHAYSALISEIFGRDIVIRDRNRLHRFRPQVEPPPSSPTRTKPRRNQGDAIDELSDAGAVAKA

SEQ ID NO: 46379 - protein, 849 aa, Zea Mays
MARIMTTRRSDSIADMMPEALRQSRYYMKSCFQRYVSRGSRLMKQQHLLEELHAGSSDSFLGHVISCTHEAVVLPPYVALAVRRNPGVWEYITVHSGDLTVQQITPSDYLRRKESLYDDHWAQDDNSLEVNLSLCLSTPRLTLPSSIGNGMHLLSRFLSSSLGGVNKIKPLLDYLLALRYQNTKLLISDTLLDTVGKLQAALLLAQAFVSEQHPDTPFQQMAHRFHEWGLEKGWGDTAGACGQTLGFLSEMLQAPDPVSVDRFFSRVPSVFDVVIFSVHGYFGQHKVLGMPDTGGQVVYILDQVRALEEELLQRIKGQGLTFKPNILVVTRLIPEAKGTTCNVELEPIDKTRHSSILRVPFKTQDGQDLPHWVSRFDIYPYLERYAQDSCTKILHILGRKPDLVIGNYTDGNLVAYLVSRKLGVTQGTIAHALEKTKYEDSDVKWREMDHRYHFSCQFTADMIAMNTSDFIIASTYQEIAGSKDKPGQYESHYAFTMPGLCRFATGISVFDPKFNIAAPGADQSVYFPFTLKHKRLMGLHPQIEELVYGKEENDEHIGYLQDRSKPVIFSMARLDKVKNITGLVEWYGQNKRLRDLANLVVVGGLLDPKHSKDREEIEEINEMHSLINKYQLKGQIRWIKAQTDRVRNGELYRCVADTRGAFVQPALYEAFGLTVIEAMNCGLPTFATNQGGPAEIIVNEVSGFHINPLDGKEASNKIANFFQKCNEDPMYWNRMSTAGLQRIYECYTWQIYATKVLNMGSMYGFWRTLDKQEKQDKQHYLNMFYNLHYRKLANTVPKVGEQPEQATAAALPDRSATRPKERGTQIRIQRTVSNLLGPVLPASHLSDAA

SEQ ID NO: 46380 - protein, 222 aa, Zea Mays
MPGRLLSVRIPSLAKLGAPRCAKSMASDTGKKLIQIDVSSDTVCPWCFVGKKNLEKAMEQSRDKFDFEVRWHPFFLNPDAPKEGVRKSDFYKAKFGPVQYERVISRMAEIFRGLGLEYDMSGLTGDTMDSHRLIALAGHQGYDKQNALVGELFLNYFCEGKYIGDKQVLLDAARKVGIEGAEELFQDPTKGVDEINDKYQLSGGQPPNVFMRAFEMAAKDGA

SEQ ID NO: 46381 - protein, 242 aa, Zea Mays
MPGRLLSVRIPSLAKLGAPSRCAKSMASDTGKKLIQIDVSSDTVCPWCFVGKKNLEKAMEQSRDKFDFEVRWHPFFLNPDAPKEGVRKSDFYKAKFGPVQYERVISRMAEIFRGLGLEYDMSGLTGDTMDSHRLIALAGHQGYDKQNALVGELFLNYFCEGKYIGDKQVLLDAARKVGIEGAEELFQDPTKGVDEVQEELKKYSSGISGVPHFVINDKYQLSGGQPPNVFMRAFEMAAKDGA

SEQ ID NO: 46382 - protein, 161 aa, Zea Mays
MEPKKSSVQRQPHAMEPNKSSPCGATATAPAATTEAESPLCSLFYPPAPAPTAANGKDSDLYSILYKGQSGSAQAGVTDGKPQWAPSRSRAANAKDGKHSPPYDSVDTSCFGSSVDYGGRDYFYGSSTPKKVTESSTDYKGNKKDPAADSHGDWWQGSFYY

SEQ ID NO: 46383 - protein, 633 aa, Zea Mays
MSSQTKNKDVCASKSIAKCTSQHRVGNTIMSSGKKVVSDDEFMVPSICYPRFYRQSTQDHADKSKPQSTTNPHKSPAMSKSSVECYSTVNKHLDKINEADRRLMNSPKVKEKEAVQGSKAVEVKEKSSSFQASEKFKDKYAKLCQMRNKASNINHCDNNGCQPASVNGNFTEAKNPTAARNTSSCKPCTDVDSSNRKSNLLERSPREVGAKRKRGHHNGEQNDDLSDSSVECIPGGEISPDEIVAAIGPKHFWKARRAIQNQQRVFAVQVFELHKLIKVQKLIAASPHLLIEGDPVLGNALTGKRNKLPKGNSKVQTLSITNKDDIQPTLEQPELSKQDTEGNLLAHSHDDGLGDNHHNQAATNETFTSNPPAMHVAPDNKQNNWCMNPPQNQWLVPVMSPSEGLVYKPFAGPCPPVGNLLTPFYANCAPSRLPSTPYGVPIPHQPQHMVPPGAPAMHMNYFPPFSMPVMNPGTPASAVEQGSHAAAPQPHGHMDQQSLISCNMSHPSGVWRFLASRDSEPQASSATSPFDRLQVQGDGSAPLSFFPTASAPNVQPPPSSGGRDRDQQNHVIRVVPRNAQTASVPKAQPQPSSGGRDQKNHVIRVVPHNAQTASESAAWIFRSIQMERNQNDS

SEQ ID NO: 46384 - protein, 384 aa, Zea Mays
MTRGGGGQGGKEEPGKVMGPLFPRLHVSDAGKGGGPRAPPRNKMALYEQFTVPSNRFSSPAASARAAGASLVPSTAAAQVYGYDRTLFQPFDVPSNEPPRSSEKFKGNTINGQSNSTRREPLRMSSQTKNKDVCASKSIAKCTSQHRVGNTIMSSGKKVVSDDEFMVPSICYPRFYRQSTQDHADKSKPQSTTNPHKSPAMSKSSVECYSTVNKHLDKINEADRRLMNSPKVKEKEAVQGSKAVEVKEKSSSFQASEKFKDKYAKLCQMRNKASNINHCDNNGCQPASVNGNFTEAKNPTAARNTSSCKPCTDVDSSNRKSNLLERSPREVGAKRKRGHHNGEQNDDLSDSSVECIPGGEISPDEIVAAIGPKHFWKARRAIQK

SEQ ID NO: 46385 - protein, 107 aa, Zea Mays
MGGCCCCCCSARASDSDRAPVRIYMWRSQALKSKLTGSSPQKWTNLSRAKKVPLRIRLMRRRMFVQYVLKNTTKKIHVRSPSASIISISVAYSNGWRGARHAQSVTR

SEQ ID NO: 46386 - protein, 271 aa, Zea Mays
MAGSSSGPAPGQAAKDKKMASAEQLVLELCDPELRENALLELSKKREIFQDLAPLLWHSFGTIAALLQEIISIYPSLSPPTLSPGASNRVCNALALLQCVASHPETRILFLNAHIPLYLYPFLNTTSKTRPFEYLRLTSLGVIGALVKVATFIVQKILLDDVGLRYICATAERFFAVGSVLANMVVSLADQPSTRLLKHIIRCYLRLSDNPRACAALQSCLPDMLKDGTFNNCLRDDPATRRWLQQLLHNVTGGGMGGAPQPGMDPMNMGM

SEQ ID NO: 46387 - protein, 291 aa, Zea Mays
MESKPHAPASGLATPRFRLGKQSSLAPERGGEGGGAGSADGSAEANGVMSFQLMYLAHEGSAEGIRELLDGGVDPNFRDSDGRTALHIAACEGHAEVVELLLQSGAEAAVEDQWGSTPLADAMHYQNHDVIKIFEKHGSKHKIAPMHVNNVREVPEYEIDPAELDFSNGNDLSKGTFRKATWRGIPVAVKKLDDDLIADGSKVQAFRDELDVLQLIRHPNVVQFLGAVTQSNPMMIVMEFMRKGDLRTHLSKKGALPPSYAVKLALDIARGMNYLHEHKPQAIIHRDLEPS

SEQ ID NO: 46388 - protein, 387 aa, Zea Mays
MDQSIARAKSCTVDCNNVDRKLRQILHMTEDEAHFHMKQSAYLYNLGVHTMPKSHHCLNMRLTVEYFKSMPLDPNDSSAHTFNIPDNRHYVILSKNVLAASVVINSTVSSSEDTENIVFHVLTDAQNFYAMKHWFARNSYRESAVNVINYEQIIFENFPEFGTQQLYLPEEFRVFISSLERPTEKSRMEYLSVFSHSHFFLAEIFKDLKKVIVLDDDLVVQHDLSFLWNLDMGDKVHGAVRFCGLKLGQLRNLLGRTMYDQQSCAWMSGVNVIDLEKWRDHNVTENYLQLLRKFGNNGDEASLRSSALPISLLLFQHLLYPLDERLTLSGLGYDYGIKEKLVQSSASLHYNGNMKPWLELGIPDYRKYWKRFLTRDERFMDECNVSP

SEQ ID NO: 46389 - protein, 613 aa, Zea Mays
MKATAPPAKRRRGPRLAVLALVFCSLLVPIAFLFNRFPAVYVTDERPQQEIDLPSFDRVAFESGGSVNEDVFKKTSGSSSVSHHVLPPPKIELVLPPPKVEPKPEVKPVPVSVPVHHNKKINVDKIRPPRVQSADEVEKAKACQLEFGSYCLWSIEHKEVMIDTIVKRLKDQLFVARSYYPSIAKLKGKETLTRELKQNIQEHERVLSESIVDADLPSFIKTKVERMDQSIARAKSCTVDCNNVDRKLRQILHMTEDEAHFHMKQSAYLYNLGVHTMPKSHHCLNMRLTVEYFKSMPLDPNDSSAHTFNIPDNRHYVILSKNVLAASVVINSTVSSSEDTENIVFHVLTDAQNFYAMKHWFARNSYRESAVNVINYEQIIFENFPEFGTQQLYLPEEFRVFISSLERPTEKSRMEYLSVFSHSHFFLAEIFKDLKKVIVLDDDLVVQHDLSFLWNLDMGDKVHGAVRFCGLKLGQLRNLLGRTMYDQQSCAWMSGVNVIDLEKWRDHNVTENYLQLLRKFGNNGDEASLRSSALPISLLLFQHLLYPLDERLTLSGLGYDYGIKEKLVQSSASLHYNGNMKPWLELGIPDYRKYWKRFLTRDERFMDECNVSP

SEQ ID NO: 46390 - protein, 259 aa, Zea Mays
MDLVVSEDGKHVKRLQPFNAEEVQSRIVVAENLPEDQKHQTLMKIFSAVGNVKSIRTCYPQDISPAAANRTSRIEMIFANKLHSFVEYSTVEDAEKAVAEFGGGGNWREGIRVRSLLGCLKHGLGQGRKGGDEEYAADEDGPDTTDHPRDFGTDVTAQISEAHFDHQAEDGTHDKGGMRQQGRGRGRGGRGRGRGQHYGHNSRDGHHPIGTPPSEHPAVPKPPPGPRMPDGTKGFTMGRGKPLSITIDAAANPTTTDAA

SEQ ID NO: 46391 - protein, 330 aa, Zea Mays
MHSTNEMILEKRNLSCEIQIPVACSAVDALKLLDHIIEAARVVYMDELELYFAGDDVGPFSARNELESLNLLLKTMKKLLLTSNTAAKEVLQILHDEIVVKLKSVGKSDNAWMVVQTQNHDAEDSLLKWGEHLGIKSRLQIAYFQGAGRGMIASESIGVGDIALEIPESLIISDELLCQSEVFLSLKDFNNITSETMLLLWSMRERYNLGSKFKPYFDTLPANFNTGLSFGIDALAALEGTLLFDEIIQARQHLRQQYDELFPLLCTNFPEIFRKDVCTWDDFLWACELWYSNSMMIVLSSGKLSTCLVPVAGLLNHSVCSSAPLEVFFY

SEQ ID NO: 46392 - protein, 364 aa, Zea Mays
MIASESIGVGDIALEIPESLIISDELLCQSEVFLSLKDFNNITSETMLLLWSMRERYNLGSKFKPYFDTLPANFNTGLSFGIDALAALEGTLLFDEIIQARQHLRQQYDELFPLLCTNFPEIFRKDVCTWDDFLWACELWYSNSMMIVLSSGKLSTCLVPVAGLLNHSVSPHILNYGRVDEATKSLKFPLSRPCDAGEQCFLSYGKHPGSHLLTFYGFLPRGDNPYDVIPLDLDTSADDEDITAQSSATTSQTTHMVRGTWLSTSGGFPTYGLPQPLLTYLRAALGCEVDEPAAEADMKESDKVVLETILSIFSPMLEALLPEQDDPNRESASWDVKLASDYKDLQRKIVSSIVTSCTSALENL

SEQ ID NO: 46393 - protein, 106 aa, Zea Mays
MRAACRLQRRGGVRGGAAGGVRTEGRPWVREEDLAKALKLHSKQLRRILRFFEEEKLVTRDHRKESAKNAKAHNAAAANDGQPIAKEGEEKVKLHTHSYCCLDYAQ

SEQ ID NO: 46394 - protein, 217 aa, Zea Mays
MRAACRLQRRGGVRGGAAGGVRTEGRPWVREEDLAKALKLHSKQLRRILRFFEEEKLVTRDHRKESAKNAKAHNAAAANDGQPIAKEGEEKVKLHTHSYCCLDYAQICDVVRYRIHRMKKKLKDELDSRNTIQHYICPSCNKRYSAFDALQLVSYTDEYFHCETCNGELVAESDKLASEEMGDGDDNVRKRRREKLKDMQQRIEIIHSLFAQSQEKN

SEQ ID NO: 46395 - protein, 296 aa, Zea Mays
MRAACRLQRRGGVRGGAAGGVRTEGRPWVREEDLAKALKLHSKQLRRILRFFEEEKLVTRDHRKESAKNAKAHNAAAANDGQPIAKEGEEKVKLHTHSYCCLDYAQICDVVRYRIHRMKKKLKDELDSRNTIQHYICPSCNKRYSAFDALQLVSYTDEYFHCETCNGELVAESDKLASEEMGDGDDNVRKRRREKLKDMQQRIEEQLKPLVAQLDRVKNIPAPEFGSLQTWERANIGAFAIGDPAAADSSRNSQGQYGTPMPYIGETKVEVDLLSDGVKEGAESGTKRRDNCATKT

SEQ ID NO: 46396 - protein, 141 aa, Zea Mays
MESPPLTAEAIAYTEKKMDMALEDIIKMSKKKNPGGKKPPRQPIKKHPFQNGNSNKGNGKVQSFMESRSTIRQGVLAQRRSNLGGNQFPATKQAAKKAAVMPMHKGAIRWNKPSASTLVQRRPVGGAFQNAKVWSMDFVKS

SEQ ID NO: 46397 - protein, 114 aa, Zea Mays
MESPPLTAEAIAYTEKKMDMALEDIIKMSKKKNPGGKKPPRQPIKKHPFQNGNSNKGNGKVQSFMESRSTIRQGVLAQRRSNLGGNQFPATKQAAKKAAVMPMHKGAIRWNKPR

SEQ ID NO: 46398 - protein, 439 aa, Zea Mays
MVKLNKRTIVLEDKDQIQGFPKYTFSLTPLDKLDQYKNKTDRFIDVIAKISGVSNVAKVPTTSGDQQMRRVVLLEDLKGNMIELSLSGKRALEFDGDQVLDVGQQHHVIAIFVGTLVKLYKGEYTFLSGTSACRWYINENDIAEIKAFQKSLPSEPVPIKKTYLQNDDATHKFEEKSLEQLKHVDPFLDMGQRYQCTATIIGITENQTWCYKACKICNSAIIQKENGYKCTKEGCPSTQFEWKYKIPFIASDHTYNLEFMFFEKKGMELIGKSASTLRKQYEPKEIPPDITSWIGYKFTFVVRVLSKKSVKTIDPSFEVLMIKEKYQKEPIISFISSSGVVPAESSSSTMAEYKELPLLVPITSKDIEKKERSTSQPEHTEETQDMDIEPSGIWEESQISNKRSFGDPNYDKQETTDDKDDLPQFKKIRSTHSQGKSKK

SEQ ID NO: 46399 - protein, 205 aa, Zea Mays
MGQRYQCTATIIGITENQTWCYKACKICNSAIIQKENGYKCTKEGCPSTQFEWKYKIPFIASDHTYNLEFMFFEKKGMELIGKSASTLRKQYEPKEIPPDITSWIGYKFTFVVRVLSKKSVKTIDPSFEVLMIKEKYQKEPIISFISSSGVVPAESSSSTMAEYKELPLLVPITSKDIEKKERSTSQPEHTEETQDMDIEPSGYD

SEQ ID NO: 46400 - protein, 698 aa, Zea Mays
MAGNLSQHSVGRVFLVGWKGNIVLLCSDNFIPSFEHSGVSSFNEFIHELSVDSDADSIADSVAGDDDHEEFVCPPSPLSQSSRLSHASSFGRHDRRLRRHIRYAVSWILWPLRFFVSLIFILFNAIKFRMVRSTAKGAETPHLSRTGLAKKSFHIRDQFLQRTTDRRRGVFEDLHLAIEIFIESVFDIVHKAAHYILSPSEVWQNLFCWIQGSGHDTSSVVDVLTANVGSDNPVPTERKTVYRHSLNTDSRTCEDVITELGYPFEAIKVVTSDGYVVLLERIPRRDSQKVVLLQHGILDSSMGWVSNGVVGSPAFAAYDQGYDVFLGNLRGLVSREHIDKSISSYKYWKYSVNEHGTKDMPAIIEEIHKIKISELGKSQPQSAEGTGDQNDKLKSLEVQASQEDSIEDQPYKLCAVCHSLGGAVMLMYVVTSRITQKPHRLSRLVLLSPAGFHEDSNVVFSMVEKLILFVGPVLAPLIPGLYIPTRFFRMLLNKLARDFHNYPALGGLVQTLMGYVVGGDSSNWVGVLGLPHYNMDDMPGVSFHVALHLAQIKRAKKFQMYDYGSSAANIEAYGTPEPLDLGAHYGLIDIPVDLVAGQRDRVISPSMVKKHYKLMRKSGVEVSYNEFEYAHLDFTFSHREELLSYVMSRLLLVTDPGKGRIKQTTVRLRRQKKVQSEIEESIECRAKEESDELAGHLE

SEQ ID NO: 46401 - protein, 165 aa, Zea Mays
MAEEALAMISQSFRQVVLDVKVGPPSFEKGLAEDILSLLRRTNCKNCLVWAKSDDIGREIIKLSKDVIVGYVVMVDKFTNRRTELVRIEGAKVAGIYHPLIHEKVMKVMRRHDRRVFAWTVDDSSSMKKMLYEHVDAIVTSNPSLLQQLMQETRAECMEDGFALP

SEQ ID NO: 46402 - protein, 766 aa, Zea Mays
MAAGGRVSIPAGARRTIADIKEIAGGHTDEEVYAMLRECNMDPNETVQRLLLEDTFHEVKRKRDKKKEVSKEPSDSRWRPAVQGQGGKNCRNCASRSLSSSNDSAGRSAISGKENGISLIMGKGSGSTPITNMNMDVKASTFMPSNSLLSGLCNGPYQSVDPAAVLVSSSSAVGDKSGSTALADLTGGLPFKDVVATIDPNSLQPLKPAPPSDPVVVSFLNSHSLGDVGASRQTIGIKKTSVEHKVGRDVSTDKGSSEQSVQSSFRRSSASRPSSSYNSHSEQSQKAPVPNSAGTEDSLKVDICLNDLQLSDKQHVIIPDHLQVSESEKYVLSFGSFDVSFQQTKGSSDPDYVKSSLPKFSSSHELDGNIDELQSMQRDQNSTSVVQEEAGHVPQPSAKLEKCAPSAMEISSIALMESKDCDDDSATSGDPQSTGTHSAPSYVTYGFAPQSHVNQIEKSESHSQSYHPTTDADERLSPSLATQAAHKYGNIPVVPTQTGQDQEGNDSPVIISSVSASVATPAAGVLSASVAIPQQSVPVFRQPLGVHIPHLPMNYVPYNQYISPFFIPPPTLHPFMGNATFSQPPSTGVMYPTPGTARVLPPVKFPVPSFKPGANIGSQASIGVPGCYGTYGSSPSVYTNNAPVSSGNLAENDNVTSSQFKENNIYFAGLQTDGLTLWVPTPGRDISALQVNSFYGLPPPGHQVTYAPQAGHGPYGGIYHPAHSVAGATVTPLLQPSHTMAGAVEIVGAPGGVYQHPQAHMNWGSY

SEQ ID NO: 46403 - protein, 461 aa, Zea Mays
MGLSSAATGDGVQLCVFDLQRGQQEGQELDKILYFYPADCPILLQLSVIGLCEGIVTFTRIFSPEEDCEVIESEKHSHVFYQAETDIWMVLVVEKNKENELTWRCGALQGILKEAHSLFAMFHGPIRTLLHKQPSAELARGHLRTFLTDYLSDFNVGKKLQFPTYRDSLKERGTVQMLTVSREVALDVQSLATVLGSCLGNVTCQSLVLFEDLLVSTTLPPDDTLNLYTYAVLRLTPRALYSNASSWSYLRKGTSVSAGQTSSSSNGTTAGERYRSRSRDTSPGGQNQMNRNFRPLLREKLSKGKDGFVAADFTATEARCAVPSTPILWFQQADECMHLCIYQHKSLTILLLVPASSVINGEEGITHVKKAMLENDSLLALNMLRQEVDLEKSRYKRGDPCHDKDFEVCIRTKNNAWVIAKISQGRELYMALEKGGETLLYASTAVEKFSNRYCEGAFSTD

SEQ ID NO: 46404 - protein, 294 aa, Zea Mays
MSPFYLARGASKLVRRITSETSVELKILSDKWRLLLAGLIFQYIHGLAAHGVHYLHRPGPTLQDLGFMILPELGKERGYISETLFTFVFLTFVLWTFHPFILQTKRFYTVLIWRRVLAFLCASQFLRIITFYATQLPGPNYHCREGSPLARLPPPQNAAEVFLINFPTGVIYGCGDLIFSSHMIFTLVFVITYQKYGSIRFCKMLAWCIAVAQSLLIICSRKHYSVDVVVAWYTVNLVVFFVDKKLTELPDRSVGSTSVLPVSARDKDTKLKEENTRLLNGNSMDSADRGHGHK

SEQ ID NO: 46405 - protein, 443 aa, Zea Mays
MSAADPSAAPAAAADPDGPDSVRLTWNTWPRSKVEASRCVVPLAATISPTRVPDPSAASPPPLPYPPLRCKPPCSALLNPFARVDFAAKIWICPLCFSRNHFPPHYAAISESNVPAELFPQCSTVDYIVGGAGIPGVGGAPPPPPPVFLFVIDTCVIEEELEYVKMAMRKAVALLPEHALVGLVTFGTQVHLHELGFSDLSKIYVFRGTKEISKDQILDQLGLAGAGRPGFPKMPQQPGGPQVNGMHPPSTAGVNRFLLPVSDCEIALSTLLDELQPDQWPVEAGNRAIRCTGVALSVAAGLLGACMPGTGARIIALLGGPCTEGPGMIVSKDLSEPVRSHKDLDKDAAPHFQKAVKFYDGLAKQLVSQGHVLDVFASALDQVGLAEMKVAIERTGGLVVLSESFGHSVFKDSFKRIFEGGEQSLGLSFNTGQCVMFWVYYNH

SEQ ID NO: 46406 - protein, 182 aa, Zea Mays
MLKGVTPELSCPIVLFTYYNPILKRGVGNFMSTIKQAGIHGLVVPDLPLEETALLRSEAIMHNIELVLLTTPTTPTDRMKGIAQASEGFLYLVSAVGVTGARSNVNLRVEHLLREIKKVTDKPVAVGFGVSTPEHVKQIVGWGADGVIVGSAIVKQLCEAATPEEGLERLEEYARSMKAAMP

SEQ ID NO: 46407 - protein, 357 aa, Zea Mays
MASATVLKSSFLPKKSEWGATRQAAAPRPPTVSMVVRASAYADELVKTAKTIASPGRGILAMDESNATCGKRLASIGLENTEANRQAYRTLLVTAPGLGQYISGAILFEETLYQSAVDGRKIVDILAEQGIVPGIKVDKGLVPLAGSNNESWCQGLDGLASREAAYYQQGARFAKWRTVVSIPNGPSELAVKEAAWGLARYAAISQDNGLVPIVEPEILLDGEHGIERTFEVAQKVWAETFYAMAENNVMFEGILLKPSMVTPGAEAKDRATPEQATQNLNAMNQGPNPWHVSFSYARALQNTCLKTWGGQPDKVKAAQDALLLRAKANSLAQLGKYTSDGEAAEAKEGMFVKNYSY

SEQ ID NO: 46408 - protein, 185 aa, Zea Mays
MRKYIQNLLKVNMEEPYGPEWLLEEKVKRREMVVPEARYIFVKQYSNGFITESSMKETEVEHMCAVCPESCLLGFVHYRFVVEEELPVLYVYELQMEPSAQGKGLGKFMMQLIEQIACKNQMGAVMLTVQKANTQAMAFYTKLRYVISSTSPSRVDPQIGLEKSYEILCKTFDSEAKSKLEDGDY

SEQ ID NO: 46409 - protein, 247 aa, Zea Mays
MVRDGEMGRSCPFDLGESIRPVSDDGEAVMATAENKRPRLSSGAEKKPMYLESGSGHQLRKPMRKYIQNLLKVNMEEPYGPEWLLEEKVKRREMVVPEARYIFVKQYSNGFITESSMKETEVEHMCAVCPESCLLGFVHYRFVVEEELPVLYVYELQMEPSAQGKGLGKFMMQLIEQIACKNQMGAVMLTVQKANTQAMAFYTKLRYVISSTSPSRVDPQIGLEKSYEILCKTFDSEAKSKLEDGDY

SEQ ID NO: 46410 - protein, 60 aa, Zea Mays
MPPVRRLDLPNSSVPLLPVVDLGGRRELRVVHRRRPRLSAPSALPVTGFLLLYRCGAGRQ

SEQ ID NO: 46411 - protein, 154 aa, Zea Mays
MAERWKSVSSVPKAENARPTGRWPAAKPKASDLLAHSLDCSLDRKDSILAAIHLLRRSMAFDSTTSLSSSDPAAPDLYASSDTDIVSSGSNSVASDPPRQGISVPARFWQKTNSRMLHASSRIAIRSDFGSRSRCITLDAPGSSSLLFTWHSGT

SEQ ID NO: 46412 - protein, 150 aa, Zea Mays
MIMSYDYRFFSSYLHYGLLAARAEVLKSGNGNGYNNCMLEGYQGQYKYGSETFEASASPSGASYSKCKNDVVKSLKVDEACTHLKCSFGGIWNGGGGAGQKKLFVASFFFDMADEENGSHATKRGTYDENLVNGQIAQQLTGTHLVAIFL

SEQ ID NO: 46413 - protein, 136 aa, Zea Mays
MASSGAAACPPCPTRPSARSTTSRPRSAPPPPRSVPRSAAPQPPPSRPPSHSPPPPPLASAPPMTTLPWRSRGPSTAGSPGRRCTWLNRCRCPRGRGRLRRAASVQCGWWQDHGVLVGRGPLWFPGGSAEGIRSCH

SEQ ID NO: 46414 - protein, 183 aa, Zea Mays
MADHLFQIRQIKSLYLYHAFPSWFQFVTSTFCHANWNHLSSNLFFVYIFGKLVEEEEGNFALWMSYILTGAGANLISWLALPTSSVSLGASGAVFGLFTISVLVKMSWDWRKILEVLILGQFVVDKVLEAARATTITGQSFQVNNVAHVSGALIGAALVFLVSRIPFSSNDDNPKATKRVNRK

SEQ ID NO: 46415 - protein, 100 aa, Zea Mays
MIPGSKSSSGRGAKQTLSKPRRTLRPARFPIQIRPRHLLLFSATPMVYVDSWDEFVERSVQLFRGDPNATRYVMKYRHCEGKLVLKVTDDREGQASYVEG

SEQ ID NO: 46416 - protein, 175 aa, Zea Mays
MWCWNCSGLAMAGPAVLNERILSSMSQKHVAAHPWHDLEIGPGAPEFFNCVVEIPRGSKVKYELDKASGLIKEQVVPGCFLRARAIGLMPMIDQGEKDDKIIAVCADDPEFRHYTDITDLPPHRLQEIRRFFEDYKKNENKEVAVNEFLPAKDAINAIKYSMDLYGSYVIESLRK

SEQ ID NO: 46417 - protein, 211 aa, Zea Mays
MWCWNCSGLAMAGPAVLNERILSSMSQKHVAAHPWHDLEIGPGAPEFFNCVVEIPRGSKVKYELDKASGLIKVDRVLYSSVVYPHNYGFIPRTLCEDNDPLDVLILMQEQVVPGCFLRARAIGLMPMIDQGEKDDKIIAVCADDPEFRHYTDITDLPPHRLQEIRRFFEDYKKNENKEVAVNEFLPAKDAINAIKYSMDLYGSYVIESLRK

SEQ ID NO: 46418 - protein, 371 aa, Zea Mays
MAAVTFSPPLLLAILLILTTASTTQCHGHKSQRHHTGGTRVAQKTAAAGASPPADTVHHAICHTTPHPVSCLLAVASHLGAVAGAKAAEASAVSVQLLPPNVLSVALASLNGAESALSSLSPALSALSAPAASPAGASLRRGAAQDCQDLHAATLWSLSRSASLLAAPGESLPAVRAHLAAALANKATCLDGLAGASGPRVGGLLASLDDAYEHVSNSLALVARRGGGVSAAGFVDVVAKTIHNRRLLQDDDDDDGNGGDDDNDNGGDDNDGGADNGGNTGQPAAATVITVAKDGTGNFRTVGEAVAAAPNNSEARTVIRVKAGTYEENVEVLPYKKNIALVGEGRDTTVITGSRSAADGWTTFRSATFVF

SEQ ID NO: 46419 - protein, 243 aa, Zea Mays
MVVCKCRKATRVYCFVHQVPVCGVCICFPEHQLCVVKNYAEWVVNSEYDWPQHCSSCNSVLEGGTEETTRLGCLHVVHTKCLISHIQSFPTQTAPDGYVCPSCSAPIWPPSSIKDTGSRLHTELKEAIVQTGMEKNVFGNHYVTIAKADTQTPPAFASDPLKTLSNRDDREFNSANAAKDAALPSTLHSGMYSSAVGSETTIHVDPEIVEIEGSSPVSTQFSVQDSNFIRSPSPHGVHFVTNF

SEQ ID NO: 46420 - protein, 209 aa, Zea Mays
MAVATRGVEREIGSLQMEEKKLVAEIKKTAKTGNEAATKILARQLVRLRQQILNLQGTRAQIRGVATHTQAMYAGTSISAGMKGASKAMSAMNKQMEPAKQIKVMKEFQKQSTQLDMTLEMMSDAIDETLDKDEAEEETEELTNQVLDEIGVDVASQLSSAPKGRIGATNKKVDNGQARPARNVAAPALEPSSAEVEDLERRLASLRRT

SEQ ID NO: 46421 - protein, 426 aa, Zea Mays
MPFRSIVRDVRDGFGSLSRRGFEVRFLSHRRGKSHGAVHELHDPVLVVQSSCWASLPPELLRDVIERLETSEDTWPSRKHVVACAAVCRTWREMCREIVKSPEFSGKITFPVSLKQPGPRDGTIQCFIKRDTSTQIYSLYLSFSSEYIISINSGDTSRCTSNNTYIGKLRSNFLGTKFVIYDTHPPYNGTSQTVAGKTSQRFYSKKGSTKVSCRWYSIAQISYELNVLGTRGPRRMNCVMHSIPASCLEAGGSVPCQPDSIAAHSVGGSFSSVSLSKSSTMDHSMHFTSSRLSDAITGDGIVNRGQALNDADDEECKDMPLILRNKAPRWHEQLQCWCLNFRGRVTVASVKNFQLVAATQPAAGALTPSQAAPQPAPPPPPDQEKVILQFGKVGKDIFTMDYCYPLSAFQAFAICLSSFDTKLACE

SEQ ID NO: 46422 - protein, 367 aa, Zea Mays
MAATGYPNAAAWTRPAGTPDNPDQNSRVEAALETPGPDPSHHHPHPHLASRIRTRWAASAATRSRRARGGGRGSCACTGSAPAARSCASRCSGSGPPTSRRASTSSSPTRRSPPRASPTSRASSTLPTTSGSSSTRSAAAYAHAHPPAHYPPPSPPRSRRPADFVKLIVVSLVFFCGARVAGSCDALTNLTFISTYYYQIPYVLYNAKQSFMEYRNFDKCLAYIEELMIKDGPFDGLMGFSQGSILSAALPGLQEQGLALTRVPKVKYLIIIGGAKFQSPTVAGKAYANKIACPSLHFIGENDFLKVHGEKLIESCVDPFVIRHPKGHTVPRLDDESLVVMHRFLEKIEGEVLEYSSKDVNETEVGM

SEQ ID NO: 46423 - protein, 415 aa, Zea Mays
MPTITHYVLDPFLETGSPAQAEKATPKPPPSPPDKATPVPVAPIRAQTSPASLYATPESTTLPDSPSSFPGTWSPYIINHKRRGASLAKTVPQGDVGSEGSQPKLPVILPALPKGGEPTAVEEPEFAFQQSGNDQAEGDSGVDEAPINGKNEMLLKGKGPVTAKNEHEQPEFEFHRGNLEALVRPVNVGRPLIGGAPKNDESDTFLELQDSMSVASNTETDDAGTQEWWWKPSSPLGISVGTPCAEFYDAFEEISSDGGTRSSRAMDDDLREMRLSLLTEIERRKQAEETLEIWQKEWKKLSHHLSHVALSLPSPSIAEDTDDSSVDPGAELCQQITVSQLVAAAISQDFARAEVASEMEAVIATKNFEIARLSDRVQYYEAANREMSQRNQEAIGRAPASRPPLLQPSCTARPA

SEQ ID NO: 46424 - protein, 61 aa, Zea Mays
MSKQKPAEYSYIKRRTGHIVDLPQHVVQAPHLTGHRAGRQETGRIFRPEKRAKCQPFPPGS

SEQ ID NO: 46425 - protein, 466 aa, Zea Mays
MDLADRYLNSECVMQMLQADQVGLAEKTAVLFTKDGDQHNNLHDMQCMWYELASGESYYRQGDLGRALKNFLAVEKHYADMTEDQFDFHSYCLRKMTLRAYVSMLKFQDRLHAHEYFHKAAAGAIRCYMKLHDSPTKSSKEENDEISKLPPAQRKKLRQKQKKAEARAKREAEEKQEDETASSNSSKSGKKQHARPVDLDPHGEKLIQIEDPLAEATKYLKLLQNNSSDSLETHILSFELSMRKQKVLLAFQAVKQLIKLDEDNPDSHRCLIKFFHKINSLPGPVTDSEKLIWNVLEAERPDMRQLHGKSLVEVNRSFLEKHNASLMHRAAGAEMMYLLEPNKKMEAINLIEDSTNITSSGHSLLGPVKTWQIQDCIDVHKLLETVFGDQNVANRWKARCAEYFPYSTYFEGIKSAISTYAIDHSLESPPENGIASNPHLKSKDGEQGSLNGTLHIVDDLSSLSIR

SEQ ID NO: 46426 - protein, 711 aa, Zea Mays
MGSSLPPKEANLFKVIVKSYETKQYKKGLKAADSILKKFPEHGETLSMKGLTLNCMDRKSEAYELVRRGLKNDLKSHVCWHVYGLLYRSDREYREAIKCYRNALRIDPDNIEILRDLSLLQAQMRDLSGFVETRQQLLSLKPNHRMNWIGFAVAHHLNSNSSKAVEVLEAYEGTLEDDYPPENERYEHNEMLLYKISLFEECGMLDRALEEMQKKESKIVDKLSFKEQMASVLFKLGRFDESESIYRSLLFMNPDNYKYFIAVQKCLGLYSDNGQYSAADVERLSALYNSLKEKYAWSSAVKRIPLDFLEGEKFQEAADNYVRPLLTKGVPSLFSDLSPLYEHPGKANILEQLFLKLEDSIRDSGCFPGCPQKEPPSTLLWTLFLISQHYDRRGQYDIALNKIDEAISHTPTVIDLYSVKGKILQHAGNFTAAAALADEARSMDLADRYLNSECVMQMLQADQVGLAEKTAVLFTKDGDQHNNLHDMQCMWYELASGESYYRQGDLGRALKNFLAVEKHYADMTEDQFDFHSYCLRKMTLRAYVSMLKFQDRLHAHEYFHKAAAGAIRCYMKLHDSPTKSSKEENDEISKLPPAQRKKLRQKQKKAEARAKREAEEKQEDETASSNSSKSGKKQHARPVDLDPHGEKLIQIEDPLAEATKYLKLLQNNSSDSLETHILSFELSMRKQKVLLAFQLNSSLNWMKIIQTVTVV

SEQ ID NO: 46427 - protein, 472 aa, Zea Mays
MDPAGLILVSAGGGQEGSRRENSTGSEQHMKNKKREREDRVMEGLGHLLLFAFLFWFSTFMVAPVMTDVTMAALCPGRDECSLAIYLTGLQQAVSGLGALVLTPVVGNLSDRYGRKALLALPATASIVPLGILAYGRTKGYFYAYYVTKTLTAMVCEGTMMTLSLAYVADRVPETRRAAAFGVFSGVCSAGFVGGTVAARFLPVSSTFQVSAVAAVATAVYMKAFLQETDGGASVSSSSSSSSGSGSDEEAACRRPLCLPSSSSSEEAASLPRLPPLRKAPSLSEIAAALTSSSTFCCAAVVTFFHGLGETGLLSALLYFLKAKFHYSKNQYANLLLIIGITGSFSQLTVMPLLVRKLGEQKLLVISLVASCGQAFLYSISWSSWVPYLAASSVILSMLVTPCIRSIVSKKVGPFEQGMVQGCMTGISSTASVVSPLIFTPLTAWCLSEATPFYLKGFSVACAGFATRWRRA

SEQ ID NO: 46428 - protein, 104 aa, Zea Mays
MCDPEKENLCLYGLPNGGWEVSLPVEEVPPEMPEPALGINFARDGMRRRDWLSLVAVHSDAWLVSVAFFFAAKLNGNDREGRIILVLITAANPGTQRSDQMMER

SEQ ID NO: 46429 - protein, 246 aa, Zea Mays
MGLLEGLRSHRKEDGSILLFRPHENARRMEIGADRLCMPAPSVEQFLEAVKLTVLANKHWVPPFGKGSLYIRPQLIGSGAMLGVAPAPQYTFIVFVCPVGHYFKGGLAPISLLTEEEYHRAAPGGTGDIKTIGNYASVVSAQRRSKEKGHSDVLYLDPLHNKFVEEVSSCNIFMVKDNIISTPLLTGTILPGITRRSVIEISQNLGFQVEERLITIDELLGADEVFCTGTAVVLSPVGSITYRGRR

SEQ ID NO: 46430 - protein, 164 aa, Zea Mays
MGLLEGLRSHRKEDGSILLFRPHENARRMEIGADRLCMPAPSVEQFLEAVKLTVLANKHWVPPFGKGSLYIRPQLIGSGAMLGVAPAPQYTFIVFVCPVGHYFKGGLAPISLLTEEEYHRAAPGGTGDIKTIGNYASVMRKCEFSKLSVLREDPRKKAILMFYT

SEQ ID NO: 46431 - protein, 224 aa, Zea Mays
MMIFVIRNEALLLLTYLTRDAEEIQKIVVFEGVFEKIFSIIREEGYSDGGVVVQHLTPSLNSTSFDDWWEEMLLKETMGFDPLISILKIRRGSAFNFTQQKTVNLLAALNTVELLLMVGPSGEAGKDANKNANQTALAQKNILDHLLLLGVESQWAPVALRCMALRCIGNLVLRNPQNLDSLARKQVGEEPHVQPALNAILSIILRTSIAQEFVAADYVFKCFC

SEQ ID NO: 46432 - protein, 737 aa, Zea Mays
MDMLMDREVIRNEALLLLTYLTRDAEEIQKIVVFEGVFEKIFSIIREEGYSDGGVVVQHLTPSLNSTSFDDWWEEMLLKETMGFDPLISILKIRRGSAFNFTQQKTVNLLAALNTVELLLMVGPSGEAGKDANKNANQTALAQKNILDHLLLLGVESQWAPVALRCMALRCIGNLVLRNPQNLDSLARKQVGEEPHVQPALNAILSIILRTSIAQEFVAADYVFKCFCERNPNGQALLASTIAPHPNQGDIHEPASDMPFGSVLLQALVSSDVNGDMEACCRASSVLSHIIKDNLQSKDRVLQIQLETSTASLGRTEPVLHRIVTCLSIAASMEGENDQNNQLEEPYIQPFILRLLIIWLVDCSNAVNCLLESAVHLNFIIELASNKRYAACVRGLAAVVLGACILYNASREKGRDAFAVADAISQKIGLTTYFLRFDELRKSLAHPLSEQHHRKELSRSSANSMSDFQEIEEDETNKGDQHPVLSEIFDSQFVNLLTKLEADIRENIMDIFSRTKTATAVLPTELEQKNGEVDEEYIKRLKSFVEKQCNEMQDLLARNAMLAEELLRTGGGTTTDTSQKPSSGRERVQIEALRQELEGAKRQIGALKSEKSQIEAEANNQRNLSVKLESDLKSLSEAYNSIEQANYRLDAEVKALRQGGSVPYPDVEAIKAQAKEEAEKDSEAELNDLLVCLGQEQTKVEKLSTRLAELGEDVDTLLQGIGDDTAIPDDDDEDDEE

SEQ ID NO: 46433 - protein, 407 aa, Zea Mays
MGASSSTGNPSPEAHEQREQETLASAALSLPLLRAAFSRSAANALPDALAPPPASFRLPGSPAPPPPHFHGILGGLGPAIASQFFGHGAAAVTDGGAGWVQFLRGFNRCCARVTASRSLALLLRVYAAACAGAGAPCGVQLQPDEGGGDEDGKVVGELAPEEIAVFLWVCWVMAWSASASRVVSDGGDKSEPVTVLLPDVTHLVLSALVSAGVVTDDAGVWGWDVSSGGKGVKVQEFMSWVLSTPFGLGNCLSRYVRDKFRSLAADSVEESSVSTVSTTFDTSDVYLLTRGRAWAIALSLRNKLSEKLLSASVIGMDTEDLLYRSSVHGKGLSRFWSCVEGYKGPMLILLSAFSKGGGENVDSDRRWVIGVLTEEGFENKDTFYGSSGFLCAAHPIFRMLPPSDKSL

SEQ ID NO: 46434 - protein, 94 aa, Zea Mays
MAVPTSTSSPLPLLFLHRCTANSSPSVLSFPSSLRGASLRSRAAAAPPAETLSDDGIPDAPPEGAGTGIPLPSSIGDDGEQITFEFPSIPDSPV

SEQ ID NO: 46435 - protein, 310 aa, Zea Mays
MSWLLASPEESLPFILADRGFDVWIANNRGTRWSRRHVSLDPSSRLYWNWSWDDLVVNDLPAMVDFVVKQTGQKPHYVGHSMGTLVALAAFSEGRVVSQLKSAALLTPVAYLAHITTPIGILLAKAFVGEVLSDFLGMAEFDPLAPPVTNLIRAFCRRPGMSCYDLVGSITGKNYCLNSSAVDVFLKYEPQPTSTKTMVHFAQTVRDGVLTKYDYVLPERNIASYGQAEPPVYRMSGIPPSFPLFLSYGGRDSLADPADVRLLLQDLRGHDQDKLTVQYLDKFAHLDFIIGVCAKDYVYKDMIDFLNRFN

SEQ ID NO: 46436 - protein, 295 aa, Zea Mays
MPEIIEVFTVEYSLICKIHEYAKPYICLMDGVTMGFGIGLSGHGRYRIITERTLLAMPENGIGLFPDVGFAYIGAKAPGGGAVGVYLGITGKRISSPADAMFIGLGTHYVPSANLGSLKESLLSANFTNDPHRDVESVLTGYKKEPESEPQLKKLLPYIISSFSPDKSVAESVEELKKCSRSGDAAVAEWANEALAGIEKGAPFSLCLTQKHFSQVASAYGTSEHYLSKLAGVMKLEYRIALRSSIRNDFVEGVRAVLVDKDQNPKWNPATLEEVNMAEVESVFEPLGAEAELSV

SEQ ID NO: 46437 - protein, 484 aa, Zea Mays
MPPLHVPGSSTPRKFYHLVLFHVHPFWIQVLYFLLISVLGFLMLRVLPMKSSSVPRPSALDLLFTSVSATTVSSMIAVEMESFSNAQLLLMTLLMLLGGEVFTSMLGLHFTCTKLRNKRETPHNNLHGNSLEQSRRRHRPMEMEAQAAAVQMELAGFNKDGHGDFASMARLLMFIVLGYILVVHIAGYALILIYLSVVGSARAVLVRKRISLSTFSVFTVVSSFANCGFVPTNEGMVSFKSFPGMLLLVMPHILLGNTLFPIFLRLSITALERVTRWRDLCELLRDRGPGGGPAAAAAAAAIGYDHLLPGPRTWFLALTVAVFLAVQLVLYCAMEWGSGGLGGLNAFQKLVAAVFMSVNSRHSGEMVVDLATVSSAVVVLYVLMMYLPPYTTFLPVAVEDDQQQQNEAQPHDNSTSKSSTSISIWHNLLMSPLSCLTIFIVVICITERRQIARDPINFSVLNIVVEVIRLKKFSMLGGQAWRLN

SEQ ID NO: 46438 - protein, 289 aa, Zea Mays
MSLTHCGLWQVHYFSDFCFQQYPFDIPTEAFPFEIFKQAFVAVQSCVVHLQKVSLARRFALVPLGPPLLTYRSNCKAMLTADGDSVRLVVDRPYKAGEPIIIWCGPQTNSRLVLNYGFVDEDNPFDRVAIEASLNTEDPQYQEKRMVAQRNGKLAIQNFNVYVGKEKQTVAEMLPYLRLGYISNPDEMQSILSSEGDTCPVSPCTERAVLDQLVGYLESRLAGYPTTLDEDEAMLADGNLEPKKEVATRLVRLEKKMLHACLQATNEFINDLPDHTVSPCPAPYAPELK

SEQ ID NO: 46439 - protein, 302 aa, Zea Mays
MIADQINHAREVNPKVRRFPFSSPMESLASQARPAAVLWLAGFFQAARLHRVVSFCASSRALSIRIAQCFLLNGLIFLGSLLTLTSVVIPTLLWILPERCNQTAGHLCEHRAAVSIYSFLRSGLVEIFYVFWFYPLYVFSFILSTIWVALGIGEQVYSILLLTIFFVEVSVIGYIPYFGKAMNFLLLSLMYAYYCFEYKWNFFAVSLHERLDFFESNWAFFAGFGAPCVLPIFFFSPLISYGFLAILYPLFVLTAAGTQAEQVIDALKPAHEGKLQRIPVFFVAKRLTTKVLQLFPVAQKEQ

SEQ ID NO: 46440 - protein, 134 aa, Zea Mays
MAATAYSVALLGGARLPAAPRSALLPRRSVCQLRFQDAPRLSLLRAKAASEDTSASGDELIEDLKAKWDAVEDKPTVLLYGGGAVVALWLTSVVVGAINAVPLLPKILELVGLGYTGWFVYRYLLFKERVGRRH

SEQ ID NO: 46441 - protein, 169 aa, Zea Mays
MRSYMGQQEDGMSDGLYTYKHHRERGADIHTIFVKKSKFRILLSFIGTTFLLVSVCCALLSKDGLCLCSLWSISFASVIAKCLRCDPVKKESLVIMPTFGIQLEQHFWSGRVHRKFVPIGKILRPVLNEHVTPVSCYWSLALLVREEYELMLVFKSRCWFQSGKRYVHS

SEQ ID NO: 46442 - protein, 304 aa, Zea Mays
MGDDYEVVRKVGRGKYSEVFEGINVNNYEKCIIKILKPVKKKKIKREIKILQNLCGGPNIVKLLDIVRDQHSKTPSLIFEFVNNTDFKVLYPTLTDYDIRYYIYELLKALDYCHSQGIMHRDVKPHNVMIDHELRKLRLIDWGLAEFYHPGKEYNVRVASRYFKGPELLVDLQDYDYSLDMWSLGCMFAGMIFRKEPFFYGHDNHDQLVKIAKVLGTDGLNAYLNKYHIELDPQLEALVGRHSRKPWSKFMNADNQHLVSPEAIDFLDKLLRYDHQDRLTAREAMAHPYFLQVRAVENSRTRPQ

SEQ ID NO: 46443 - protein, 53 aa, Zea Mays
MERLKIELKPRENRGAKIPSTTKTTDTKPVQNPLSSLKMTLLTSLMQAIVASD

SEQ ID NO: 46444 - protein, 90 aa, Zea Mays
MFVNRQIVNIWYIPRNEKLGKSDDVLSAAERYIEQNGPEAFEKLISKSTKSSKSRNTKRLNLEDGEAENRAKAERESWGENPFYDKNYRY

SEQ ID NO: 46445 - protein, 214 aa, Zea Mays
MNTKGEILLEQSGVVRSNCIDCLDRTNVTQSFLARKSLDSQLQLMGALLSSESISLSDNIHDTFKKLWVEHGDELSLEYAGSYALKGDLVRYGRQTLPGLIKDGMSALSRYYLNNFHDGVRQDALDLISGYYTVSQGSSSPFHNGVDSSSYLPVASAIIVGGITATTFTLSQVGRNAQHLISSIICAGLTVGVVALVKANGKQFCSRPRLCGLI

SEQ ID NO: 46446 - protein, 519 aa, Zea Mays
MNKTPKGSYVLVITSQKDAGSYLGSPVYQVNSMKFLCCNEAIKHLTPQERRDEAYFMSLLRIAETTCGLYYSYDRDLTLNLQRASKLAAGRVHKPLWKQADPRFVWNKNLLEELIEAKLDEFIIPLIQGSFQSAQFTLKDRPVRITLFSRRCNRRLGTRMWRRGANLEGATANFVETEQLVEYEDLTSSFIQLRGSIPLLWEQIVDLSYKPRLSIIEHEETHKVVQRHFHDLSQRYGKIIVADLTDKRGDEGDLSNAFAAEMDRIPGVRYIHFDFHHVCRGGNFDNLQALYNQIEEAIHKQGYFLMNTKGEILLEQSGVVRSNCIDCLDRTNVTQSFLARKSLDSQLQLMGALLSSESISLSDNIHDTFKKLWVEHGDELSLEYAGSYALKGDLVRYGRQTLPGLIKDGMSALSRYYLNNFHDGVRQDALDLISGYYTVSQGSSSPFHNGVDSSSYLPVASAIIVGGITATTFTLSQVGRNAQHLISSIICAGLTVGVVALVKANGKQFCSRPRLCGLI

SEQ ID NO: 46447 - protein, 258 aa, Zea Mays
MDRIPGVRYIHFDFHHVCRGGNFDNLQALYNQIEEAIHKQGYFLMNTKGEILLEQSGVVRSNCIDCLDRTNVTQSFLARKSLDSQLQLMGALLSSESISLSDNIHDTFKKLWVEHGDELSLEYAGSYALKGDLVRYGRQTLPGLIKDGMSALSRYYLNNFHDGVRQDALDLISGYYTVSQGSSSPFHNGVDSSSYLPVASAIIVGGITATTFTLSQVGRNAQHLISSIICAGLTVGVVALVKANGKQFCSRPRLCGLI

SEQ ID NO: 46448 - protein, 77 aa, Zea Mays
MFCVSHIPYAQLDGLLKGLGFTQKKADSQVRWAVLNTVLILRRHEKARSQLAEAMSTGKSVGSCIQVIEECISTDDI

SEQ ID NO: 46449 - protein, 264 aa, Zea Mays
MSTNLGGASCFGFGLTQMQPAAVRLRLPPARAADTSSSQSPARLTAVLEQVDQLLSQGNDMAALSLVRSTQGGDGGLRAFGAARQVYFGGGVRNLVLDTIGHYLSQKYHNRVIQHEAGHFLIAYLLGVLPKGYTITSLDTLMNQGSLNVQAGAAFVDYEFLEEINTGKLSATMVNKFSCIALAGVAAEYLLYGRAEGGLADINKGLGFTQKKADSQVRWAVLNTVLILRRHEKARSQLAEAMSTGKSVGSCIQVIEECISTDDI

SEQ ID NO: 46450 - protein, 409 aa, Zea Mays
MGEEAESNCKRKAPDSSVEEQPSLAPAPAQSQADPAAKRPNISRSCVHEVAVPNGYESVKDEAVHGTLASPAFNGEMAKQYPFKLDPFQSVSIACLERNESVLVSAHTSAGKTVVAEYAIAMAFRDKQRVIYTSPLKALSNQKYRELSQEFTDVGLMTGDVTLHPNATCLVMTTEILRAMLYRGSEVIKEVAWVIFDEIHYMKDRERGVVWEESIIFLPPAIKMVFLSATMSNATEFAEWICSLHKQPCHVVYTDFRPTPLQHYMFPIGGSGLYLVVDENGQFREDNFAKLQDSFAKPNNQLDGRKGGGPKASGRIAKGGSASGNSDIYRIVKMIMERKFQPVIIFSFSRRECEHHAMSMSKLDFSTEEEKECIEQVFCNAIGCLVEEDRSLPAIELMLPLLKRVCHGS

SEQ ID NO: 46451 - protein, 67 aa, Zea Mays
MFGLRIQDHFTYLGVDMEADDWSTCRIITAQRVQQFRLELAGNIMMTKHDIDVSIVEPSVQNRLEQF

SEQ ID NO: 46452 - protein, 298 aa, Zea Mays
MTDLTALFTWTCSRCNDLTQGFEMRSLIVDVENCLQAFVGVDHSLNSIIVAIRGTQENSVQNWIKDLIWKQLDLSYPNMPNAKVHSGFFSSYNNTILRLAITSAVHKARKSYGDINVIVTGHSMGGAMASFCALDLAMKLGGGSVQLMTFGQPRVGNAAFASYFAKYVPNTIRVTHGHDIVPHLPPYFSFLPQLTYHHFPREVWVQDSDGNTTERICDDSGEDPDCCRCISMFGLRIQDHFTYLGVDMEADDWSTCRIITAQRVQQFRLELAGNIMMTKHDIDVSIVEPSVQNRLEQF

SEQ ID NO: 46453 - protein, 215 aa, Zea Mays
MQSGFFSSYNNTILRLAITSAVHKARKSYGDINVIVTGHSMGGAMASFCALDLAMKLGGGSVQLMTFGQPRVGNAAFASYFAKYVPNTIRVTHGHDIVPHLPPYFSFLPQLTYHHFPREVWVQDSDGNTTERICDDSGEDPDCCRCISMFGLRIQDHFTYLGVDMEADDWSTCRIITAQRVQQFRLELAGNIMMTKHDIDVSIVEPSVQNRLEQF

SEQ ID NO: 46454 - protein, 633 aa, Zea Mays
MPRVRRRCRGAMLLLLVASVLAPLVLYGGSPVSVAPLPDSTVASGAFDPEGASNLVWSHMAASAVSLAKGLITERLGEHKNRVLSATDHWQVVEAGSRNRASGKSGTAGVREDHHLPNSEEEGDLVVVESGSARFGQEDVIKEVVGSQRRADGSGEPGDSMEVDEQKAKEVGIELPHATDVLHKNGSDGLEMNDVSGLRTVGILNTSSAKESDVHSLSNKMKHPNISREQQTRTSNSNAAHHATNSITDQTTALPDATIRIIKNQLTTAKMYLGLFASRGNHGFTRELRARMRDIQRALGDARSDRQLPHNVHSKTRAMEQTLVKVRKIHDGCSSAVNRLHTVLHSTEQQLESNKRQANYLAQVAAKSLPKGLHCLTLRLTNEYYFTNSKNKDFPYVEKLEDPKLYHYALFSDNVLAAAVVVNSTLVHAKKPEKHVFHIVTDSLNYAAMKMWFLANPFGKAAIQVQNIEEFTWLNSSYSPVLKQLETRFMIDYYFRTGHARHDENPKFRNPKYLSILNHLRFYLPEIFPRLNKVLFLDDDTVVQRDLSALWLVDLKGKVNGAVETCRQDFHRFDKYLNFSNPLIAKNFDPHACGWAYGMNMFDLSDWRKQNITEVYHTWQKLALQEQLCRLVS

SEQ ID NO: 46455 - protein, 443 aa, Zea Mays
MYLGLFASRGNHGFTRELRARMRDIQRALGDARSDRQLPHNVHSKTRAMEQTLVKVRKIHDGCSSAVNRLHTVLHSTEQQLESNKRQANYLAQVAAKSLPKGLHCLTLRLTNEYYFTNSKNKDFPYVEKLEDPKLYHYALFSDNVLAAAVVVNSTLVHAKKPEKHVFHIVTDSLNYAAMKMWFLANPFGKAAIQVQNIEEFTWLNSSYSPVLKQLETRFMIDYYFRTGHARHDENPKFRNPKYLSILNHLRFYLPEIFPRLNKVLFLDDDTVVQRDLSALWLVDLKGKVNGAVETCRQDFHRFDKYLNFSNPLIAKNFDPHACGWAYGMNMFDLSDWRKQNITEVYHTWQKLNENRLLWKLGTLPAGLVTFWNRTFPLDRSWHQLGLGYNPNVNVKDIRRAAVIHYNGNLKPWLEIGLPKYRKYWSAHVNYDQVFLRECNINP

SEQ ID NO: 46456 - protein, 497 aa, Zea Mays
MDIFILVMPRFDDTNPEAEKKEYIDHIQEIVHWMGWEPYKVTYTSDYFQPLYEHAVELIRKGLAYVDHQTAEEIKEYREKKMNSPWRDRPIEESLNLFEDMRRGLIAEGAATLRMKQDMQNENKNMSDLIAYRIKFTPHPHAGDNWCIYPSYDYAHCMVDSLENITHSLCTLEFDIRRPSYYWLLVALGLYQPYVWEYSRLNISNTVMSKRKLNRLVTENWVDGWDDPRLLTLAGLRRRGVSSTAINSFIRGIGITRSDNSLIRVDRLEYHIREELNKTAPRTMVVLRPLKVVITNLEEGKVLDLDGKMWPDASDTDASSHYKLPFSRTVYIEKTDFRLKDSKDYYGLAPGKSVMLRYAFPIKCTDVIYGDTPDDIVEIRAEYDPLKTSKLKGVLHWVAEPAPGVEPLKVEVRLFEKLFMSENPAELEDWLGDLNPHSKEVIKDAYAVPSLATAVLGDKFQFERLGYFAVDTDSTPEKLVFNRTVTLRDSFGKAGPK

SEQ ID NO: 46457 - protein, 524 aa, Zea Mays
MTRFPPEPNGYLHIGHAKAMFIDFGLAKERNGHCYLRFDDTNPEAEKKEYIDHIQEIVHWMGWEPYKVTYTSDYFQPLYEHAVELIRKGLAYVDHQTAEEIKEYREKKMNSPWRDRPIEESLNLFEDMRRGLIAEGAATLRMKQDMQNENKNMSDLIAYRIKFTPHPHAGDNWCIYPSYDYAHCMVDSLENITHSLCTLEFDIRRPSYYWLLVALGLYQPYVWEYSRLNISNTVMSKRKLNRLVTENWVDGWDDPRLLTLAGLRRRGVSSTAINSFIRGIGITRSDNSLIRVDRLEYHIREELNKTAPRTMVVLRPLKVVITNLEEGKVLDLDGKMWPDASDTDASSHYKLPFSRTVYIEKTDFRLKDSKDYYGLAPGKSVMLRYAFPIKCTDVIYGDTPDDIVEIRAEYDPLKTSKLKGVLHWVAEPAPGVEPLKVEVRLFEKLFMSENPAELEDWLGDLNPHSKEVIKDAYAVPSLATAVLGDKFQFERLGYFAVDTDSTPEKLVFNRTVTLRDSFGKAGPK

SEQ ID NO: 46458 - protein, 277 aa, Zea Mays
MAAGGADQRGNNAATTTFVVPAVALSLGKPMPRVGFGTATATLGQAEGRAGVTEAILRALDAGYRHFDTAAVYNTEASLGDAVVEAVRAGTVASRDDLYVTSKLWITDAHPGRVLPALHRTLQNLQMSYVDLFLIHHPVSMRAPADDEAEGAGPAVVVKKDLVAMDMEGVWEEMEECHRRGLARAIGVSNFSCKKLEHLLSVAKIPPAVNQVEVNPYCRQEKVRNFCRANGIQLCGYSAMGASGTAWANNSVMDSPVLKQIAHARGKTVAQVGLRAG

SEQ ID NO: 46459 - protein, 274 aa, Zea Mays
MGEMAHACSAPRPSPAHHLCVRILLAYLLAARWLVPSCSAASFFRFPWPAERHDYRDALAKSILFFEGQRSGRLPPGQRASWRGDSGVSDGAAAGVDLEGGYYDAGDNVKFGFPMAFTTTMLAWSVIEFGDSMPRDERRHAAAAVRWATDYLLKTLAHPGVIFLQVGDPWKDHDCWERPEDMDTDRTVYNVSAGRPGSDIAGETAAALAAASMVFRDDDPEYAETLLTSARKAFEFADTYKGAYSDDPDLRAGGCPFYCDFNGYQRQSDGGKNK

SEQ ID NO: 46460 - protein, 343 aa, Zea Mays
MRRRCNQLGLPLALLFAALLGGAQCQSSHGGGGAAANLTVVGTVFCDACSTSSFSKNSYFLPGVRVRLDCMIKVNSNSKEEIKITAEKVTNSDGAYQLDIPAIDGFECAAPGATAGESFCRAAVLDNPSALCGVPAVTTTVGHISLPSQDPSACFYSLNSLYYRPSKPGPAQCGGAAGLSPPAAALNTSLFYCPPWPWPPIPFCTPRPWFPPIPFFTPPPPAFPFPLPPLPFFTPPSPSFPFPHLPPIFTTPSPPPPPPPQFPFPMPPLPHLPPLPHFPPLPSLYSPPPPPPPPPPPPPSFPWTFPPLPFFPPGPGSSGPSPPPLMSGSRKDPTTWSPSNKQP

SEQ ID NO: 46461 - protein, 103 aa, Zea Mays
MEVLMEAMKHIRDMPVRSRSSLVGSCFMKWMQLERRTSRPTSRGGSPWATGPARPRCRSSGTTPSPPTPLSDSSSSPGSPAWFCILFSYLSIMFFHITAGGSD

SEQ ID NO: 46462 - protein, 252 aa, Zea Mays
MSCHLADRVVRHRRQAARADGQRDQERLAHAPQEAPGSHQAGAAAAARDDAGGWRRQEAQARGGGEARGRRSQEGDGQRRRRRRPGPGPGHRCAGVSRTVGGLVVGDRVVHDGAGAGARQHGELARVPQGGEPHHLLLGRRGVPVRRQLLVRDAVDAAGQPRRRRPHGALRRRRVRRRRRGCRLLLVRRRRRRPGLLAQSVHGVRRRAPRTAADLDRSRENFRLLIDSSFFCLYLSLHVLHRRGRTRTAAAD

SEQ ID NO: 46463 - protein, 383 aa, Zea Mays
MARRLFCATRTLLLPAPAPVPAPTSASSAAAAEASASLLPLLPCKRRKKLLRKLNSPRVAPIEPEAARRVPALDAVLDRDTAFRFLHRARSFLASLPPPHRIPLAEAGKLYRELGFPRGRKVSRSATRHPLLFHLPVVDSVPHLALTPFMCSLLEEERRIHDDLLPSRVLAVRKLLMLTAHRRVPLAKLHHCRAVLGLPDDFRDRVQDFPDDFRVVVDPRDGRHFLELARWDPALAVSALERDFVVDERRVRRTFRFAVPHRRLMPLDAEDADRLDMATTFPLVSPYTNGALLKPWTPEAEKYRVGVVHEFLNLTLEKRAMIHHIVEFKEEFGLTRHMDAYDENGVLKEKDPLVLFNEKLQHYACMSKIDSRETMIDTAGLTE

SEQ ID NO: 46464 - protein, 1138 aa, Zea Mays
MGTEVAAVVDLRALTQSDLVALAAASPYAVDSRRGRRRRRDSEFLSPPKIDRAVFNESAGSRKQTFSRRRVATNISHKLTPTTTGASSLSTPAAPTEEDPDNRLIVFYLQRLFARDDPSYPAPPTIPPRPQTLAAPAITAPAPPAPSLPPPSAAAADPDRVVLNPKGLVVDLVRLADLVDPYGEELRQRTAGLGSESELLGFMNALEGQWGSRRRRRKFVNAGMFGDHLPCGWKLLLGLKRKERVAWINCRRYVSPKGHQFATCKEVSSYLLSLLGYQEAKPTASQINNAGVHDLHVNSVGLHQQTISIEEKQIAVPVNSVALFNSSGDSHQQKLQKDEAPIEVNAKECRKCNLTFHDQSAYMQHQLSFHQRKAKRRRVSKSGELGTNIDGNYEKTQQKTSGEVSGNFGHSAANVRYEGLSPAELLDGRPSLMAVPCGSQEITILPQQGKEPCVLPQQGKEPSVLPQPGKEPSVLPQQGKEPSMLPQQGKEPSVLPQQGKEPSVLPQQGKEPSELPQQGKESSGDISVNQKDPLKEMNGFPEQEKGLVAGELVSAHHKDPLMDITDAFEMIKKHPAREPSSGHHLDTVDNSDDHKTHDEACDNVVTSLSIDAERKLGVCNSMNVHENISLKDPELSNADYSQKFNRSDETCDVHKEVSSTVNDPDERKCTDDSTRCTNMSCDLLHGKIVSSPEEHDFSNQLESNPLSVSRNEPDLNSIGTEVDGGNITCNAENPRSFKSEKSAELKIMDCEMTSFKDSEIKNDVRVRDVNLNSCLDSISSPISGGNNETSDTPDDAIRSSIIAQCFGTTSNDDTACKDGNFANQNDTCKGENFVNQKNVTMYQSNLTMEPIPRAQINVDCFTSSCSMTPEIKDYGNRGEDRAKEALVNSQNMTSNETGFDAEAYNSDIFNGTITESSLAQSSFVSSTSRTEPNEHCTLDFDIKGSMLEALEKSDSDLDNQYNDAGPSCDSLPATGTSGTIDDFMSMQTNFGSFTSLVRAVEDVPLSRIIQDQRCDLQLGFGGPKQQMYPSFEQQLRMASAGAPPYGTIGRHDPIPVPEPTLMLGYAPQLGNCPPPFQLGWGPSYSKMVGMLQSVCVWCNSPFQHFGTVAEQQADSLGYICPSCKGKFSGHLGINGPSI

SEQ ID NO: 46465 - protein, 435 aa, Zea Mays
MGESLLTALSMDTATAHHPHQGPSTFLSMDTASHDDFDLFLQPQGPFRRCLHAAAVAPPDINLPLAADPSPPPLASLDANVDMLDVGLGGSQHYDSDSPAAAGPVSAPAAAATTMVAVSHTKGSGSSAARKCVKRNVSIWGAWFFFTHYFKPVMSADKAGKAKAATTTGGNGNSATLDAFLVQHDMENIYMWVFKERPENALGKMQLRSFMNGHSRLGEPQFPFSADKGFVRSHRMQRKHYRGLSNPQCLHGIEIVRAPNLAGVPEADLKRWMQLTGRDANFSVPTEASDFESWRNLPSTDFELERPATAAPAKSSSHGHHKKLLNGSGLNLSTQPSNHSSGDGMEITATCNKRRKDSSPTAMEEDCSNSNSDKAQDMDVIHTFEPSWMNDFSGVMRHASGPVTAAKTIYEDSKGYLIIVSLPFADFQKVGGSCS

SEQ ID NO: 46466 - protein, 495 aa, Zea Mays
MAGGDRERDADEETRNQMMQNLFGDQSEDEDDADDDDVAEMVDEDDGHQPQSPPQSPPQRHQELDDDAYDDEEEDARSHAPARASGYHSEEVDGEAENGGEGEGESEGQVVIEEESEGEAHGADLDQGESDGDKVQSSPERELDDQRMEPDARGMDSEDEGYQQRTVSGRRRGVIASESEGSEDSYYAAGAQEDEEPRQTRKQSSPLEEERDHEVVRDVFGDSDEDEPAPYRVRHEIDEDSHRSHMEDEGHYEKDMQPDDVVADEDMRYESDDNRELKPKEKPVGPPLDLVVPFKQPPARPDKMNVIKVSNIMGIDPKPFDPKTYVEEDVFVTDESGTKKRIRLEDNIVRWRTIRNADGTTSCESNARFVKWKDGTMQLLIGNEVLDISVHEAHHDQSHLFLRHGKGILQSQGRLLHKMRFMPSSLSSKSHRLLTALVDSQNKKTVKMQKWFETKDPEKAKMEKERVSKSLLLHYLVFWAKIFEPIQSFNAKEKK

SEQ ID NO: 46467 - protein, 123 aa, Zea Mays
MHMNLVPSHTIDPQAASLVNTSTTLLALLALAVASGLAADGLDHRVDLNGTTGDMVDFQSTGDAGNGATITEMGNPVPEPSYEEAVLSVEEARLWSVDTVNCLDFDVWTTIVEETDKNVEGDD

SEQ ID NO: 46468 - protein, 179 aa, Zea Mays
MCWRYANAAVVKIHQVYGISTAEVMELLEHFLAMNPDNDGRVKAEDFWAHFGLDCSPLCKKIFHYFDLDIKGLITFRQFLVGCAHLRKQPLFQGSCETAFEKCRGPETSEISRAQLADLLRLSMVPPSDDKMLELFKTFDVDGDEKISRDDFMACLGRFPFLIAFFAALINGEVYIEIV

SEQ ID NO: 46469 - protein, 121 aa, Zea Mays
MKGNIEIGSVREVNVKSGLPATRSTERLELLDDDERILSVRFVGGDHRLQNYSSILTVHPEVIDGRPGTLVIESFVVDVPDGNTKDETCYFVEALLKCNLRSLAEVSEGQVIMDQTEPLDR

SEQ ID NO: 46470 - protein, 88 aa, Zea Mays
MIDTPNDESSFYSSVEYCGVKKVPNRLIGKKFCGVKKRFRRLTRRKPCEVKKKMFDETHTDAIPDISSQAQGWIVDELCVSLSAQTTK

SEQ ID NO: 46471 - protein, 262 aa, Zea Mays
MTSCGCLMLEKVEGDASAKTRVKAAPGAGAGAWCGSCAGDWRGRSEAIFPIYVMGSSRESTVAAARGIVDSPEDPIWVAVKAEAKSEAEKEPILSSFLYASVLSHDCLERALSFVLANRLEDPTLLATQLIDIFNDVMLNNKDICRSIRLDAQAFKDRDPACAQYSWALLYLKGYQSLQSYRIANILWNQGRKVLALALQSRISEVFAVDIHPAAKIGEGILLDHGTGLVIGETAVVGNWVSLMQTFDAGCYTWRYRQGTWR

SEQ ID NO: 46472 - protein, 272 aa, Zea Mays
MVDGGNFYEAQQMYKSTSARYIAAQKYSEALDILQSGALVQLKHGQVTCGGELAVLFVDTLITGELPYSEQIFDRIRKMYEAFPRVTVPHFLGDDYDDEGHQLSEAISAAKVRAESCSSFMKAAIRWSAEFGTSRNGSSELHVMLAEYIYSESPETDMTKVSSHFVRGNDPKKFASMLVNFMGKCYPGEDDTAIARGVLMYLSQGNLRDANLLMDEMNEQLKSANSEFPKTDLIQFIKYLLPTLERDAYPLFRTLRQKYKTSTDRDAVFQEI

SEQ ID NO: 46473 - protein, 318 aa, Zea Mays
MSRSLSMRGSMRARRDLPPPEKTIERLESMVDGGNFYEAQQMYKSTSARYIAAQKYSEALDILQSGALVQLKHGQVTCGGELAVLFVDTLITGELPYSEQIFDRIRKMYEAFPRVTVPHFLGDDYDDEGHQLSEAISAAKVRAESCSSFMKAAIRWSAEFGTSRNGSSELHVMLAEYIYSESPETDMTKVSSHFVRGNDPKKFASMLVNFMGKCYPGEDDTAIARGVLMYLSQGNLRDANLLMDEMNEQLKSANSEFPKTDLIQFIKYLLPTTLRQKYKTSTDRDAVFQELLDEIAAKFYNIQRQNPLEGLFSEMFKI

SEQ ID NO: 46474 - protein, 130 aa, Zea Mays
MIWLRNSLKLIVSWRKPVTLPCKEKNSFNLWVRPILILRMLSSDLVFLTEIAWKNANYAQILEYLREEYELNQRFGSLDFKLKFVEHNIHFLQEVLQNRRSDLLEWGVIILLIIEIAISLYEIAKDSMID

SEQ ID NO: 46475 - protein, 138 aa, Zea Mays
MIWLRNSLKLIVSWRKPVTLPCKEKNSFNLWVRPILILRMLSSDLVFLTGMSTTLKSEIAWKNANYAQILEYLREEYELNQRFGSLDFKLKFVEHNIHFLQEVLQNRRSDLLEWGVIILLIIEIAISLYEIAKDSMID

SEQ ID NO: 46476 - protein, 407 aa, Zea Mays
MPHAAATAAAALPRASLLVISAPLRDSLAAAPYEPPAGASASVKSLLASLLPSPSPPQPQLQEPAGKESGDLLLFCAAVLAASPEYPALHWVPASLVGAAAAAVNELAAAGGWGSVGDMVVAVAPEVVPPLKAVVKDSCVDADSDEIGAVKPPKEHAAVAAHQFRWLVSQVSYPKLGDLCSLVIPCALTTLDHWSPEVKVQGMVSFVHIAKNVKATELSLYEDAILDACCQNIPADDELWYQVIEVSVMLLTFTQRSNPRSPWYDRMLSEMLGHLERQPLNKERRVAWLTLIGPVFDAMGLFLLAHFRRLFSLFFQWMHTDDNKTVLLTLKQIHAIIKLTWIRKSPYTLRYYNTSSHCCWWTSLFYYIKNQPQGATVKSCEIISWRYLYCFRTARDINLRKLGRNMN

SEQ ID NO: 46477 - protein, 102 aa, Zea Mays
MVELENKLKFKEETAAAAMAARDAAEKSLKLADTRSSRLRERLEELNKQLEESDTRTESVNRNGHRYMCWPWQWLGLNYVQLPLAETDQTSNEMELSEPLII

SEQ ID NO: 46478 - protein, 82 aa, Zea Mays
MSQNNPSQLLPSELIDRCIGSKIWVIMKGDKELVGTLCGFDVYVNMVLEDVTEYWFLVVHHLMCNELLLPRVSFVAMDYEET

SEQ ID NO: 46479 - protein, 958 aa, Zea Mays
MYGNDNWINSYLDAILDAGKGVAAAAAGAVRGRGGGWGGDRPSLLLRERGHFSPARYFVEEVITGYDETDLYKTWLRANAMRSPQEKNTRLENMTWRIWNLARKKKEVRLFALEMSEDLFEGVKGEDAGDPSVAYGDSTTGNTPRTSLFDKLYIVLISLHGLIRGENMELGRDSDTGGQVKYVVELAKALSSCPGVYRVDLLTRQILAPNFDRGYGELDELLASTSFKNFRCERGENSGAHIIRIPFGPKDKHLAKENIWPFIQEFVDGALGHIVRMSKTIGEETGSVCPVWPTVIHGHYASAGVAAALLSGALNVPMLFTGHFLGKDKLEELLKQGRQTREQINVTYKIMRRIEAEELSLDASEIIIASTRQEIEEQWNLYDGFEVMLARKLRALVKRGANCYGRYMPRMVIIPPGVEFGQLIHDFDMYGDEDNQSPALDPSIWFEIMRFFTNPRKPMILAIARPYSEKNIATLVKAFGECHPLRELANLTLIMGNREAISKMNKISAAVLTSVLTLIDEYDLYGQVAYPKLHKHSEVPDIYRLAARTKGAFVNVAYFEQFGVTLIEAAMHGLPVIATKNGAPVEIYQVLENGLLVDPHDQHAIADALYKMLSEKQFWSRCRENGLKNIHQFSWPEHCKNYLSRISSLGPRHPAFACKEDHKVPVKCRKHISIIAVDSVNKEDLIQIIRNSVEATRTGTMSGSTGFVLSTSLTIAELQSVIVRTGMLPTDFDAFICNSGSDIYYPLQSSDVPSNSRVTFALDHNYRSHIEYRWGGEGLRKYLVKWASSVVERRGRTEKQVIFEDSEHSSTYCLAFRVVNPNHLPPLKELQKLMRIQSLRCHALYNHGATRLSVIPMHASRSQALRYLSIRWGIELPNAVVIVGETGDSDYEELFGGLHKTVILKGGFNTPANRIHTVRRYPLQDVVALDSSNIIGIEGFSTGDIRSAMQQQLGIPTQ

SEQ ID NO: 46480 - protein, 329 aa, Zea Mays
MKKLKKSEMLRRGQVEHVRAERDLLAEVDSPYIVKLYCSFQDDEFLYLIMEYLPGGDMMTLLMRKDTLTEDESKFYVAETILAIESIHKRIYIHRDIKPDNLLLDRSGHLKLSDFGLCKPLDSSCFPNLSDLDYAAGKSTNPSSDGDKQSSNSTAPRRTQQEQLLHWQKNRRMLAYSTVGTPDYIAPEVLLKKGYGMECDWWSLGAIMFEMLVGYPPFYSEDPMSTCRKIVNWRSHLKFPEEASLSLEAKDLISKLLCNVDQRIGTKGAHEIKAHPWFAGVEWEKLYQMEAAFIPEVNDELDTQNFEKFEETAPPMQTSSKAGPWRKLS

SEQ ID NO: 46481 - protein, 144 aa, Zea Mays
MEPHSDNLANYGKLCRERTQKYMVKSRQVQVLDNDHGMSMRPMPGLVGLIPSGSKEKKKQAPAKPSDVKRTRRDRTEMENIIFKLFERQPNWALKALVQETDQPEQFLKEILNDLCVYNKRGPNQGTHELKPEYKKSTGDTDAA

SEQ ID NO: 46482 - protein, 1532 aa, Zea Mays
MEAVPLLTNLLNYHDSKVLEHASVCLTRIAESFSPFPEKLDELCSHGLVAQAASLVSVSNSAGQASLSTSTYTGVIRLLSICASGSPLAAKTLLLLGISGILKDILSGSGLVAGTTVSPALTRPADQMNEIVKLADELLPSLPVGTISLPVYSGVHMKGCSVKKSTSSKQGEHGSTANELSGREKLLRDQPELLQQFGMDLLPTMTQVYGSSVSGPIRHRCLSVIGKLMYYSSAEMIQSLLSTTNISSFLAGILAWKDPQVLIPALQIAEVLMEKLPEIFLKMFVREGVVHAVESLICPELSGQVTPHVDSITSSHNRRNRRRNNAVNTGNNLPDGPKGSNSMIANSPPSMAEVPNNSLRALVSNHAKSFKDKYFPSEPGSSDIAVTDDLLKLRALCAKLNTTADTIKTKAKGKSKVVSDNSFDVLCNIEEQLDDIIAEMLSELSKGDGVSTFEFIGSGVVTALLTYLSCGTFGREKVSEANIPNLRHQAVRRYKTFISFALPNDKDGNKTPMAFLVHKLQSALSSLERFPVVLSHSGRASTLGGSRLTTGLGSLSQPIKLRLCRAPGEKSLKDFSSNVVLIDSLASLAAVEDFLWPRVQRTEPVLKPPMSSANNSGSGAASSTACAPSIPSETQSVRRTSLRSKSSAATSGAIKKDYQEGSINTSKGKGKAVLKLSLDEPKGPHTRNAARRKATSEKDVELKPSHGHITSEDEDLDASPVEIDDALILDDDDEDVPDDEDDDHEAVLRGSLPSCVPERVHDVKLGDADDSSVASLANDNQAQPSSGSSTKNTSSRGLDTAEFRSPATFGSRGAMSFAAAAMAGLTPVGGRGIRGSRDRNGLPLGARATEHYNKLIFTAAGKQLNKHLTVYQAVQRQVVHAEDDEDRFGGSDLPDDGNHFWDDIRGDVFTITYQKADNTAEKGSVGGSASVPKSSKSDSCRTLSEKQCTSLLDSILQGELPCDLEKSNQTYNILSLLHVLEGLNQLSPRLRLQSACDDFAEGKVATLNGLYDVGAKVPSKEFINSKMTPKLARQIQDVLALCSGSLPSWCYQLTKACPFLFPFETRRQYFYSTAFGLSRALHRLQQQPGNDNNTAFEREVRIGRLQRQKVRVSRNRILDSAAKVMEMFSNQKAVLEVEYFGEVGTGLGPTLEFYTLLSRELQRVDLGLWRSHSSDNSGMQIDANADDLIRSKNHESESLTESRNIVQSPLGLFPQPWPPTAAASEGSKFFKVVEYFRLVGRVMAKALQDGRLLDLPLSTAFYKLLLGQELDLYDILSFDTEFGKTLQELQILVARKQFLDSCSSESQKIDLCFRGAPVEDLYLDFTLPGYPEYVLKEGGENAEVNICNLEEYISLVVDATVKTGIMRQVEAFKAGFNQVFDISSLQIFSPQELDYLICGRCELWEPETLPEHIKFDHGYTSKSPAIINFLEIMAEFTPEQQHAFCQFVTGAPRLPPGGLAALNPKLTIVRKHSSVANNNSNATGATESADDDLPSVMTCANYLKLPPYSTKAIMLKKLLYAINEGQGSFDLS

SEQ ID NO: 46483 - protein, 423 aa, Zea Mays
MQPLQVRRFSPFSLSLFFTLDRNRSARYHTNSSRAVAAQLPPPSSPNLAGFRPPPSPRICRRFASVPERVALPVVLVVVGGVAAEGRSWTTGPLTAAELMMIFHNFHIGVSEAADVLVEKEGLMTELRKELRVSDKAHRELLNKVNNDNIICSIREWRSTGGLQASMSNNPQPIHDPVPSPTTSGRKRQKTSQSVPALPAPPAMHSQQLATPTQPSSSTARKAVPPVPKGKKTKPGQKVPGGSAAKPMPSSAGPSGRGPHMNRNFPGGSAPEAQAQNVDPLVGRKVMSRWPEDNSFYEAVISDYNAETGLYVLVYDINTANETWEWVDLKEMGPEDIRWKEDDSGIDPVVYLRSRGAPSSGVRKPTGRGGPMPGSGRGRGLPKNMSRKDFPPPQNGVGKRSSDDIDILHTESLIKEVECLLLQ

SEQ ID NO: 46484 - protein, 608 aa, Zea Mays
MVPLTQLQKKLYMSVLRKELPTLISFARGSSRHQSLQNIVIQLRKVCSHPYLFSGIEPEPYVEGEHLIQASGKLIVLDLILKKLHECGHRVLLFAQMTQTLDILQDFLELRNYTYERLDGSVRAEERFAAIRNFSSQSTKGLIRDDNRSEAFVFMISTRAGGVGLNLIGADTVIFYEQDWNPQADKQALQRAHRIGQLNHVLSINLVSQRTIEEVIMRRADRKLKLSHNIIGEEDGTDGKGGDPGIEASDMRSIIFGLHLFDPADTATETIDEDITAETFSVEKLAKLKTMSEKVVMMRSHESSEKDERAFEINPNMTDDSGTVIRRASDSIRIDPGLNEAAYLSWVKKFKEASISSEDATVGFGRQRAAPEEKLLKHDVNKQKIEEKRLAKWESLGYQTLAVKEPDITASQNISDAGSIQFVYGDCTNPSKVCPAKPAIIFSCIDNSGTWGHGGMFDALTSLSTCIPDAYHRASEFDDLHMGDLHLIQLDEGNCTRSLDAPLWVALAIVQSYNPRRKVPRSEISMSDLELCISKAAFSAAQHSAAIHMPRIGYQGGSQRSEWYTIERLLRKHSSLHGIDIFVYYFQRRQTDCQIVTQVGHADDSTQA

SEQ ID NO: 46485 - protein, 514 aa, Zea Mays
MALALKQCGLEGVIVVWQLDTGKRRYKPRLGSPLLFFVDSPDSSISCVSCTNNQVYLLKMPNMEVMRSIAGIKLPIASPNLGGSNRAVYGFDYTNRLVAIPTEDYCIQFYNLFENAEVSEVQVCERNFQPIDDITMYISMVSLSIDGDLMCTVDVKLPEEGLGGLVTLKFWNHGSRAGHYFLSTVIYEPHSDDGVSSVAFRPGRNMAVSSSFGGNFKVWVQSLSSQSNDERNCSGWRCQSVGSYKKKPMTSAAFSADGSVLAVAAESTITLWDPDNNALVGVIAETLSPVTNLSFVGTSVFLMSLCQSSRPQIALWNVSNLSMQWSYSIYAEAACCSPDGSEFAVLALLSCPDGEASTQQDGVILLFDAESSNPIASWSVKKASGGSISFVKGDVPLDANADSSRDKEPMLLVYVNGSHEYAIFDPRESEEVVISKNKHKKIQAEEPAPIGYASIYGELTKLEPKKEVSDVPFVPSDRPWETIFSGSSHVLPPLTKLCSAFLSSLLEKRPVANE

SEQ ID NO: 46486 - protein, 95 aa, Zea Mays
MVLATVEVLHAFATEGAHCARVREVLNSSDVWSAYKDQKHDLFLPSSAQSSAAGVAGLIESSSRFTYALAAPPSSSLSPPSAPANPSGRQYYQHS

SEQ ID NO: 46487 - protein, 323 aa, Zea Mays
MGTPPPFQESGHCDVCRCTFNTFRRRHHCRSCGRTLCHEHSSYYMALPQYGIYTDVRVCYGCFNKSSSQGHADNPVSAGSISGAADSFSGLSLGKEDDSSPMKNSTVQSTAALIECKCGMPLCICEAPKPEPSPTPVKNINTVPPTTQSNPRPKKPANTQQKASATSSSNSSPFLNIGLMNNDSNDKGIVDYEVSGEGLREAIKGGDVKGVKKLLTQGVDSNYCDKQGFTLLHLAALFNQTEIALILMDHGANVESKNGQDPTHVEASDDGSALKLSKKMFNVEPKRREYDKGKSGLSSMLNLVLLRVIIVIYLVTHPILKLK

SEQ ID NO: 46488 - protein, 343 aa, Zea Mays
MFLVWSHCVSFMQEIELNKANWNALFEPFHFFEAYRKFLVVDIVAEDDDDLRLWKGWIESRLRQLTLKIERDTKGILQCHPYPCEYSDPTIECAHCAFYMGLSRKEGLKKRGQQFDIRGTVDEFMREIGMYSLWKPGMDLAVTHVHREQVPSYVFEQGYKKPCPTMHANQQEQSDGDGTFSPYLESQLKRKYISDGDGHVDLCKSVKRASVSPPGVGTPPHLGNSVSNVVCDSPVKFVSSVVCSGAHASSSHDDINIEQAQLTTSPYGSEDTSASGTSCAAVGAVILADESSKLGNLTSDLEVDTIQTMPLHTSLECVAQKGETKLEEIRRLASNNCAEFLES

SEQ ID NO: 46489 - protein, 763 aa, Zea Mays
MEHDEKPLPIDTRLLGALAEKCRAFAKALHYKEMEFEAVCTKKMGANPVTVVESLIHINNQLQQHEAAIGILTYSQQNSEVQLKESWYEKLHRWDEALKAYTVKSSQTSGPFTKLGCYIRSNEVSSSFGSAANAAWHMGEWDHMADYVSRLDDADENKLRMLGNATASGDGSSNGAFFRAVLLVRYKKYDDARMYVERARRCLATELAALVLESYERAYNNMVRVQQLSELEEVIDYCTLPMESPIADGRRELIRNMWNERIKGTKRNVEVWQALLAVRELVLPPNEDRDTWIKFAELCWKNGRISQARSTLVKLLQFDPESSPELTLYHAHPQVALAYLKYQYAVGDELKRRDAFSKLQELSVQVATTMGNLPGTSANHGTMSNAGVPLIARVYLTLGSWKKALSPALDDDSIQEILISYHNATLSAKDWGKAWHIWALFNTEVMSRYTFRGRPDIAGKYVVAAVTGYFYSIACASTTKGVDDSLQDILRLLTLWFNHGDTSEVQTALQKGFSLVKIEMWLVVLPQIIARIHSNNRVVRELIQSLLVRIGKGHPQALMYPLLVACKSISILRQRAAQEVVDKIRQHSGGLVDQAQLVSKELIRVAILWHEMWHEALEEASRMYFGEHNIEGMLAVLEPLHAMLERGDETIKENAFIQAYGHELLEAHECCLKYRATGEDAELTKAWDLYYHVFRRIDKQLPSLTTLDLHSVSPELLKCRKLELAVPGTYAADSPLVTIEYFVPQLICYNVQTKAKKADNSWK

SEQ ID NO: 46490 - protein, 1370 aa, Zea Mays
MKPSPHFPEIGKKPKDLIAKDHTFNIAAYISSGADVIAAALRKHVEEEARDLSGEAFLRFMDQLYEQISSLLQSNDVNENLLALRAIDALIDMPFGEGASKVSKFASFLRNVFEVKRDPEILVPASEVLGHLAKAGGAMTADEVERQIKTALGWLTGERVEYRRFAAVLILKEMAENASTVFNVHVPEFVDAIWVALRDPKQAVREKAVEALRACLHVIEKRETRWRVQWYYRMCEAAQVGLGRNASVHSIHGSLLAVGELLRNTGEFMMSRYREVADIVLDYLKHRDQLVRRSITSLLPRIAHFLRDRFVTNYLKICMDHILFVLRTPDERASGFVALGEMAGALGVELVPYLPAITSHLQDAIAPRRGRPSLEAISCVGSFAKAMGPAMEPHIRSGLLDAMFFAGLSDKLIDALESISTSIPSLLPTIQERLLDCISQALPKSSIRPGASVGRASRSNNLQQFVDSNSPVLVQLALWTLANFNFKGHELLEFARESVILYLEDEDSSTRKAASLCCCKLVAHSLSASSASQFGSNRTNRIGGAKRRRLVEEIVEKLLMAAVADADVGVRSSVFKALYRNPAFDDFLAQADILTSIFVALNDEEYDVRELAISVAGRLSEKNPAYVLPALRRYLIQLLTYLDQSMDSKCREESARLLGCLIRSCARLILPYIAPVHKALVTRLCEGTGPNANNALAAGVLATVGELAKVGGFAMRQYLPELMPVVVDSLLDGGAVSKREVAVSTLGQIIQSTGYVIAPYNEYPPLLGLLLKLLNGELEWSTRLEVLKVLGIMGALDPHAHKRNQHNLPGQHREVLRPTIETAQHIVSMEELPTDYWPSFSASEDYYSTVAISSLMRILRDPSLSSYHQMVVGSLIFIFKSMGLGCVPYLPKVLPDLFRAVRMCEDGALKEFITWKLGTLISIVRQHIRKYLQDILSLISELWTSSFSLAAPNRTIQGPQGSPVLHLVEQLCLALNDEFRMYLLHILPSCIQVLGDAERCNDYYYVPDILHTLEVFGGNLDEHMHLVAPVLVRLFKVELVDIRRRAIVTLTNLIPKVQVGTHVSALVHHLKLVLDGNNDDLRKDAAEALCCLAHALGEDFTIFIPSIRKILVKHHLRYRKWDEIENRLLRRELLITENLSVQKYTQCPPDVIRDPLDDCDGTPSEIADDTQRQARSHQVNDVRLRSAGEASQRSTREDWAEWMRHFSIALLKESPSPALRTCARLAQLQAEFMEHDEKPLPIDTRLLGALAEKCRAFAKALHYKEMEFEAVCTKKMGANPVTVVESLIHINNQLQQHEAAIGILTYSQQNSEVQLKESWYEKLHRWDEALKAYTVKSSQTSGPFTKLGCYIRSNEVSSSFGSVGRFKCIV

SEQ ID NO: 46491 - protein, 485 aa, Zea Mays
MAFLFGAFLGLVVGVAVVMAFARFENSRAEQRRELAATAAAFSKLTVQDLRKLIPPEFYPSWVSFTQKQKLKWLNQELTKIWPFVNEAASELIKTSVEPIFEQYKSFILASLHFSKLTLGTVAPQFTGVSILESDDSAIIMELELQWDGNPNIVLDIQTTLGISLPVQVKNIGFTGVLRLIFKPLVSEFPCFGAVCCSLREKSKVEFTLKVIGGEMTAIPGISDAIEGTIRDTIEDTLTWPNRIIVPIVPGDYSDLELKPTGVLEVKLVEARDLKNKDLVGKSDPFALIYIRPLHDKTKKSKTIVHLELLYYPYAKHEGVPNPFANQIQLTSLEKVLKTESNGYDINQRKNVIMRGVLSVTVISAEELPPMDIGGKADPFVVLYLKKGETKKKTRVVTDTLNPIWNQTFDFMVEDALHDLLMVEVWDHDTFGKDYIGRCILTLTRVILEGEFQDTFVLQGAKSGKLNLHFKWTPQPIYRDRDRDQ

SEQ ID NO: 46492 - protein, 128 aa, Zea Mays
MDGGGGGGGGGGGVGAGVMVGGGVVPGGGGGDVELVSKTLQFEHKLFYFDLKENPRGRYLKISEKTSATRSTIIVPIDGVAWFLDLFDYYIRTDERDVFSKELRLQTKVFYFDIGENKRGRFLKLVTK

SEQ ID NO: 46493 - protein, 330 aa, Zea Mays
MATERRRASVVVLGDIGRSPRMQYHSLSLANQASMEVDIVANGGSDPHLSLRENPSIHIHEMKTVQLTGISKISGALSLLLKAAVQFILLVWFLCFKIPRPDVFFVQNPPSVPTLAAVKLASWLRGAKFIVDWHNFGYTLLGLSHGRSHIIVKIYFWFEKYFGQMADGAFCVTKAMQHELAQNWGIRATVLYDQSPDFFHPASLMEKHGLFSRLGNSMCSAMGNADCISVEEVGEDMNTTAFTSKIDGQVFLKPNRPALVVSSTSWTPDEDFSILLEAALMYDRRVAAALGEDDSMDEGQLWIDIKNGKQFVYPRLLFIITGINHSAILT

SEQ ID NO: 46494 - protein, 148 aa, Zea Mays
MVEQNLDIETTRNEDHYGAAIHHLSLLRNKRCLMAYMYNRAEVIQSFRWKIGPVLPHDIQEKLHFSEKEYFKNHSAAIKSYISEMDIDLTVDMVPPKDPYIQVRVLEDIGEVSLGDHSVSLTKNSLHFLRRTDAEQFISQGLMEEFLE

SEQ ID NO: 46495 - protein, 127 aa, Zea Mays
MSKLSQPVSGKNLCHSWCGRLSPSEVADKVKHFFKYYAINRHKMTVLTPSYHAESYSPEDNRFDLRQFLYNSRWPYQFRKINELVQEMDKDGKWGTSAEGKLGAQTGAQGTGMGVVAAGSANPSAGF

SEQ ID NO: 46496 - protein, 87 aa, Zea Mays
MSMGAVSREVSSACERLCFICPSLRTRSRHPVKRYKKLLAEIFPRTQDEGPNDRKIGKLCEYISRNPMRVPKVYFLLCFARIVLSVT

SEQ ID NO: 46497 - protein, 96 aa, Zea Mays
MFNLENQIPKLCHLAQEMGEKEKICILHAAGLQALSSMIWFMGEHSHMSAELDNFWKIMRAHMQMLIMMLLLRIFELSGWMKCSKPKVMNLLLLPF

SEQ ID NO: 46498 - protein, 217 aa, Zea Mays
MARKCSSCGNNGHNSRTCGGHSRTAAAFENNGGGVRLFGVQLHVGSSSPVAVAMKRCFSMECLSPPPPLPPPPAAPAYYAAALAAANSSSPSASASASSSSSLVSVEEAQAPEKMASGYLSDGLVGRAQAERKKGLLLWVFRPAITRRSVDGGRAPAVPGGPGEARQGRLERHLPALRHDADADAGGQPRPEVLPPAEQPGAQEAQVQPLRRGGERS

SEQ ID NO: 46499 - protein, 415 aa, Zea Mays
MDPFSKKRKPDENGAVTASPAGGAATLGLTRDDVIRLLEPLSRDQLADIAAAAALVSSQALDAVRAAADRDPALRKLFVRGLGWETTSDSLRAIFSAYGDLEEAVVITDKPTGRSKGYGFVTFRHADSAVLALKEPSKKIDGRMTVTQLAAAGSAGGPAGGPAGSGGAPVSDVSLRKIFVGNVPADMASERLLAHFASYGEIEEGPLGFDKQTGKFRGFALFVYKTPEGAQASLVDTVKVIDGHQLVCKLALDGKKEKQGQSQQPGPGNHQQQQILPGGPQDIQGGLGLGSQMGAQYGVPGTGGLGSMGGQVPSGLASAGAGAFGPGGLGGGSFGVSSQFGAAGMGAYGGLGIGGGSMYRIQQGAGGLPAGTFGDGGSYPPPGSGFRGQDPQGGMSPPGPGGRAPPMYPNVPPYF

SEQ ID NO: 46500 - protein, 95 aa, Zea Mays
MGHCSIDGVYRNDLNCHFGQNHNSSTYVRKSKDLSVFHGLKFMMSKFDLFLIVYHILRIILLPIQQIPWGEHLIQLAGKQDLVVTVYDETNISNH

SEQ ID NO: 46501 - protein, 101 aa, Zea Mays
MCLNCSYSHKAQTILSIWFYIIFSGFCFCDLCSDDANASIFYVAPAQDFLHNQLFFEFFMLFDPGSGHNQALAQVSPEFTTCSFEMGLPKKIFALRIFMFV

SEQ ID NO: 46502 - protein, 126 aa, Zea Mays
MGHCSIDGVYRNDLNCHFGQNHNSSTYVRKSKDLSVFHGLKFMMSKFDLFLIVYHILRIILLPIQQIPWGEHLIQLAGKQDLVLGCDRASLQCKITLTMSPLSIVFLSLFPKPLNYYCPRIVMLST

SEQ ID NO: 46503 - protein, 1192 aa, Zea Mays
MDWSIDLDRGLRSRQPATRVRAVDAAGPRLRQLCTCATAPAPVASAYGVLPGEARVFAETMLLRLATEFRSADVAMRVRIIKTLLNSATGPGALAGARITEPDQLLRRVKVVYDTGNKRDRALALRMFGCFADIAKDSVHVRSLILSSLSASSALEVKAAIFAASCICHLSDDFSRIILEVFRRLICSQTSEPQVIMSAAKAFWKLGSTLAVIHKVHEVGKQMVLGTLEDVFKSEMLFSLSRLSSKSIILFSDQVDLLLLFMDHNSSSMKSVALKCMCFMFRRNICHFPVIRNVFGRLFPLIDDEDFPLDCKSDVLRILQKMLCSKTSSNHRANGSELSKLLLAAESSLDSSCLEVQGTALEILVEIFCILKEVGSDNISVLKGSSFAHAEWQGITNNVPLTEDNSMNGPLCKIIAMIVNHIISLANEVASRDICISSAVDKAYKTPFRLMLKLVSCYPSAAAVTLHILKSLVKELFLINGSDYSEVSVTSVEPFQTSVALKELSTSDDNVQLLATCIKASCIGTLIGNGKLDFLKIDCKNRKSIMHDLICCMLKFANACHEVLCETSGARYNLHDSIKGLIKYVRQDAPQHWSTYESFHLIMCACVTRNTCKINRGNQESGDSKEHHNTLFTPSVWITQELCALRMTKMLIKKQKYWEAYRSSMYCCCKGLWFTASFVFRKLADAFEAGSFSFWLKSLLLFSAGEIEMKLLFFSSATIKLVGELKMEGDLSEDLYCNETDADSTLSRSSELHGFQAKISDICGRTLLANNALASSASSDHDFVFQRWFISLRSSFLEVLTKVLDILNAHSSYEARGDHLSLSGEFVKDQVLALDHCSLRLSDLAKSYDLLAASHMDLERHGSSSIARLAFMCSLLAFCTAYSVYFSKACNYVEYCKLPKRFSHASILQDLYGRVDGSDWQVVSQLRQFMSTSFDELDSLQSSTWISGSCNLEKDLYSLCHFAVASLLGVCDSAEAEKIQNGEDCLSALQGGLQVLSSILQKYLELPFVVPKYFFRVKPCLGAELYIFDSNHLNEKGMSIEPGFLLSLTLCMKWKCVLERSTIRIVKLYCILAASLETCLDTAGTRSKQFDQHRTAEMVELNSKLLQYIKNDLRKARNEKKNSHSVMEMVTAFACFEPTDSGQGFSGCLLDVSSFPEGSYQIKWQACCVDENGSYFSLLPLNDGSIFSVQKS

SEQ ID NO: 46504 - protein, 1176 aa, Zea Mays
MDWSIDLDRGLRSRQPATRVRAVDAAGPRLRQLCTCATAPAPVASAYGVLPGEARVFAETMLLRLATEFRSADVAMRVRIIKTLLNSATGPGALAGARITEPDQLLRRVKVVYDTGNKRDRALALRMFGCFADIAKDSVHVKAAIFAASCICHLSDDFSRIILEVFRRLICSQTSEPQVIMSAAKAFWKLGSTLAVIHKVHEVGKQMVLGTLEDVFKSEMLFSLSRLSSKSIILFSDQVDLLLLFMDHNSSSMKSVALKCMCFMFRRNICHFPVIRNVFGRLFPLIDDEDFPLDCKSDVLRILQKMLCSKTSSNHRANGSELSKLLLAAESSLDSSCLEVQGTALEILVEIFCILKEVGSDNISVLKGSSFAHAEWQGITNNVPLTEDNSMNGPLCKIIAMIVNHIISLANEVASRDICISSAVDKAYKTPFRLMLKLVSCYPSAAAVTLHILKSLVKELFLINGSDYSEVSVTSVEPFQTSVALKELSTSDDNVQLLATCIKASCIGTLIGNGKLDFLKIDCKNRKSIMHDLICCMLKFANACHEVLCETSGARYNLHDSIKGLIKYVRQDAPQHWSTYESFHLIMCACVTRNTCKINRGNQESGDSKEHHNTLFTPSVWITQELCALRMTKMLIKKQKYWEAYRSSMYCCCKGLWFTASFVFRKLADAFEAGSFSFWLKSLLLFSAGEIEMKLLFFSSATIKLVGELKMEGDLSEDLYCNETDADSTLSRSSELHGFQAKISDICGRTLLANNALASSASSDHDFVFQRWFISLRSSFLEVLTKVLDILNAHSSYEARGDHLSLSGEFVKDQVLALDHCSLRLSDLAKSYDLLAASHMDLERHGSSSIARLAFMCSLLAFCTAYSVYFSKACNYVEYCKLPKRFSHASILQDLYGRVDGSDWQVVSQLRQFMSTSFDELDSLQSSTWISGSCNLEKDLYSLCHFAVASLLGVCDSAEAEKIQNGEDCLSALQGGLQVLSSILQKYLELPFVVPKYFFRVKPCLGAELYIFDSNHLNEKGMSIEPGFLLSLTLCMKWKCVLERSTIRIVKLYCILAASLETCLDTAGTRSKQFDQHRTAEMVELNSKLLQYIKNDLRKARNEKKNSHSVMEMVTAFACFEPTDSGQGFSGCLLDVSSFPEGSYQIKWQACCVDENGSYFSLLPLNDGSIFSVQKS

SEQ ID NO: 46505 - protein, 51 aa, Zea Mays
MFAKTTDANADWLLPNNKPQQAKRDDNWRRRKKDALINNVWIPGSGVDKGL

SEQ ID NO: 46506 - protein, 128 aa, Zea Mays
MNKTGARLRLAPNKRLTRRRSRVLRMATDSEASKAAEVVVDWHKQDSKRMLHAVYRVGDLDRTIKYYTECFGMKLLRKRDVPDEKYTNAFLGFGPENTNFAVELTNFAEVSRPTCVAPLPGSVLAVPL

SEQ ID NO: 46507 - protein, 109 aa, Zea Mays
MKRWIRGRNFIILFKRQKEIIRVFCRCRPLSKNEVSSGLNANGGTTKKTFKFDRVFTPKDDQGVGVSGGPTIRSEGVSGLRTRKAKRKGRTAVSPPAPHQTATRDVPMS

SEQ ID NO: 46508 - protein, 324 aa, Zea Mays
MMSIVVLLGLVITSIYWGVNKFVLNDPSLPKSDRKKKKEKPKLGMKESLKVLLSSRYVRDLATLVVAYGISINLVEVTWKSKLKAQFPSPNEYSSFMGDFSTATGIATFTMMLLGRIILRKFGWGVAAMITPTVLLLTGVGFFSLILFGQPLTPMLATMGMTPLLAAVYVGAMQNIFSKSAKYSLFDPCKEMAYIPLDEDMKVKGKAAIDVVCNPLGKSGGALIQQFMILTFGSLANSTPYLGGILLVIVLAWLGAASSLDKQFSSLAKEDLKKDKAAREKVEPSLLKAPAEGSDDVLAEQTNGSVTPQATGTESSPSNSSPIQ

SEQ ID NO: 46509 - protein, 331 aa, Zea Mays
MVKPPLPRRRTACVTGAGGYIASWLVKLLLSRGYTVHGTVRDLSDNKTAHLKRLENASENLKLFKADVLDYDAMAGAVAGCQGVFHVATPVPSGKITDPEREMLGPAVTGTINALKAASAANARRVVVVSSMVAVEINPKDWPRDKIKDENCWSDKEFCRNEENWYSVAKISSEEAALEYAKQTGLDVVTVNPAVVFGPLLQPTLNTSCQFLVYFLKGGPDRMRDKLWHIVDVRDTADALLLVYETPQASGRHICAPHFISARDLLELLKTMESIYDMEHPAPMTSDKLKKLGWKVRPLKETIAETVEFCQHAGFLEDVEGFRFPPLYNII

SEQ ID NO: 46510 - protein, 497 aa, Zea Mays
MEAHQGARDGGGAADGRRHGEQRGRPQCARSGTDIRAGRETGRSGAGFREDIRGRRFQVHPAVLPGRHSAPHRPAQRRRRALQLLLQGASERGAKRIRVHVLTDGRDVADGSSVRFVEMLEEDLARLREKGVDARIASGGGRMYVTMDRYENDWQVVKRGWDAHVLGEAPHRFRSALEALRKLREEDPKKASDQYLPPFVVVDGSGEPVGPVRDGDAVVTFNFRADRMVMLAKALEYEGFDRFDRVRFPRTRYAGMLQYDGELKLPRHYLVAPPEIQRTSGEYLARNGVRTYACSETVKFGHVTFFWNGNRSGYFDQNLEKYEEIPSDAGIPFNVQPKMKALEIAQKARDAILSQKFDQVRVNIANGDMVGHTGDMEATIVGCKAADEAVKIILDAVEQVGGVFVVTADHGNAEDMAKRDKSGEPLRDKDGKVQTLTSHTLNPVPIAIGGPGLAPGVRFRTDLASAGLANVAATVMNLHGFQAPDHYEPTLIQVVDE

SEQ ID NO: 46511 - protein, 565 aa, Zea Mays
MATRPAAEEKPWELAAHPRLPKGRTVAVVVLDGWGEAAPDPFNCIHVADTPTLDALKKAAPERWRLIKAHGTAVGLPTDDDMGNSEVGHNALGAGQIYAQGAKLVDLALGSGKIYEGEGFKYIQQSFQDGTLHLIGLLSDGGVHSRFDQLQLLLQGASERGAKRIRVHVLTDGRDVADGSSVRFVEMLEEDLARLREKGVDARIASGGGRMYVTMDRYENDWQVVKRGWDAHVLGEAPHRFRSALEALRKLREEDPKKASDQYLPPFVVVDGSGEPVGPVRDGDAVVTFNFRADRMVMLAKALEYEGFDRFDRVRFPRTRYAGMLQYDGELKLPRHYLVAPPEIQRTSGEYLARNGVRTYACSETVKFGHVTFFWNGNRSGYFDQNLEKYEEIPSDAGIPFNVQPKMKALEIAQKARDAILSQKFDQVRVNIANGDMVGHTGDMEATIVGCKAADEAVKIILDAVEQVGGVFVVTADHGNAEDMAKRDKSGEPLRDKDGKVQTLTSHTLNPVPIAIGGPGLAPGVRFRTDLASAGLANVAATVMNLHGFQAPDHYEPTLIQVVDE

SEQ ID NO: 46512 - protein, 155 aa, Zea Mays
MEVDDGSRATPPLDAVAAAFKSQVMELQDLVLARSMFPATALPDLANVDALVTAMESQVETISRRLQEELDAIPKAKKLVQRSLKEEEKLQHMLANLPSGMRKNDFANQHEQSSSRMLPHFNSSFTEANECELKIKDEPVAAPRVHEGKTDFGKG

SEQ ID NO: 46513 - protein, 847 aa, Zea Mays
MWWMTQRMGSAGRDIPSETQFLLVEVSGGGEQPAVVYTVFLPVLEGSFRAVLQGNADDELEICLESGDPDVESFQGSHLVFVGAGSDPFEVITSSVKAVERHLQTFSHREKKKMPDILNWFGWCTWDAFYTNVTAQGVKQGLQSLEKGGVSPRFVIIDDGWQSVAMDPVGIACLSDNSANFANRLTHIRENHKFQKNGREGHREDDPAKGLAHVVNEIKGKHQLKYVYVWHAITGYWGGVRPGAAGMEHYGSKMQRPVPSPGVQKNERCEALDSMTANGLGLVNLDRAFSFYDELHSYLASAGIDGVKVDVQNVLETLGAGHGGRVMLARKYQQALEASVARNFPDNGIISCMSHSTDNLYSSKRSAVIRASDDFWPRDPASHTIHVASVAYNTVFLGEFMQPDWDMFHSVHPMAEYHAAARAVGGCAIYVSDKPGSHDFNLLKKLVLPDGSILRAKLPGRPTRDCLFSDPARDGKSVLKIWNLNEHSGVVGAFNCQGAGWCRVAKKNLIHDQQPGTVSGVIRAQDVEHLARVADHGWNGDVVVGGGVPAEERLAACDVEIARVRGVHRRPSQAPAKRCLFAAIGLLGMFNSGGAMRELRFGGEDADVELKVRGSGTVGAYSSTKPTCVAVDSKAVGFSYDGTCGLISFELGIPDQEMYLWTMDPYGLRAPGSVTPSEPPPLQCSQDMEPERTLRHRWRLQLSRHWLVPGSQEVPHPRPPAQNGEVVYLPKNTLLPVTLRSREYEVFTVVPLKHLPNGVSFAEIGLLGMFNSSGAVRELRFSGEDADVELRVRGSGTVGAYSSTKPRCVAVNSKAVGFSYDGTCGLISFELDIPDQEMYLWTVTVGY

SEQ ID NO: 46514 - protein, 166 aa, Zea Mays
MAPAISKPLLTDLVAQIGKVPSSHIRPVGDRPDLANVDNESGAGIPLIDLKKLNGPERRKVVEAIGKACESDGFFMVTNHGIPAAVVEGMLRVAREFFHLPESERLKCYSDDPNKAIRLSTSFNVRTEKVSNWRDFLRLHCYPLQSFVDQWPSNPPSFRKDLSNRN

SEQ ID NO: 46515 - protein, 532 aa, Zea Mays
MTAPVSLPNELEAVSHSARVELFRDASCNIENEVLASLGNGQDSTAVGATPGFRVGEIRFANGDIYSGTLLGNTPEGSGQYRWSDGCTYDGEWNKGMRHGQGKTEWPSGATYEGEYSGGYVYGEGTYKGPDKIIYKGRWKLNHKHGLGHQTYPNGDMFEGSWIQGEIVGHGKYTWANGDTYVGNMKSGKMSGKGTLTWKNGDSYEGNWIDGMMHGYGIYTWNECGYYIGTWTRGLKDGKGKFFPKGCRVPVNDEMYINNLRNRGVLPDIRRQNHGSRILHSSSVDMGNMKVGMARQSSDVLFKRNSAEQSSLKNVSLERRWSLEVAIEKFIGHESSESSGLESLENLSDSRLPILEREYMQGVLISEVVLDRSFSDSSKKTKRRQKKTVRDTKKPGETIIKGHRSYDLMLSLQLGIRYTVGKITPIQKREVRASDFGPRASFWMNFPKEGSRLTPSHSAEDFKWKDYCPMVFRNLREMFKIDAADYMISICGNSALRQLSSPGKSGSVFFLSQDDRFMIKTLRKSEVQGETF

SEQ ID NO: 46516 - protein, 496 aa, Zea Mays
MINSSVDKLTRSTNFLRFLGQHAMIVDEESPSTAGEEEIEDQKYHFMSLMLNLVNTFLYMVNTYIIVPTADDYSVSLGAASTVCGVVIGSMAVAQIFSSIYFSAWSNKSYFKPLVFSSIVLFLGNICYAMAYDMKSLTVLIIGRLLCGMGSARAVNRRYISDCVPARIRMQASAGFVSASALGMACGPALAGLLQWKFKVYMVTFNQSTLPGWVMAVAWLLYLIWLWFSFKEPNRATEVNEAPQNPASGQTVDIGRLENGIAQPLLKDSVDKQNEDEDEVDDIEETADDSRKPATSIGSAYRLLTPSVKVQLLIYFMLKYAMEILLSESSVITNHYFSWNTSAVAIFLAILGLTVLPVNAVVGTYISNMFEDRQLLMVSQITLLVGIIFSFKVTSTYYVVQYVVSALVTFVSAEVLEGVNLSLLSSVMSSRLSRGTYNGGLLSTEAGTLARVVADCTITAAGYLGVGKLLNVTLLPSLVICVASIACTFLTYNSLF

SEQ ID NO: 46517 - protein, 698 aa, Zea Mays
MVNFGKKLMADQIPEWKGYYINYKLMKKKVKQYGQQLQQGEKDRRRVLKDFSKMLDDQIEKIVLFLLEQQGLLASRIEKLGKQRAILQEQPDISGIAELREAYREVGINLIKLLKFVDLNATGIRKILKKFDKRFGYRFTDYYVTSRSNHPYSQLQQVFKHVGVGAVVGALSRNLAELQERQGSYLSIYDQPSSALKDPIIDMINSSVDKLTRSTNFLRFLGQHAMIVDEESPSTAGEEEIEDQKYHFMSLMLNLVNTFLYMVNTYIIVPTADDYSVSLGAASTVCGVVIGSMAVAQIFSSIYFSAWSNKSYFKPLVFSSIVLFLGNICYAMAYDMKSLTVLIIGRLLCGMGSARAVNRRYISDCVPARIRMQASAGFVSASALGMACGPALAGLLQWKFKVYMVTFNQSTLPGWVMAVAWLLYLIWLWFSFKEPNRATEVNEAPQNPASGQTVDIGRLENGIAQPLLKDSVDKQNEDEDEVDDIEETADDSRKPATSIGSAYRLLTPSVKVQLLIYFMLKYAMEILLSESSVITNHYFSWNTSAVAIFLAILGLTVLPVNAVVGTYISNMFEDRQLLMVSQITLLVGIIFSFKVTSTYYVVQYVVSALVTFVSAEVLEGVNLSLLSSVMSSRLSRGTYNGGLLSTEAGTLARVVADCTITAAGYLGVGKLLNVTLLPSLVICVASIACTFLTYNSLF

SEQ ID NO: 46518 - protein, 262 aa, Zea Mays
MQPRYGEARQPLPGRYALYHFGTSGAAVAAATAVTHPFDVIKVRLQMQLAGQRGNLVGMGTIFTQMVEREGARSLYLGLAPALARAVVYGGLRFGLYEPCKHVCSYAFGSTNFAFKFASGVIAGGLATALTNPMEVLKVRLQMSKSSTSTIREMRKVIAHEGFKALWKGVGPAMTRAGCLTASQMATYDEAKQALMKWTPLEEGFQLHLISSFIAGTAGTLVTAPVDMIKTRLMLQQESIGARVYRNGFHCASQVLILIFHF

SEQ ID NO: 46519 - protein, 165 aa, Zea Mays
MMRKHRRQVLFSGIITAVGISLHNLPEGMAVFLGSVKGLHVGLNLAVAIALHNIPEGVAVALPIYFATKSKKKAFYTAAFSGLAEPLGVVAVALLFPSSLNPDILEGLLGSVGGVMAFLTLHEMLPLAFDYCGQKQAVKAVFVGMACMSASLYFLEVSLPKEISL

SEQ ID NO: 46520 - protein, 341 aa, Zea Mays
MEDDPSRQVRVRFVTKLPPPLRTPPAAIAVPADLTRMGLSEIVNSLLAAAEPDHQSQPFDFIVQGELVRLPLQEFLLAKGISAERVLELEYVRAVAPRKQEEPCPHDDWVSAVDGSNPGFILSGCYDGLARLWKDAAVCTQILEGHNDAITSTRFINKGSETEGSLHVVTGSKDRSLRLYKCDTSVIMDYPKRVGAYKILRGHTASVKSISADPSGDMLCSGSWDGTIKLWAVEGSDDDDAVSLKKRRMNSDSSGPEESQLEGSATSTLLGHTQGVTAVTWPERKTIYSASWDHSVRQWDVQTVKETWNMFCGKALNCLDCGGEGSSLIAAGGSDPVLREH

SEQ ID NO: 46521 - protein, 53 aa, Zea Mays
MASEEMTATEVAALLDLKPHPEGGFYTETFRDGSITLTTSQLPPHFALGGDPS

SEQ ID NO: 46522 - protein, 311 aa, Zea Mays
MDGASSSLPLPQPPPQVYLRRPVPPPGPPLQAAPRVQPFSAPAPIPIFSSKPRAAVRSPIPPPHLPAAVTSAPAPLAATAEAPSRPPPASTDQPPQQQTGAMPPPPAPAPAGKGGPKPKAQLNEQNSGEYSQSENNVVETAQGHDKETTPGPVKATKRIKKLKASKHNLNNTNSGAIEGDADPSLSSLNHCRYDSSLSLLTKKFINLLQGAEDGALDLNKAAETLEVQKRRIYDITNVLEGVHLIEKGLKNMVRWKGFDISKPKDIERQISSLKEELESLYDEELRLDDEIREAKEKLQALALDGDKRKKI

SEQ ID NO: 46523 - protein, 259 aa, Zea Mays
MDGASSSLPLPQPPPQVYLRRPVPPPGPPLQAAPRVQPFSAPAPIPIFSSKPRAAVRSPIPPPHLPAAVTSAPAPLAATAEAPSRPPPASTDQPPQQQTGAMPPPPAPAPAGKGGPKPKAQLNEQNSGEYSQSENNVVETAQGHDKETTPGPVKATKRIKKLKASKHNLNNTNSGAIEGDADPSLSSLNHCRYDSSLSLLTKKFINLLQGAEDGALDLNKAAETLEVQKRRIYDITNVLEGVHLIEKGLKNMVRWNLRI

SEQ ID NO: 46524 - protein, 75 aa, Zea Mays
MVDGNGLLHPRGFGLACHLGVLADIPTVGVGKNLHHVDGLNQSEVRRLLGSKENCNRELVLLTGQSGTKWGMPRR

SEQ ID NO: 46525 - protein, 1086 aa, Zea Mays
MASDSDVDEDELLQIALQEQAARDLSHQRPPAANKPVVNLVRPPAPNARGGNARAGGAAAKARQPSRGGDEDDDSEVELLSISSGDEDDNPRARGPPPPRGGGGGRAGARRAASRDDGDFDDEEPRSWKRVDEAELARRVREMREAKVAPNIQELDQKAAAAAAAAARKALTSVQTLPKGVEVLDPLGLGVIDNKSLRLITDASVSSPISREKSQGLDPNMRDKVIYSSPNFDPKVFLSWVHKDTSAADLEAGALTLKTDLKGRTQQKKQLVKENFDCFVSCKTTIDDIESKLRQIEEDPEGAGTAHLYSVTQKISGVANRAFEPLFERQAQAEKIRSVQGMLQRFRTLFNLPSAIRGNIRKGEYDLAVREYQKAKSIVLPSHVGILKRVLEEVEKVMQEFRGMLYKSMEDPHLDLAEIENIVRLLLELEPETDPVWHYLNIQNSRIHGLFEKCTQDHDSRMEVLQNKIREKVLSDSKWRQLQQDSNKSLSTNFMAEEADSLRATYIRRLTSVLIQHVPAFWRLALSVFSGKFAKAASGNVVSDFDVNAKPTANKNDEKGGEVKYTNHTLDEVGSMVQATISAFDTKVQSTFRDFEECNILCPYMSDTIKEIAKACQTLEGKDSSPTAVKMLRTLHFEMTKLYILRLCSWMRATTKEISKDETWVTLSTLERNKSQYAISCLPLEFRDITVSAMDRIDTMILNLMSETAKSYDISQPLQEINESVRLAFLNSFLDFAGYLERFGGELTENRPNKENNYVSNGYINGTRETFVNTDGDLHKKLLVVLSNIGYCKAELSEELYSKYRHIWSPVRNNEERSSDMRDLRTSFSALEEKVLDQYTFAKSNLIRSAAQSYLLDSGIYWGAAPMVKGIRDATLDLLHILVAVHAEVYSGARPLLEKTMKILVEGLVDIFLSVFHENKTKDIRLLDANGFCQLMLELEYFETVLHTYFSPEAQQAMKSLQENLLEKACESVAEAMENPGHQRRPTRGSEDTASDDRQPSVSPDDLLVLAQQCSSDLLQGELERTRLNIACFMESTLQPTAAPAGPKPAAHSSYQAQHAPVQTSSPSFRRQQTGTSSPVVSRRRR

SEQ ID NO: 46526 - protein, 760 aa, Zea Mays
MLQRFRTLFNLPSAIRGNIRKGEYDLAVREYQKAKSIVLPSHVGILKRVLEEVEKVMQEFRGMLYKSMEDPHLDLAEIENIVRLLLELEPETDPVWHYLNIQNSRIHGLFEKCTQDHDSRMEVLQNKIREKVLSDSKWRQLQQDSNKSLEVDSTIGDSPRVDQLSTNFMAEEADSLRATYIRRLTSVLIQHVPAFWRLALSVFSGKFAKAASGNVVSDFDVNAKPTANKNDEKGGEVKYTNHTLDEVGSMVQATISAFDTKVQSTFRDFEECNILCPYMSDTIKEIAKACQTLEGKDSSPTAVKMLRTLHFEMTKLYILRLCSWMRATTKEISKDETWVTLSTLERNKSQYAISCLPLEFRDITVSAMDRIDTMILNLMSETAKSYDISQPLQEINESVRLAFLNSFLDFAGYLERFGGELTENRPNKENNYVSNGYINGTRETFVNTDGDLHKKLLVVLSNIGYCKAELSEELYSKYRHIWSPVRNNEERSSDMRDLRTSFSALEEKVLDQYTFAKSNLIRSAAQSYLLDSGIYWGAAPMVKGIRDATLDLLHILVAVHAEVYSGARPLLEKTMKILVEGLVDIFLSVFHENKTKDIRLLDANGFCQLMLELEYFETVLHTYFSPEAQQAMKSLQENLLEKACESVAEAMENPGHQRRPTRGSEDTASDDRQPSVSPDDLLVLAQQCSSDLLQGELERTRLNIACFMESTLQPTAAPAGPKPAAHSSYQAQHAPVQTSSPSFRRQQTGTSSPVVSRRRR

SEQ ID NO: 46527 - protein, 461 aa, Zea Mays
MGGCFSQEEHRLQSRPAEAAGPDGLQKSKSDSKATASVLAPPKAVVDLQVEGYGNVNIFTYDELSAATKNFRPDQILGEGGFGVVYKGVIDENVRAGFPSRQVAVKELNPEGFQGDKEWLAEVNYLGQLSHPNLVELIGYCCEGSHRLLVYEYMACGSLEKHLFRRVCLNMPWSTRMKIALGAARGLEYLHRAERSIIYRDFKTSNILLDADYNAKLSDFGLARTGPSGDQTHVSTRVMGTYGYAAPEYVMTARSDVYGFGVVLLEMIIGRRAVDDSRPSREHNLVDWARPLLVHNRKLFRIIDPRMEGQYSTKAATEVASLAYRCLSQNPKGRPTMSQVVETFEAVQNMPECQDILLQNGITGAVTLYEVPKEPADRVELEKAKQEPAVKTAAIPPVNGKPAPQSRRTRPGNGRSKSEPSLECKMYIPSPDSDEQQLGLEALASPNGSMKDHPDEDLYKI

SEQ ID NO: 46528 - protein, 229 aa, Zea Mays
MKYSTFCYAPRNPNITPLATASFGDMADSSIFTFPRIHVKDPYQRLGISREASEEEIRAARIYLISKYGGHSQALMQLSVPMIGLSCRVSLIGKKPKTNLKKKIRELSQSRAVKAIQGRFQTPRSKVIWQTAITFVLLGVLTLAFPTEEGPTLQVAISCAANIYFIYQRVKSGWRAFFYGLGSFFASLFLGTFLMVSLIPPVLPGPRNLEVSTACVTYVLLFVSPTFLK

SEQ ID NO: 46529 - protein, 340 aa, Zea Mays
MASAVAASTATRFLPRLPDPWWTRRARAALPPPPLTWRPLPFTVSAASSRPGEAEGGRRGRMRRRRARRAEQEEGVSLSSEKETVNSTPRAQPKKGAEPVAVSSTSGKGSAIRRVTLVILAAVLFGVSIALKDGAEKASEYFAGYLLEQSLSVDNLFVFVLVFKYFKVPNEYQNRVLSYGIAGAVVFRAVMIILGTATIQKFEAVNLLLALILLFTSYKLFAEEEEESDLSDNFIVKTCQKFIPVTDYYDDNRFFTNQDGVWKATPLLLTLAVIELSDIAFAIDSIPAVFGVTRDPLIILSSNIFAISGLRSLYVLVSESMGELEYLQVIIYQQKLRLQL

SEQ ID NO: 46530 - protein, 117 aa, Zea Mays
MIKEEKVEAAIISIRSFSLPSVHPRPCYRHLRSLPILQYIFSTARAVGKAKGGHVVLSSAPRHPRRWWRRLLQSPFVSLRCSSTRLVVVSTVGPGMEVVNSGRVGALYGSALLLVVQ

SEQ ID NO: 46531 - protein, 264 aa, Zea Mays
MDRYQRVEKPRNDTPISQNEIRITTQGRMRNYISYGMSLLEENGHDEISIKAMGQAINKTVMVVELIKRRVGGLHQNSATESVDITDTWEPLEEGLLPLETTRHVSMITVTLSKKPLDTSSPGYQPPIPAEEVKPAFDYDHEDSYPTGRGRGRGGGRRGRGRGICMSNGPSPPAYGYNEEWGEEGDYYNRGRGRGRSRGRGRVRGGYYGGGRRGGYSYGYGARGGYYEEQDEYYDDPEEYAPPGRRGRGRGRRGMPWRGRGVYY

SEQ ID NO: 46532 - protein, 263 aa, Zea Mays
MLIMAENSFDYIEGFVIINRTGILNNWRASFKPQDPVQASHFQSDGRVLYCLELTKNFNSGDTDTMEQEVAVLLSRLRFIQSTLFHTDVTYLEFLDRVHTSELKLRAQSLWEVPHPWLNLLIPRSSIRRFATEVFGRILKDSNNGPILLYPVNKSKWDNKTSVVIPDEEIFYLVGFLSSAPSLSGHGSIAHAMSLNSQIVEFCEEADIGMKQYLAHYTTQEQWKTHFGARWETFERRKHRYDPLAILAPGQRIFPKASLPLSL

SEQ ID NO: 46533 - protein, 283 aa, Zea Mays
MVRWIRVLYSDFESFTEDQEMLIMAENSFDYIEGFVIINRTGILNNWRASFKPQDPVQASHFQSDGRVLYCLELTKNFNSGDTDTMEQEVAVLLSRLRFIQSTLFHTDVTYLEFLDRVHTSELKLRAQSLWEVPHPWLNLLIPRSSIRRFATEVFGRILKDSNNGPILLYPVNKSKWDNKTSVVIPDEEIFYLVGFLSSAPSLSGHGSIAHAMSLNSQIVEFCEEADIGMKQYLAHYTTQEQWKTHFGARWETFERRKHRYDPLAILAPGQRIFPKASLPLSL

SEQ ID NO: 46534 - protein, 83 aa, Zea Mays
MAAATCGPSRRVSTPHSPPSPPSSSPLCLKALSSLQATVTNFAANFISSGLAGCFLFDEPLPSKVIREFSVFIWCILRISTEK

SEQ ID NO: 46535 - protein, 726 aa, Zea Mays
MKPKSLPFIAFEHKRDAYGFAVRPQHLQRYKEYAGIYKEEEEERSDRWKNFLERQPESSGQDAGGNAKDDGSESLHEKTVVGPRKIEIWTPIRPSLSNIEQMMSLRIEKKQSSASKQQAKDVIHPVKVEEGKLSEDSDDEFYDVDKVDPSQEVQPSDTGNADVGSRSQEENYISKEELECLVHGGLPMALRGEAMNFFAGLLLLLMPEENAFWTLVGIMDDYFDGYFSEEMIESQVDQLVLEELVREKFPKLANHLDYLGLQVAWVTGPWFLSIFTNVLPWESVLRVWDVLLFDGNRVMLFRTALALLEFYGPALVTTKDAGDAVTLLQSLAGSTFDSSQLVLTARMGYQSVNETILQELSNKHRPPVISAMEERAKGLGVWTDTNGLASKLYNFKRDPEPLVSLSDSTDQLSDVGDGDTNQESDLGNMDDEYGGVIVNSEIDSLPDPKDQVAWLKLELCRLIEERRSAVLRADELETALMEMVKQDNRRQLSAKVEQFEQEISELRQALSDKQEQEQAMFQVLMRVEQELKIAEEARISAEQDAAAQRYAANVLQEKYEEAMASLAQMENRAVMAETMLEATLQYQSSQQKAMSPCPSPRPSMLDASPSQSSQNSSQEFQPRRKNLLGPFSLSWRDKNKEKPNNADDSTNTKSTNNDEMVETSNTNDEKHRETLDLNSEQRAESPKADVKMRAETPEKDNDLPGVQLVTDDLNGHHEQMQEIKLD

SEQ ID NO: 46536 - protein, 143 aa, Zea Mays
MIIPDHQMLEAVERITSQLSDDPIRPLVMWNPRLVSGDVGVGFNVRNLRRNFLSTFTTVYSMRPLPTGAVFRCFPGQWKVFYDDPNRPNRYLLARELTSRPDATDIERIFGGADEQSEEAPSLMNNVMGVFSSVSRFMRVISK

SEQ ID NO: 46537 - protein, 237 aa, Zea Mays
MEPRFYALSKELHSSASPSHVFITHGRGAKQWRPRRRCSRPSALALPISGAASRPYISYSPSTRQRGGCAFAGRRHLVRPSSASSTPPTPRRRPRRRGARRMVGWRSPWRRTTGRVHCTLNSCVIENTKDADVVKRPSLWFSCLPSDLEGAIRQSGKASADFVNSGGMRAIAELLIPQLEFLNEEGAQAELWALSKIFLDTLVQETGQKVTAIFPDAGAAALLKHQWKDAQFKCARY

SEQ ID NO: 46538 - protein, 188 aa, Zea Mays
MPRRNPPPPREQSNSFLPHGSSKAGDAPLGAFWATQHAQGAQAVVNRNPLFDGESIKAPLSSKQNQSWVDTSISIPGNRHDHSGQMSLTSKAQNNSLSNNGFRGLSDTEIQNSGKSRAQQPQPEPKCEKDPFNSFVADFDTHNLNIAVGKASELELEVSNLKEQLKKTTLEKAEMTAKHLLIVRRSKS

SEQ ID NO: 46539 - protein, 211 aa, Zea Mays
MTRAGTKVMVQHVLTGAHKRTPVMPRRNPPPPREQSNSFLPHGSSKAGDAPLGAFWATQHAQGAQAVVNRNPLFDGESIKAPLSSKQNQSWVDTSISIPGNRHDHSGQMSLTSKAQNNSLSNNGFRGLSDTEIQNSGKSRAQQPQPEPKCEKDPFNSFVADFDTHNLNIAVGKASELELEVSNLKEQLKKTTLEKAEMTAKHLLIVRRSKS

SEQ ID NO: 46540 - protein, 240 aa, Zea Mays
MKLIKHPNVVQLHEVMASKTKIYMVLEFVDGGELFDKIVNSGRLGEDEARIYFHQLINAVDYCHSRGVYHRDLKPENLLLDSNGALKVSDFGLSAFAPQTNEDGLLHTTCGTPNYVAPEVLADKGYDGMAADVWSCGIILFVLMAGYLPFDDANLMRLYKLICQAYFSCPPWFSSGAKKFIKRILDPNPDTRITIAEILEDEWFKKDYKPPRFEQGEDVSLDDIDAAFNDSERKERNRNP

SEQ ID NO: 46541 - protein, 251 aa, Zea Mays
MAADVWSCGIILFVLMAGYLPFDDANLMRLYKLICQAYFSCPPWFSSGAKKFIKRILDPNPDTRITIAEILEDEWFKKDYKPPRFEQGEDVSLDDIDAAFNDSEDRLVAEKREKPESMNAFALISRSQGFNLGNLFEKEMMGMVKRETSFTSQCTAQEIMTKIEDACGPLGFNVRKQNYKMKLKGDKSGRKGHLSVATEVFEVAPSLHMVELRKTGGDTLEFHSFYKNFSSELKDIVWKAESDANNKQTNK

SEQ ID NO: 46542 - protein, 298 aa, Zea Mays
MEEKLKAPKATVGGWTLVLTGQTGVGKSATVRAIADDLGADLCEWTTPVPTLWAEHVHANSGLRYTSKLEEFETFVEKIRKYSMLCPTNTRSQRNLIIILIDDIPVTSGNVAFARLGKCLTGLIRSTQVPTVISLTHYHKSESNDTAMWNSEDLESLLQDAGAHKIGFNPVTTNSIKKILVRVCKEESCHASEELLHQIATSSGGDIRHAIMSLQYYCLDPRRHSSALATSSSSTVPKNLDSLVPGHESYGPSSALPSPCGRDETLSLFHALGKFLHNKRETNSDADIDLDSCPLKET

SEQ ID NO: 46543 - protein, 317 aa, Zea Mays
MVLEEHRRSFITAKDFDFLSRHGINTVRIPVGWWITQDPYPPSPFVGGSLAALDLAFSWAQSYGLKCIIDLHAAPGSQNGMEHSASRDGSVAWPSPEYISQTLEVIDFLATRYGGHPSLLGIELLNEPSAATVTLDVLVSYYMRGYQIVRNHSSTAYVILCQRIGNADPIELFQAGIGLSNVVVDLHYYNLFNPYFATMNSSQNIDFIYKMRAPQLQDLKGMNGPLVFIGEWVNEWDVQNASQYEYQKFGSAQLDVYANATFGWSYWTLKNDMIHWDFEWNIKNKYLLFSGSSMLKTPSFLLLLALGWGIHLIIMPR

SEQ ID NO: 46544 - protein, 423 aa, Zea Mays
MATRRHILLLAAAFVSLLALEAVEGLEEGPRGRRLLVLLDDLAVRSSHSAFFGSLQARGFDLEFRLADDPKLSLHRYGFGGSVDQNAVLEFIDAGLDMILAADSSASDLIRGIATECGVDFDEDPEAMVIDHINYAAMDVEGDHTLIVGDDLIQSDVILGSKKIEAPVLFRGIGHTANPSNSLVLKVLSASPSAYSANPKTKLSLPPSLTGSAISLVSVMQARNNARVLLSGSLDLFSNRFLKSGVQKAGSKTRYERAGNEQFVTETSKWVFHERGHLKAVNVKHHKVGETNEPGMYRINDDLEYSVEIYEWSGTSWKPYVADDVQLQFFMMSPYVLKTMSNDNKGLYSTSFKVPDVYGVFQFKVEYQRLGYTGLSFTKQIPVRPYRHNEYERFITSAYPYYTASFSTMCAFFIFSLVYLYHK

SEQ ID NO: 46545 - protein, 194 aa, Zea Mays
MDSSSVGEPFYVVRKGDVIGIYKTLSECQAQVSNSVRDPSVTVFKGYSLRKDTEEYLAARGLRNALYAIDATDARDELFDDLVPCPFQQPDGAASSTLKRSQEIEIGPSKKHPKVDEQVPLPDSHLSCILEFDGASKGNPGKAGAGAIIRQVDGSVPRKGSSIFVLKATLSLFVTRSKISGVLRMIIWLASARK

SEQ ID NO: 46546 - protein, 164 aa, Zea Mays
MGMAAKEHFVLVHGEGHGAWCWFKLRWLLEGAGYHVTCIDLAGGGVDPTDPNTIRSFQQYDKPLIDLISTLPEGEKVILIGHGAGGLSVIHAMHEFVDRISQAFFVAATMLPFGFQADEDKKDGLPTLPENEIELTLGAGADDPPTTISLRPEFQRDRLSQQSH

SEQ ID NO: 46547 - protein, 374 aa, Zea Mays
MGEYCPSPQGDSALAAPPLTLPSSSPATAVRPSYGSCDRSYVKQVFDNLHGSISVDPLALQFVDTEEFQRLRDLKQLGLTYLVYPGAVHTRFEHSLGVYSLAGKAINNLKTYQGVELGIDPVDMQTVKLAGLLHDIGHGPFSHLFEHEFLPRVDPGSSWSHEKMSVLLLDSIVDKHAIDIENDYLKMVKDMITASSDPASTTSAKEKHFLYDIVANGRNGIDVDKFDYIGRDCRACGLGCNFQYWRLMEGMRVMGDEICYPAKDYLSIHKLFSTRADLHRTVYTHAKVKAVELMLVDALVEANDYLGISLHAHDPEDFWKLDDTIIKTIETAPNNELKKAKEIIQRIRRRELYKMLLLRIIRRKGGLIFREAYD

SEQ ID NO: 46548 - protein, 321 aa, Zea Mays
MGAVGAVGVAALGTTGPAAVAGLTAAAIGASVAGGLTAEKGVAKDGLTAADHLGEDFYKVLLQQEPFRSTTVRSIVESYRWSPFVPITLDTSMLTVLLLLSKYRLRNVPVIEPEKPIIRNFITQTGVVKGLQQCKGRDWFDYISALPLSDLGLPFMSIDEVITVNSDDLILEAFKCMKDNKIGGVPVVEGPKRKLVGSVSIRDIRFLLLRPNLFSNFRQLTVIEFMKTLGSTLPDSESNCLVKPPPTCTPDASLGSVIDSIASRITHRIYVVDDDLEVVGVVTLRDVISCFIHEPPGYCDNYLASAMEKLEGKGVRSVEKI

SEQ ID NO: 46549 - protein, 150 aa, Zea Mays
MLLSAFLGDCLFSYPPPPLLPATTAAPRPSTRLPVPFPARLRPASLVARRLTAEAGEALSALSAAEGDDEYEAELQEEGFPSWAGGGEEEDYDHDPEIGDIMGDYFDDPKKGQTRMEDRIRKKRHKIVQTKTGSPNPMKVVFNNLCDHGI

SEQ ID NO: 46550 - protein, 210 aa, Zea Mays
MLLSAFLGDCLFSYPPPPLLPATTAAPRPSTRLPVPFPARLRPASLVARRLTAEAGEALSALSAAEGDDEYEAELQEEGFPSWAGGGEEEDYDHDPEIGDIMGDYFDDPKKGQTRMEDRIRKKRHKIVQTKTGSPNPMKVVFNKFDFSNSYIWFEFYNVLLPKDVTLISDSLRSWHIVGRLGGCNSMNMQELTSLRRPFTTLVILRFKII

SEQ ID NO: 46551 - protein, 382 aa, Zea Mays
MECHRFGLFATSTAQSNESTATEGAIHGVPLIEKITFHLVRLEDGVILDEKAFCNDFINLAHSIGAYMYEDLLCIVSLRYQTIHILQIRDSGNLVEVRNIGAFCREDDELFLHSHIQTGYGGSFLPGIKQRLLSYIFCKTWNEVPDQTLRVQHLKKKFYFHFQDYVDLIIWKVQFLDRHHLFVKFGSVDGGVSRSTDQNLAFFAVYNMETTDIVSLHQNSSEDIYALFEQFYDHFHANPQASSHGKFISSHSNDIHALDQLRVIKNKASSSSQFVKKMMTSLPYTCQSQSPSPYFDLSLFRYDEKLISAIDRHRHCTEHPIKFMSVRQNVVKFKIKPGSDSGASDSRAKRISSFLFHPFFPLALSIQQTYMQPTVVNIHFRR

SEQ ID NO: 46552 - protein, 386 aa, Zea Mays
MSMAEEGSEAEEGSEAEALEKDGSKASSPSGPASRLVSSNAAGVGSLEVGAATDTSNASRQGLDLGKKGPGAMSMAEEGSEAEEGSEAEALEKDGSKASSPSGPASRLVSSNAAGVGSLEVGAAADTSNASRQGLDLGKKGPGAMSMAEEGSEAEEGSEAEALEKDGSKASSPSGPSGLEDEELQVQDAVASGSKRSKDSAAAATRSANVSSPSVVHSHPAILPAPAQQIPEVKQAVCIPYGFHRLKSLEYSKLVSQCLNTEWTATIGQSEETEELSKITLENKDIQLDINIREESRSSSQQGNFDTEGTSSSEAFLLGTVASEKMLEKLKHKSGRCEPALEKAIVELEHGINGLKYFVCLDPRLQEDKGDTTLVHACCHNGQKKI

SEQ ID NO: 46553 - protein, 51 aa, Zea Mays
MNVIVETNALISLHCFFSGRTWPDDMIKLLACVVVYTSISFCNHIMHVPVS

SEQ ID NO: 46554 - protein, 267 aa, Zea Mays
MALSSSGHPATTRLLFSLLLVGSAAGLPERAAIDRVNRRGPSLGLVMSYVDEATALQASGYFQPWRALPFVDLYGRRYHIGSIRGVNVIYALTGQRRLNAAVTVQTLIDVFSVSGIVHYGTAGSCNDSISFGDVSVPRLVAYTGAWTWKVELERCNDTFCLPTAPRIVYGLKGSSADMFLDNAEYRKFLFQEFGVSTMDEESAAVVMTATSPGIPVIVFRGVSDLAGGEPTWSSTSLMNLASINALKVAVEFIAAVGKHSSTASVKR

SEQ ID NO: 46555 - protein, 178 aa, Zea Mays
MSYSYPATTPRQHKPLSAPSQPSSDLNPGAPSLPPRLGTASAAVRRPWSTTPRRAAGSPGWASGASTTGGGAGSARPAAATSSTAAIATTSPRKTGTSWIGTTSNRLSASSVTPSSRCAATAASAWGSTSAQPATSWTMTLTRSSSIATIAASAGACVRVSVPLFLFLVFFSSFHCGH

SEQ ID NO: 46556 - protein, 92 aa, Zea Mays
MSNQCHMFSNLRISVSRMGASILAIPFIYLSVWFHLYKFSVATNIFPVRKMGKEFTGKLILGDRSSFLQINSVSSNLSPLIVNPVIQSKPKP

SEQ ID NO: 46557 - protein, 97 aa, Zea Mays
MEVSALSPRVAFLDHHRSLLTVGNSHLKQRIAALAQDKIFKDAHQEALEKEIQRLRQVYQQQQVKVATTGGADIATAASPSMQARQELLACEGAAIR

SEQ ID NO: 46558 - protein, 1242 aa, Zea Mays
MGHSSRKKKKRGAAGRKAAKDHAAQLEGDETALDEELTALASILGEDFKVTSESPHTRCNICIRPYSDDMGFEDLNISAILIVICFPGYPHKCPKLRILPEKNLSKEDTDRLLSLLIDQANIYSREGRVMIFNLFEAAQEFLSEIAPARVSVSTASFLGLSSTTDDNVEVGFDSDPYLGISYIYNSFDLYSQLYDDTYWSRQGSDLTTDSGRKNIVSQVQSNVRSKRKTIIEKSHISADKVNNAKESSGDKAEQQHATKHGAIREAAPTLHVVDEETEIYGKSLSASNTGNTSDTPERGFSSLNEPEDTDLADESWNEQDCDSDFSSSNALPYVSYMLDDASRNKKRDLVLVHLLRIACASKDSLSSALPTISAELCNIGVLSEWAKDLISDSPAVFGETFSHVFGQQMISSECSLFWRPDNSSSKPNSRYLNDFEELRSLGQGGFGRVALCKNKLDGRQYAVKKIRLKDRSPQLNEKILREVATLSRLQHQHVVRYYQAWIETEYGHHNILNAGGSCTAESSIFSYDEVSLSDAGGGNKQESTYLYIQMEYCPRTLRQDFETYISSFDVDHAWHLFRQIVEGLAHVHSQGILHRDLTPSNIFFDVRNDIKIGDFGLAKFLKLEQLDHDQYLPTEALGVSMDGTGQVGTYFYTAPEVEQKWPQINEKVDMYSLGVIFFELWHPFATAMERHLVLSDLKQKGDPPLSWESKFPRQSVLLRSLLSPSPSNRPSAVEVLQNELPPRMEDEWLNDVLRMIRTPEDTYVYDRVISTIFNEDRFAKMQGQHDSSKKSTGNIDNSELLDTIVEVAKEVFKRHCAKRFQISPLHTLEWNFTKNRGNTVKILTQGGEMLELCYELRTPFVMSIASNQTSSFKRYEISWVHRRAVGHSTPYRFLQGDFDIIGGTSPIPEAEIIKVALDLGTRFYDSKTLVIRLNHGKLAEAICSWAGVSQDQRQNVAEYWPNEADRKSQWSLIRGQLLQDLRLSEEVVEKLHKADQRFCGSADLVLARLRGTLFYDESACKALDDLSALLRCLRVWSVEQPITTIDVLMPPSECYYTNLFFQVYSKEGNHGPGFHEKLLAVGGRYDWLVEQAWDETSKSKPPGAVGVSIALEKFLPNNPSSDLGLRRLLSRVEPSISVLVCSRGGGGLLTERMELVAELWKANIMAQFVPQEDPSLQEQYEYASEHDIKCLAIMTESGLSQTDLVKVRHLDFKKEKDVEREGLIKFLSDAMCSQYKNPTIWS

SEQ ID NO: 46559 - protein, 1250 aa, Zea Mays
MGHSSRKKKKRGAAGRKAAKDHAAQLEGDETALDEELTALASILGEDFKVTSESPHTRCNICIRPYSDDMGFEDLNISAILIVICFPGYPHKCPKLRILPEKNLSKEDTDRLLSLLIDQANIYSREGRVMIFNLFEAAQEFLSEIAPARVSVSTASFLGLSSTTDDNVEVGFDSDPYLGISYIYNSFDLYSQLYDDTYWSRQGSDLTTDSGRKNIVSQVQSNVRSKRKTIIEKSHISADKVNNAKESSGDKAEQQHATKHGAIREAAPTLHVVDEETEIYGKSLSASNTGNTSDTPERGFSSLNEPEDTDLADESWNEQDCDSDFSSSNALPYVSYMLDDASRNKKRDLVLVHLLRIACASKDSLSSALPTISAELCNIGVLSEWAKDLISDSPAVFGETFSHVFGQQMISSECSLFWRPDNSSSKPNSRYLNDFEELRSLGQGGFGRVALCKNKLDGRQYAVKKIRLKDRSPQLNEKILREVATLSRLQHQHVVRYYQAWIETEYGHHNILNAGGSCTAESSIFSYDEVSLSDAGGGNKQESTYLYIQMEYCPRTLRQDFETYISSFDVDHAWHLFRQIVEGLAHVHSQGILHRDLTPSNIFFDVRNDIKIGDFGLAKFLKLEQLDHDQYLPTEALGVSMDGTGQVGTYFYTAPEVEQKWPQINEKVDMYSLGVIFFELWHPFATAMERHLVLSDLKQKGDPPLSWESKFPRQSVLLRSLLSPSPSNRPSAVEVLQNELPPRMEDEWLNDVLRMIRTPEDTYVYDRVISTIFNEDRFAKMQGQHDSSKKSTGNIDNSELLDTIVEVAKEVFKRHCAKRFQISPLHTLEWNFTKNRGNTVKILTQGGEMLELCYELRTPFVMSIASNQTSSFKRYEISWVHRRAVGHSTPYRFLQGDFDIIGGTSPIPEAEIIKVALDLGTRFYDSKTLVIRLNHGKLAEAICSWAGVSQDQRQNVAEFLSSTIVQYWPNEADRKSQWSLIRGQLLQDLRLSEEVVEKLHKADQRFCGSADLVLARLRGTLFYDESACKALDDLSALLRCLRVWSVEQPITTIDVLMPPSECYYTNLFFQVYSKEGNHGPGFHEKLLAVGGRYDWLVEQAWDETSKSKPPGAVGVSIALEKFLPNNPSSDLGLRRLLSRVEPSISVLVCSRGGGGLLTERMELVAELWKANIMAQFVPQEDPSLQEQYEYASEHDIKCLAIMTESGLSQTDLVKVRHLDFKKEKDVEREGLIKFLSDAMCSQYKNPTIWS

SEQ ID NO: 46560 - protein, 195 aa, Zea Mays
MLGTLTKPTDESVLKKLSTRQERKFGEEINQDLLYLISVQRVLHMEDFNEDGMWVVPSEYTSAEPDPLRNFAENIVEEFNSKHAEDVHRIYNIYVESDLQVADVKMIWVDRLGFDLHVHSGDGVFDVRVPFSREVSDEKGVKSSFNMMSHHSWEVERSYAGPEFEKVQFLKKVRGANERAKQYSSTHVQKGGEAS

SEQ ID NO: 46561 - protein, 69 aa, Zea Mays
MMSAQAHVDTIGAKMSDEQMALARSLLSTSRGVQEVPRSGGLMTTIGTLASAVAQSISGPVDISLVWTT

SEQ ID NO: 46562 - protein, 374 aa, Zea Mays
MVDVAALTDDVLAEILLRVPSPRDLARASVSCSSFRRVISNPHFFRRFVALHAAPPLGVFCCYPALGGGVGGSQFQPALPSHPSAPLARALASSADFCFNFLPPPASDWLVRDSRDGRFLLDRVRDGSTAFTEVAICDPLFRSNDSVSENDTTFTVIWMACCRGKLVAFFYSSESQQWCALSPPEHYALSTRRVMGVRLGQRNHAHGCFYWMLALTHRWLVLDTHKMDFSIVDISPILTGRAMMFSNQITTLESSNGWTTIVVSDVFRSDRRCILYFYAFLNFSDRWQLLNRITLPDEWGYRFRGIIGAADGYLFIKLDDPKENLNDQIERYVEYFSLDVKTMQLGSFCRTTLFTVTESYLYCGFPPSLSMPSI

SEQ ID NO: 46563 - protein, 111 aa, Zea Mays
MDLSPSSSAPSAPPVPCEWSGAGLGSAACGLACRVLCAVATCVFAAVGSLVGAVTGSMVGLATESGMLRGAGIGAISGAVFSIEVAESSRDLWHSGDSGVWTLLYMVRYAH

SEQ ID NO: 46564 - protein, 1029 aa, Zea Mays
MDLPSLAVVLRAALSHVPEERKAAEESLNQFQFTPQHLVRLLQIIVDGSCDMAVRQVASIHFKNFIAKNWSPNDPDESPKVLESDKAMVRENVLGFIVQVPPLLRAQLGESIKTIIHSDYPEQWPSLLHWVSHNIDLQNQIFGALYVLRVLARKYEKILATPLKATKLEIPKQLFDPNVFNAWMVLFINLLERPVPVEGQPMDPEIRKSWAWWKVKKWTIHILNRLYTRFGDLKLQKPESKAFAQMFQKTYAGKILACHMQLLNAIRSGDYLPDRVINLVLQYLTNSVTKNSMYQMMQPQIDILLFEIIFPLMCFNDNDQKLWEEDPHEYVRKGYDIIEDLYSPRTAAMDFVSELIRKRGKNNLQKFIHFIVDIFRRYDEAPADLKPYRQKDGALLAIGTLCDKLKQTDPYKTELESSMGCWAVCPYQLFRPEQFSSGYALYVSGMRDPDLPVRVDSVFALRCFVEACKDLNEIRPILPQLLDEFFKLMNEVENEDLVFTLETIVDKFGEEMAPYALGLCQNLAAAFWRCMASSEADDEADDSGALAAVGCLRAISTILESISSLPHLFLQIEPTLLPIMRRMLTSDGQDVYEEVLEIVSYMTFFSPTISLDMWSLWPLMMEALNDWAIDFFENILVPLDNYISRGTDIFLASKDPDYQQSLWDALQSIMMDENMEDSDIEPAPKLIEVVFQNCKGNVDQWVEHYLRITIARLRRAQKPYLKCLLVQVIANALYYNPALTLESLNKLGVAADIFNHWFAMLQQVKKSGARVNFKREHDKKVCCLGLTSLIALPADKIPAEALDRIFKATLELLVAYKDQVAEAKKENEEAADDMDGFDADEEDDDEVDSDKEMGVDDEDGDEISSLQLQKLAAEIAGLQGMPGRWCLKMVHCPCSMKGSSKNNAVDMKQAMEAGTDLQRNLAWRRLLSRSPASHLLNEARGFQPADEDDDSDDDFSDDEELHSPIDEVDPFIFFVETVQALQASDPARFQNLMQTLDFRYQALASGIGQHAEQRKIEIEREKSEKANAQ

SEQ ID NO: 46565 - protein, 662 aa, Zea Mays
MRSDKLISLCHGMEVEALEKGYTAFAKAVKSFTSSERYKRSESYFEDMYGTDALRSSDKTIVLPMPEAVKAKVKGDISKEAQPGRGAQSTLRKEILELEKHFREQQVVSGALENALGPNAGSVNFSPENPMPKAANELIREIATLELEVKNMEQYLLTLYRKAFEQQAPALSPPDCREASKPSVSSRFGQLRETPVAAKSCKSGGGDAALRTSYPPPAHKKLNDPLADCCTSARSHRAVDSDVLRCQSALSYRGVCSSRVLPSEEDDDSLARALRSCHSQPFSFAEEGEGAGASGGAISLAEYLGTNVADHIPETPNNLSEEMVRCMAGIYCRLADPPLVHHGSSSSPTLSFSSTTSAVSPQYVGDDMWSPSYRRREATTLDSRLINPFHVEGLKEFSGPYNTMVEVPTISRDGRRMKEAEDLLQTYRLVLYRLEAVDLRTMTNEEKIAFWVNVHNALLMHAYLENGVPQNKTSLLAKAACKIAGRSINAAVIQSVVLGCTTHCPGQWLRRTLLYPRTKSKVSKAGHEWRAFAVAQPEPLLRFALCSGSHSDPAVRVYTPKRLFHQLEAAKEEFIRATAGVWKEQKLLLPKLVEAYAKDVRLSPQGLVDMVQRHLPETMRVAVQRCQQGGRASSGKVVVDWVPHNPAFRYLLARDLAFPHLS

SEQ ID NO: 46566 - protein, 135 aa, Zea Mays
MAPPTSPRSPPPPRLSRLTSRRTGPRSTLPHARTRRGSSPWGTGGPRSSSPSCGLGMSPGVVSVRLQVHQFGLICDNLDAVNKFEPNYRLIRRYTTIAPTLFFHPLANNGMLCLQCLIHTTQVFVIDKLNSALIE

SEQ ID NO: 46567 - protein, 85 aa, Zea Mays
MNCLQNLLKEPPIVGSRSMRRPSPLNLAMVRGGSRRSNTVKTAPGASTSGAESSAVEMGTEKSEVYSTNMTQAMGAGILMLLICD

SEQ ID NO: 46568 - protein, 371 aa, Zea Mays
MNCLQNLLKEPPIVGSRSMRRPSPLNLAMVRGGSRRSNTVKTAPGASTSGAESSAVEMGTEKSEVYSTNMTQAMGAALTYRHELGMNYNFIRPDLIVGSCLQSPLDVDKLRKIGVKTVFCLQQDSDLEYFGVDIRAIQDYSLQFKDIVHCRAEIRDFDAFDLRLRLPAVVSKLHKLINCNGGVTYIHCTAGLGRAPAVALAYMFWILGYSLNEGHRLLQSKRACFPKLEAIKLATADILTGLSKNTITLKWEADGSSSVEISGLDIGWGQRIPLTYDEEKGAWFLEKELPEGRYEYKYVVDGKWLCNEHELITKPNADGHVNNYVQVSRDGTSDEEKELRERLTGPDPDLTDQERLMIREYLEQYADAAER

SEQ ID NO: 46569 - protein, 299 aa, Zea Mays
MNCLQNLLKEPPIVGSRSMRRPSPLNLAMVRGGSRRSNTVKTLQAPGASTSGAESSAVEMGTEKSEVYSTNMTQAMGAALTYRHELGMNYNFIRPDLIVGSCLQSPLDVDKLRKIGVKTVFCLQQDSDLEYFGVDIRAIQDYSLQFKDIVHCRAEIRDFDAFDLRLRLPAVVSKLHKLINCNGGVTYIHCTAGLGRAPAVALAYMFWILGYSLNEGHRLLQSKRACFPKLEAIKLATADILTGLSKNTITLKWEADGSSSVEISGLDIGWGQRIPLTYDEEKGAWFLEKELPVSIQCLC

SEQ ID NO: 46570 - protein, 118 aa, Zea Mays
MLTHLRVKALEKFKTGLNSSLESGKGFAVSARDNTECSLKEFEQGCADAIIKQANWDCSKMLEKVRRDIEDHALSIRESKLSEMTRHAKVMYGKLKEILITSLAMHNFLLDLFAYLIL

SEQ ID NO: 46571 - protein, 492 aa, Zea Mays
MEESDAAEGVAVQLIDGEGEFAAEGAERFMAAAGVAGCGLSYAVVSIMGPQSSGKSTLLNQLFGTNFREMDAFRGRSQTTKGIWIARCVGVEPCTVVLDLEGTDGRERGEDDTAFEKQSSLFALAISDIVLINMWCHDIGREQAANKPLLKTVFQVMMRLFSPRKTTLLFVIRDKTRTPLEHLEPVLREDIQKIWNSVAKPEAHKDTPINEFFNVQVTALSSFEEKEDQFREQVQQLRQRFSNSIAPGGLAGDRRGVVPASGFLFSSQQIWKVIRENKDLDLPAHKVMVATVRCDEIANEKFGCITSDTEWLDVESAVQSGPVPGFGKKLGNIVDVHLQEYDKEAVYFDEAVRKGKRQHLESRILNLVQPAFQKMLTHLRVKALEKFKTGLNSSLESGKGFAVSARDNTECSLKEFEQGCADAIIKQANWDCSKMLEKVRRDIEDHALSIRESKLSEMTRHAKVMYGKLKEILITSLAMHNFLLDLFAYLIL

SEQ ID NO: 46572 - protein, 883 aa, Zea Mays
MAPSAAVPGGSEVEGSPRMAKFLCSFGGSILPRPLDGCLRYVGGETRIVMLPRDISYADLAARMRELYKDADIIKYQQPDEDLDALVSVVNDDDVVNMMEEYDKVIATGEAFTRLRIFLFSQHLDDDAASVDVHYNVDERETERRYVDALNSLGDVKSPSSPVSVEQLFGIGGNDSGIPDFAGLRHLNVPRPTHSQRYGEMDSPWSPAYVSPGQYGVHDPRDFPISPSSARFQVGAEDFDERTPDDFVRQSPKYRHYEAHSPSHMDNLVWLPPGAVIQQNAGFPGNLSRSNNFLDGSNGCDHCRSPFHKVQGSVNDPIYMNPRWTRPVQQHFDQPSMINDYPGHHANSCPDYCRPGDHYVGGQDVRLENGVYVKEQNGGHPPMFYNESHPHDRVWHVHTKQSHQRYEDPRLHHPANGRVIEPYIMDANKVYEVHSASLARSSHESPHYYHGSSEVINDTYHNQQVGGSGSYVQPAGFEESPSHHYNHSSAYGADSFYQMQQNLPPIQSLRRRANSPVHTASPYDSPHLPISNGTINTNFVRNTGDVSPRIPGLPGYDRMPNTWTPPNGSIPYRVVGHDVHAASMENTSAFGPRSNPTAAQYVQHFIAPESIQHQPGAPLREVHPERSYPEPMPSSYVDGKVAVSALPLTDQLSRLDTNTIKKPEGPDDVNSTQNVNETTPLHAVDEPSTLPHHVVVVHEVDTKQGKPTEHESRQKQHEAGATALQECGDISEDRLNFLPELIASVKKAALEDAAETRIAQSDANGAVSPVPDDDDDNEKKLDAAAAGTTDANQDPDLQGSIDRQKSSKIESTTAEAEALSKGLQTIKNDDLEEIRELGSGTYGAVYHGKWRGCDVAVKRIKASCFVGRPSERERLFVMVQMEA

SEQ ID NO: 46573 - protein, 398 aa, Zea Mays
MSGASNYGSLIDEWLLPPTPSPRTLMSSFLNEEFSSAPFSGPHDQSEKSREVLNSSDEVPSHAVKGPFQNGFPNLFSAKSNSNGGLAERRAARAGFSVPKIDTSRVGSSTVIRSPVSIPPGLSPTTLLESPVFLYNKMAQPSPTTGTLPFLMATNDKSTISPAAKITEDSTFDNDVFSFQPHLGSEQTGFSTAEKDYGAYERKQSLSNIHQQESSLQSSFTAVKDNTSATIVKAKPSSSSMFSDSHYSADQQQADETNIKVQGKGVEARSAAFAPVSAHSDASLLESQEALDVSSTLSNEEDERATHGTVSIECDGDEADAVSKRRKLELDALEATATATTSTTNTIDMGPAASRAVREPRVVVQTTSEVDILDDGYRWRKYGQKVVKGNPNPRSHFH

SEQ ID NO: 46574 - protein, 156 aa, Zea Mays
MIRFILLQNRQGKTRLAKYYVALEDSEKHKVEYEVHRLVVNRDPKFTNFVEFRTHKVIYRRYAGLFFSICVDITDNELAYLECIHLFVEILDHFFSNVCELDLVFNFHKVYLILDEFILAGELQETSKRLLDFSFQNPDFTSTPADRRPSVRAVRF

SEQ ID NO: 46575 - protein, 99 aa, Zea Mays
MPLGGHWVQDQLSKLVTASEKSTTSVESLARKEDIGCSIRDIMALVKECGAVLGTKEHFIASQVFVKRAEREMFMTLDTLEERFNWLTMKHDWVTRMIH

SEQ ID NO: 46576 - protein, 94 aa, Zea Mays
MPREYIYEPWTAPTSIQKKANCIIGKDYPKPVVDHETASKECRKRMGEAYALSRVDAKPSKGKTLNSRRKMLHGDRDTSNSTIAKRLKRNSRAE

SEQ ID NO: 46577 - protein, 227 aa, Zea Mays
MIYAALNPEKFESDKGAKLMQLAGLSADDMIAVNNMRCLCGPDTKKSSVGGFTLKFDVHKKKHTNRKERTGEESTWALSRFYPILEQLIENLSKGELPKDEYNCMNDPSPTVHGLPTSSSARTSPAHSMRSRRTGGTWARPRGSDDGYSSDSVLKHASSDFRKLGQRIFVFVIGGATRSELRAAHKLSSKLKRDIILGSSSLDDPPQFITKLKLMSVEELTLDDLQL

SEQ ID NO: 46578 - protein, 684 aa, Zea Mays
MSLDSEASSQGGDYRSFRQITRDRLLFEMLRSTRKNSKSTWKVLIMDKFTVKIMSYACKMADITEEGVSLVEDLYKRRQPLPSLDAIYFIQPTKENIVMFLSDMSGRSPLYKKAYVFFSSPVHKELVAQIKKDSSVLPRIAALSEMNLEYFAIDSQRSVLFDGQLKEKRNSLRRFLEATGFITDHERALEELFSENAEGSHKYNACLNTMATRISTVFASMREFPRVHYRIAKTIDASTMTTLRDLVPTKLAASVWNCLAKYKTTIPEFPQTETCELLIVDRSIDQIAPIIHEWTYDAMCHDLLCMDGNKYVHEVPTKNGSATEKKEVLLEDHDPVWLELRHAHIADASERLHDKMTNFISKNKAAQLHQARTDGELSTRDLQKMVQALPQYSDQIDKLSLHVEIAGKLNNIIREQCLRDVGQLEQDLVFGDAGTKELINFLRTQLVVSRENKLRLLMIYAALNPEKFESDKGAKLMQLAGLSADDMIAVNNMRCLCGPDTKKSSVGGFTLKFDVHKKKHTNRKERTGEESTWALSRFYPILEQLIENLSKGELPKDEYNCMNDPSPTVHGLPTSSSARTSPAHSMRSRRTGGTWARPRGSDDGYSSDSVLKHASSDFRKLGQRIFVFVIGGATRSELRAAHKLSSKLKRDIILGSSSLDDPPQFITKLKLMSVEELTLDDLQL

SEQ ID NO: 46579 - protein, 412 aa, Zea Mays
MAAAGEGEAERVSALLREITGEGGFAFVASAEKAGAGDLRAAEAAREMAWEQLHSGPWSEVGTAWRDAYALACLNVARLRTHAASGGDSDRSAALRALDMGLIMGGNLLRADLEAALARISAEACGGSEGGEGVVDKENQRWREALDRNRDIADALKILPANSLSCKKVERRSCISLEEFICNYFLRDTPVIISGTIDHWPARTKWKDIEYLKKIAGDRTVPVEVGKNYVCSEWKQELITFSQFLDRMSSTVCPSNLTYLAQHPLFEQIKELSEDIIVPEYCYAGGGALQSLNAWFGPEGTVTPLHHDPHHNILAQVLGRKYIRLYPAFIAEDLYPHTETMLSNTSQVDLDNIDLKEFPRVENLEFIDCILEEGDLLYIPPKWWHYVRSLSTSFSVTPLLNGCTHVITNVHC

SEQ ID NO: 46580 - protein, 237 aa, Zea Mays
MNKDILVAADDHEGGLCLPKSSARLTQESGVGYNKASSLSFSAESRRQIHYCRAPLPSLSLRRSVSRRQNPRSLSLLNPLNKCGRMSEPSKVIHIRNVGHEIAESDLLQLLQPFGMVSKIVMLRAKNQALLQMEDLHASVSALQYYTSVQPSIRGRNVYMQFSSHQELTTDQSSHGRNSDQWRFYIKYSKLMDLWRRLSHFKSQLVFKLLFSITRAKKLWKHLVLCMEGTYTMVAAN

SEQ ID NO: 46581 - protein, 308 aa, Zea Mays
MAAPALRITARLGLALDGATAARRREASAPVAVPAAPWLKKAAVRCQRAVGAAVAEKKDAPVSVAQDRSGDGGAAPELTVVMKFGGSSVASAERMREVADLILSFPEEHPVVVLSAMGKTTNKLLMAGEKAVGCGATNVSELDELSFVKELHLGTLDQLGLDRSIVCGLLDELEQLLKGIAMMKELTLRTRDYLVSFGECMSTRIFAALLNKIGVKARQYDAFDLGFITTDDFTNADILEATYPAVARRLHVEWINDPAIPIVTGFLGKGWRSGAITTLGRGGSDLTATTIGKALGLREIQELLSIGP

SEQ ID NO: 46582 - protein, 471 aa, Zea Mays
MAAPALRITARLGLALDGATAARRREASAPVAVPAAPWLKKAAVRCQRAVGAAVAEKKDAPVSVAQDRSGDGGAAPELTVVMKFGGSSVASAERMREVADLILSFPEEHPVVVLSAMGKTTNKLLMAGEKAVGCGATNVSELDELSFVKELHLGTLDQLGLDRSIVCGLLDELEQLLKGIAMMKELTLRTRDYLVSFGECMSTRIFAALLNKIGVKARQYDAFDLGFITTDDFTNADILEATYPAVARRLHVEWINDPAIPIVTGFLGKGWRSGAITTLGRGGSDLTATTIGKALGLREIQVWKDVDGVLTCDPNIHPKAKPVPYLTFDEAAELAYFGAQVLHPQSMRPAREGDVPVRVKNSYNRRAPGTLITKARDMSKTVLTSIVLKSNITMLDIVSTRMLGQYGFLAKVFSIFEDLGISVDCVATSEVSISLTLDPSKLWSCELVQHKNVWASIYSLNLMMSLKSLRR

SEQ ID NO: 46583 - protein, 436 aa, Zea Mays
MMVAEKPALGFQAHGDGDDELELELASPAPPPRKMHSLEFEHIGSLAAVAESLAPGSRWQRALTSVRVVIFQAKINVLLPFGPLAIMLHYLSGTHQGWVFLFSLIGITPLAERLGYATEQLACYTGPTVGGLLNATFGNATEMIISIYALKNGMIRVVQQSLLGSILSNMLLVLGCAFFAGGLVHSDRDQVFNKASAVVNSGLLLMAVLGLMFPAVLHFTHSEAQYGKSEVALSRFSSCIMLVAYASYLFFQLKSHRSMYSPIGDEEAAAEEEDEKEITQGEAICWLFILTIWISVLSGYLVDAIQGASDSLNLPVAFISVILLPIVGNAAEHASAIMFAMKNKLDITLGVAIGSSTQISMFVIPFCVVIGWMMGQEMDLNFQLFETATLFITVLVVAFMLQEGTSNYFKGLMLILCYLIVAASFFVHVDPDATYL

SEQ ID NO: 46584 - protein, 414 aa, Zea Mays
MAASPSSPLTAPPEPVTPPSPWTITDGAISGTLPAAEAFAVHYPGYPSSPARAARTLGGLPGLAKVRSSDPGARLELRFRPEDPYCHPAFGQSRASTGLLLRLSKRKGAAAPCAHVVARVRTAYYFEGMADFQHVVPVHAAQTRKRKHSDSQNDNENFDKTGHDEADGDVMMLVPPLFSVKDRPTKIALVPSSNAISKTMHRGVVQERWEMNVGPTLALPFNTQVVPEKINWEDHIRKNSVEWGWQMAVCKLFDERPVWPRQSLYERFLDDNVHVSQNQFKRLLFRAGYYFSTGPFGKFWIRRGYDPRKDSESQIYQRIDFRMPPELRYLLRLKNSESRKWADMCKLETMPSQSFIYLQLYELKDDFIQAEIRKPSYQSVCSDRKTGDVIGTGHRRKSSPRLYILDTLRLLSSP

SEQ ID NO: 46585 - protein, 124 aa, Zea Mays
MRNPDSFKWMLQNPMYRQQLQDMLKNMGGSPDQWDNRMLDHLKNFDLSSPEVRQQFAQVGMTPEEVVSKIMANPDVAVAFQNPKIQTAIMDCSQNPLNIVKYQNDKEVMDVFMKISQIFPQING

SEQ ID NO: 46586 - protein, 427 aa, Zea Mays
MSLEKLVIAPDLAIIRKHINDGVNGLLFPRKNIGMLAQVLLRAVSNSKVSLSGQKIASAGKAHAKNLMASETIEGYAMLLKNVVKLPTDALSPLTADEIPLALKQEWKWHLFDDVKHLHRVNTSLSGYKILQKLEQEWHSNQMENSSLSTKNINDAFSAIAWEEQRVNEVMDIKRKMEEDELKDRNDQPHGTWEEVYRNVKRVERLKNELHERDDKELERTGQPLCIYEPFFGEGTWPFLHQSSLYRGVGLSSKGRRPGADDIDASSRLPLLNNVYYRDILGEFGAFFALANRIDRIHKNSWIGFQSWRATARKANLSTNAESAILEAIQSQKHRDSFYFWVRMDQDPRNHANKDFWSFCDVINAGNCRLAVLEAFQRMYGVHLDRDLDTLLHMPNDGDTWSVMQSWVLPTRSFLEFVMFSRYGFCF

SEQ ID NO: 46587 - protein, 71 aa, Zea Mays
MADGEDIGHARPQHPMKQSRFDFTKVDAAFLPTITSRSWASPPPHRHLLCPPLQPWCYLLDPTIGAGYYPR

SEQ ID NO: 46588 - protein, 609 aa, Zea Mays
MDTTTQGLEFGGGINSPKPYCYWSTTQDTTVHKDSTPEAYSTFSISNSKASKRKQGAMSGAKGGNPLLTLGLGCSPSSSYNSKLSSGTACITSSSLLKEIDEESSIDLGLNLGLYIGNDIGHCQQKSHAGFENVLSTNSPKLDLQLSLSTSSPESVVIDANRSPDGLAMPMANSPLAIVEEGSVPHSWVFEHSIVSSSHASKATHGFPLSKKTNGGNASVPSHVMSSTMFTSVKGPVASASETTNSQQRNSNAKSCQFPGCVKGARGASGRCIAHGGGRRCQKPGCEKGAEGRTIYCKAHGGGRRCQFLGCTKSAEGRTDHCIAHGGGRRCSHEGCSRAARGKSGLCIKHGGGKRCQKENCTKSAEGHSGLCIAHGGGRRCQFPDCTKGAQGSTKFCKAHGGGKRCTFVGCTRGAEGSTSFCKGHGGGKRCAFQGGGVCPKSVHGGTQYCVAHGGGKRCASFGCTKSARGRTEYCVRHGGGKRCKFESCTKSAQGSTDFCKAHGGGTRCLWGQADTSFGAGAQQCDKFVRSKTGLCSAHSALIQDHCVHGGGTLGSAIYQSVHVKPTEMINGDKTLLDPAIPVTNSGVHPPVLAQSMIDPLPEGRVHGG

SEQ ID NO: 46589 - protein, 169 aa, Zea Mays
MSSSPAALRFYCHQCDRTVSLAPPASPDADVFCPRCGGGFVEELPPNPSPAPPAAAFFAPPSFDIRHPSDLSAFFGPASPEPLAPGLFDPSNFLHDHFGGLLSGGATIQIVLEGRRRRSVCRLHGRLPPRRRRQAAPLQARLPQGLHRPMARPPQLLPGLPLRAAHRRP

SEQ ID NO: 46590 - protein, 464 aa, Zea Mays
MTQQATRHARPVYVGGLPPTANEQTVAIFFNGVMAAIGGNTAGPGDAVPSQPPLWPRGFIQQHPLDCNMMRNINFSNASYGPTTMWAPIQTGNISSESTMLPATQSAVYWNHYMNFVRNPLGSVQGNPFPDSFSGTNTSTPLQGSNTIPSIPVNLESAAEHSVQDINSPIKTSAPVTKPKKTKEQNYTAAEDLLLCTTWLQISSDPIVHTGQRKKGLWARIEKRYNEQRGEYPCRMNRALSSRWDKIRADVGKFSGCYARVLREKQSGLTDDDKTSKAATLFAHEENKPFHFMHCWHKLKGEPKWESICQGPFRGLHGKAIGSSGGPFIGVEESDSGSAGLTGKRPLCRDSSKSERKKAASSTTTEYLSRLQELTEKLIQRIIEKGEKKYKYNEQDMELEKKRLDLEAKKLSIRKRELRLKELSMAEQQLEMLERTREDEVDPEVWSMMKERKKHLQQFIFSFC

SEQ ID NO: 46591 - protein, 510 aa, Zea Mays
MWSFEEKGFLCQLPGVTAPIPGVGVLPNLYNLAAGQFNPHVIQPQAMTQQATRHARPVYVGGLPPTANEQTVAIFFNGVMAAIGGNTAGPGDAVPSQPPLWPRGFIQQHPLDCNMMRNINFSNASYGPTTMWAPIQTGNISSESTMLPATQSAVYWNHYMNFVRNPLGSVQGNPFPDSFSGTNTSTPLQGSNTIPSIPVNLESAAEHSVQDINSPIKTSAPVTKPKKTKEQNYTAAEDLLLCTTWLQISSDPIVHTGQRKKGLWARIEKRYNEQRGEYPCRMNRALSSRWDKIRADVGKFSGCYARVLREKQSGLTDDDKTSKAATLFAHEENKPFHFMHCWHKLKGEPKWESICQGPFRGLHGKAIGSSGGPFIGVEESDSGSAGLTGKRPLCRDSSKSERKKAASSTTTEYLSRLQELTEKLIQRIIEKGEKKYKYNEQDMELEKKRLDLEAKKLSIRKRELRLKELSMAEQQLEMLERTREDEVDPEVWSMMKERKKHLQQFIFSFC

SEQ ID NO: 46592 - protein, 100 aa, Zea Mays
MLSDRGLFNVQNHQLSHVTEDVQNMKSKLNNLESKLEEAEKMIIRLREESRNTTQERDELQQEMVFLRKKGTARSQMGFPLLFVVYVALLGTCIGYLLRI

SEQ ID NO: 46593 - protein, 564 aa, Zea Mays
MLAWVLETPVLGWIVLGVLKRDNLVYKLVSDAEIPEPPLFTATHTWQAIQEQSVRVTESRLSPAERVQEAVACVPAAAQAQLEPAAGFRRWTVRDFHRAYRSGQATPTMVARRFLAAVEECSGPDLNMGFFISCDPADVLRQAEDSTRRYQQGAPLSAMDGVLVAVKDELDCLPYPTSGGTRWLGSARRCAADAACVAQLRACGAVMAGKANMHELGAGTSGINPHHGATRNPYNVGRVSGGSSGGSAAAVCAGLCPVALGADGGGSVRMPAALCGVVGFKPTAGRLSNSGLLPLNWTVGMPGILAATVEDTLIAYAAIADQSKPSPLQQPELNLPMLTRTRSMPSIRLAKYAKWFDDSSEDIRSLCGKALQMLRTHYGWESVDVTVPEIEEMRLAHYVTMGSECTASLAAKYLDSMSEVGWDVRIALSAYGSFSSRDYLSAQRLRCRQMYFHEKIFETADAIVTPMTGVTAYALQDDALSTGELDYINGAALVRYSIAGNFLGLPAITVPVGYDRGGLPVGLQFIGRPWSEATLLHLAYAMQEACGKKVLRKPKVHYDLLTKE

SEQ ID NO: 46594 - protein, 522 aa, Zea Mays
MDFELRQAREKLEREQRERMQRAKAKAERESLAKAEAARRQEALEASHRERRLDAARAQEEADRTMEEVMQLGKGISFSHMFEALRYDGPGDKIKLPPSSFKELSDEGALDKGPMYFRLSKVRDTVPGAAMEQDAGTTCCGVLEFTAREGSAELPLHVWNNLFGSDTPEVPLIEVKYTSLLKGTYAKLKPEGGGFSDLPNHRAVLETALRNHATLSENDTVVVNYGQLQYKLKVLELKPASSVSVLETDVEVDIVGSDSVLDNEDDQHVLVPLVIGNIESSVVEEGKFRYYKFSVEGNVSEKVASGHANIEIKIDTDASGGDTDIYVSRHPLVFPTQHRHEWSSHEMGSKVLILKPRDATLVSGVYSIGVYGFKGTSKYQLSVAIKDVSGQRIGEYASASGSVDFDSVLCRNCKRHIASQSAHLHEAYCMRHNVACSHDGCGVVLRKEEAADHVHCNKCGRAYQQREMEKHMKVFHEPLQCPCGVVLEKEDMVCVRFSSWSRGTLLTQFLKDFFLSSWWRAF

SEQ ID NO: 46595 - protein, 585 aa, Zea Mays
MCGILAVLGCSDWSQAKRARILACSRRLKHRGPDWSGLYQHEGNFLAQQRLAVVSPLSGDQPLFNEDRTVVVVANGEIYNHKNVRKQFTGTHNFSTGSDCEVIIPLYGENFVDMLDGVFAFVLYDTRDRTYVAARDAIGVNPLYIGWGSDGSVWIASEMKALNEDCVRFEIFPPGHLYSSAGGGFRRWYTPHWFQEQVPRMPYQPLVLREAFEKAVIKRLMTDVPFGVLLSGGLDSSLVASVTKRHLVETEAAEKFGTELHSFVVGLEGSPDLKAAREVADYLGTIHHEFHFTVQDGIDAIEEVIYHDETYDVTTIRASTPMFLMARKIKSLGVKMVLSGEGSDELLGGYLYFHFAPNKEEFHRETCRKVKALHQYDCLRANKATSAWGLEVRVPFLDKEFINVAMGMDPEWKMYDKNLGRIEKWVMRKAFDDDEHPYLPKHILYRQKEQFSDGVGYNWIDGLKSFTEQQVTDEMMNNAAQMFPYNTPVNKEAYYYRMIFERLFPQDSARETVPWGPSIACSTPAAIEWVEQWKASNDPSGRFISSHDSAATDHTGGKPAVANGGGHGAANGTVNGKDVAVAIAV

SEQ ID NO: 46596 - protein, 256 aa, Zea Mays
MYNCTSSGRMSSDEDHGSGTVNGDLFILKRIMVERGNAAYLSGLREKYFGELFSNASRTLEGLSRIESSTISVDMLYDPDIHLEKNLSATEEPLKHVARFIESFESESREIWLVYHNEGHSLSKLIYTAEETKLVTGNNNERVRHIQVLHPSKWWHWLRTTKAGLKQMQNLLWQLNMIICFEDMETGKCLREVPSEAKQNKLNMRLIDFGSAIDDYTLKNLYGPGPTRSEQTFEYTPPEALLNSNWFQGSRSARLK

SEQ ID NO: 46597 - protein, 677 aa, Zea Mays
MRIKEVDVGVVAIFDGHNGAEASEMASKLFLDYFLLHVYFLLDGIHSLRFRKSTGKLTYREVTIFNNVFNLYKHGQSDHAERSCWASPAILDRSFHTEILKESLMRAVHDIDLTFSKEGKRRRKRNSINHEEFALANYDGPLYHARELTKDHHPNREDERNRVEAAGGYVLEWAGVYRVNGELALSRAIGDVPYKRYGVISTPELTGWQILSENDSFLIASSDGIFEKMTMQDVCDLMLHAKIRVKHDFGSSAITQRNLADYVVHVALQKGTTDNVAAVVVPLGSPGSTGTTLKDSSQFEEDLKISISPMLNVPYGLKPDHGHSSAVIDMEYFKRSSIKFQRFLVEAKPKKLGCFYLSESLDEDMDYIFRVPEAYQREEVHDFNHIPAETALYSDGNLEKYKDKHFCLYLGPEDGEMGQCNGPEAFANFFGLLDSLPHNGSKPNGSHSFGNTIDFRYKLKRRFDRGSYGEVWLAFHWNCSEDTDVHKEPPHFTNISQSEMYNCTSSGRMSSDEDHGSGTVNGDLFILKRIMVERGNAAYLSGLREKYFGELFSNASRTLEGLSRIESSTISVDMLYDPDIHLEKNLSATEEPLKHVARFIESFESESREIWLVYHNEGHSLSKLIYTAEETKLVTGNNNERVRHIQVLHPSKWWHWLRTTKAGLKQMQNLLWQLASD

SEQ ID NO: 46598 - protein, 481 aa, Zea Mays
MTMQDVCDLMLHAKIRVKHDFGSSAITQRNLADYVVHVALQKGTTDNVAAVVVPLGSPGSTGTTLKDSSQFEEDLKISISPMLNVPYGLKPDHGHSSAVIDMEYFKRSSIKFQRFLVEAKPKKLGCFYLSESLDEDMDYIFRVPEAYQREEVHDFNHIPAETALYSDGNLEKYKDKHFCLYLGPEDGEMGQCNGPEAFANFFGLLDSLPHNGSKPNGSHSFGNTIDFRYKLKRRFDRGSYGEVWLAFHWNCSEDTDVHKEPPHFTNISQSEMYNCTSSGRMSSDEDHGSGTVNGDLFILKRIMVERGNAAYLSGLREKYFGELFSNASRTLEGLSRIESSTISVDMLYDPDIHLEKNLSATEEPLKHVARFIESFESESREIWLVYHNEGHSLSKLIYTAEETKLVTGNNNERVRHIQVLHPSKWWHWLRTTKAGLKQMQNLLWQLLMGLKACHDRNITHRDIKPGRNDVTAYFFLVFYTS

SEQ ID NO: 46599 - protein, 785 aa, Zea Mays
MPLPDCGRRGFPTLPLLLLVLHALPRRLPRCAAESATCLAVYREGGAPAVFQSAHCPRWTLPPHDGQGGGGGKSIPMGCHVAADRGRRRSQEDRAVCALGIRIPFVENMRIKEVDVGVVAIFDGHNGAEASEMASKLFLDYFLLHVYFLLDGIHSLRFRKSTGKLTYREVTIFNNVFNLYKHGQSDHAERSCWASPAILDRSFHTEILKESLMRAVHDIDLTFSKEGKRRRKRNSINHEEFALANYDGPLYHARELTKDHHPNREDERNRVEAAGGYVLEWAGVYRVNGELALSRAIGDVPYKRYGVISTPELTGWQILSENDSFLIASSDGIFEKMTMQDVCDLMLHAKIRVKHDFGSSAITQRNLADYVVHVALQKGTTDNVAAVVVPLGSPGSTGTTLKDSSQFEEDLKISISPMLNVPYGLKPDHGHSSAVIDMEYFKRSSIKFQRFLVEAKPKKLGCFYLSESLDEDMDYIFRVPEAYQREEVHDFNHIPAETALYSDGNLEKYKDKHFCLYLGPEDGEMGQCNGPEAFANFFGLLDSLPHNGSKPNGSHSFGNTIDFRYKLKRRFDRGSYGEVWLAFHWNCSEDTDVHKEPPHFTNISQSEMYNCTSSGRMSSDEDHGSGTVNGDLFILKRIMVERGNAAYLSGLREKYFGELFSNASRTLEGLSRIESSTISVDMLYDPDIHLEKNLSATEEPLKHVARFIESFESESREIWLVYHNEGHSLSKLIYTAEETKLVTGNNNERVRHIQVLHPSKWWHWLRTTKAGLKQMQNLLWQLASD

SEQ ID NO: 46600 - protein, 676 aa, Zea Mays
MRIKEVDVGVVAIFDGHNGAEASEMASKLFLDYFLLHVYFLLDGIHSLRFRKSTGKLTYREVTIFNNVFNLYKHGQSDHAERSCWASPAILDRSFHTEILKESLMRAVHDIDLTFSKEGKRRRKRNSINHEEFALANYDGPLYHARELTKDHHPNREDERNRVEAAGGYVLEWAGVYRVNGELALSRAIGDVPYKRYGVISTPELTGWQILSENDSFLIASSDGIFEKMTMQDVCDLMLHAKIRVKHDFGSSAITQRNLADYVVHVALQKGTTDNVAAVVVPLGSPGSTGTTLKDSSQFEEDLKISISPMLNVPYGLKPDHGHSSAVIDMEYFKRSSIKFQRFLVEAKPKKLGCFYLSESLDEDMDYIFRVPEAYQREEVHDFNHIPAETALYSDGNLEKYKDKHFCLYLGPEDGEMGQCNGPEAFANFFGLLDSLPHNGSKPNGSHSFGNTIDFRYKLKRRFDRGSYGEVWLAFHWNCSEDTDVHKEPPHFTNISQSEMYNCTSSGRMSSDEDHGSGTVNGDLFILKRIMVERGNAAYLSGLREKYFGELFSNASRTLEGLSRIESSTISVDMLYDPDIHLEKNLSATEEPLKHVARFIESFESESREIWLVYHNEGHSLSKLIYTAEETKLVTGNNNERVRHIQVLHPSKWWHWLRTTKAGLKQMQNLLWQLRT

SEQ ID NO: 46601 - protein, 522 aa, Zea Mays
MGCSASKCCSQLKCSLCSNGCLGQAPDSPRESRGKSSRGRGRVDSSGSDDSSGDDLGEDDDAFNHMNATRESTAGISRLSRVSSQFLPPDASRKVQVPLGNYDLRYSFLSQRGYYPESLDKANQDSYCVHTPFGPSPDDHLFGVFDGHGEYGAQCSQFVKRRLCENLLRDNRFRTDAVLALHSAFVATNTQLHADNLDDSMSGTTAVTILVRGKTIYVANTGDSRAVIAEKQGDDIVAVDLSIDQTPYRFDELERVKECGARVLTLDQIEGLKNPDVQCWGTEESDDGDPPRLWVQNGMYPGTAFTRSIGDSVAESIGVIADPEIFVLDLNSNNPFFVLASDGVFEFLSSQTVVDMVSKYKDPRDACAEIVAESYRLWLQYETRTDDITIILVHINGLTDKESTQTVTKVTLQPSQQVVGLAGPESPLIVSSNTNNQRSKHDLSRARLRALESSLENGQLWVPPSPSHRKTWEEQAHIERVLHDHFLFRKLTDSQCHVLLDCMQRVEVKPRDIVVQQVTASM

SEQ ID NO: 46602 - protein, 1056 aa, Zea Mays
MGCSASKCCSQLKCSLCSNGCLGQAPDSPRESRGKSSRGRGRVDSSGSDDSSGDDLGEDDDAFNHMNATRESTAGISRLSRVSSQFLPPDASRKVQVPLGNYDLRYSFLSQRGYYPESLDKANQDSYCVHTPFGPSPDDHLFGVFDGHGEYGAQCSQFVKRRLCENLLRDNRFRTDAVLALHSAFVATNTQLHADNLDDSMSGTTAVTILVRGKTIYVANTGDSRAVIAEKQGDDIVAVDLSIDQTPYRFDELERVKECGARVLTLDQIEGLKNPDVQCWGTEESDDGDPPRLWVQNGMYPGTAFTRSIGDSVAESIGVIADPEIFVLDLNSNNPFFVLASDGVFEFLSSQTVVDMVSKYKDPRDACAEIVAESYRLWLQYETRTDDITIILVHINGLTDKESTQTVTKRSKHDLSRARLRALESSLENGQLWVPPSPSHRKTWEEQAHIERVLHDHFLFRKLTDSQCHVLLDCMQRVEVKPRDIVVQQGGEGDCFYVVGSGEYEVLAIQEENGKEITKVLHRYTADKLSSFGELALMHNKPLQASVRAVTSGTLWALKREDFRGILMSEFSNIPSLKLLRSVQLFTRFTVLQLSQLAESLVEVSFADGQIIVDKNDKFSSLYIIQRGRVRLILATDQMTSDTWDLISAETKQAQSSRENGNYVLDIDEGGHFGEWSLIGETIAFTAIAVGDVTCSTIMKEKFDSIVGPFPKLSQADSKIKESLVTLENVADGDFPFRRVKLSDLEWKMCIYAADCSEIGLVQVRGYDKMRTLKRFYIKRVQDLHKEVQVFEEKDLMKSLSKSTCVPEVLSTCADQSYLGILLNCCLCCSLASILHTPLNETSARFFAASVVVALEELHQKSIIYRGVSADILMLDRSGHLQLVDFRFAKKLEGQRTYTICGIADSLAPEIVLGRGHGFPADWWALGVLIYFMLQSDMPFGSWRESELEPITKIAKGHLVMPVSFSAEVVDLITKLLVVDENARLGTSGAEAVKKHPWFDGTDWERIASGTCAAPEEITERINYCIETLNEDLSASPSVPIEDPDDLTAPEWIQDW

SEQ ID NO: 46603 - protein, 735 aa, Zea Mays
MAEEQIEEASMAAAAATPFQLQFDKPIPFQIKMAEWNPEKDLLAMVTDDSKVLLHRFNWQRLWTISPGKCITSICWSPDGKIIALGTEDGLILLHDVENGKMLRTTKSHDVAIVSLNWAEDDPLSKSDKDEFLSYEDRTTRFFPPPPVMPRIGGLRSGDTGLADENEEAIPEFSSASCQRFNILCSGGKDGCVCFSVFGIFPVGKINITKIPINVGSSRKSYQLQDASVSKVSLSRNLQKFVILCFGKLVDTDNLSDSCENSGLHCLYLDTSIFFNRKNELHQVSQQASSIQDMVEVVRASVSLISKQWSNAMSLFHEKFSALPNLISTHGVESSSEDEFLSLLFGTRTSPALHHFLASSLGEAGLKRIAKAVDSAGRDIRGIITEHLQPAVEIISFRLAELRGLSRWRSRFQTIGLDGNLIDGVTESIGMLVVQVERFSRVAATVVYLFQNFFAWVLKSVRILLNEPTDQVPAANSELVVIFLKFLLDKDPIKQLLEADERIECDILKEAFLMPFTAISSQIQCQGLLPLYPVTSSATLSSSCSPTSISFYKDEDSSHEESSYSLTDYVCLKIPDGSLNKVNCIGVIKGSGNCCTTLSMMSLSGFLLHIPDGYECVDLSLYKDNQVVLLLSETSCSDSPGKSWMVMLQIENFSFMPLSGTFPANIYSLQKLVALDLQLDTDYGKVRSIPHTVSTPFAVSASRGVACVFSSRRHALVYILDEDEEAEGDETSDME

SEQ ID NO: 46604 - protein, 514 aa, Zea Mays
MGMEVVGAEAAPAEVKISDGEVNLFQEKESKATAKEREEAAVFGSETTANVTDLAPPKDAKDEWPEPKQTYVFYFIKIRSFEDPKLRVKLEQADKEFQKKIQARSKLIEAVRAKKAERSSIIAELKPLSAENKQYNEVVNEKIKEMEPLRNSLGKFREENNAMRAQSAGLCSSIEELDLTIKMLNDRMVHESIPLSEEKRLVKEIKDLEKTRSKVISNAANRAKLQGTVVEKEAIQDQVKIIGEGIDGIKKERQAVRSKIKVLEDELKLVDAEIGLLQEDLDAATARKDKAYESLQELRAVRDAKNASSMHNRTVLTRARDYSSRNMLTELQELHKTEVDKFMTQWCESKAFREDYEKRILTSLNSRQLTRDGRMRNPDEKPIFIESQAPAPAPEPIPVKLPAKQAKEVPAPQADDAPKTEAPSKGPVKSHKAKAALDADDDYEAEPLKEKAKPTEADVAKLKEIKRQEEIEKNKLALERKKKQAEKQAAKAAARAQKEAEKKLKVRRKSARSA

SEQ ID NO: 46605 - protein, 413 aa, Zea Mays
MQRVLAKHDAIDAGLAVRVEKPKSLQSQIGSSSTRKPDTMEETIQRPSASTTATSQSPFGILALPAPPSSSSKAPAIPASSIDLLSGDDYVKPEPANSLALVPVTEYSAADKNVLAFADMFEQNTANNSNHNLPYSFLSSTSNSTISTSQTYHAPVRPVLPQHSAAYPNGARSNAIVPYDQQAQSNSTGSRNGQTAYGGNHQKQALNYGTGDQNGDIPPAPWGTKRSTNPFDDDQLGGMAVQPKGMQPQPVQPSQHGNKFMSAPPMPRGQPGRMQLQQVPGAQLGALQPTQATLNMQYRGMHPSMQMNHGMGMYSQPTFGGYYGMNQTQLYGVHMSGYGYGQQSGGYYIPNAAYAYTSANELAQRMNDLSVQNGDPNGAAANKQSRPEDALFGDLLSIAKMKQNKPAAGKVGG

SEQ ID NO: 46606 - protein, 364 aa, Zea Mays
MKVDSTACESSRRVTNLKSQVSSLERENVELRRQINELSMKLQIAGQGKNETLYKPGPFGAVKALRTNPTVIPDNSVNPRLAKILEEVAVKKELIVALANTNVREMLEVWFSNIKRVGIPNYLVVALDDNIESLCKSKGVPVYRRDPDEGIDNIAKTGGNHAVSGLKFRVLREFLQLGYSILLSDIDIIFLRNPFDHLHRDSDVESMSDGHNNMTAYGFNDVFDEPSMGWARYAHTMRIWVYNSGFFYIRPTVPSIELLDRVAGRLSREPKSWDQAVFNEELFFPSHPGYEGLHASRRTMDFYLFMNSKVLFKTVRKDAGLKKLKPVIVHLNYHPNKLERMKAVIEFYVNGKQDALDHFPDGSE

SEQ ID NO: 46607 - protein, 334 aa, Zea Mays
MDREALRMLCSPQFWRMAVLWALSLLHSYLLVFHCGRADAPRRRRPRPAEGRCPICVVTGATSGLGRAAAAALAREGYHVVLAGRSTQLLYETVQEIQRQQPDAHLKEFQVDLASFKSIKKFGSSLKQWVHEKNVEPSIQLLVNNAGILAKSHRITEDGLDEMIQTNYIGPFMLTNILLPLLKNSSVPSRVVNLTSFTHRCVSGLDVCEDALRGMKFGRCSIGESYPLASTYEYTKLCMLMFSYELHRQLHMSSGVSVIAADPGVVETKIMRELPECLSWFAFLALRSLKLLQEPDTGVGAVLDAALALPSLGSISLEGKGERSDRPDCPMTPR

SEQ ID NO: 46608 - protein, 314 aa, Zea Mays
MSTSSQCTLMEGAISLPRNTSRIAVVTGANRGIGLEVCRQLAGNGVTVVLTAVDEELGAKAVGNLQGLALSDVLSHQLDITDASSIARLANFLKARFGKLDILVNNAAVAGVVYSQDHLDDLEPREEKFNLMDRDQRLEWLWRNCRETYHAAKECLQTNYYGTKHVIEALLPLLKASDDGRIVNISSDFGNEDLKQVLNDVGNLTEERLDELLDQFLRDFKVGTAEARGWPVAFAAYKVSKAAVNAYSRMLAAKQPALRVNCAHPGYVKTDITLHSGLLAPEEGASNVVKVALLPDGGVTGAFFEEGNELASFV

SEQ ID NO: 46609 - protein, 344 aa, Zea Mays
MMYCQDVNDLELIVLQMNIGYRAAAFFSLFCFSHKEKISSACSDCMGTVPQRLRCRCNFHALRFVYKIQETGAVLVERLHGHRASSSPLKDNLLGQFAVKSDPRANKSDASKYLAVHLRFEIDMVAYSLCYFGGGKDEEDELEAYRQIHFPVLSELKKMTKLPSAAFLRSEGKCPLAPEEAVLMLAAIGFKRSTNIYVAGAEIYGGKDRMAAISRLYPALVTKETLLSPSELEPFRNFSSQLAALDFIACAAADAFAMTDPGSQFSSLVQGYRMYYGGGDLPTIRPNKRRLASILVKNATIEWNGFENRVRKLIQQTKQVHERPVARSVFRHPRCPECMCRTEH

SEQ ID NO: 46610 - protein, 539 aa, Zea Mays
MVMGSWRSRRSRSRHPTPRCPTPPAPQPPPRSLLVGFTLPRPEGAAAANRSRALRLGAADGLRGGGAEGACWSGQRLTTTRRWACRAPRVTRTSRPRTGSSRASRVRASLASRIRRIRAYRWMQKNSSKMNYFASTRAAHVWHIQYHPDVNKEPGATEKFKEISAAYEVLSDEKKRTLYDQYGEAGVKSAVGGSGGAYTTNPFDLFETFFGGSMGGFSGMDQSTFRTSRQNTVLQGEDIRYDVVLGFTEAIFGTEKYIILSHLETCDTCGGSGSKAGSKMRICSTCGGRGQVMRTEQTPFGLFSQVSICPTCAGEGEVISEYCRKCSGEGRIRVRKEIKVKIPPGVSKGSTLRVRGEGDAGSKGGPPGDLFVCLDIEEPSDIKRDGINLYSTVSISYLEAILGTIKKVRTVDGTNDLRIPPGTQPGDVIALAKQGVPSLNKPTIRGDHLFTVKVAIPKRISGRERELLEELASLSNGGFVRTDAKPKPAQPKRVHLEKEVGASQEDTDKSKAAGDWLKKLTHFAGSIANGAAKWLKENL

SEQ ID NO: 46611 - protein, 472 aa, Zea Mays
MEAAGGEQHETRRRAGAGLALLGVVYSSLLLNAIFVAHHFLSPSRLLLRDDGCGCGLTWSLQAAREAEAVAAVECSGHGQVFVDGVAGEDGRPGCECNSCFGGPDCSLRTPNCTADADSGNPLFLEPYWRRHAAASAVVFSGWHRMSYTTTGGFQSVELERQIRRLHGAVGNAVADDKHLVFASGSLQLINALVHALSPYYPAYRQQTSMFDGREYRWAGTTALWANSSRANSTDGTFIEFVTSPNNPDALLREPVLRGSAAAIVDHAYYWPHFTHIPAPADEDIMMFTVSKPSGHAGSRFGWALIRDDEVAKRALEYLRDSNMGASRDTQLRMLGIFKFMLANLRGKDDIFAFGHDVMRSRWLRLSAAVSRTRRITLQKIAPQYCTYFGRVREPSPAYAWVKCEMEEDEDCYEALLKANIITRSGVQYEASSRYTRISLLKSDDDFDVLMERLEDLVDADKYDDSNGSSSM

SEQ ID NO: 46612 - protein, 88 aa, Zea Mays
MVEETKIQAGRIVGLEHQQQEDTHSYAITVREELKETMGFLGHHDQVLEELHHTYPMEFQTVQRLINHLQQTVHMLNVAFYSAPTPTD

SEQ ID NO: 46613 - protein, 386 aa, Zea Mays
MSLCLRAADEERRWEVAGAKGLAHLAAPLVNILTHTDEIKLKAKRIAAVEKKKRCLGMKILSTKEASGGLQRCADYFGMPTAPSESNKEPRPEECVNELGIKQPVQHVASEEQEGVQDDAKADANVMNVSFGKGKSEDSFGTINGTNSGDKIESPSGLAERTLTQPTTKGCSKQRGRSSNGRGNRTKKIEEGNASGLIAVAPESEDDDDDAAFIDGNQAEGGALWDIFRREDVSKLHDYLMKHAHEFRHCNFEPVKQVTHPIHDQCFYLTIEHKRKLKEEYGVEPWTFEQKLGEAVFIPAGCPHQVRNLKSCIKVALDFVSPENVRECIRLTEGFRLLPKWHKVNEDKLEVKKIALHAFNQAIKDITDESSNSNERCLNVEVMLQE

SEQ ID NO: 46614 - protein, 994 aa, Zea Mays
MPPPTRGRGRGRGRGRGRGRGRGRGRPSKDTVAEDSAHATEESGEENLQEKVQEGGKVNLTEKVQEGGEENLTEKVQEGGEENLTEKENEGIVEVSKPPQRRRKDPVADPSSLESSGFMRFRERRNASAVQEQGPKKRRITEDSNMCHQCQRNDSGRVVRCQGCVVRKRKYRYCVKCIKRWYPHLSEDDFANNCPVCQNNCNCKACLRGDITRANSRKKKKLLQINSGGYSVSEQDKIKFSMRIVHFLLPWLKQFHQEQMQEKSAEAATKGIDADKLEVPLTICGKKERIYCNNCRTSIVDFHRTCNKCNYDLCLQCCQELRRGLVSGNDAKVDGGGKQDFLSGVSHDKIISKGPSDGQNDMLIDSVVPGENNTSSLRQWSVNKDGTIPCPPNAFGGCGSSLLELKCLFKEKFIAELLEKANSALNNEMEVKIEGSKCPCFTESGDMDDGISRKSSCRENSCDNYIYCPTATDVQNGSLDHFQEHWLKGEPVIVRDTLALTSGLSWEPMVMWRALREKKEKVERLSVLALECLGWCEVDVNIHMFFAGYSSGLVGPDDLPLLLKLKDWPPHSSFEERLPRHGAEFMSALPFREYTDPKWGPLNLAVKLPDNVNKPDLGPKTYIAYGVSKELGIGDSVTKLHCDMSDAVNILTHTDEIKLKAKRIAAVEKKKRCLGMKILSTKEASGGLQRCADYFGMPTAPSESNKEPRPEECVNELGIKQPVQHVASEEQEGVQDDAKADANVMNVSFGKGKSEDSFGTINGTNSGDKIESPSGLAERTLTQPTTKGCSKQRGRSSNGRGNRTKKIEEGNASGLIAVAPESEDDDDDAAFIDGNQAEGGALWDIFRREDVSKLHDYLMKHAHEFRHCNFEPVKQVTHPIHDQCFYLTIEHKRKLKEEYGVEPWTFEQKLGEAVFIPAGCPHQSCIKVALDFVSPENVRECIRLTEGFRLLPKWHKVNEDKLEVKKIALHAFNQAIKDITDESSNSNESKWIRR

SEQ ID NO: 46615 - protein, 201 aa, Zea Mays
MCSSSRGYLAPEYTIQGQLNKKSDVYSFGVLLLEIVSGRCHTDPRLPVDEQFLLEKVWTLYEFDDLESIIDRTLKRDFDTEEALWLLKVSLVCIPDSPKIKSSMSMVAKMLQGSSIKVEWMQSKLEGCAPSRITAAKAIVKAGIVVMAPQAISVLGGFRPQGKTIDNVVKVFFPWADHCRLVVSGLLPMGGALERLIVSRI

SEQ ID NO: 46616 - protein, 188 aa, Zea Mays
MCSSSRGYLAPEYTIQGQLNKKSDVYSFGVLLLEIVSGRCHTDPRLPVDEQFLLEKVWTLYEFDDLESIIDRTLKRDFDTEEALWLLKVSLVCIPDSPKIKSSMSMVAKMLQGSSIKVEWMQSKLEGCAPSRITAAKAIVKAGIVVMAPQAISVLGGFRPQGKTIDNVVKVVETTLAMQEAGCFSVVY

SEQ ID NO: 46617 - protein, 200 aa, Zea Mays
MNWTCLIQGTWLMCSSSRGYLAPEYTIQGQLNKKSDVYSFGVLLLEIVSGRCHTDPRLPVDEQFLLEKVWTLYEFDDLESIIDRTLKRDFDTEEALWLLKVSLVCIPDSPKIKSSMSMVAKMLQGSSIKVEWMQSKLEGCAPSRITAAKAIVKAGIVVMAPQAISVLGGFRPQGKTIDNVVKVVETTLAMQEAGCFSVVY

SEQ ID NO: 46618 - protein, 157 aa, Zea Mays
MNWTCLIQGTWLMCSSSRGYLAPEYTIQGQLNKKSDVYSFGVLLLEIVSGRCHTDPRLPVDEQFLLEKVWTLYEFDDLESIIDRTLKRDFDTEEALWLLKDHEAGLITDVMDLKVRMVEPVQFSLTSCSSTIALWPGARCAHSLLGISHSATTSHAV

SEQ ID NO: 46619 - protein, 669 aa, Zea Mays
MEEPQKDSGQPSKSSDSELEAMVLDDNGAGKSHSMEENRDSPIDVDGGQSSMDVDIKGKSSLSDDVNGKSSSEPYSNAPIDMSVESLEKFCKEASRSFFDEVGLISHQINSYNEFVSHGLQELFDSLGEVIVEPGYDPSKKGSGGWKHAIIKFGRVKLEKPVFWTGKDEGSVDFKPWHARLQNMTYASRLIVEVTIQVYSLEKSDKSKTGNDGFVQKRNFMNETHWIFIGLLPVMVKSNLCLLHSLNESECLFDAGGYFLVKGMEKVFIAQEQRCLRRLWISDRPCWTISFMSEIKRRRIYIKLVESTRSEDFSESKIITISFLYATMPVWLLFFALGISSDKEVFDMIDMQDCDASVINTISATIKESDKLCEDFRKSDKARQYVDELVKSSRFPPAESFDDYIARFLFPDISGNRNKALFLGYMVKCLLMAFTGKRKCDNKDDFRNKRLDLPGELLGRELRAQLRLAEKRMVKAIQRDLNSDRELQDLERYIDASIVTNGLNRAFSTGSWCHPYKRAERCSGIVATLRRTNPLQMMSDLRKTRQRVAYAGKAGDARYPNPSYWGKLCFMSTPDGENCGLVKNLAVTAIVSSRVMQPLIESFISCGMSKLNDIPTEHIQRMDKIFLNGNWVGSCENSASFVFRLRCMRRSSLIDPQGESSDPFLWLRI

SEQ ID NO: 46620 - protein, 356 aa, Zea Mays
MRLPSFPEYEIRVRYATEHRCGVVVKGPKLSGNISGTDPLKDNRLHLKAEPLDDSQEAKNSAAVINELSKEITHILVSHPINAQRAAEGKNIANVVLLRGCGIRIEVPAFETKHGLAPCMVAPTKIIAGLGLSLGIDILEAPGATGDYRTLLTSKAKAIAKALSSPMGTPPRVFVPGEDEYKAGKENGYDFGFLHIKAIDDAGHDKAVKLKVRGLEAVDRAFGQLARLLWEAENAGHYQYFLCVTGDHSTPVEYGDHSFEPVPFAICRLRDYAGAVGVDNIINTQLDAFPLPSVKSGEDLLDNIESLDHKPDQLKAFSGDTVCEFNEIATARGCLGRFPGSEMMGIIKKFIKAKND

SEQ ID NO: 46621 - protein, 542 aa, Zea Mays
MFGTFPCSYLLFLLCLCVPLFLEEKNTTCSIHQELYFLVSPHVSLPSTFCRNGGFMTLVCTYPCQVTENVMCLHVDGFLTAEAPLCSLFDEPDRQDDSNQISLVGNDGKLEGYIYNIEVSYVLGAIKEQYTKNPPFKLSIDYSCSDGIEEGDDGIWSIVGGKLSSKCDNKLFRIKFSTLHMQRYSFLEAYSKPIRCISRSRTVRPLGPTKRASSATANEIDMLSNGQGFVSTDKVNSRGHSVCLHTPMFPKIEGGMVEVVEAPKINKNARKVVVSKEAQNVIGTDSSTSNYDSFDSGSSWSGSEGDDGIETFSDAVVFRYCLDSTYDRSKFLRGASLTVNKDDLVKLADRVSLYSGCSHHREGADTWNMISKNNERALWSSAIPEIITKFTNIVHSVRRGLSEQDLEVLRGIAGCGEDIGRDEFDRLWCWLYLVVVSLSRERIKKLWDCTAPRWIEGLITTEEAENALRSSRELLKEAGTFVLRFPITRSWPHPDAGSLVVNYIGSDSSIHHRLLSLDSSDASAEKLQDLLLQEPELSQLGR

SEQ ID NO: 46622 - protein, 450 aa, Zea Mays
MPCFIRRRRLGIYQKEYANLTFPLATCIVMSGIYEDDLDKADEIIYTGQGGNDLLGNHRQIGSQQLKRGNLALKNSRKNGNPVRVIRGHLSKNSYTGKVYTYDGLYKVVDDWVQNGVQGHVVFKFKLKRLEGQPSLTTSEVRFTRAEAPTTISELPGLVCDDISGGQENIPIPATNLVDDPPVPPSGFTYLKSLKIPKDIKIPSSIIGCDCEGDCASNKNCSCAQRNGSDLPYVSYKNIGRLVEPKAVVFECGANCSCNHDCVNRTSQQGLQYHLEVFKTASKGWGVRTWDTILPGAPICEYTGVLRRTEDLDGSQNNYCFDIDCLQTMKGLDGREKRAGSEMHLPNLYPENDSDAPPAPEYCIDGSSIGNFARFINHSCQPNLFVQCVMSSHNDVKLAKVMLFAADTILPLQELSYDYGYRLDSVVGPDGKIVKLPCHCGAPDCRKRLY

SEQ ID NO: 46623 - protein, 397 aa, Zea Mays
MRGAYPVLPTLLCSRRFALLPSPPAHPDLVLPPFPLSRSAGAPRLLRRHREGELLVSLAELDAAVRCSLRSWWMANMDSVVVMEVAPVPIPTFMDATPLNPPLPLVVEELVLRRSARYLNRPTRPNYADQEPPKNPGGRGRGKRKRDEEKPELAAQQGTKTPGRNDSNVEAGERKPMPVTAAVPACCAGVAAEDDATPTGKSAKLRVKETLRAFNSHYLHFVQEEQKRAQAAIQEIEAKGGLKRQTKGGKKKSSKQEAEAEEKEKRPSKRPDLKAITKMQEMNAVLYQEKTIGHLPGLDVGDQFYSRAEMVVLGIHSHWLNGIDYMGMKYQGKKEYANLTFPLATCIVMSGIYEDDLDKADEIIYTGQGGNDLLGNHRQIGSQQLKRGNLALKQEEW

SEQ ID NO: 46624 - protein, 116 aa, Zea Mays
MVGEPLVSFLFVKMESVHRRRRSQSTGAWCYVHGDQCKSWVQRQAPIPQDRWIPSRTRRTFVRKAGRHGRHKPQTCQRFVGFRCSRAAGAEIRRLLLLRLRQFCVQRSYNSTATSS

SEQ ID NO: 46625 - protein, 125 aa, Zea Mays
MNPPRVTIDNTSCPSAIVIHVLTNLKLIVTKAYISSDGGWFMDVSTDEGEAKAQEHGAMFMETSAKAGFNVKPLFRKIAGSLLGLDALSSGKQEDMVDINLRPASGSSASGAAAQLEQKSGGCSC

SEQ ID NO: 46626 - protein, 126 aa, Zea Mays
MEGDPACGLALADEEAECSSWDSDDEYQKFIQNMNPPRVTIDNTSCPSAIVIHYGILLEVVQVLTNLKLIVTKAYISSDGGWFMDGKCPPTKEKPKHRSMVLCSWRPVQKLGSTSSPYSARSLDPF

SEQ ID NO: 46627 - protein, 117 aa, Zea Mays
MEGDPACGLALADEEAECSSWDSDDEYQKFIQNMNPPRVTIDNTSCPSAIVIHVLTNLKLIVTKAYISSDGGWFMDGKCPPTKEKPKHRSMVLCSWRPVQKLGSTSSPYSARSLDPF

SEQ ID NO: 46628 - protein, 289 aa, Zea Mays
MATPLDVPLDDLIKSRGDGQRLARGSWRGRGTGNFRERGLGVSSRRPLGVNTWSSSFAIAKSFNKAKDFVWRHDLFEDSMVAAGLSGIESGTKLYISNLHYGVTSEDLQELFSEMGHLKHCAVHYDSYRHPTGSAEVIFTRRSEALAALKRYNNMRLDGKAMKIEVIGAELGLSAAAVPQISVVPGASRRGQREVVMMPGGSGFGQGASGPSSSLPGWKRGGFVRRGQGRVSFPQRGRGQVRSRGRGRGRSSFVQSRGRGYVRRGNAEKSAKQLDNELDNYNSGAMNVD

SEQ ID NO: 46629 - protein, 736 aa, Zea Mays
MALFVDEESVTDEPSDQSQTTDDNSENGPTEEQDLFSQGNADLLKSWVVNTISCVLKNLKLTSKGNSDSEMARCIEEKFQVQTEILKFLAVQGLFSASLGTEVTSFELQEKFKWPKNPISTSLRKECIERLQFLLEDAQKDASLHVPNEVKSNDLGYYLMCFINTVCNIPSVSLFRILSGHDDNAFKKLMAVESMLFHEERKTGPGLESTKMHAMRYLLIQLLLQVLLHPDEYWEAAVDVTICCKKSFPVIAQGDNSSAQESAEHGSQESDEDGFEESDEDGSEDPNEEVSLEFMDVLVQTFLSILPHASGPVCFTVEQVFRVFCDDITETGLLDMLRVVKIDLKDRHQTDSDDEDDGRVDIEDDDETVMEDEEVGEIDNVTDGLDENTDDDSTDEDDLDQDDFNKTVPNETKGGGKTETTKDGDDSDDSDGMDDDAMFRIDPYIARIFKERNLPGSDTKQSQLMRFKLRVLTLLDIYLQRNPGKVLVLEVYSFLMQAFVKSHGADGTEQFRQRISGILQRRVFKGNEYPKGDAVEFGKLESLLEKALRLTSRSRYNTVASVAQNATFWILKIINSKHCSEQELARVVDLFRSILSDYDRKKSRLKLGFVKQVAKRNPWIGQKLFGFVLQRAENTKAQYRRNQLLELAEFILKSWADGTSEMFLNHLSQLCGLIQAALSAVAENKSRRKEVRNFCTGILQTVLKLGLKDQFQKALSPETYSLCEAKLGAAFTAFKK

SEQ ID NO: 46630 - protein, 628 aa, Zea Mays
MSKVTWCRSAGVKKKANMPQGKSKKNVVKEKAKKIKKNAESRAKVHENTDQIEINIREGVSIWITKAAVQKCFEFPPGTDKKLPIDPTTKTFDSLYRVLSVSEKKINVKKKKMKENMKEKQVEEEKIEMNMEEKKQNLVEDEGSQQEESEEEDGEDGEIGEEEGEDGAIGDAKVGGDGDKESAKRGGIKVAVRRNVLTPLNINLMLQNINNDEILKLLVKRNEDTDGTEPNLDIDLIVRCFFAVSSVAEFGKDKKKLISGCTTVLMVVFLDHLVENPLDPLTIPRINLYTSDFIADLIMVPKDSPGPEKKRRKFKNSEDTCYHEDSEMVPSPGRASPVVASVQSHKNFVDHADLEIVPSHENSVDLHSVYMAHVLERSRQSIVVDILDYNIPESTFADCLLPTGHMHTDVFYLQCQLLSKDWKDKVILSWKATQELIHQDIGVKELDKELTAEIFIPIIHAGHWSLVILSTAKQETYILDSYPRHSGVAKDVLTQLQKYLDNKHNFDMSNYTDHVPPVQHQKNNYDCGFHVLLYIEEFMKEKMYKINKKMVLKFRKQLCMNLLYHPLNRINLVEFRKKLGITLKRKLPGILDLTIEGERSESEAAVIIEIENRDDKTLEDEHISVEKE

SEQ ID NO: 46631 - protein, 416 aa, Zea Mays
MDTPTRVLPPAGQIRSINVTPGRLTDGLLPLPMMNMGPDLSRVWSWFVVPCRLDACRHTTAKQLFEEMPSLSSLLSGSNTASAELPLIPCKLCNGVVIERVSKQPETTSRKFYRCRAKKTDGFVSGDRRLELLMIALNDHGKAVESLTNSIREMKKKLSNLELVMEELDNVKNLMKAAMVEIEENKKSTAAALKLMENELQKLKGSTKVKPRNMAQCFLLLALIGCVMFHVPCHFLESTVVLLLSVESDVDFGRTHGRRACHFHEDPRAEPRVTFMRYSVGFLIRVAFGYIELCSSNLCWVSGFHVDFWEDPRSEARVTFRSLQRCVLNASVMFHVPCHFLESTVALLLSVESDGRMLILGGPTGEGCVPFMRYSVGFLISVAFLQGVEFQGPMLIFGRTHGPKPVSLSGVYSVAL

SEQ ID NO: 46632 - protein, 251 aa, Zea Mays
MANPLAGLQDHIKLARDYALEGLYDTSIIFFDGAIAQINKHLTTLDDALVRTKWMNCKKAISEEVESVKQLDAQLKSLKEAPGTRRSSSPPIRSNKSFVFQPLDEYPTSSPAPFDDPDVWAPPRDTPTRRPTRGQSSARKSSQDGAWARGSSRTGTPSRSSKPNGSKGGSVVKSSTASNSSVRKGKPSSSKADSAGIRRPWKGVLMFGPPGTGKTLLAKAVATECGTTFFNVSSATLASKWRGESERMSIW

SEQ ID NO: 46633 - protein, 229 aa, Zea Mays
MMSSAPEETLFNLDQQQPPPAEQEQICYVHCSYCDTILAVGVPCSSLFQTVTVRCGHCSNLLYVNLRALLLPAAAANNQLPPFGQPLLSPTSPHGLLDAEAMSFQAPSLPGAEPPSACVSGVTSINNTCGGNTTTSSAMSSMAPPPAKHALQEAQQLPRTAASVNRTSEKRQRVPSAYNRFIKDEIQRIKASNPDITHREAFSAAAKNEGAECMLFMDGLYASMGFSPF

SEQ ID NO: 46634 - protein, 149 aa, Zea Mays
MKCDPGEFWCHVSEIALHDRKPAPSLPLASNVGIAREMSQVPKKAIPLFPKADDDKSKESKCDVEKPAATESSKPKVSLEETKDPEKHEVDVGGTDDDESDEDFVDSEEGESDDDENSSDGDECESSNEEDEDSPNVVLRARIGQQQHP

SEQ ID NO: 46635 - protein, 371 aa, Zea Mays
MLQYLKRLATYILSKGGFFFLLIVLLVASGILLVVSDGLHKKHVQEFLNYAKFVSWWVSLGVASSIGLGSGLHTFVLYLGPHIALFTIKAVQCGRIDLKIAPYDTIQLKVGPSWLDKKCSEFGPPVYPASAHSVRIPVFDLLPQIQLEAVLWGIGTALARLSGSESKAVQELDAATSKEDGPVASSLNRTKRWLLSHSQHLNFFSILILASVPNPLFDLAGIMCGQFGVPFWEFLFATLIGKAIIKTHIQTLFIVSLCNNQLLYLIEKELIWIFGHVPGFSATLPSVIARLHAAKDKYLSPPAPVSPSSQMGEKQWNFSFTSVWNSIVWLVLLNFFIKIVTSTAQDYLKKQQDTEMELISDSPIQDHSKTN

SEQ ID NO: 46636 - protein, 589 aa, Zea Mays
MGSRREEERNEKIIRGLMKLPPNRKCINCNSVGPQYVCTNFWTFICLSCSGIHREFTHRVKSVSMSKFTTQEVQALEQGGNQRARDIYLKDWDWQRMRLPINTNPDRIREFIRAVYVDKKYAGGSSNKPATESESMKSNDHDMRRPSSYHSYSQSPPYDFQYEDRRYGKQVNTLARRPSDRALFDGKLGNLLFSPGRLRDQMNEDRFANESSGSRFSDFSASSTGDFRNDVLSPSSQETGYSSPSVHHSRNVSADNPQTQKCPNAASQIDFNGVRRPQRTTSSGSFGSFDGSSVSNKSIESGYPPDAPTEKSVHCAVNHQTVPSPEACSTQQYASPSDNHNLIPHKPADLGSQIVATRKPVQHSCAQIENVVPMHAPVQPTTSTPLGLFDQSTVQHPVTSAAPIDLFAGFNEQLPASHNTDGVSSHSVVAKEPAHNVVQKGIMPSAEALATSHAVHQDLFSLSILQEPATPLPSQPIDLFAGFDQHLPHLSTVQKIPSAVPFPANDGWAFFDVQHGLLTSVSNVQGQVPAAFSPSDGIAKGIDQLTLPTSPPNVIGSQNSPAMMDNWSLNAEEVKIPVLNENSLLECLW

SEQ ID NO: 46637 - protein, 127 aa, Zea Mays
MQVKAAQHSCLSWCIPSLAIRRCPSLAIYCTKGKKCDSDRELEVLSRAYLLCWCCQVRKWTIADYRTLLPVGEKKWCSCIGRNGKLAVSYAFGNSLVVHSGVLTASKMVKVNGCCGVWHPGDLNILL

SEQ ID NO: 46638 - protein, 192 aa, Zea Mays
MQSEKKTYNDAGEPSEEKGEEHCIQPVYFLRRSSGDPLHSELQKGIKFLWFDGKLSQKHKEKVLKEFSESQDKLVLMMSLKAGGVGLNLIAVSNVFYDGSMVESSCGRAGFHENSPYWAEKRGPSQKLHRQGYCRGASGCNRSKCASRGWFLGRSLMRRFVALALSISRCCLNDCCHELPMCIADAMSLMLL

SEQ ID NO: 46639 - protein, 293 aa, Zea Mays
MYLGPVRANERAAYEVVVEEGRLLYKQSGDLVNTNEESKWIFVLSTSRSLYVGQKRKGKFQHSSFLSGAATSAAGRLVAKDGVLKAIWPYSGHYLPTEENFREFIAFLEDNNVDLANVKRCSVDDDEYPSFKKQAAEGPEEPQAAGEAPAPVATEEAAEEAVELPAVDVVKAEDTATDTVEPSKMTMMASRPSFKWSTPTGARIGCLQNYPADVQSMALEQVNLSPRLAAAAPSPRLPIPSPRPSPKIRLSPSLHYMGCPTPTGRRSSPKQQQFMGFYTAPPVALTLPKHKVK

SEQ ID NO: 46640 - protein, 254 aa, Zea Mays
MSPSEYLIKRVIMLENDLKCYYQTEGLNQKNENSSVIQYIQVHQDDAILNIKLELFSLIAKQPAFNQLRTVEQLGYITSLSLRSDYGVLALQVVIQSTVKDPSYLDVRVDEFFKMFESKIYELSDKDFKRNVKSLIDSKLEKFKNLWEESHFYWGEIEAGTLKFDRVESEVAMLRELKKEEFIEYFNQYIKVDAPQRRTLSVQVFGGNHLVEFKKAINEANPPKMYRITDIFGFKRSRPLYSSLKGGPGRITMD

SEQ ID NO: 46641 - protein, 704 aa, Zea Mays
MHLVVYGKENLDCIQGLVERMFSDIKNTDQRSLKCPSHPLSEEHLQLLVKALPIVEGDYLRIIWPITPSIQFYKEAPCHYLSHLIGHEGEGSIFHIIKELGWAMNLMAGECSDSNEYSFFSVSMRLTDAGHERMEDIVGLIFKYLHLLKEDGVHEWIFNELAAINEMEFHYQDKVRPINYVMRTVSTMRLFPPEEWLVGAALPSKYASQRINMILNQLIPETVRIFWESKKFEGSTSSAEPWYNTPFSVENVTPSVIQEWIEKAPTEKLHLPKPNIFIPKDLSLKEVHEKVTFPTVLRKSPLSQLWYKPDMLFSTPKVHIIIDFHCPLSSHSPEAVVATELFVDLLVDYLNAYAYDAQIAGLFYSIYVTSAGFQVSLGGYNDKMRVLLNAILVQIVKFEVKPNRFSALKETSVKDYQNFNFRQPYSQASYYVSLILGDKKWPVAEKLEALSKLESDYFAKFVPHLLSKTFLECYVQGNIEPSEAKSIVEEIENTIFTTPNSLFKSMSPSEYLIKRVIMLENDLKCYYQTEGLNQKNENSSVIQYIQVHQDDAILNIKLELFSLIAKQPAFNQLRTVEQLGYITSLSLRSDYGVLALQVVIQSTVKDPSYLDVRVDEFFKMFESKIYELSDKDFKRNVKSLIDSKLEKFKNLWEESHFYWGEIEAGTLKFDRVESEVSVLLSATMRVKEIVSSIKQADCSLLVNR

SEQ ID NO: 46642 - protein, 201 aa, Zea Mays
MKACAKAAGERLSLVCAPSTRQPLARSSAGAVNRIYEIKGRIQTRPLAICVGDVSDISRFALVDHLPHGLLDSLLPGPVTIVLKRGENSILERSLNPGLDSIGVRVPDLDFIRSIARGTGSALALTSANLSGQPSSVCVKDFEGLWPHCSYVFDGGVLPSGRAGSTIVDLITPGVYKILRDGSSRKETAAVLGKFGFVEAL

SEQ ID NO: 46643 - protein, 54 aa, Zea Mays
MWSIAPAASGQHLSDPSTASAGACSPSSRPSRRHLTTASAILPAAAGRRLVPKP

SEQ ID NO: 46644 - protein, 174 aa, Zea Mays
MHGAVNRIYEIKGRIQTRPLAICVGDVSDISRFALVDHLPHGLLDSLLPGPVTIVLKRGENSILERSLNPGLDSIGVRVPDLDFIRSIARGTGSALALTSANLSGQPSSVCVKDFEGLWPHCSYVFDGGVLPSGRAGSTIVDLITPGVYKILRDGSSRKETAAVLGKFGFVEAL

SEQ ID NO: 46645 - protein, 665 aa, Zea Mays
MASWLKVAEDLLEVVDRRAKIVATELSDEQSTSQPSGPNNQEVQAKKGKPREKGPLKLTNADGGNKISAQKEKRSRQRPRERMKIEKIRPSPPAGSSSVDTSASEPEVTPIDVKEVGNEGTLEKGEKEIAVESYFSVMDAKSESSSSNQTSEIGSVINLEERDSTVAVIQDTNASELPNTEVTGKLQESKKASVSDSSESIEDRRKQKSDTISVKEQDQLEEAQGLLKSAVKTGQSKEARLARVCAGLSSRLQEYKSENAQLEELLVQEREKSTLHEAHIKQLQQELSMSRVEGSRAELNMVDALTAKNAEIESLVKSLDSWKKRAATSEEKLASLEEDIDGLKRNCELTETRVIQALREELATTERRAEEERIAHNATKMAAVEREVELEHRAVEASSALARIQRAADQSSSRVLELEHKLAVLEVECASLQQELQEMEARNRRVQKKPSEEANQVLQMQAWQEEVERARQSQREAEAKISSLEAELQKMRVEMAGMRRDAEHYSRQEHVELEKRYRELTDLLYHKQTQLESMASEKAALEFQLEKSLKQFHEVQIEAERSKATRRSASSWEEDADIKALEPLPLHHRHMATANQQLQKAAKLLDTGAVRATRFLWRHPVARVSLLFYLVFVHLFLMHLLNRLQDFASREGTSAMGDLASANLP

SEQ ID NO: 46646 - protein, 200 aa, Zea Mays
MKRDGAGRGNWGTATDELIAQDAEDSPKMEEAAPVAEKQGEQNDAPAADENKDNKDATANEEEEKEEDKEMTLEEFEKIREEKRKALLALKAEERKVEVDKDLQSLQPLSNKKENDEVFIKLGSDKDKKKENAERDERAKKSVSINEFLKPAEGERYYGGRGRGRGRGDRGGFRGGYGGGYSRRPAAAVTERCVVCCCHI

SEQ ID NO: 46647 - protein, 173 aa, Zea Mays
MRKFEIGALVELVRAHGVTVAPFVPPIVVEIAKSPRVGAADLASIRMVMSGAAPMGKDLQDAFMAKIPNAVLGQGYGMTEAGPVLAMCLAFAKEPFEVKSGSCGTVVRNAELKIVDPDTSASLGRNQPGEICIRGEQIMKEKNRALSTSCGRSAHAKSTSSPRSLQARSRCAR

SEQ ID NO: 46648 - protein, 499 aa, Zea Mays
MPAVDTLELVTGSPTDIAAPSVICPPPTLPPRRGGIITRLPPQFRHSSAQASSGAEQSLEIPPTICPPADAEPIASPAARTMGSVAEDSTAAAAAAASVVFRSKLPDIEIPRNLSLQAYCFERLPEVSSRPCLIDGQTGAVHTYAEVDRLSRSAAAALRGLGVGRGDVVMALLRNCPEFALVFLGAARLGAATTTANPFYTPHEIHRQAAAAGARVVVTEACAVDKVRGFAAERGVPVVAVDGAFDGCLELRALVDAAEPLAADEEVGPDDVVALPYSSGTTGMPKGVMLTHRSLVTSVAQQVDGENPNLYFSKDDVVLCVLPLFHIYSLNSVLLAGLRAGCAIVIMRKFEIGALVELVRAHGVTVAPFVPPIVVEIAKSPRVGAADLASIRMVMSGAAPMGKDLQDAFMAKIPNAVLGQGYGMTEAGPVLAMCLAFAKEPFEVKSGSCGTVVRNAELKIVDPDTSASLGRNQPGEICIRGEQIMKALPLLGLTSSGLL

SEQ ID NO: 46649 - protein, 507 aa, Zea Mays
MAALQSWRKAYGALKDTTTVSLANLNSDFKDLDVAIVRATNHVESPPKERHLRKIVAATSIARPQADVTYCIHALARRLAKTRNWIVALKTLVVIHRLLREGDPAFREEFLTFTQRVRILQLSNFKDDSSPVAWDYASWVRTYGLFLEEKLECFRVLKYDIEAARLSKQGQGPEKGHSRTTELNSQDLLEQLPALQQLLYRLIGCRAEGAAKNNYLVQYALAQVLKESFKIYCAINDGIINLIDKFFEMPKHEALKALDVYKRAVHQELPERLLLTYKPEEEVHDTVPIVAEKLQVVEEIAPVPSSQIALPPKPEIADTGDLLGLGDSTPTVLAIEESSALALAILPTGIDNSTTTTQQDSGFDPTGWELALVTTSSNATPLSMESNLGGGFDKLTLDSLYDDGTYRQMQQQQLYGSAPPNPFMASDPFAVSNQVAPPPSVQMAAMAPQPQHLPMMIEPNPFGPPQQHHAGVAPAANPFLDAGFGAFPAVNGMHPQTNPFGGAAQLL

SEQ ID NO: 46650 - protein, 95 aa, Zea Mays
MRIVLLSDDCLIRLLPRTHRHELYIESSVEGPHCGLFPVGAPSTSTTTTGLKWNLSESKMRFGSMISTSNIVQSEKVTVESDADLLWTISLRNLT

SEQ ID NO: 46651 - protein, 250 aa, Zea Mays
MDLLHGDHQAFANVAGHGCGNNHGLAMFEAEGMVFLLVTMVATKVHRHLRLMDIYKLCALTRSVKSTTRYVPEIIEGDMDSIRPEVKLFYSSQGSKISDKSHNQETTDLHKCISRIHHCTPDDEKPNLCVLVTGALGGRFDHEAANINVLYLFSDMRIVLLSDDCLIRLLPRTHRHELYIESSVEGPHCGLFPVGAPSTSTTTTGLKWNLSESKMRFGSMISTSNIVQSEKVTVESDADLLWTISLRNLT

SEQ ID NO: 46652 - protein, 87 aa, Zea Mays
MTSVTEGIDAIATTRVVVTGDVANNSKHALTGHSFNRSFSGSGAAMDIVVSSVRAYLSALNKMCSFAGAARASSTEVPGSASVQRAE

SEQ ID NO: 46653 - protein, 320 aa, Zea Mays
MAFNAKPYCSTTAKPPTPAAHRSPSGPSPCISVRAAAVSPRARHSAYGLSAAGNASSSTVRLRALAQRTRAQPQPPRRRPEYVPNRIDDPNYVRIFDTTLRDGEQSPGATMTSAEKLVVARQLARLGVDVIEAGFPASSPDDLDAVRSIAIEVGNPPPGDDGGAHVPVICGLSRCNRRDIDAAWEAVRHARRPRIHTFIATSEIHMQHKLRKTPDQVVAVAREMVAYARSLGCADVEFSPEDAGRSNREFLYHILEEVIKAGATTLNIPDTVGYTLPYEFGKLISDIKENTPGIENAIISTHCQNDLGLATANTLAEHDS

SEQ ID NO: 46654 - protein, 109 aa, Zea Mays
MLVLLESGMWLACPFGRKKKIFYLLYANPSVPSSPNALAVAAGIPGWPHCSIQLRCRSHNGQRVWLAPQDYDDSFGLVVSLSQGKILVNVWTDFVCSYINGSFFFFLPL

SEQ ID NO: 46655 - protein, 323 aa, Zea Mays
MILATSTVSTFVKYIFYVSDMLMEGQWEKKAVYTFYLELISDLVHLSLYMLFFIAIFLNYGVPLHLIRELYETFRNFRIRIADYVRYRKITSNMNERFPDATSEELDVSDATCIICREEMTTAKKLLCGHLFHVHCLRSWLERQHTCPTCRAPIIPADNGHAVSARQHGAQAGVQPGTATPSSEGAPGENMSRHQAKLEAAAAAASLYGRSFVYPPANTLKRSVPPQPASSTPQSEASSSNHQSQKDQEMQSRNSSDGLVPLPLNADGAVGSGTSTRDLENSLQKAQENFIKSQIEMLQIQLQMVQRGAAGPPSNENTEHTEE

SEQ ID NO: 46656 - protein, 230 aa, Zea Mays
MNERFPDATSEELDVSDATCIICREEMTTAKKLLCGHLFHVHCLRSWLERQHTCPTCRAPIIPADNGHAVSARQHGAQAGVQPGTATPSSEGAPGENMSRHQAKLEAAAAAASLYGRSFVYPPANTLKRSVPPQPASSTPQSEASSSNHQSQKDQEMQSRNSSDGLVPLPLNADGAVGSGTSTRDLENSLQKAQENFIKSQIEMLQIQLQMVQRGAAGPPSNENTEHTEE

SEQ ID NO: 46657 - protein, 450 aa, Zea Mays
MEANGAVDLEVDIIGPGAAGSKLTSVDDPDATECSSSFGDTLSGSEDGARPSEISDIEVDSPFCRYPSNCDAAALLDAAASDNSDRLLKKKKVTDHWRKYVSPLMWRCQWLELRMKDLQSQVSKYDKELAVLKHEKELQTKMIELDCSSSRSVPFSSLCCRKTMKRRRRKRNEDKIDTSSYISNHTVLSYFEKMEADGHSIEDNANLVDDNTKANNDADWLLGIEGGDTTVEQILLSIQAAQDRVFSLRSNLKQAMARKNKGITLKINTSVIGTHSSNCSPGKGKVAGLHERSPQDTSECDMDDSGMPDSALSSYGEASNMDIFESTMSLLSEGPHQMGEFREAAEEGYRNFEVISHPSKRLRVSVKREAGPHSEDESVAPVVGVKREETHEEATTSFSLHGAFLKPCFTGKRQERKPKKQMKRRRGGPTAAAAALISWRSKRIRKKKQL

SEQ ID NO: 46658 - protein, 330 aa, Zea Mays
MESPRTLEALTNDLVVEIFLRIGSPADLVRASAACVAFCRLIANPSFLRRKLSGYCVSDVRDGHVLLTITPYLEDDEDEKLVPDLAVCDPLARVCLRLPPIPDDLLASVQVQQQDLVHYSCDTFLVPSGDEEDVTSFRVIVMMRSTQMLVAFIFSSTTGDWSAGSPFSLGSLRIPYDNIPSYAYGCFYWKVESENRLLTLNMSSMEFSVVDLPPGPDRSFVIMVEAGESRLGMFSLINHGTTLCYAIRQIGSEKSNQLEMDSVIPLPEGYIYFRIHGSYEGHILIFGYAFSEDACFALEIKTMKIERVCRKWRGFCPYFVFLPSMSQRRI

SEQ ID NO: 46659 - protein, 248 aa, Zea Mays
MSESELAVIKPEVLKTYIWLQCFDGSIQQVEEEVAMFCPMICQEIVKNGTGSSKNHAIALPERVNPANLSLILDYCRFHQITGRSNMERKSFDEKFVRIETERLCELTSAADSLQLKPLVDLTGRALARIIEGKTPEEIRDIFHLPDDLTEEEKLEPLKNINDGPARIRLLNRLYAKKRKELQERHKLKDVQVQKEQKDERSLDELLSFINGDGGIATVQEAGKLPRVRKRIKGRIMLRTPQKLTLSL

SEQ ID NO: 46660 - protein, 243 aa, Zea Mays
MSESELAVIKPEVLKTYIWLQCFDGSIQQVEEEVAMFCPMICQEIVKNGTGSSKNHAIALPERVNPANLSLILDYCRFHQITGRSNMERKSFDEKFVRIETERLCELTSAADSLQLKPLVDLTGRALARIIEGKTPEEIRDIFHLPDDLTEEEKLEPLKNINDGPARIRLLNRLYAKKRKELQERHKLKKEQKDERSLDELLSFINGDGGIATVQEAGKLPRVRKRIKGRIMLRTPQKLTLSL

SEQ ID NO: 46661 - protein, 311 aa, Zea Mays
MAGGCLGSGALVTGTDSLLANQSPAQFISPCDIWLLVTSDIFCSHVLKTYIWLQCFDGSIQQVEEEVAMFCPMICQEIVKNGTGSSKNHAIALPERVNPANLSLILDYCRFHQITGRSNMERKSFDEKFVRIETERLCELTSAADSLQLKPLVDLTGRALARIIEGKTPEEIRDIFHLPDDLTEEEKLEPLKNINDGPARIRLLNRLYAKKRKELQERHKLKDVQVQKEQKDERSLDELLSFINGDGGSGGRKATKSKKKNKRKDHVENPPKADSEPVNANPDMQDDAEYPFEDADLDDGLDPAMKEELDR

SEQ ID NO: 46662 - protein, 269 aa, Zea Mays
MSESELAVIKPEVLKTYIWLQCFDGSIQQVEEEVAMFCPMICQEIVKNGTGSSKNHAIALPERVNPANLSLILDYCRFHQITGRSNMERKSFDEKFVRIETERLCELTSAADSLQLKPLVDLTGRALARIIEGKTPEEIRDIFHLPDDLTEEEKLEPLKNINDGPARIRLLNRLYAKKRKELQERHKLKDVQVQKEQKDERSLDELLSFINGDGGSGGRKATKSKKKNKRKDHVENPPKADSEPVNAICKMMPSTLLKMLTSMMDLILQ

SEQ ID NO: 46663 - protein, 300 aa, Zea Mays
MSESELAVIKPEVLKTYIWLQCFDGSIQQVEEEVAMFCPMICQEIVKNGTGSSKNHAIALPERVNPANLSLILDYCRFHQITGRSNMERKSFDEKFVRIETERLCELTSAADSLQLKPLVDLTGRALARIIEGKTPEEIRDIFHLPDDLTEEEKLEPLKNINDGPARIRLLNRLYAKKRKELQERHKLKDVQVQKEQKDERSLDELLSFINGDGGSGGRKATKSKKKNKRKDHVENPPKADSEPVNAEGAACVVPCKVDRSNVSRLPCQNPDMQDDAEYPFEDADLDDGLDPAMKEELDR

SEQ ID NO: 46664 - protein, 96 aa, Zea Mays
MGNCQAAEAAAVIIQHPGGKVDRLYWSTTAAEVMRNNPGHYVALVILRVPADNKPAAAAAAAAGDAAASSGPGSGGAKITRVKLLKPKDTLLLGQR

SEQ ID NO: 46665 - protein, 665 aa, Zea Mays
MAWLPSLGGFLSFRPTLFLRTLLFQSVVLGSSSSPHKHNGIVPTILENRRTWKASQQEYGVHGEPDRDDEPHPARLHRPRRPRRRKRLAHPLGVAPNHRRRRRPGIVTRRPLVLQLQQTEDGSQEYAEFLHMPKRRFSDFALVRQEIADETDRLTGKTKQISPVPIHLSIYSPKVVNLTMIDLPGLTKVAVEGQSESIVQDIENMVRSYVDKPNCIILAISPANQDIATSDAIKLSKEVDPTGERTFGVLTKLDLMDKGTNALDVLEGRAYRLQNPWVGIVNRSQADINRKVDMISAREKEREYFETSPDYAHLSSRMGSGYLAKLLSQHLESVIKAHIPSITATINKTIDELESELDIIGRAVAADPGAQLYTILDLCRAFDRVFKEHLDGGRSGGDRIYGVFDHKLPAAFKKLSFDRYLSVQNVKKVVSEADGYQPHLMAPEQGYRRLIEKGINYFRGPAEATVDAVHVVLKDLVRKSIGETEQLRRFPTLQAAIATAANEALERFREDGRSTALRLVDMEAAYVTVEFFRKLPQDPPADAPASKAGGKPSAEPAAAPPPDRYGDGHFRSIASNVSQYIRMVGDELLQKIPKAAVHCQVREAKRSLLNHFYVQMGKKEAGEFGHMLDEDPAMMERRQQCFKRLELYKSARDEVDSVAWGGSSR

SEQ ID NO: 46666 - protein, 125 aa, Zea Mays
MNNVEVIYTPWANLKKSPSMDVGQVHVLIVEKRVNEIINRLNKTRVERRAPDLKAEKEASNAAEKAERKMQLKEKKRKEEMERLEKEKWAEIRSYKGLMVAEKMTSNRQIASAGKSMQEMEDEFV

SEQ ID NO: 46667 - protein, 355 aa, Zea Mays
MQGLRTCVMSLAGRSHDGTSDGCHWADGFPLNLHLYQTLVEACFDNDEGTVVDEIDEVMELLKKTWVILGINELLHNLCFTWALFNHFVMSGQVDIELLSAAENQLAEVAKDAKTTKDPNYCKVLSSTLSSIMGWTEKRLLAYHETFNTSNIESMQGIVSIGVSAARVLVEDISHEYRRRRKEETDVARSRVETYIRSSLRTAFAQRMEEADSKRSSRNPTPVLSILAKDISDLATKEKKLYSPILKTWHPLASGVAVATLHSCYGNELKQFVAGLTELTPDTVEVLKSADKLEKDLVNIAVEDSVDSDDGGKSLIREMPPYEAENAIANLVKVWIKERVDRLKGWVDRNLKQEG

SEQ ID NO: 46668 - protein, 745 aa, Zea Mays
MGEAVPDPDDLAAFPAWARSVADCEARLGVSVTRGLSSAEAAARLRAHGPNELADHPAPSLLRLLLDQFEDTLVRVLLAAAAVSFLLALSSSAGALTLAAFVEPLVIFLILVVNAAVGVWQEANAERALDALREIQSHHAAVLRDAAWLPALPARDLVPGDVVQLRVGDKVPADMRVASLLTSTLRLEQGSLTGETASVNKTSRALPLEDADIQAKDCMVFAGTTVVNGAALCIVARTGMDTEIGAIHAQIHQASQEDDDTPLKKKLNEFGEALTKIIGLICALVWLINVKYFLTFDLQGGWVPRNITFSFEKCTYYFEIAVALAVAAIPEGLPAVITTCLALGTRKMAAKNALVRKLPSVETLGCTTVICSDKTGTLTTNKMSVAKLVAVGDSSQEVRTFKVDGTTYDPRDGKIHDWPAGSIDANLETIAKVAAVCNDANVAHSSHQYVATGMPTEAALKVLVEKMGLPGGKNGLSLDPSEILGCCAWWNNVAKRIATLEFDRTRKSMGVIVKTSSGSNALLVKGAVETLLERSSHIQLKDGSVVPLDEKAKRTILASLHEMSTNALRCLGFAYKEALAEFATYDGENHPAHKLLLDPANYAAIETDLIFAGLVGLRDPPREEVYDAIEDCRAAGIRVMVITGDNKETAEAICREIGVFSPDEDITFKSLTGKEFMALEDKKTLLRRKGGLLFSRAEPRHKQEIVRLLKEDGEVVAMTGDGVNDAPALKLADIGVAMGITGTEL

SEQ ID NO: 46669 - protein, 877 aa, Zea Mays
MGEAVPDPDDLAAFPAWARSVADCEARLGVSVTRGLSSAEAAARLRAHGPNELADHPAPSLLRLLLDQFEDTLVRVLLAAAAVSFLLALSSSAGALTLAAFVEPLVIFLILVVNAAVGVWQEANAERALDALREIQSHHAAVLRDAAWLPALPARDLVPGDVVQLRVGDKVPADMRVASLLTSTLRLEQGSLTGETASVNKTSRALPLEDADIQAKDCMVFAGTTVVNGAALCIVARTGMDTEIGAIHAQIHQASQEDDDTPLKKKLNEFGEALTKIIGLICALVWLINVKYFLTFDLQGGWVPRNITFSFEKCTYYFEIAVALAVAAIPEGLPAVITTCLALGTRKMAAKNALVRKLPSVETLGCTTVICSDKTGTLTTNKMSVAKLVAVGDSSQEVRTFKVDGTTYDPRDGKIHDWPAGSIDANLETIAKVAAVCNDANVAHSSHQYVATGMPTEAALKVLVEKMGLPGGKNGLSLDPSEILGGLQCYLLAGCCAWWNNVAKRIATLEFDRTRKSMGVIVKTSSGSNALLVKGAVETLLERSSHIQLKDGSVVPLDEKAKRTILASLHEMSTNALRCLGFAYKEALAEFATYDGENHPAHKLLLDPANYAAIETDLIFAGLVGLRDPPREEVYDAIEDCRAAGIRVMVITGDNKETAEAICREIGVFSPDEDITFKSLTGKEFMALEDKKTLLRRKGGLLFSRAEPRHKQEIVRLLKEDGEVVAMTGDGVNDAPALKLADIGVAMGITGTEVAKEASDMVLADDNFSTIVSAVGEGRSIYNNMKAFIRYMISSNIGEVASIFLTSALGIPEGLIPVQLLWVNLVTDGPPATALGFNPPDKDIMKKPPRRSDDSLITPWILFRYLVNGLPRVLPVP

SEQ ID NO: 46670 - protein, 686 aa, Zea Mays
MEGDDFTPEGGKLPEFKLDARQAQGFISFFKKLPQDPRAVRLFDRRDYYTAHGENATFIARTYYHTMSALRQLGSSSDGILSASVSKAMFETIARNILLERTDCTLELYEGSGSNWRLTKSGTPGNIGSFEDILFANNDMEDSPVIVALFPACRESQLYVGLSFLDMTNRKLGLAEFPEDSRFTNVESALVALGCKECLLPADCEKSIDLNPLQDVISNCNVLLTEKKKADFKSRDLAQDLGRIIRGSVEPVRDLLSQFDYALGPLGALLSYAELLADDTNYGNYTIEKYNLNCYMRLDSAAVRALNIAEGKTDVNKNFSLFGLMNRTCTVGMGKRLLNRWLKQPLLDVNEINNRLDMVQAFVEDPELRQGLRQQLKRISDIDRLTHSLRKKSANLQPVVKLYQSCSRIPYIKGILQQYNGQFSTLIRSKFLEPLEEWMAKNRFGRFSSLVETAIDLAQLENGEYRISPLYSSDLGVLKDELSVVENHINNLHVDTASDLDLSVDKQLKLEKGSLGHVFRMSKKEEQKVRKKLTGSYLIIETRKDGVKFTNSKLKNLSDQYQALFGEYTSCQKKVVGDVVRVSGTFSEVFENFAAVLSELDVLQSFADLATSCPVPYVRPDITASDEGDIVLLGSRHPCLEAQDGVNFIPNDCTLVRGKSWFQIITGPNMGGKSTFIRQESCILIY

SEQ ID NO: 46671 - protein, 235 aa, Zea Mays
MTKIMMQYKQNMLPERQSNHKVEADKMVEQTNQSEVSFVKAEHLNGSKIRQTGIEDYSYDKDVVEIKLPDTDLSSDYGVHFVKDVCIDEGVLPDQKISSEKQVDQKVSISFDSREEISADSTKTAHELKSKIVVLPVKCDTHDNIVEQNSSCKKRDLEDNNTTDVSTESNDEGLNPKQLPFHEVAQDYQEVDSVISESNENQDRLFTGDATHQVSSNDCYEAGISIASEASNLSF

SEQ ID NO: 46672 - protein, 392 aa, Zea Mays
MPAAPRLGCSTSIPRPARLESRSPAALLQNGIVSARGHLSSLSLPLLHLGVLVKQRRWLCLLLVFLRGCVQGFSKSLAMTVLFEIRDKTFFAVAILAMRHPRKLVLAGCLTALRRLFNYTKSHDSSIDLSRLGCTKSGKVVISFVCVCLLPAMHRAVMTKIMMQYKQNMLPERQSNHKVEADKMVEQTNQSEVSFVKAEHLNGSKIRQTGIEDYSYDKDVVEIKLPDTDLSSDYGVHFVKDVCIDEGVLPDQKISSEKQVDQKVSISFDSREEISADSTKTAHELKSKIVVLPVKCDTHDNIVEQNSSCKKRDLEDNNTTDVSTESNDEGLNPKQLPFHEVAQDYQEVDSVISESNENQDRLFTGDATHQVSSNDCYEAGISIASEASNLSF

SEQ ID NO: 46673 - protein, 154 aa, Zea Mays
MEDVCIDEGVLPDQKISSEKQVDQKVSISFDSREEISADSTKTAHELKSKIVVLPVKCDTHDNIVEQNSSCKKRDLEDNNTTDVSTESNDEGLNPKQLPFHEVAQDYQEVDSVISESNENQDRLFTGDATHQVSSNDCYEAGISIASEASNLSF

SEQ ID NO: 46674 - protein, 154 aa, Zea Mays
MTALSTYLGWVAPNLDVCIDEGVLPDQKISSEKQVDQKVSISFDSREEISADSTKTAHELKSKIVVLPVKCDTHDNIVEQNSSCKKRDLEDNNTTDVSTESNDEGLNPKQLPFHEVAQDYQEVDSVISESNENQDRLFTGDATHQVCNYLSYTR

SEQ ID NO: 46675 - protein, 222 aa, Zea Mays
MTKIMMQYKQNMLPERQSNHKVEADKMVEQTNQSEVSFVKAEHLNGSKIRQTGIEDYSYDKDVVEIKLPDTDLSSDYGVHFVKDVCIDEGVLPDQKISSEKQVDQKVSISFDSREEISADSTKTAHELKSKIVVLPVKCDTHDNIVEQNSSCKKRDLEDNNTTDVSTESNDEGLNPKQLPFHEVAQDYQEVDSVISESNENQDRLFTGDATHQVCNYLSYTR

SEQ ID NO: 46676 - protein, 225 aa, Zea Mays
MSGNGAMTFDLEYSRWQEEQNKQINELRTAVNAHASDSDLRLIVDGIMAHYDEIFRLKGIAAKADVFHILSGMWKTSAERCFLWLGGFRSSELLKLLVNQLEPLTEQQLMGLSNLQQSSQQAEDALSQGMEALQQSLAETLAGSLGPSGSSGNVANYMGQMAMAMGKLGTLENFLRQADNLRQQTLHQMQRILTIRQAARALLAIHDYFSRLRALSSLWLARPRE

SEQ ID NO: 46677 - protein, 166 aa, Zea Mays
MADASSRTDTSTVVDMDDKNQRLENGQSGAMVPASNSSDRSDRSDKPMDQKVLRRLAQNREAARKSRLRKKAYVQQLESSKLKLASLEQELQKARQQGIFISSSGDQTHTMSGNGAMTFDLEYSRWQEEQNKQINELRTAVNAHACGKHLLKGASCGLGVSVRLSF

SEQ ID NO: 46678 - protein, 192 aa, Zea Mays
MADASSRTDTSTVVDMDDKNQRLENGQSGAMVPASNSSDRSDRSDKPMDQKVLRRLAQNREAARKSRLRKKAYVQQLESSKLKLASLEQELQKARQQGIFISSSGDQTHTMSGNGAMTFDLEYSRWQEEQNKQINELRTAVNAHASDSDLRLIVDGIMAHYDEIFRLKGIAAKADVFHILSGMWKTSAESSL

SEQ ID NO: 46679 - protein, 314 aa, Zea Mays
MADASSRTDTSTVVDMDDKNQRLENGQSGAMVPASNSSDRSDRSDKPMDQKVLRRLAQNREAARKSRLRKKAYVQQLESSKLKLASLEQELQKARQQGIFISSSGDQTHTMSGNGAMTFDLEYSRWQEEQNKQINELRTAVNAHASDSDLRLIVDGIMAHYDEIFRLKGIAAKADVFHILSGMWKTSAERCFLWLGGFRSSELLKQSSQQAEDALSQGMEALQQSLAETLAGSLGPSGSSGNVANYMGQMAMAMGKLGTLENFLRQADNLRQQTLHQMQRILTIRQAARALLAIHDYFSRLRALSSLWLARPRE

SEQ ID NO: 46680 - protein, 162 aa, Zea Mays
MVPASNSSDRSDRSDKPMDQKVLRRLAQNREAARKSRLRKKAYVQQLESSKLKLASLEQELQKARQQGIFISSSGDQTHTMSGNGAMTFDLEYSRWQEEQNKQINELRTAVNAHASDSDLRLIVDGIMAHYDEIFRLKGIAAKADVFHILSGMWKTSAESSL

SEQ ID NO: 46681 - protein, 399 aa, Zea Mays
MVPASNSSDRSDRSDKPMDQKVLRRLAQNREAARKSRLRKKAYVQQLESSKLKLASLEQELQKARQQGIFISSSGDQTHTMSGNGAMTFDLEYSRWQEEQNKQINELRTAVNAHASDSDLRLIVDGIMAHYDEIFRLKGIAAKADVFHILSGMWKTSAERCFLWLGGFRSSELLKLLVNQLEPLTEQQLMGLSNLQQSSQQAEDALSQGMEALQQSLAETLAGSLGPSGSSGNVANYMGQMAMAMGKLGTLENFLRQVARPAPSFRTQACGLRCWIAAKLKLRKALKRHHGWQLQRNLDARGNDNVPDCLEAASLTEKRSHWNMHLAYDSGGEMANTSSDTLDSSTVQEKPVVPGHIISEISSHVQKEESAVSKRRSNNEPSLCIAVIGATECWYIWVF

SEQ ID NO: 46682 - protein, 561 aa, Zea Mays
MPGSSAGSSSGVMLPGVGASLGEICRDYMNGRCTKVETDCKFTHPPQQLLMSMLAATSSVSALGHAPLAPSAAAMAAAQAIMAAQALQAHAAQAKAAGGASGSVHKADEADALKRTVQISNLSPLLTVDYVKQLFGLCGKVVDCTITDSKHIAYVEYSKPEEATAALEFNNKNVGGRPLNVEMAKSLPSKANNNLPMMMQQAIQLQQMQFQQALMMQQSIATQQAAARAATMKSATEAAAARAAEISRKLKAEGFGADNMEEKHAKGKSRSPSPSTRRSKSRSRSPIKYRRSRRSRSYSPPVRRSREQRSRSPSKSRHSKYGSDRSHRDDKDRYSRSGRRESERSRDHHSSSSRRNRSKSRSPRHKKPSRVDSRSPKKQREESLSPSKSRSARAGSRSPRHHKGSKSSPTRDRHSRHSRHSRSRSPGRKHRHSDKRDSRKSEIQDDKRRSHRGSRHDKDESSVKDEGERSHRSNRGDKDERSVKDPVEDKGMDTKVVAHKRSSTVSEDEILNNNSSNHKKYRHEVGLEVDGNDVCSAAADIDRKHETGVDGSLGGAAESAM

SEQ ID NO: 46683 - protein, 111 aa, Zea Mays
MSLFSHIFLLNVPFMVLLIAQGHENVAAEYYKQQVEMLEGFSEMDAFTDRAFLPVMSKEEHEKVVRSESLAIWLSNIANMVLFAAKVYASVRSGSLAIIASTLDSLLDLLS

SEQ ID NO: 46684 - protein, 101 aa, Zea Mays
MNNYLLFERTLQVALVEPEKVHPKLWKGVRRGFIPVDRVAIERKRHNKDKTVAEHKKMVEGIVKRDGKRRKRIKAAGIDYECPALIGSIQPSAKKIKFDEA

SEQ ID NO: 46685 - protein, 444 aa, Zea Mays
MVVRQEIRQAWNSSFSQICLRYLGSTMFLSIPWFCFSLLSFPIYCNSPKTFFSGGIEKLWGITFTFCFWERRNSCVDYPLQLVLLIFQIKVNSIAIVCMRSMDRGPEHTINRGFYVAEGAKMCSVEQVRVAQALYVSGSLFNHSCQPNVHAYFLSRAFVLRTTEFIKSGSPVELSYGPQVGEMHISERQKSLQENYYFSCQCSSCSELNLSDLVMNSFCCPQSNCLGAISESTYYRSKENFVNVSLGGSYVCKLSLPDVSKVDMDMENVAKSLLQNSGVSLNIDHGCCMSCRSCIDLSSALATSHREESTIDRLKKHTFLDKTLITEALQSLKQLKKLRHPYSKALAQAEDTIAEAFAKVGDQELARKHCEASIQILEKLYHPKHIIIAHELIKLVSILLSLGDGASAAATFAQAEAIFSLYYGSHVEKVLTYMGALKKAVIDV

SEQ ID NO: 46686 - protein, 328 aa, Zea Mays
MISQQCSRRYMIISFPIWFSYATALLFHREGSQDYLSETLSKEITAESISDVSLVQRAAFYLSWLLCPYNHDQREMLSNNILEISHSWARNNKKCVSYQSTVNNRRKLRIPTAADSEKFHVPVNTISSLVKEFDDRCVKCCSPTAFPQAQVGNLSDLHPLYFNLLHQWIPLGVLLVSPSCVNEQNCDILLRYTSTGQVLESNGARVKTKDDATNDGFLGSCIGTAERWALTGAYLIFGWLDVVEDMAPLIFDCEDKCHSFVSQLRNKTGPYLLKCVKSLFKTLEQPNQDKDFVIDLHNRLLNWDKNVQGCEIFGDVILEMNKKFNLPL

SEQ ID NO: 46687 - protein, 233 aa, Zea Mays
MAAGGELQLLSSWYSPYVIRAKVALGLKGLIYEFIEEDLFSKSDLLLKLNPVHKKVPVLVHGGRPVCESLVIVQYVDETWAAGTGTPLLPADAHDRATARFWAAYVDDKFCKEWIKLYRSTTAEKAAEALGGVVPVVETLEQAFRECSKGKPFFGGDAVGLVDIALGSFVVWIRVVDEAAGVKLLDEAKFPALTAWAERFLAVDAVKEVMPDAGRLLEHYKGFLAKRSPPAGY

SEQ ID NO: 46688 - protein, 575 aa, Zea Mays
MAMTRRSASHLLSAFRPFSLLLQPHLVDSSPAAASARRAMSSASALRARDEKDVARWRESMGRMRNIGISAHIDSGKTTLTERVLYYTGRIHEIHEVRGRDGVGAKMDSMDLEREKGITIQSAATYCTWKDYQINIIDTPGHVDFTIEVERALRVLDGAILVLCSVGGVQSQSITVDRQMRRYEIPRVAFINKLDRMGADPWKVLNQARSKLRHHNAAVQVPIGLEEEFEGLVDLVEMKAYKFEGSSGQNVTASDVPLNMEDLVTEKRRELIEVVSEVDDQLAEAFLNDEPITANQLKAAIRRATVARKFIPVYMGSAFKNKGVQPLLDGVLDYLPCPLEVYNYALDQNKSEEKVLLAGTPAEPLVALAFKLEEGRFGQLTYLRIYDGVIRKGDFIYNVNTGKKIKVPRLVRMHSNEMEDIQEAYAGQIVAVFGVDCASGDTFTDGTVKYTMTSMNVPEPVMSLAVSPISKDSGGQFSKALNRFQKEDPTFRVGLDAESGQTIISGMGELHLDIYVERIKREYKVDAKVGKPRVNFRETITQRAEFDYLHKKQSGGQGTLSLYLQVLMVNSNLIT

SEQ ID NO: 46689 - protein, 354 aa, Zea Mays
MIEKRMESSAISERKNVDARSYFMTLEYWEDLFCKLNEMRRYRRIVGSLAGSCLSAAIPLLSSNKETACLVALDIVESAAISIANVEEAYKCECQSKGVIEEAIQFCSFDELLDGTDATEDVDENRLLPAMNKLWPYLVICLRNKISVPVVRKCTEMLRRAICISGGDFYVRRFHKDGPIVWRLLALSPFRRLSKMDEKAIILPYRDTSLNSEEPMAEISSQKIQIAVLDMIAAISSNKRSAVALESVLKKVCGLVVGIAYSSLTGLQEAAIRALAGLACMDADLVWLLLADVYYSLNQRESLLPNQDLALVSDLLPPPVSSREYLFVQYGGEGVRCDVDPSSVHYVFRRMQGV

SEQ ID NO: 46690 - protein, 415 aa, Zea Mays
MQSISSELEVLGRHDHPRLTVPFLKAVSEISKACRHESTCLPDEAQSFYEKVSSEGQEVKIMIEKRMESSAISERKNVDARSYFMTLEYWEDLFCKLNEMRRYRRIVGSLAGSCLSAAIPLLSSNKETACLVALDIVESAAISIANVEEAYKCECQSKGVIEEAIQFCSFDELLDGTDATEDVDENRLLPAMNKLWPYLVICLRNKISVPVVRKCTEMLRRAICISGGDFYVRRFHKDGPIVWRLLALSPFRRLSKMDEKAIILPYRDTSLNSEEPMAEISSQKIQIAVLDMIAAISSNKRSAVALESVLKKVCGLVVGIAYSSLTGLQEAAIRALAGLACMDADLVWLLLADVYYSLNQRESLLPNQDLALVSDLLPPPVSSREYLFVQYGGEGVRCDVDPSSVHYVFRRMQGS

SEQ ID NO: 46691 - protein, 1344 aa, Zea Mays
MAMEASAASDETLAAVFAQLKLHTVALLDLLRTRRPISSSGSSLREMAAFLRAAPAPALQLCFDYTVFPLLLLLDAAVQCRKQGNAPGQVAGGIDIGDAVAEAGLTCLEVLLTKCHLTSVNQMVAMLKKLTSGAMLSPSEASEEFRGAIIRCFRALVLQLQPCLDHFCSCKHGIVLPTIPTSTCLEVRSVVRPNHSAQPEECLLAFLQSQNASAAVGHWLSLLLQASELEASRGHRGSADVRKESLHTLRILIGKVGSADALAFFLPGIVSRLGKVLYTAKTMISGAAGSSLSIEQAILGLTEALMIVLNDKENLSALGKHKNENHSGGSESTEHILQMLRQLPTKNISDKISHDEITDDSVSNVNNSFADRKALHVKRTKKWLEETTSNVDKLLSATFPHLAIHSSEKVRKAVVSGVKGLLSSCSSTLKRTKMLLLECLCVLACDDAAAVSEAAQDALDHLFNQGHNLVTEKEISDTFTRLVERLPQVVLGSEETTALSHARMLLALTFYAGPQFLINHLHRSPVIAARFFDCLGLCIGHSSQFSGSMDKLIVSKPLSIGYLYSVAELKSGAYSKDTTNISLHATSTSAASKISVIHDNALPNALLGTVEYELPHVPPWFFHAGSQKLYGVLAGIIRLVGLSTVSGEGTAATLSLFVDILLDQFRRLSTELRDKDVYNDGLQRWYMKGEAGQALRQASSAVCMLNELMYGLSGRSLGMFLQLFSNGSAQMPRTVCQKNQLLACVKHNAVTNKREVWGFSEQKGTKDNILHCISSILHEYVSPEVWDLPTEKDTELHLIELNLPLHFYRDTTALHTVVLEGIGVLGVLLGQDFALSGFMHSSLYLLLRELISSSAQIRTACDAVLRALATAGGHCSVGQFVVANADYIIDSLCRQLRHLDLNPHVPDVLASMLCYIGASRDILPFLEEPMQSISSELEVLGRHDHPRLTVPFLKAVSEISKACRHESTCLPDEAQSFYEKVSSEGQEVKIMIEKRMESSAISERKNVDARSYFMTLEYWEDLFCKLNEMRRYRRIVGSLAGSCLSAAIPLLSSNKETACLVALDIVESAAISIANVEEAYKCECQSKGVIEEAIQFCSFDELLDGTDATEDVDENRLLPAMNKLWPYLVICLRNKISVPVVRKCTEMLRRAICISGGDFYVRRFHKDGPIVWRLLALSPFRRLSKMDEKAIILPYRDTSLNSEEPMAEISSQKIQIAVLDMIAAISSNKRSAVALESVLKKVCGLVVGIAYSSLTGLQEAAIRALAGLACMDADLVWLLLADVYYSLNQRESLLPNQDLALVSDLLPPPVSSREYLFVQYGGEGVRCDVDPSSVHYVFRRMQGV

SEQ ID NO: 46692 - protein, 991 aa, Zea Mays
MAMEASAASDETLAAVFAQLKLHTVALLDLLRTRRPISSSGSSLREMAAFLRAAPAPALQLCFDYTVFPLLLLLDAAVQCRKQGNAPGQVAGGIDIGDAVAEAGLTCLEVLLTKCHLTSVNQMVAMLKKLTSGAMLSPSEASEEFRGAIIRCFRALVLQLQPCLDHFCSCKHGIVLPTIPTSTCLEVRSVVRPNHSAQPEECLLAFLQSQNASAAVGHWLSLLLQASELEASRGHRGSADVRKESLHTLRILIGKVGSADALAFFLPGIVSRLGKVLYTAKTMISGAAGSSLSIEQAILGLTEALMIVLNDKENLSALGKHKNENHSGGSESTEHILQMLRQLPTKNISDKISHDEITDDSVSNVNNSFADRKALHVKRTKKWLEETTSNVDKLLSATFPHLAIHSSEKVRKAVVSGVKGLLSSCSSTLKRTKMLLLECLCVLACDDAAAVSEAAQDALDHLFNQGHNLVTEKEISDTFTRLVERLPQVVLGSEETTALSHARMLLALTFYAGPQFLINHLHRSPVIAARFFDCLGLCIGHSSQFSGSMDKLIVSKPLSIGYLYSVAELKSGAYSKDTTNISLHATSTSAASKISVIHDNALPNALLGTVEYELPHVPPWFFHAGSQKLYGVLAGIIRLVGLSTVSGEGTAATLSLFVDILLDQFRRLSTELRDKDVYNDGLQRWYMKGEAGQALRQASSAVCMLNELMYGLSGRSLGMFLQLFSNGSAQMPRTVCQKNQLLACVKHNAVTNKREVWGFSEQKGTKDNILHCISSILHEYVSPEVWDLPTEKDTELHLIELNLPLHFYRDTTALHTVVLEGIGVLGVLLGQDFALSGFMHSSLYLLLRELISSSAQIRTACDAVLRALATAGGHCSVGQFVVANADYIIDSLCRQLRHLDLNPHVPDVLASMLCYIGASRDILPFLEEPMQSISSELEVLGRHDHPRLTVPFLKAVSEISKACRHESTCLPDEAQSFYEKKERMLMLDLTL

SEQ ID NO: 46693 - protein, 125 aa, Zea Mays
MWVLFVSERTLVGVGFDCNPMIFAADDTGLWSFVRFLDEMKAAPSASKASQLSEALGKLYGQSKQGASSDTVEPSKARGGAHENCITCIVPLRKGSDGTIKRFSTSGLDGKVVVWDLENHVSIAK

SEQ ID NO: 46694 - protein, 247 aa, Zea Mays
MPVTRRRAAVAAVAQEEGRDAAIYISSDSDAGSDPEDSESEEEEDTSDEDFIDVSDSEADDGESSDEEGEEDSESEAEAEAEQLGADRSEVACNKIAGLLSSGRSLEGLKLAEYKVYLKKNGLSQTGGMDTCVDRIVLHWRFKDADPRRIYPRSSFCINCKGDVCRGDAVLFKQKVYEKSGKRHAKCIGNRIVAGKVIKESYGKQKQQHTFTIQVFWSKGPGKLPPLHLLLVKGRNLYRMMTFRQKG

SEQ ID NO: 46695 - protein, 290 aa, Zea Mays
MMTFRQPWANEAERLKILEEKHNRGDDARRVRALNRPNSAGNTLKGKKKLHKEKHKSRSERPHRQSNITELDKGKKRPAQSSKSDLPNKRSKKEGSQVPSRKKDTGGRMAKKNGPCQDKSICTGQNSSLCKDNREKHSHATFQKKCHAEPLNNGPSGSGWNRTAGGHSQFEGRHITPASHVEANHGNFVSVQHPCVERLQRPTQSREVALAHPGGGHPYVLSSAAMGLRHQNGATAGVHAPAYFRGLPLSQQRAAFPSASTPQTGYHPHPEELFVAPHFRYPRGSAGFRR

SEQ ID NO: 46696 - protein, 854 aa, Zea Mays
MAKLGRMSTAKVMITYKRKRAATHAHTEDDTVLDSSPAASSNVAVSSLQLKPEGPAETAVINEYNHITPKMQQSFSTFQQNIKEEREPEKGHDQLYESSPWKEQPEICSATIASTAEAHSNKSQCIDGTNSQTPVSSSLCGNMLADRMINQTKDSNISAPVEINSPTGMENAVAPGQCKSRFSPLLTFRRRVKKKTNLDEPAEEICSLDNDKQCSTLTCSPPRSSQDATSLLKHTAPNPLDIEDKVGRLKNTGPSTEAEHSPEQESSHVVKSSVQHVVPQIALDVNQNIILEDDVTPMSNQKMSLEDDVTPMSKFTGVQEVSGQDTPVEDFNRTSPNTIEVPKVIDLQGKGHCTGETTSLQSPRQKVDASWLKRTNKSVAEDVPESQGSTKNIPIILLDDDNDDRGKELENSEALDQGLHSQNKRTFGKIDLNCTELRQQGLLCLDDSTIQRLPDLDLAVNARKQMSRPIERLFFTEEKDTIRGKQEHHEESSTMHAPYSNFFDLGPPWNTGSLKGPKGLPSEVKFGIMDRAPEFSLDLRLDSFTDNNSVAALRSDKLFLGSTSSTSRKLTEKLGMYSYKRQSAPWSEEELDFLWIGVRRYGVNNWNAMLRDSRLRFSISRMPEDLAKQWDKEQKKLVGPAQAVGYLGRASCSGCSKSASVGAQAQTDLSLGEYYLGRASCSGCSKSSFLGAQTDLSLGDVYLRSGRAPERGHQHHLPTSLGVGGFPGASSSYGRSGGRRRRASKSYYYENKSAWFQEPPSDRVPQQPGGRMGPEMWPSIMVVPPPTADPPRDDDVKPHVLLPDATLKRAIRRSADWGSFSRRLFLSGDLNGGAAGAPVPSDTGASSEETVSDS

SEQ ID NO: 46697 - protein, 2520 aa, Zea Mays
MKWSTLLSKVVFAGGQQQQPPPPPSPPPESPFHGQQAVQDLATPRLSSASTGGDEGGFDAAAGSSPSAAASSARGRNELESDFRRLWEEFRSSSSEKEKERALNLAVDVFCRLVKQYSSVAQLVTKLVEGHIFSFVIGRAFVTDVEKLRIHSKGRPLRVADVIGFFSDTTELGICPGSNLLYAVEVLVTETNDRQPLLDSGILCCLIYILNSLLSPNENSTDTLPVHQEGSRNEKNKNLDPMQSRRLEFRDGIVPLHTIQLHRHAMQVLGLLLANDNGTSAKYIRKHQLIKVLLMAVKDFNPQSGDAAYTMGIVDLLLECVELSYRPESGAIRLREDIHNAHGYQFLVQFALTLCSLHKNQTLQSSSKLASEADASVPSHRLEQDIFSCDLSPQLSRLLDVLVNLSQIGPSENGGVSSPKALRGYHLLALFLHRRMSLFDMQSLDIFFRIAACEASFPEPQKSKINRTAGYASGMSPEASLDDLTLPRFADDMSSGGSHGDLDDFSAQKDSFSHLSELENADLAGETSEFIVLSNADMVEHILLDWTIWVAAPISVQITLLGFLERMVSMHWFRNHNLTMLRRINLVQHLLVTLQRGDVEIPVLEKLVVLLGVILEDGFLASELELVVRFIIMTFDPPELTPNRQIVREAMGKHVIVRNMLLEMLIDLQVTINAEELLEQWHKVVSSRLVTYFLDEAVHPTSMRWITTLLGVCLTSSTTFALKFRTSGGFQGLNHVLPSFHDSPEIYYILFCLVFGKPVYPRVPEVRMLDFHALMPSDGNYGELKFVDLLDTIIAMAKATFDSLIMKSMLAHENNNLSHLNGTLVADLVEATSDMGGDLQGEALMHKTYAARLMGGEAAAPAVATSILRFMVDLAKMCPPFSAVCRRHDFLESCIDLYFSCVRSDFALRMAKDLTTVATGEMNEHDDDNGSLKDALSSLPHDQDQSTKTLSATSFPQEQKSSSSESTGMPNPFETAEAKADDSSNQEFSNKILNGEANQIFNNARDQGRITASGANGISEFHHVTDSPNSVAMNNVGSPVLSERSTHRAASTPTASPMAPFTSWPGSAGSYTDGRHLTASPSMASSISGIDLDSSPDLRTNIQGPSAANTLFPINSKLLLDIDDLGYGGGPCSAGATAVLDFVAQILADTISDQLKAALFIENILESVPLFVDIDSALVFQGLCLSRLMNFLERKLLLDDEEDGKKLDKSRWSVNLDPLCWMIVDRVYMGCFPTPLRVLQTLEFLMSMLQLASKDGRVEDAVPPGKGILSIARGSRQLDPYIHAILKNTNRMIMYCFLPIFLKSMGEDDLLANLAFLTETGRSLASKRYQEDFSIDICTVLQLLVANKRLVLCPSNVDTDLMCCFCINLMSLLHDKRVTAQNLAVDLLKYLVVHRRQSLEDLLVCKPNQGQQLDILHGGLDKLVTGSTSTFFEWLQSSQQTISKVLDQCALIMWVQYITGSAKFPGVRIKGMEVRRKKEMGRKFRESAKVDARHWEQINERRYNLDLVRDVMSTELRAIRQDKYGWILHGESEWQSQLQELVHERGIFPMRQPSTEPEWQLCGVEGPYRMRKKLEHSKFKIDTIQNVLTSNLGSNGGKIINKEDGELLLTSGSDTMSGLNLLTYDTEQRDLDAVEFSSFKDDDDIFKGGSTISGPIGWTDDKSSVNEQSLHSATEFGAKSSSLSFHMTESHQGKSELSSPRRAPSVKGTDARTSEDKSEKELLDNGEYLIRPYLEPYEKIRHKYNCERVAGLDKHDGIFLIGELCLYIIENFYIDDSNCICEKGSEDELSVIDQALGVNKDIMGGSESQLKSPTTWGGTAKVLLGGRSWAYNGGAWGKEKLCNSSNLPHPWHMWKLDSVHELLKRDYQLRPVAIEIFSMDGCNELLVFHKKEREEVFKNLIAMNLPRNSMLDTTISASSKQESGEGSRLFKVMAKSFSKRWQSGEITNFQYLMHLNTLAGRGLDKPMGCQTEEGEEEFCKRYDSWDDPDVPKFHYGSHYSSAGIVLFYLLRLPPFSTENQKLQGGQFDHADRLFNSVKDTWVSAAGKSNTSDVKELIPEFYYLPEFLENRFNLDLGEKQSGEKVGDVVLPPWAKGSAREFIRKHREALESDYVSENLHHWIDLIFGYKQRGKAAEDAVNVFYHYTYEGNVDIDAVSDPTMKASILAQINHFGQTPKQLFQKPHPQRRTDRKVPPHPLRYCAYLTQQEIRKTASSVSQIVSYNDKILIAAVNCLLKPLTYNEYISWGFPDRSLRILTYDQDRLLSTHENLHGGSQIQCTGVSHDGNILITGGDDGVVAVWRFVKDGIRRLLRMEKALCAHTGKITCVSVSQPYSLIVSGSDDCSVILWDLTSLVFVKQLPRFPASVSALHVNSLTGEILTGAGVLFAVWSINGDCLAVVNTSQLPSDLILSVTSATHSDWQDTNWYVTGHQSGAVKVWKMLHCSSDEAVNSKSKSPAVSSGGLSLNGQAPEYRLLLQKVLKSHKHPVTALCIPPDLKQLLSGDGSGHLLSWSLKDDSFKGS

SEQ ID NO: 46698 - protein, 148 aa, Zea Mays
MGVPKYAGVSMTQHPQYITVRNDRGQEMLNLVAGLLESTPTISSGSRQPFVMETVKADDAAKLGKGPSKPAPRFVGDILAFLLNLVGPKGLEFARYSLDYHTIRNYLHVRRAWGKQRAEQHIPGYAKKIVEAYDKDGRIEAMVTQSGD

SEQ ID NO: 46699 - protein, 590 aa, Zea Mays
MTRCGRCRQCECAGASTTTSHGDARNRDNDAPDAVLEGLAMAGLVDILRQLGDLAELAAEVFDDMQDQVMAASARGRRLAARARKLLAADLDLVLDLDLPPPSTQEHRCLSSAAAATALATSGGAGRLGCRSYLGGAPPMPRVVVQRIERCRGPPRLSLLDKFDAAGDGACLKRYTDPSFFFRAHSAKIDEQGTLKQHRRQAEAAAAAGAAGSMFLLMQQTAAHRVEQPNMEQKLQEGSTAQPSPSELERTSSFEAWLSPQARRFPTATAATTHHHLQEPPDDDDGGGGGGATTCSGSISSQVDTTSNAAAVSSSSTVKAVRLNSASLVKGGESNTTRSRYKGKIASRVSSLPRKLFMNTTKHHNDHSRSFRAGSSSLRVTQATDIGDCSPELEAIAVAIPTPDRCSNSNSSTPETCTAADSKNLLLLLPGSGPVLEPPDNSSAAAAEDAKQQFGSSGQSDEKPSQEHEASDHSSNLLQESVFFSAAQELAKMSPPPPWVPRPKYPLLDVKAVKLRNGPSPIHPSRNILDSRSAQIKDIAISSKLKPASRASSHVTGTGSPTNATILNRADGIRQVHDDETDQIWSDDTQ

SEQ ID NO: 46700 - protein, 599 aa, Zea Mays
MMSHQQQIAPPSRGSVNGFPHLKLDRVGSGRHESKIVRSSSGGFTNSGHGSHSRDRLIYVLTQLIGHHVNVHVKNGSIISGIFHATNSDKDFGVVLKMAQVIKDGSARGQRFASDVVKKPETMIIPARELVQVFAKDVALGGDELPKGPGHDKRKDLLIDSAISRSHYLEERELERWAPDEGDSECIELEKYDRKGNRSWDQFETNAALFGVKSTFNEEIYTTKLERGPHMRELEKHASRIAREIEGEDTKDIHLAEERGLFLGDDLDHDEEIKYSAVRRDTDNSKYKPPFTNVPSSTYQVDLFNRTVNIVPKDLLGCSSTMDEESSSHIFDDIDASATIQTNSVRQPTSDYLPDRLSSNDENRLDRKLSKGSNENMDKRKLQPENNLSDGARPLISEGSDGPPSSSYAYEPSSSGQGFKSPETPDLTVSVKHPSKTEHVINSQRPGSSTSSTSERIAANSAASALGLSPSSSIGSLTSEKSTLNPNAKEFKLNPNAKSFTPSASLRPPHPASSDASYYYTNNIPAAPLGPGLPVGMGFPPAYGTQPVMYNAQPGASQQGYMHPVGLQQYGQQMMMGGGQNRPVYYYAPEMQQYRGRNF

SEQ ID NO: 46701 - protein, 284 aa, Zea Mays
MHAVFISLSALPPRLTETFANAKPISLDRYVYVQCSAGTDNNHHMGNSMGGKRRRARVMTVDGTTYKYRAPAAAGDALREHPGKGNHLLESEEVRRLGLRARPLDPDAPLKPGKLYFLVELPPPSSAAHHHRRARAPQRTWSGALHYGAVAGAGERLESLMLARRSASDVAASSSVGDGGALRLRVRLPKADVQRLVDDSRDAADAAERIMQLCVARDQQRRHRSAPATPLAVPVPPAVVSVTSTSSSRKDDGSGGSNKPAAATTGKKEKRARFVTVPDEIIGF

SEQ ID NO: 46702 - protein, 196 aa, Zea Mays
MPLPVLGDIEIGCPRSEVTARRCLDLLKPKLNNLEEDSWEELNTLDIGGGAESLKWLVWPKIDDNSKETLAAECPRVTVNPQPSLFDLSGSKVPVEALASVPLDHSIVEDIDPKTWAVSAAPRRPVAPPNPNAPPEIPIAERFRLAYVEREARLAPKRAKRERQQRRRAERDYMMNDIDARSMALAAQASRNLRKS

SEQ ID NO: 46703 - protein, 265 aa, Zea Mays
MSIARRRRLLNDEVLTSLAESSWEILDISGSDVTDAGLATVANVCSNLRAVDISRCEKVTTSGVSEIVCHCPSLEILRCGGCPRSEVTARRCLDLLKPKLNNLEEDSWEELNTLDIGGGAESLKWLVWPKIDDNSKETLAAECPRVTVNPQPSLFDLSGSKVPVEALASVPLDHSIVEDIDPKTWAVSAAPRRPVAPPNPNAPPEIPIAERFRLAYVEREARLAPKRAKRERQQRRRAERDYMMNDIDARSMALAAQASRNLRKS

SEQ ID NO: 46704 - protein, 291 aa, Zea Mays
MSTCTYACYCELVTIEFICYMIQLTIMSIARRRRLLNDEVLTSLAESSWEILDISGSDVTDAGLATVANVCSNLRAVDISRCEKVTTSGVSEIVCHCPSLEILRCGGCPRSEVTARRCLDLLKPKLNNLEEDSWEELNTLDIGGGAESLKWLVWPKIDDNSKETLAAECPRVTVNPQPSLFDLSGSKVPVEALASVPLDHSIVEDIDPKTWAVSAAPRRPVAPPNPNAPPEIPIAERFRLAYVEREARLAPKRAKRERQQRRRAERDYMMNDIDARSMALAAQASRNLRKS

SEQ ID NO: 46705 - protein, 417 aa, Zea Mays
MRGRHLKMKRRHKYGETRGVIVEIGNYRSGSPQCARQPSSSGRFQIPAASSIFCSARHSGCPKNFAHPRFPPALVRALVWFPCQPGHSTSQPPRAARAGTRGLGFGCKFGNTMAGAAGESSGERQGTVERRMLRSRYHAVKNIISDERDEMSRADSDRFTAIIQQVDCLHELVQRPREQIADAEALLGITNTLVTSVRSHSSEGISPSDFITALLKKFGQQGNHDDESVSLRWGDLGLSVSHIFRPVPGCCTMLGPMNTEVKQRKVVAVGRKRTARPTENTCPEELAESSEEVKTDTDRNVLVMFDILRRKKSAKLENLVLNRLSFAQTVENVFALSFLVKDGRVEITVDDSGHIVRPRNAPAASAIASGEVSYSHFVFRFDFKDWKREKSCCHTGLPRAIFATKKTTNQIWRHVRK

SEQ ID NO: 46706 - protein, 355 aa, Zea Mays
MMVIPFFQHASTSGETPLPGKMNPRIDRSGSNETSKVPRLGSIVGTASMAGFGKAVEILDTLGCLMTTLSSDGGFVSRTKTKGCKISILAFEVANTILKGASIMQSLSEDTVTYFKQVVLPSEGVQNLVSSEMSELMRIAANDKREELKIFSQEIVRFGNRCKDPQWHNLDRYFVKLESENAPQKQLKETSIAEMQKLMSLVQRTTDLYHELHALDRFEQEYFSRINGKGHTDRIEKGGNIQIVKLELKTQSSYVKSLKKRSLWSKTLEEVVEKFVDIMHYLHVEINNDFGSSDGGVMNAESTESCQRLGPAGLALHYANIIIQIYSFSIRVCAIKFKRCTVPGIATKDQVSTTK

SEQ ID NO: 46707 - protein, 409 aa, Zea Mays
MGKSKKSKARGGGDDLIDSSDADSVGSSSTALSDLSISYATEHVNSQEFVLDKYIDALYEKRGSTREAALVKLVDAFESFMLHGLVENRYATLLSQFNNSVKKGSTKEFFLASHAIGLLAITLGAGNSSHEIMEESHPQLCRVLQAWSDASKMIPALDCLAVITFVGATDLAETESSLKAMWDVIHPKSGSNVGTVRKPRPPVLAAAVSAWTFLLTTVGSWRINTDSWKEPIAFLSTLLEADDRAVRMAAGGTGGSKNKLFLDMQALKAKISGLASNLSAEAGGKGADKKNLTDQRDLFQRILDFVKYGDCPEESIKIAGKRDVLRVSSWSELIQLNFLKRFLGKGFLKHVQENGLLQDIFDIKVDKTETLSSTDKKIFRSEEEKERALRLNKERRLAQVRKNAVMLDE

SEQ ID NO: 46708 - protein, 693 aa, Zea Mays
MLSAQSNLGHNRHSRNDVSTKHKSGYEPSDTETEWHESPWNDGALASNRNRLPKDSGRNDQVGTRRQNISPNCTLDYHAEKTSNLRYSRTPPRVTEQRRHPSPFTAVKNESRKKSSRTPPRFRSSMETFSRSSIKARFSRNRSISAPKLRPQEKEHPARAPAFPGSNPVSTHPEREVADNIEEDSHAENCSQEISELIANGKLPNSRYNEYAFTSTESIPAGDIFFSRDCRAPLEKTSTKLNNIDQSFTSDSNVHTENDGTVTQSNLGQPSQFVSARTGLSRTTTKSSYATGRHCQMSTTTTLSSPYSNGKLSGESGKFSEITGKLVGGVMKFTSSKVQNDTWLPCMTGKACRKSRTSNNKKNDESESSFIQKALVIEKIRLFWADKYRPQNLNGFTCHREQVQQLKQSVSAEFCPHIIFKGPPGSGKRSLCRAVLTEIFGDSSLNVSHYLKSCNGQGSISVPILVPVSSSNNHVELHMRFQSKNARYALMTLANEMSDKCKITEPIVRKSFKVIVLYDVDKVSQNNQRLIKWIIDSSSDACKIIMTCQDESNLLDSIKSRCKIISIGVPSTREVVDILTYTSRKESFDLPTSFATTIANQSRKNLREAILALEACKANNYPFIDGQAIPLGWEEVLEELAVEILDDPAPKRLFLARGKLQKLLVEFVPPKLILQEYYFLNRDNYAYELHSQI

SEQ ID NO: 46709 - protein, 740 aa, Zea Mays
MLSAQSNLGHNRHSRNDVSTKHKSGYEPSDTETEWHESPWNDGALASNRNRLPKDSGRNDQVGTRRQNISPNCTLDYHAEKTSNLRYSRTPPRVTEQRRHPSPFTAVKNESRKKSSRTPPRFRSSMETFSRSSIKARFSRNRSISAPKLRPQEKEHPARAPAFPGSNPVSTHPEREVADNIEEDSHAENCSQEISELIANGKLPNSRYNEYAFTSTESIPAGDIFFSRDCRAPLEKTSTKLNNIDQSFTSDSNVHTENDGTVTQSNLGQPSQFVSARTGLSRTTTKSSYATGRHCQMSTTTTLSSPYSNGKLSGESGKFSEITGKLVGGVMKFTSSKVQNDTWLPCMTGKACRKSRTSNNKKNDESESSFIQKALVIEKIRLFWADKYRPQNLNGFTCHREQVQQLKQSVSAEFCPHIIFKGPPGSGKRSLCRAVLTEIFGDSSLNVSHYLKSCNGQGSISVPILVPVSSSNNHVELHMRFQSKNARYALMTLANEMSDKCKITEPIVRKSFKVIVLYDVDKVSQNNQRLIKWIIDSSSDACKIIMTCQDESNLLDSIKSRCKIISIGVPSTREVVDILTYTSRKESFDLPTSFATTIANQSRKNLREAILALEACKANNYPFIDGQAIPLGWEEVLEELAVEILDDPAPKRLFLARGKLQKLLVEFVPPKLILQKLVELFLKGIQTGVKREVYYWHAYYDKRLPVGASALLKLEEFVAKFMSIHRKSMSHEPKIPEVPQ

SEQ ID NO: 46710 - protein, 754 aa, Zea Mays
MSKKQTFSFESYSFRGKQRGDSEGMARRKDGWGDGDKIKIGVCVMEKKVSCSPMEQILERLRAFGEFEIIIFGDKVILEDPIESWPICDCLIAFYSSGYPLEKAEKYAALRRPFLVNELAPQYLLHDRSKVYQQLKLYGVPVPTYAVVRREYPNQELSYFLEEDDFIEIHGKRFCKPFVEKPIDGDDHNIMIYYPSSAGGGMKELFRKVGNRSSEFYPYVRKVRRDGSYIYEEFMPTGGTDVKVYTVGPVYAHAEARKSPVVDGVVTRNSDGKEVRYPVLLTPSEKQIARSICQAFRQAVCGFDLLRCDMGEATSYVCDVNGWSFVKSSYKYYDDAACILRKIFLDEKAPHIPSTIPTNLPWKISEPAQASDTARCRERVTVGLSRPSEELRCVIAVIRHGDRTPKQKVKLKVTEEKLLKLMLKYNGGKAHAEAKLKSALQLQDLLDATRILVPRARSGRESDSDIEVEHAEKLRQVRAVLEEGGHFSGIYRKVQLKPSNWVRVPKDNREGEEYPVEALMVLKYGGVLTHAGRKQAEELGRYFRNNMYPSEGPGLLRLHSTYRHDLKIYSSDEGRVQMSAAAFAKGLLDLEGELTPILVSLVSKDSSMLDGLQDGTIDINEAKAQLHDIITSSEVAHYNEPMEFPWMVDGARVPKNAAQLLTDLAELTKEITAQVKMLSDDEDEKAAIGSDSPNPPYDIAKALGKAEIDTDRLLAGLPCGSESFLLMFARWKKLERDLYNERKKRFDTTQIPDV

SEQ ID NO: 46711 - protein, 385 aa, Zea Mays
MQGQSLYYRNRSAAASTSNDDFAWRHLMAFTGCDDAEKLRSENITGKIMVCRAPEFKSNYPPTAQFSWASRAAIAGGAKGVIFEQYSTDVLDGQASCQGHLPCVVVDKETIYTILNSDSNVARISPAATMVGPQVASPRIATFSSRGPSAEFPSVLKPDIAAPGVSILAAKRDSYVLLSGTSMACPHVSAVVALLKSVHPDWSPAMIKSAIVTTASVTDRFGLPIQANSVQRKPADAFDMGGGLIAPDRAMDPGLVYDIQPEEYKSLDDRVDRLNLPSIAVPNLMYDSVTVSRTVTNVGPVEATYRAVVEAPAGVAMDVAPPVIAFERGGVRNATFKVTFVAKQRVQGGYAFGSLTWLDDAKRHSVRIPVAVRTVVRDFVADVSR

SEQ ID NO: 46712 - protein, 387 aa, Zea Mays
MGWRPHVVSASSSALVLQFLVLLLPLPLPLLSADASSSQTTTTIYVVYMGEKKHDDPSVVMASHHAALTSVLGSKDEALRSIVYSYKHGFSGFAAKLTQPQAEELTKYPGVVSVKPNAYHHVHTTRSWDFLGMSYGESPSLSSSSRLLRKAKYGEDVIVGVIDSGIWPESPSFDDSGYGPVPKRWKGVCQTGQAFNASNCNRKVIGARWYGADVSEEDLKAEYRSARDANGHGTHTASTIAGSPVRGASHAGGGLAAGIARGGAPRARLAIYKVCHDVGGGTSCGDASILAALDAAIGDGVDVLSLSLGGGSDEVYRTLHVVAAGITVVFSAGNDGPVPQSVTNALPWLVTVAATTVDRTFPTVVTLGDGETKLVVCMTRDLRVCLV

SEQ ID NO: 46713 - protein, 609 aa, Zea Mays
MEFVDNTNCLSLFEKKHLGLLSLLDEESTFPKASDFSFANKLKRQLSGNSCFKSEKEGTFKICHYAGEVTYDTAGFLEKNRDPLHSESIQLLSSCTCELSKHFASVMVADSQNKSSLSWHSVKDTHKQSVVMEFKAQLFKLMQQLESTTPHFIQCIQPNSKHHPRLFEHDLVLHQLKCCGVFEVVRISRTCYPTRITHQQFAERYRFLLLRSIASQDPLSVSIAVLQKFNIPPEMYQVGYTKLFFRTGQVAALENAKRQMLLGTLHIQTQFRGLHSRRGYQRLKKGAMNLQSFIRGERTRIHFDNLVKRWRAAVLIQKHTRRRLAANMFNDQLNHVILLQSVTRGFLARRKYKCLQNEKESKASHSIVQGNTRKNNSESRICHEMNGHYPHEPVITELQGRITKAEAALRGKEEENVMLKQQLEQYERKWSEYEAKMKCMEEAWKRQLSSLQLSLVVAKKSLAADDAATRAARTDCTPTHAQYDSEDTLSTGTRTPEVIESKHDNHNPEAKVSAGNSDRRVNAVNHLAKEFEDRRQVFEDDAGFLVAVRSGQIGSNMNPDEELRKLKDRFATWKKDYKSRLKETKVNLSKVGTHDEKSRKRWWGKKSSK

SEQ ID NO: 46714 - protein, 933 aa, Zea Mays
MDAAALETYCEQVVRCIEMALSCVETDRHKRPSIGAIIDELNKMETNTDQVFSVDICSTPAQTQPPPLPDSSHSTEETSNTKGVSRLGPREYVQSTMRDLVIGITKSVVEGVISKAQSVMEEENMLLISMQHDLHFITDEFQMIYSFLSITDEERINNAVVRIWVMQTRGLAYDLEDYMDAFSCLDKTRKWWSRLFRACLAPPGSPYMSVTSLAVELKHLKARVEDVSHRNTRYNLISDAGSKPGLVRQQPVPPGAVAYENDTRRKHILGDLTQLITNKDDADLQLISMWGAGGGTGTTSIIRKCYSDPEIIQNFICRAWVNLSHPFNPHEFVRSLMAHFYANSCQERQGGIIGVDVLTSMDATATQGDLLSEFVQLVDKNRYLVVLEDLPTMAEWDSIRTFLPDRKNGSWIIVSSQKYEIASLCVGHPYQILDLKQSSPTEHSVCAFLREEVTLKEKKGGNRKEKIYVGDESEVNNGSTSTNSKVISTEYDLSHNHRMVANSKWKEARDWMQNSSLVGRRLQMYQIHRCIAEAQRNHSHVMSVWGIVGVGKSAIVRNFYCDRILENQQFQEYGWVDLSHSQPFNLKDFSQNLLTNFQSDSLQANETTPSRGILGTVRKCCEFLSTRHCLVVIDGLQSKEEWDLIQSSLVSRYSKSNTIIIVITTEASIAAYCADKDDLVFNVKTLETDAAFDLFENEISKKAPLWTTSLCDRGNSVTQELVSKCGGLPMVIVAIAGILATKVVSWMDTATSINLRFMFELEINPDLQDLFSWVHSCFRTCPDFIKPCIFYLSFFPRDHNIRRRRLVRRWIAEGYCRDSDDKSAEENGEFFFSKLLGMSIIQPESSDARMVSCQINGFFRECILSRSGEMEDLVIELADRCNLTTQRSGRHLVISESWDRDKILFESIDFSRLRSMTVFGMWKSFFISKSMKL

SEQ ID NO: 46715 - protein, 682 aa, Zea Mays
MELAETGAVSSENLLKLSSLLSLSTNMELYMEAVSLENLRTRALRSENREELELAEQMIPLVNYMHDHLLREKQQLSINGVPIPPDFCCPLSLELMSDPVIVASGQTYERVYIKLWLDEGFTICPKTRQRLGHSNLIPNYTVKALIANWCESHDIRLPDPIKSLKLNFPSAASSLQDLSAAGGSPLHPTLVSRSNIPGSPEADVHLRNLNGASSPRSLANQNSHVHANRPGHEVSTSQTSENANGSAPDVSRLSLAGSETRESSMEAKRAGSIGQMSEHSTDEAFQSSNLDRNLQDNLASSSLNGSLPNSGQLDGECDNGVTRVPSDRTNYSSDASGEVTDGGAAPVASSVPQREHLIPARLGTRQFIRRQPSDRGFPRIISSSTMDTRSDLSAIENQVRKLIDDLKSDSIDVQRSAASDLRSLAKHNMENRIVIANCGAVNVLVGLLHSPDAKTQEHAVTALLNLSINDNNKIAIANADAVDPLIHVLETGNPEAKENSAATLFSLSVVEENKVRIGRSGAIKPLVDLLGNGTPRGKKDAATALFNLSILHENKARIVQADAVQHLVELMDPAAGMVDKAVAVLANLATIPEGRNAIGQARGIPALVEVVELGSARGKENAAAALLQLCTNSNRFCSIVLQEGAVPPLVALSQSGTPRAREKAQALLSYFRSQRHGNSARR

SEQ ID NO: 46716 - protein, 336 aa, Zea Mays
MASSSASSRHQVTITLGRSGQVVKRRTISDDINGDEMPLSGKKRSVRDRLGSNVSDSDFYGSQQRNKRQQTEINSSHGDDGSDRLVGKDDLRLKLMRKGSFQRSNGGAEQNTMDLREKLSRNHKKLPRYDSRGHAAESRASYDMRDEPPELRSRYFSREDVLGSRNSSVVSRVPYSRTADDLLKSNPSRKSYPSWTDDGLRHRSPERILSVRSDVSPPVGYDQIRSMPPLRSAGSSRPQSFITRGAPDTPRSQPYAGKATISVDTVQRTNGITPSSAPLPKAEAPLTVTGLLNSLGLEKYIVLFQAEEVDMAALRQMGESDLKDMGVPMLKFTGSM

SEQ ID NO: 46717 - protein, 446 aa, Zea Mays
MERNVVAVIGPQSSGIGHVISHVVNELHVPLLSFAATDPTLSASEYPYFIRTTISDYFQMNAVASIVDYYQWKEVTAIFVDDDYGRGGVSALGDALAAKRARISYKAAIPPNSNTDVINDVLFKANMMESRVMVVHVNPDTGTRIFSVANKLQMMATGYVWIVTDWLAAVLDSSTSRDRKEMSHIQGLIVLRQHTPESVAKNKFISKWNNAARNRSITSGLNSYGFYAYDSVWAIARGVDQFLNNGQQINFSTDPVLHDTNGSSLHLSTLKIFDGGEQMLQQLLLTNFTGLTGRVQFNSDRNLVHPAYDILNIGGSGSRLIGYWSNYSGLSVAAPEILYQKPPDTSSIAQRLHNVVWPGDSTTTPKGWVFPNNGQPLRVGVPIKPSFKELVAAGKGPDNVTGYCIDIFNAAIRLLPYPVPCQFIAIGDGRKNPNYDDIISMVAANL

SEQ ID NO: 46718 - protein, 304 aa, Zea Mays
MVEGRSYLPAEVRNGLETLKRRRLERVRLSAQNEAGDNPAVAARSGGDALRSPANCGVRLHSNNSTGLPGNVHDKSPFAKRKVEKFDMSNLEWIDKIPECPVYCPTKEEFEDPIAYIQKISPEAAKYGICKIVSPVCASVPAGVVLMKEHPNFKFMTRVQPLRLAEWAEDDTVTFFMSGRKYTFRDYEKMANKVFSKKYSSSSCLPARYVEEEFWREIAFGKMDFVEYACDVDGSAFSSSPHDQLGKSNWNLKNFSWLPNSVLRLLQTPIPGVTDPMLYIGMLFSMFAWHVEDHYLYRRCGSWV

SEQ ID NO: 46719 - protein, 377 aa, Zea Mays
MLRRPAAALPVISASSPTHRSCSLEGSVKLKNLFGYCETWDASGALELDKTAELSAGVQMPRIGAIPTPLMARISFVSDDWLKSSLKEHLMGVSVGLLSTINHNIAYNLTWRKLTDPTRMSSNSVQEELGHSLLSSIKYAYKVDRRDSSIRPARGYAFMSTSQVGGLAPGSKYSRFLRQEFDLRVALPLGVLNGALNAGVAAGVIHPLERGSAGSVSPLVERFNLGGNRALVCRLGGPSSLLGFKTRGLRAATESRTQDPNTPGNGTSPSPELNGLGGEVAVTAFADLSFDLPLKPLRELGIHGHAFVCAGNLGRLTECDLRKFPVTEFLQTFRSCAGWGVVVPTRLFRVEMNYCYILKQLDHDGGKTGIQLNFSSS

SEQ ID NO: 46720 - protein, 345 aa, Zea Mays
MKLHQVWQLGVKDMKAVPLPRPRSAPKRPRELTDEERASRVVFRQILTTPPVLSKNSKIAFMFLTPGTLPFERLWEKFFEGHEGRYTIYIHASREKPEHVSPIFVGREIHSEKVTWGKISMVDAERRLMANALQDIDNQHFVLLSDSCVPLHSFDYVYDYLMGANLSFIDCFYDPGPHGNFRYSQNMLPEVTETDFRKGSQWFSVKRQHALMIIADSLYYTKFKLHCRPGMEDGRNCYADEHYLPTVFRMMDPDGIANWSVTHVDWSEGKWHPKAYRAKHVNLELLKNIASIDVSHHVTSDGKKVVTENPCLWNGAKRPCYLFARKFYPESINNLLTLFANYTLI

SEQ ID NO: 46721 - protein, 331 aa, Zea Mays
MKRSQPKVLRLNLVGSPDKESKATCAVPPVLDCSSGKTATDVKEARSSIRGPAVTPNSSPDLDTPFRSTEAGTSSVSSSDPGASPFSASEINGSLKKEVLATKDKIQHSDVNISDSDSETLSPPANFSFQPWMSDILQGSASSRSLGKVPRKTRTATADVLLEKISKLDLLNEISAMRSRSDLNFRGDVRDAVSLARNAPPGPPPLCSICQHKAPVFGKPPRWFSYAELELATGGFSQANFLAEGGFGSVHQGVLPDGQAIAVKQHKLASSQGDVEFCSEVEVLSCAQHRNVVMLIGFCVEDRRRLLVYEYICNRSLDSHLYAILEISFRS

SEQ ID NO: 46722 - protein, 994 aa, Zea Mays
MGAKVERESYMPGYYATGDLNLEPNGRWSPYYEEMTSNDQLCNGFTTKPTNDYSEFDKEILKHQILEHEAVFRQQPHNPLAIQVYELHRVYKIQKDMMKQHQSKEVYSYPTLAVASHTNSPSQVPQNGAKMMWQMPVPPMSTTYRKAIGEHNDTNQSSMKFLREGSVQSSPNGFISSDVGPRSRQGTFDLQLPADHYIDDDGTSDNKPIDFLGLASDTKPRNDAELTLVSAEGLGKFSDNSSSSGLQTTNNLGPRQVTDLNESNTGFHMGRANGSVSRGLPRTLENSWNQPILRANTTNFSFSKKHSKEKHTDEGTSSNFFDTSVKTIHDDKPSINKGKQVSSVTFLAPRYNDADPPKYFKAVDGRPATASYNHFVYQGQNSSVGWIAQSPLEPSVINNFARVDRPHHLNMGTFTAPVSIPQIDNPSIVSPMGSCTADPRSSVINNPALIPRFNGFSTVNSYTSLSAVTQSIGTSIPKLINVDNVDKRYRGFPLDSFSVSHSRHQVAVSSNLEQKNSQKLEDSDQQSHGKGMKNFNLNETLSDCQEDGLVEQDGRCASSFQHDKDGGSVLGISWLKKKLMSADPTAVEKPGKIFGHSLGTAIELKNTKDQNEPAVTIRNLSDSASTSVGCAIKKDRPSDNIVTGTLPVCNKAQEGATCLPLSCQKHVPKDGQAAEGATKKSGAPIRNFIDLNDDVPNDDNSEESVVSHECHVEPSRNNHPKRAFVIDLEVPACEEDASWDIDQECAQPKPDAYQEVDDGSDTSALAAAENIVALSRNTPTAAEASDDTLQWFADLAVLNINDLAEQAELQACTNDSSNYESDSFESLTLKLEETKIDDLWSRPLEPETATDEQTVSAAHLLTKPRRGQQRRRRQKRDFQRDVLPGLSSLSRPEITEDVQLLEGLVQASGGSWESSLTRRGRCGGRARGRKPRKTVVTVIVEEEEEEEVEVSPPPKPAGTGELEADGRGMIGWGRTTRRCRRARCPSGNSMATAS

SEQ ID NO: 46723 - protein, 246 aa, Zea Mays
MSIVGLLLLGKVLEPLWGAKELLKFIFIVNLSTSACVFVTTIVLYYITQEETYLYTPVSGFYGVLSGLLVGIKQILPDQELNLFVLKISAKWIPSIVAFTSVVVSFFVKESISYLPIILFGIYMSWIYLRYFQRSLEVGLKGDPSDEFSFSSFFPVFLRPVLDPIASIFHKLFCGRSAKPEGTGQTLDGSQFPGLGSIEANRRRERGQRALEQRLAEKPAAVRNTEGTPPPKQQLEDAEDDASDEV

SEQ ID NO: 46724 - protein, 591 aa, Zea Mays
MDRSRSKRGYHYDQDSPPPRSKQRFDRRSGGGQNANSSYHRRGPLGGGGSDRRGFLPPAPAPPPPPPPPPLPPSSATAGGGAGPTTTTTSFRILCPECKAYGFPPGFVAKVRDDSGALVTVHPPFAGDYVRVIETVDGARREADGRPPMFSPAQEALLMVHRRILETDADDGDEDGEYGPRGKDSRDRGKTTTRLIVPKMHVGCLLGKGGKIIEQMRMETKTHIRILPRDQHTPRCVSLSEEVVQVVGDGNCVKKAVAIITDRLKESLHRDRGPFRGRMNSPEPRISQEDDYLGVSQMPAYEESLGRSDQIRNNTSMEPPGYEFDSNDGKVIEHPDILYDDIIFRILCPNDKVDNLVATNDGILEMLQADVGVDVRLSDIIAGSDERVVIITSREGPDHELFPAQEAVLHIQTHIVDLGPDKDNIITTRLLVPSSEIACFDGREGSLSDIQRQTSANVQILPKEDLPLCALESDELIQDSGGSASGSFDQGSNIIDEIRQGATKRFAVPLVTRSTLEVVIPNSAVASLTMRAGSKLAQISEISGATVTLAEDRPDILEKVVRISGTPEQASKAENLLQGFILSIPDDIPSG

SEQ ID NO: 46725 - protein, 588 aa, Zea Mays
MGMLAAAVAPALLASPQASLVRRRLSGAWTLRLKPAAASHGVAALRVHNFLPKCYITNVEVDVSTVNKEETFDDHPSLAPGRNIPLVNLRGDILDSSPFPLHDRASCPSGFEELPVLSEGEQHTLASTPAHPAGLYALYASYLFGNLVEQLWNFAWPATLAILHPNLLPVAIVGFFTKLSVFVGAPIVGKLMDHFPRIPMYTALNAVQVGTQLISAATVIYALRNLSHASTTAVVLRPWFIALVAAGAIERLAGLALGVSMERDWVVLLAGTNRPVALAQANAVLNRLDLVCETVGASVFGLLLSKYHPVTCLKIASGLMICSFPVLVMLGQLINRVSCHALDSSRTATDESICADLLDVRRIVPNSLRAIKHGWNEYKQQTVLPASAATVFLNFNVALAPGAIMTALLMHRGTSPSIVGAFSGLCSIMGLVATFISSSLVKRVGILKAGAAGLIFQASLLSIALTVYWAGSISQTTPLLIFLASIALSRLGHMSYDVVGTQIVQTGVPASKANLIGGMEVSIASLAELVMLAMAIIANDVSHFGFLAILSVSSVAGAAWMFCRWLTNPTDEQRELFMVDPLYQVQAM

SEQ ID NO: 46726 - protein, 574 aa, Zea Mays
MAVASAARTATPASPARLGSLWSTLEDQRGAAVPLLSSAWTLPTTSQGGIAGDGEQLPKEGLLRRAGGVVARWWGAACGAVAELWAFARADPRKPVFAGKVALALALISLLVFLREPRDIVSHSVWAILTVVVVFEFSIGATLSKGFNRGLGTLTAGAFALVVAELSKHLGKLEEVILITSILIVAFFTTLTKLHPKMKPYDLGINVGIYPIWAGEDLHNLIAKNFTGVAKSLEGCVDGYLRCMEYERIPSKILVYQASDDPVYSGYRAAVEASAQEETLLGFAIWEPPHGPYKTMNYPWRSFTKVSGALRHCSFAVMALHGCILSEIQAPPESRRVFSAEIQRVGQEGAKVLRELGSRVKTMTKLSSSGILFEVHMAAEELQKKIDEKSYLLVNTERWDASKQAQGIKEVVNGTRAVETENKNKENKDDGTSAVEKENKSKENNNGGLEPTIVDQTLVHQSKSFLANSFLSRYDSASTIDGFKPALSWPARKSFHPNIPLEDEDSQTYESASALSLATFASLLIEFVARLQNVVNAFEELSEKANFKDPVVEPTAVSTSNVRFLDKLCKFVGF

SEQ ID NO: 46727 - protein, 557 aa, Zea Mays
MAVASTTKPKSQPNEILVDMAVCAATKLQCLRHLSRYFKQSATTMEQQFQKETRFYSSLIRLQQNWKVKRQRSVGSPGSEGFMFDLVDTSQLDTTTMPRLSPLSLIPIDQDSSGTLSVQIPQKCFHSLSLRFHGDIANNAESSAVKRKEGTLTNTTTGAENDVLENDDVNKSTEHAHSILRDIHKSIFEEQVFDMVIQETFIQSQGINVTGMCEDFLQLAIGQECSLCLSHDLSGQNNNSGTVGQEDHMDIDHTGNLAVATVNGKESSNKDVRGFPNPKSLEIYLLHVFHEGILRKLREKSRHVVRYQSSAQGTPDECGLLSHFCMTVSHRIFSSKVHLELESVVSRVPYLHLCSLPTWHSRTSSWSLCLKVPQPILATDRVRRPSDYSELKCKSRSQFGTKVILKDGQISLMGEGSPSIAGSLAGKPSDGRLVNSYNCDLEDLPMMLLQQVASQVIHWLHDEAVVLGMNATIDFLCLYLDLDQGETLGLVAHVDPDDTYGCVSWYLTLDHHPTEEGKMSAGSPELEERRFLGYLSPELLYSTLMDLVKLCSTGVQR

SEQ ID NO: 46728 - protein, 516 aa, Zea Mays
MEDDEGKKQHQRIIPNANGHVMIVVPDDAHAHALPASASAPPRDADGPDEESGDEEERTPAGATSSLWRAAVLALAALALAAAAYACLYAGGDDDAGAAWRLLEARRQEDGGDDEHPGGRTSFLLPLYPKPPRRGGDDWPQNSTLFPHSLAGNLFPEGLYYTAISLGSPPRPYFLDVDTGSHTTWVQCDAPPCASCAKGAHPLYRPARTADALPASDPLCEGAQHENPNQCDYEISYADGSSSMGVYVRDSMQFVGEDGERENADIVFGCGYDQQGVLLNALETTDGVLGLTNKALSLPTQLASRGIISNAFGHCMSTDPSGAGGYLFLGDDYIPRWGMTWVPIRDGPADDVRRAQVKQINHGDQQLNAQGKLTQVVFDTGSTYTYFPDEALTRLISSLKEAASPRFVQDDSDKTLPFCMKSDFPVRSVEDVKHFFKPLSLQFEKRFFFSRTFNIRPEHYLVISMFLFVGNWLLTTTIRMRSGGLISTAPTLANEAGFLPSCDERCATNFCKYWLL

SEQ ID NO: 46729 - protein, 433 aa, Zea Mays
MCAQVFSAFGFVHKIATFEKASGYQALIQFSDAETATSAKAALDGRCIPSYLLPELDVACTLRITYSAHSVLNVKYQSHRSRDFTNPYLPFLDSAKDGSGPDGKKQEAESNILLASIENMQYVVTIDVLHEVFSAFGFVQKIAIFEKNGFQALIQYPDIQTAYAAKEALEGHSIYEGGYCKLHLTFSRHTELNVKVNNERGRDYTKGNATPSSDQPSILGPQPIPSVGAAIPPAQGSVPSAATNSVMPPGDPSVALPSNPSSEPLLQAPVVSSGGPPHYPNQAILQGPLGVVARFPGYGALQFAQGSAQAQMVQPSGQGSQHMSGHVNYQLPPGSAQFMQYLSNGSHPLPNAPGPQTMPYPALSGQQLPPGLQMMQAQGFGGLPFSQGPGQPMPQFPMYGTQQFPPGMEPKMMRFSEQGGQQFTFAPRGPNSR

SEQ ID NO: 46730 - protein, 278 aa, Zea Mays
MPHFHRLCSHLRSHRLLEDTVNVSVEEQVAMFLKFVGHRWTNRSVGFEFLQSGETVSMYFNLVLDAPCVMSHDLITMRTTETHPKISSSPGRFHPYFEMSKGKEKIERTIVWDEDQSKFMLGWFTDFIKEQYAGFKIKKQRHFKCAEALNRQFNMGVTATQVERHYRHYKENWKFVAAALSKSGNTFDTIRSMVVISESEKANLKDRARRLISKPIKFFNEMQELFINSSADGSLAMEATTCMNETHPGDDSDFNDDVCSDFSNYPQPVHDLARQVLD

SEQ ID NO: 46731 - protein, 490 aa, Zea Mays
MRRRCSWLSSLFRPRRADRSLPQPDPQGPDSEPKAEQAIDKHSASEEVVMDNILPNSDFSEGLHLWQSNSCHAFVAVEGSGYHYGVRPHSGSTYAVLTHRTQSWQGLEQDITEKVTLGTEYFVAAYVRVHGEVHEPIGVQVTLKLEEDGSSTNYLSIARILASQERWEKVEGSFNLTTLPRRLVFYLEGPPPGVDLLIDSVTISYKKTASSVGGTENIILNYDFSKGLHPWNPIRCHAYVASQWSGFLDGIRGNSGENYAVVSKRTEHWQGLEQDITNQVSTGTVYVVSAFVRVDGIVQGQVEVKATLRLQNADGSTHYNPVGSVVASKEKWNKLEGSFSLTNMPKNVVFYLEGPPAGVDLVIDSVTVACSRHKQSKEVKVPSGVETIIKNPHFEDGLKNWSGRGCNICRHEFSAYGNVRPLNGSYFASATGRVHNWNGIQQEITGRVQRKVLYEISSAVRIFGSANDTEVRATLWVQEYGRERYVGLAK

SEQ ID NO: 46732 - protein, 175 aa, Zea Mays
MALPTRSVVPLSAIRALIPFLRAAPFHPWLASRNPPTYGAASQSGIHPQNHYPLCGDGRESKRVLPPSILGVARIAWPSFRAPNPSMQGTRASPFHPRRCANCRLRIAWSSFRPSSLPASDGRAPRSASPPSMRCLPFLHGDAKEKEPVTKSASVRSMNTHQRSVMSAPVQTSPP

SEQ ID NO: 46733 - protein, 394 aa, Zea Mays
MASFSPSGRMTRTAASSLAARVVLALLLLIGVSGSGATQAASPHTHHSRQLDVNHKKPVQTFRPINIAHRGSNGELPEETAAAYLRAIEEGADFIETDVLASKDGHLVCFHDVTLDATTDVADHAEFAGRKRTYEVQGEDVTGWFIVDFTLEELRSLRVKQRFSFRDQRTVGIYPEIKNPVFINQHVKWSDGKRFEDKFVETLLRYGYGGEYMSDGWLRQPLFIQSFAPTSLIYVSNMTDSPKLLLIDDTTVPTQDTNQSYHEITSDAYLAFIGSYVVGIGPWKDTLVPPDPTDNRLGRPADLVARAHALRLQVHPYTFRNENQYLHFDFRQDPYAEYAYWLDEVAVDGLFTDFTGSLHKYQEWTRPYRKEQEKTSPEALLREIAGMLKNDGYD

SEQ ID NO: 46734 - protein, 186 aa, Zea Mays
MASFSPSGRMTRTAASSLAARVVLALLLLIGVSGSGATQAASPHTHHSRQLDVNHKKPVQTFRPINIAHRGSNGELPEETAAAYLRAIEEGADFIETDVLASKDGHLVCFHDVTLDATTDVADHAEFAGRKRTYEVQGEDVTGWFIVDFTLEELRSLRVKQRFSFRDQRQVPDHYVRRVHPDRALR

SEQ ID NO: 46735 - protein, 92 aa, Zea Mays
MVSNDEKDEPFVLEKDQCWVLADNLVLKPKEARDSRLFGPVPMTDILGRVIYSLRTAVDHGLVENSGMATKLDGPVLAVELDVEELAKNNKA

SEQ ID NO: 46736 - protein, 334 aa, Zea Mays
MPARDGIDIQNHQLTLHMRIPGRLYGKIGFCIAGEALQSRIPDLPCLRCINRPSSSLQADFKAAAEEAGHPEWDLPDDAGTYNDTPEKTQFFADNGTYQTDKGKFFLTWYSNKLIKHGDKILDEANKVFLGCKVQLAIKVSGIHWWYNVPNHAAELTAGYYNLDDRDGYRTIAHMLTRHRASMNFTCAEMRDSEQSSEAKSAPEELVQQVLSAGWREGLNLACENALNRYDATAYNTILRNARPQGINKNGPPEHKLHGFTYLRVSDELFQEQNYTTFKTFVRRMHANLDYNPNVDPVAPLERSKAEIPIEEILEVAQPKLEPFPFDKDTDLPV

SEQ ID NO: 46737 - protein, 361 aa, Zea Mays
MATAQVLFHRFYCKKSFVRFSAKRVAASCVWLAGKLEESPRKSRHIIFVFHRMECRRENLPIEFLDVFSKKYSELRHDLIRTERHLLKEMGFICHVEHPHKFISNYLATLEAPPELTQEAWNLANDSLRTTLCVRFKSEVVACGVVYAAARRHRVPLPEDPPWWTVFDADEAGIQEVCRVLAHLYSLPKAQYIPVYKDNDSFTVKRISDLQASKESPARAVASDKGTPVPSSSSQEKDPVAKTILNKVKEKSDDEGKPLPAEFDGKENPVANSKNDKSDSGVDRSRERERSRGRERDARGRDSDRDSRGRESDRERDRRRCSRERSSGHSDKEKSRRHSSRDRADYYNSHSSREKDRHRHH

SEQ ID NO: 46738 - protein, 78 aa, Zea Mays
MWVFSSCRCRSSTCRRREPPLPHIPRSFLRVSRYGRMTVRVVMRYLVNKLGLEDDSQINPKAAESLADPSEYPNLFED

SEQ ID NO: 46739 - protein, 311 aa, Zea Mays
MIQHDSVGPHGGFSFFVFKELVNRGDYSNLLRLGEEFQEELASFLKERSDLLWVHEICLNQFSSASDTLHTYALRRSPDGDASFTTSRKPLSFAERRRLLYLSKIAATAGKDIDYEVKVARIEADIRILKLQEEIVQHDPEYAQVKSTNTLLGPSELIEMCLRRDRELSLKAFEVFALTSSSFRSSNRGLLEACWMNATDQDDWVKLSEASMSEGWSDEVIEESLQATVLFKASRLCYSPDAVVYDGTFEDVLPVKKEDVHLRGLESKCLSVEEVLMQHEDFPDAGKLMMTAVIRGKEPIFTATEPVEMDS

SEQ ID NO: 46740 - protein, 462 aa, Zea Mays
MAGGGGGRGESSPAIKPISKAVVHRICSGQVIFDLSSAVKELVENSLDAGATSVEVSLKAYGEEWFKVADNGCGISPSNFRALALKHHTSKISDFSDLGSLVTFGFRGEALSSLCALGKLTVETRSKDELVGTHLEFEHSGVVVSERKTARQVGTTVTVEKLFSTLPVRSKEFSRNIRKEYGKVISLLNDQQCGRCHSASGAPNKYSESRHQNALADSPLPDAQDYGDGAAVCYASVQYPIIQFTVAELRRRRKNCFMVVGQFNLGFIIGKLGQDLFIVDQHASDEKYNFECLSQSTILNVQPLLEPLRLDLSPEEEVIVSMNMSTIRKNGFVLAEDLHASPGNHYLLKAVPFSKNITFGVQDVKELISMLADSQGDCSIISSYKLDTADSVCPSRVRAMLASRACRMSTMIGDPLTKAEMKKILKNMAGLRSPWNCPHGRPTMRHLADLRTMKAKDIAFKR

SEQ ID NO: 46741 - protein, 59 aa, Zea Mays
MASPEGTTWVFDCPLMDDLAVAADFAAAPAGGFFWAAPPSLQPQAPVQSVVAASAPNPW

SEQ ID NO: 46742 - protein, 210 aa, Zea Mays
MDADAAAAAAAAAVSQMDPHSALVAGTVPPMATNQLTLSFQGEVYVFDSVSPDKVQAVLLLLGGRELSSLGGASSSAPYSKRLNYPHRVASLMRFREKRKERNFDKKIRYSVRKEVALRMQRNRGQFTSSKPKPDEIAASEMASADGSPNWALVEGRPPSAAECHHCGTNATATPMMRRGPDGPRTLCNACGLMWANKLRLRNGPRGECE

SEQ ID NO: 46743 - protein, 164 aa, Zea Mays
MDLFTPHSDLDLSINFSANTDEQYTRKQMISIIKKFSKVLFSYQRSGIFCGVLPIVSARVPILKVIDRGTGVECDISVENKDGMTRSMIIKFVSSLDERFQILSYLVKFWAKVHDLNTPRQLTMSSMSIISLVAFHLQVPWVNYYFGLVIKLQVTVPLPFVLIN

SEQ ID NO: 46744 - protein, 570 aa, Zea Mays
MATLAAISSVSYDTDTDSDSSRCSEASTWDSQVLSRHAECLELEELTAISVNPSLLPALNQLLLEAYAILRPKPLDYDQRNTLVDVFRKMVNQRFGSNSGSPVVEPFGSFTMDLFTPHSDLDLSINFSANTDEQYTRKQMISIIKKFSKVLFSYQRSGIFCGVLPIVSARVPILKVIDRGTGVECDISVENKDGMTRSMIIKFVSSLDERFQILSYLVKFWAKVHDLNTPRQLTMSSMSIISLVAFHLQTRHPPILPAFSDLLKDGLDCESIERNALRFRDFGSRNKESVAELFVSLISKLLSAESLWEHGLCASNFEASWISKTWKKGVGNLSVEDFLDRSQNFARSVGKVQMQKICKCLRECALNLLDFMRGKMDTTKLKTLLFGRLSPDELVSKPRLKHVKRKRNWERTPQGGRCVLQKSAKHAGSATGSDSLPTPNKVLHHALHYRVAGHQSSIHQFVPIIRWPRIIPSGFGYGLSLGIPSVAPHLGKGILGKPPIIPSGFGYGLSLEIPSVAPHLGNGILGKPPSNITPLDQRSSTQLVHVRNPHQHTCQQSCGGAMEPSSSGVA

SEQ ID NO: 46745 - protein, 217 aa, Zea Mays
MQKICKCLRECALNLLDFMRGKMDTTKLKTLLFGRLSPDELVSKPRLKHVKRKRNWERTPQGGRCVLQKSAKHAGSATGSDSLPTPNKVLHHALHYRVAGHQSSIHQFVPIIRWPRIIPSGFGYGLSLGIPSVAPHLGKGILGKPPIIPSGFGYGLSLEIPSVAPHLGNGILGKPPSNITPLDQRSSTQLVHVRNPHQHTCQQSCGGAMEPSSSGVA

SEQ ID NO: 46746 - protein, 344 aa, Zea Mays
MGDPPTLKRPKLEKADDDSTYCPRPSSNGAAPVRTPGATAAIGAAPGDDVEEEDDIAEEAVIALIAHRERDVERCKLKLLHYQSLLDTAEMKLEEAHSRLARFRDRKPPPTRSEPKPPTPPIQREHKPSPPPIQRDLKPSPQPLIQKAPSPAPQPSARPQLVIPGTSNRPTPRPEPMPGLKRAAAPSSSSSPAPPERSRKEEKKPKIKMEQKEHQNLIPSVGKSSATVLRFQGGNLVSSQHRRKLRCLELCPANDQLVVTSALDGLVTLWQVETRGPSLSFRGKTDFFSPKHRWPEDIAWHPDGETIFAVYTADNGDSQVSMTNLISGQIIYFLEILLNGVPQF

SEQ ID NO: 46747 - protein, 410 aa, Zea Mays
MIKQILGRLPRKPGKAGDSREAAAAGNGTEPSNSYSVARSMDPGNKRAGNGDYPVPSGVIPNPVMNGAVVYHSNEPLPAFKDVPMSEKQNLFVKKVSLCCAVYDFVDPTKNLKEKEVKRQTLMELVDYVASANGKFSEVVMLEITKMVSINLFRSSSPTPRENKAIEGVDLEEDEPLMDPAWSHLQIVYEVFLRFVASQETDAKLAKRYIDHSFILRLLDLFDSEDPRERDYLKTILHRIYGKFMVHRPFIRKAINNIFYRFIFETEKHNGVAELLEILGSIINGFALPLKEEHKLFLVRALIPLHKPKCVSMYHQQLSYCITQFVEKDCKLADTVIRGLLKYWPVTNSSKEVMFLGELEEVLEATQLAEFQRCMVPLFRQISRSMNSFHFQVLNMAFAYSKHDYLLPSC

SEQ ID NO: 46748 - protein, 125 aa, Zea Mays
MSYYGQQQPPVSAPPAQGYPGKDAYPPPGYPPAGYPPPAQGYPPQGYPPQGYPPQQGYPQQGYPPQYSQPPPPPRQQQSSGPSFMEGWYVLSSVRPLTSDSMRLQILEPSIRFQFCRRRRPGRWR

SEQ ID NO: 46749 - protein, 634 aa, Zea Mays
MGMGSDAAALFPFSTSTTATSPRLCGATAVSHRRIFSDVAEDVTVSVDGQSFLLHKFPLVSRCGRIRKMLADSSSSNSKDADGHQKLELANVPGGAYAFELAAKFCYGTNFEITAANVAQLRCVAEYLEMTEDQHADNLVARAEAYLAEVALRSLDGALEVLRRCDDGGPVAEQVGLVARCVDAVAASAGKEQLVSGLAAHLETCDCAAAARCREDWWVEDLSLLRIDHYRRVIAAMRRSGVRPETIGASVAHYAQTWLKGVDVEQRRRQRACWDGSGPFVGDGQRMVVETLVDVLATENVAAVTLSFLFGMLRVAVEVDASLDCRIELERRVGMRLEMAALDDLLVPAAQTSDSMFDVDTVHRILLSFLQRIDEDSSGDLSSPPCGYDSDGLKSPSHGSVLKVGRLMDGYLAEVAPDPYLKLQKFMALIELLPDYARIVDDGLYRAIDIYLKDASSHAAQNDRLPIQMVVRVLYFEQLRLKSSFSGGGSGCVGLGGADGSFSQRFVCSSSGVPSSCVSPQRDNYASLRRENRELKLEISRMRVRLTELEREQGLMKQQGRMRGGDGGGGGGRGGGGEHGRAFLASLSRGIGRITMFGGGPAAADRRRKKSGGRSSQCSDGKARRRQKASFAYD

SEQ ID NO: 46750 - protein, 529 aa, Zea Mays
MPSCPAPAPAVATFLLVALLSCGTRAIRTHGGYVSAVGDPGMRRDGLRVAWEAWNFCNEVGQEAPGMGSPRGADCFDLLETSSDEEGRPVYSVAHLVSDADNRLGAGDPFPGSPPGAARVTDADLYAPAKELYLGDRCQVADTPAPWQFWMVMLKNGNLDTTAAACPENGRPARPFPQTSRFPCPAGAGCMNQPLLFHNRTALDDAGRRLRGGLFGTYDLDAAAGLGAGDVSFYSVTWEKDVAASGRGGGWAFHHKLCTSTKYPWLMLYLRSDATRGFSGGYHYDTRGMTKTVPESPDFKVRLTLDVKQGGGRNSQFYLMDMGSCWKNDGRACDGDTATDVTRYSEMIINPATPAWCSPSRIDQCPPWHTFRNGSRVHRRDGARFPYGAYHVYCSPGNAARAEQPTTYCDAYSNPQAQEILQLLPHPVWGEFGYPTARGQGWVGDPRAWDLDVGAMSQALYFYQDPGTPPARRRWTSLDVGTEIYVSDRAEEAEWTLSGFDILVPDKCIKSQQRASNSCWHPKILEVEK

SEQ ID NO: 46751 - protein, 220 aa, Zea Mays
MKSYRLSELSDTEVSGLKARPRIDFSSIFGTVNPIVEDVRVRGDAAVKHYTEKFDKVMLDDVVVCVSDLPDAELDPAVKEAFDVAYDNIYAFHVSQKIPEKTVENMKGVRCKRITRCIGSVGLYVPGGTAVLPSTALMLAVPAQIAGCKTIVLATPPSRDGSICKEVLYCAKKAGVTHILKAGGAQAISAMAWGTASCPKAEKIFGPGNQYVTAAKMILQ

SEQ ID NO: 46752 - protein, 473 aa, Zea Mays
MGSLHALRAPTPLVGSTRIGFSSGLRFCSNRVLRGLTPIGAMKSYRLSELSDTEVSGLKARPRIDFSSIFGTVNPIVEDVRVRGDAAVKHYTEKFDKVMLDDVVVCVSDLPDAELDPAVKEAFDVAYDNIYAFHVSQKIPEKTVENMKGVRCKRITRCIGSVGLYVPGGTAVLPSTALMLAVIAGCKTIVLATPPSRDGSICKEVLYCAKKAGVTHILKAGGAQAISAMAWGTASCPKAEKIFGPGNQYVTAAKMILQNSEAMVSIDMPAGPSEVLVIADKYANPVHVAADLLSQAEHGPDSQVVLVVAGDGVDLGAIEAEVSKQCNALPRGEFASKALSHSFTVFAKDMVEAISFSNLYAPEHLIINVKDAEQWEEFIENAGSVFLGQWTPESVGDYASGTNHVLPTYGYARMYSGVSLNSFLKYITVQSLTEEGLRKLGPYVAKMAEVEGLEAHKRAVTLRLQEVEANVTV

SEQ ID NO: 46753 - protein, 328 aa, Zea Mays
MSREAQKLDCAAGAGGIGVLSLDLLGQVLEHLREPRDRKTCRLVSRAFERAEAAHRRALRVLRREPLPRLLRAFPALERLDLSACASLDDASLAAAVADAGGGLAGLRSVCLARANGVGWRGLEALVAACPKLAAVDLSHCVTAGDREAAALAAASELRDLRLDKCLAVTDMGLAKVAVGCPKLEKLSLKWCREISDIGIDLLAKKCPELRSLNISYLKVGNGSLGSISSLERLEELAMVCCSGIDDEGLELLSKGSDSLQSVDVSRCDHVTSEGLASLIDGRNFLQKLYAADCLHFVEIILIGDRTAFSIQVGKTEGNLDIAETRRS

SEQ ID NO: 46754 - protein, 73 aa, Zea Mays
MEKIYPLLILKLLGISVYCMAGMLYCITEQEVPFSGLQRKWCTHKVRASITKVCHEAKEIFQETKKPSWSWNA

SEQ ID NO: 46755 - protein, 174 aa, Zea Mays
MVGGGGHSSMDHPGAKDDGDGEESQYFSDAEDRSWPSHSRHDSTAYEDYVSLCVSARASSVDADADADGEAVRQHCRKSSCVSEGSLDDVDLEAGLSEIIKASPEKAEQNCRICHLGLESTAVESGAGITLGCSCKGDLSYAHKQCADTWFKIRGNKCQSAGVDTLFVEGGTIS

SEQ ID NO: 46756 - protein, 199 aa, Zea Mays
MDFESLNPGEQIYEKMISGMYLGEIVRRILLKLAHEASLFGDVVPPKLELPFILRTPDMSAMHHDSSHDLKTLGAKLKDIVGVADTSLEVRYITRHICDLVAERAARLAAAGVYSILKKIGRDKVPSGGGKMPRTVVALDGGLYEHYKKFSSCVEATLTDLLGEEASSSVVAKLANDGSGIGAALLAASHSQYQYGASD

SEQ ID NO: 46757 - protein, 1154 aa, Zea Mays
MASAVAAPPPTPPESDPRLVEIFSPFLEKLIKNASWRNKAHSKLSHTAKSILDRLQKPPPPPAAEAQAPSTPTSSPSTPTSSSAQPGPLRSLSLADSELLLAPVISALGSGSAKLAEAALELLHRLIAHSYIHGEADPSADPSAQLVASLLDAACNALGLDDEHIELLLLKTLLSAVTSTSVRLHGDCLLRAVRACYDMYLGSRSAVNQATAKASLVQMLVIVFRRMEADSSTVPVQPIVVADVIELPDAISGSSPTADPNVVQGFISKIIGDFDGALTPLARTTSSAGAGPTVAHDGAFETTAAAEEGANPADLLDSTDKDMLDAKYWEISMYKTAIEGRKDELGVEGAVVGTLDDDADVRIGNKLRRDAFLVFRALCKLSMKTPPKDAPADPIVMRGKILALELLKILLENAGAVFRTSERFLGAIKQYLCLSLLKNCASSHMIVFQLSCSIFISLVARFRPGLKAEIGVFFPMIILRVLENIAQPNYQAKMIVLRFLEKLCGDSQILVDIFLNYDCDVHSSNIFERMVNGLLKTAQGPPAGVPTTLVPPQDTTMKSEAMKCLVAILRSMGDWMNKQLRIPDPASPNVESEKNDNDDGNELPQADNNGDESSEASDSHSELSNGISEAASLEQRRAYKIELQEGIYLFNRKPKKGIEFLVNASKVGETPEEIAAFLKSASGLNKTMIGDYLGEREDLSLKVMHAYVDSFDFQRLEFDEAIRAFLQGFRLPGEAQKIDRIMEKFAERYCKCNPKAFSSADTAYVLAYSVIMLNTDAHNPMVKNKMSPEDFIRNNRGIDDGKDLPEEFMRSLYERIWKKEIKMKEDEFVPQQQQSTSSNKILGLDNILNIVVRKRGSSMETSDDLIKHMQEQFKEKARMSESVFYPATDVVVLKFMVEVCWAPMLAAFSVPLDQSDDEIVVSQCLEGFRSAIHVTAAMSMKTQRDAFITSLAKFTSLHSAADIKQKNVEAIKAILLIADEDGNYLQEAWEHILTCVSRFENLHLVGEGAPPDATFFALQQPDLDKSKQAKSSILPVLKKKAPNATSASKRGSYDSAGVGGKASGVDQMNNEVTSLLEQVGMAEMNRVFVRSQKLNSEGIIDFVKALCKVSMEELRSASDPRVFSLTKIVEIAKSFNRNICYGLLAAVIYEVPGA

SEQ ID NO: 46758 - protein, 1145 aa, Zea Mays
MASAVAAPPPTPPESDPRLVEIFSPFLEKLIKNASWRNKAHSKLSHTAKSILDRLQKPPPPPAAEAQAPSTPTSSPSTPTSSSAQPGPLRSLSLADSELLLAPVISALGSGSAKLAEAALELLHRLIAHSYIHGEADPSADPSAQLVASLLDAACNALGLDDEHIELLLLKTLLSAVTSTSVRLHGDCLLRAVRACYDMYLGSRSAVNQATAKASLVQMLVIVFRRMEADSSTVPVQPIVVADVIELPDAISGSSPTADPNVVQGFISKIIGDFDGALTPLARTTSSAGAGPTVAHDGAFETTAAAEEGANPADLLDSTDKDMLDAKYWEISMYKTAIEGRKDELGVEGAVVGTLDDDADVRIGNKLRRDAFLVFRALCKLSMKTPPKDAPADPIVMRGKILALELLKILLENAGAVFRTSERFLGAIKQYLCLSLLKNCASSHMIVFQLSCSIFISLVARFRPGLKAEIGVFFPMIILRVLENIAQPNYQAKMIVLRFLEKLCGDSQILVDIFLNYDCDVHSSNIFERMVNGLLKTAQGPPAGVPTTLVPPQDTTMKSEAMKCLVAILRSMGDWMNKQLRIPDPASPNVESEKNDNDDGNELPQADNNGDESSEASDSHSELSNGISEAASLEQRRAYKIELQPKKGIEFLVNASKVGETPEEIAAFLKSASGLNKTMIGDYLGEREDLSLKVMHAYVDSFDFQRLEFDEAIRAFLQGFRLPGEAQKIDRIMEKFAERYCKCNPKAFSSADTAYVLAYSVIMLNTDAHNPMVKNKMSPEDFIRNNRGIDDGKDLPEEFMRSLYERIWKKEIKMKEDEFVPQQQQSTSSNKILGLDNILNIVVRKRGSSMETSDDLIKHMQEQFKEKARMSESVFYPATDVVVLKFMVEVCWAPMLAAFSVPLDQSDDEIVVSQCLEGFRSAIHVTAAMSMKTQRDAFITSLAKFTSLHSAADIKQKNVEAIKAILLIADEDGNYLQEAWEHILTCVSRFENLHLVGEGAPPDATFFALQQPDLDKSKQAKSSILPVLKKKAPNATSASKRGSYDSAGVGGKASGVDQMNNEVTSLLEQVGMAEMNRVFVRSQKLNSEGIIDFVKALCKVSMEELRSASDPRVFSLTKIVEIAKSFNRNICYGLLAAVIYEVPGA

SEQ ID NO: 46759 - protein, 142 aa, Zea Mays
MVDDLVEASKSISTLPSMVERDIQTDTVRKPGSHTRNLLRVKRGIDMVKVLFEQILVTEGNSLRDAASVAYAQVFAPHHGWAIRKAVSAGMYALPSKSQLLKKLNEDEESAKVQMQNFVRSSAPVICYVDDLFTSRNLGIDW

SEQ ID NO: 46760 - protein, 166 aa, Zea Mays
MVVMISFNSFSVHGFWLVISNQNYEVDDLVEASKSISTLPSMVERDIQTDTVRKPGSHTRNLLRVKRGIDMVKVLFEQILVTEGNSLRDAASVAYAQVFAPHHGWAIRKAVSAGMYALPSKSQLLKKLNEDEESAKVQMQNFVRSSAPVICYVDDLFTSRNLGIDW

SEQ ID NO: 46761 - protein, 807 aa, Zea Mays
MARGGGGGCCPPMDLMRSEAMQLVQVIIPAESAHLTVSYLGDLGLLQFKDIKRCSEMARKLRFFKEQMSKADITASPTQLNGTHMDFDELEIKLGELEAELTEVNANNEKLQRTYNELLEYHTVLQKAGEFFYSAQRTAAAQQMEMEANQSGQTSLESPLLEQEMTTDPSKQVKLGSLSGLVPKEKAMAFERILFRATRGNIFLRQEPVDEPVTDPVSREKVTKNAFVIFYSGERAKTKILKICDAFNANRYPFPEDVGKQLHAVQEVSGKISELKTTIDMGLAHRDSILKNIASDFEQWNHLVKKEKAIYHTLNMLSVDVTKKCLVAEGWSPIFASIQIQDALQRATLDSKSQVGSIFQVLNTKESPPTYFQTNKFTSAFQEIVDAYGVAKYQEANPGVFTIVTFPFLFAVMFGDWGHGICLLLATLYLIIREKKLASQKLGDIMEMMFGGRYVIMMMAVFSIYTGLIYNEFFSVPFGLFGKSAYACRDSSCSDATTEGLLKVRDAYPFGVDPVWHGSRSELPFLNSLKMKMSILLGVAQMNLGIVISYFNAKFFRNSINVWYQFIPQLIFLNSLFGYLSLLIIIKWCTGSKADLYHVMIYMFLSPTDDLSENQLFSGQKTVQLVLLLLALVSVPWMLIPKPLLLKKQHQQRHQGHQYAMLQGIDESVGAELGEHHEDAHDHEEFEFGEVFVHQLIHTIEFVLGAVSNTASYLRLWALSLAHSELSTVFYEKVLMTAYGFNNVFILIIGVVIFIFATIGVLLVMETLSAFLHALRLHWVEFQNKFYEGDGYKFAPFSFALIREEED

SEQ ID NO: 46762 - protein, 743 aa, Zea Mays
MTSRPPVSGSCTASVNSNQMQTIASSSANKHMVTDGLAVSLQSSCGFQHGGWSGTPGQLSMVDIVKMGRPQGKASSKPVVTADRGYAGQYPSLPSTNQNLKQSGSMVSPAELDKGLQPAHNLVQVKNHGHFTADSKLPYGTDWSPQDDPTSENQSSQPETSGDPSLYESSFQSSTLVTDVVNSHENSHLELDENSTFAMRSTPASERHLEPSDSIPEYNDGILNNSSSYQPHNYSYTEQDVEDSSADVSAAAENFQSLSLHNDELAAKKTAEDNPAVIIPDHLQVTNTECVSLSFGSFGSGAFSGLLPQKTTDSNVEFLVQEDSATVDPIDARNQDYYESGAVTSPAEENLEAMLGTNMENVDAPSVSQANELSQDVLDPSVLKYDVSSVSSHAYSNMNTPQPSTIEDPQGNNQAHTLSHLSNMMQANPLSTSSLLASNQNHPSLHGLEFDLPYLEAKYNAGTTTNPRPAISMQEALKAGVFSNARSTQSLPSTSIPTGHPLPQQLAHHPYSQPTLAPITHFPNIVGYPPYLPQNYAAYLSSGTFQQAYPSNGAFHQSAAALLGSGMKYSAPEYKNNLSATGLQQQHQPQPQPPSSVISGYGGLGSSSNIQGNFTLNQSTGTGSTLVFDDALGRQYKDTSQHIALQQPDNSGMWLHGSGSRAAALPPNHFYGYQGQSQLGGFGQAQQQQPSQFGGHGYPTFYQSQGGLTQEHHPQNLAEGSLNGFQVAPSQPSHPSWQHQHTY

SEQ ID NO: 46763 - protein, 623 aa, Zea Mays
MDLSRLASVAGPSRAAPRAGLQIGAAGNGFRVCSLRHRGAGNGRLTSAAALLRGSSGLFYLAPARGGPPRLRARGRPRCQGSDSLAYVDGPLEAAKGSGEVYDDDATSSGPDDDDNDKGPADVDGLREMLQRCRNELEVARLNSTMFEEKAQRISESAIALKDRAEGAQRDVSAAVATVQEVIVKEADAKEAVQKATMALSMAEARLQLASEALDAKRGSVGPMEVSIEGVEEEALVSAQEEIKDCRAALLRCEEELERIQEQKMNLQKEVDRLTELAEKAQLDASKAEEDVTNIMVLAEQAVALEMKATQRVNDAEAVLLKAEKVISSVDTVVELTSLAEEQKSAEEDSVSEGYEYSSNGTDDVPVRDEVSSIERLMVGDLTVEGIEQLEPSREIYDEASSDKMSVEPQKEAEPDSDKLKQGKKQEMERKEFTKEPLSAQKSLKKRSSRFFPASFFSSKADGEFTPTSVFRGLMKSVQKQAPKLVVGILLLGAGAEKSQLFQQQEIATSIGKVTSTTKPIVREIRQIPQRVKKLIELLPHQEVNEEEASLFDILYLLLASVIFVPLFQKIPGVLFLDILLLVSSLVHMGSPSSVMCMGQRQLRNSESCSYCLTLDLSFLWKG

SEQ ID NO: 46764 - protein, 1089 aa, Zea Mays
MDLSRLASVAGPSRAAPRAGLQIGAAGNGFRVCSLRHRGAGNGRLTSAAALLRGSSGLFYLAPARGGPPRLRARGRPRCQGSDSLAYVDGPLEAAKGSGEVYDDDATSSGPDDDDNDKGPADVDGLREMLQRCRNELEVARLNSTMFEEKAQRISESAIALKDRAEGAQRDVSAAVATVQEVIVKEADAKEAVQKATMALSMAEARLQLASEALDAKRGSVGPMEVSIEGVEEEALVSAQEEIKDCRAALLRCEEELERIQEQKMNLQKEVDRLTELAEKAQLDASKAEEDVTNIMVLAEQAVALEMKATQRVNDAEAVLLKAEKVISSVDTVVELTSLAEEQKSAEEDSVSEGYEYSSNGTDDVPVRDEVSSIERLMVGDLTVEGIEQLEPSREIYDEASSDKMSVEPQKEAEPDSDKLKQGKKQEMERKEFTKEPLSAQKSLKKRSSRFFPASFFSSKADGEFTPTSVFRGLMKSVQKQAPKLVVGILLLGAGAFFLNRAEKSQLFQQQEIATSIGKVTSTTKPIVREIRQIPQRVKKLIELLPHQEVNEEEASLFDILYLLLASVIFVPLFQKIPGGSPVLGYLAAGVLIGPYGLSIIRNVHGTKAIAEFGVVFLLFNIGLELSVERLSSMKKYVFGLGSAQVLATTAAVGVIAHRFAVLPGPAAIVVGSGLALSSTAVVLQVLQERGESTSRHGRATFSVLLFQDLAVVVLLILIPLISPNSSKGGVGFQAIAEAMGMAAVKAVAAITAIIAGGRLLLRPIYKQIAENQNAEIFSANTLLVIFGTSLLTARAGLSMALGAFLAGLLLAETEFSLQVGMSIDPKLLLSNFPMISMILGLLIIGKTLLVTFVGRVFGVSTIAAIRVGLLLAPGGEFAFVAFGEAVNQGLLSPQLSSLLFLVVGISMALTPWLAAGGQFLASKFEQHDVRSLLPVESETDDLHDHIIILGFGRVGQIVAQLLSERLIPFVALDVRSDRVAVGRALDLPVYFGDAGSREVLHKVGAERACAAAITLDTPGANYRAVWALNKYFPNVKTFVRAHDVDHGVNLEKAGATAVVPETLEPSLQLAAAVLAQVNSCLIIIHCAY

SEQ ID NO: 46765 - protein, 246 aa, Zea Mays
MVQRLQARQRLLYMSLQKHKRMEVAALVPKTELDGEMGDAHIALQARLMSQALRKLSHSLSLSQTILLFINQIRAKVATFGFGGPTEVTSGGNALKFYASVRLNIRRIGLVKKGEETIGSQIAVKIVKNKHAPPFKTAQFELEFGKGICRSSELFELGLKHKLIRKSGGSYYSFNGKAFNGKSNLKSYLTENKSVANDLEMELKRLMGTDASKEQEAGDSSQSDFPEESVTPEASSEEDLGAIIEG

SEQ ID NO: 46766 - protein, 1144 aa, Zea Mays
MESGVRFHTTQYVRDKSTTPSGFTLKLRKHIRNKRLEDVRMLGYDRIILFQFGLGSNAHFIILELYAQGNILLTDSEYTVLTLLRSHRDDNKGLAIMSRHRYPVEACRVFGRTDFAKLKDMLTKPDKADDKEEITSGSTDAQETSQSTNDEVLVTEISEKSLSKKEKKAAAKAKQFGSNAKVNNGAQSNKATLKTILGEALAYGPALAEHIILDAGLVPSTKVGKDPESTINDSTVQSLMESITRFEDWLVDIISGQRIPEGYILMQNKMTAKNITPLEEASINHKIYDEYCPVLLNQFKSREYNEFATFDAALDEFYSKIESQKVNQQQKAKEESAAQRLNKIKLDQENRVHTLRKEVDHCVKMAELIEYNLEDVDAAILAVRVSLANEMSWEALTRMIKEERKAGNPVAGLIDKLNFERNCITLLLSNNLDDMDEDEKTAPVEKVEVDIALSAHANARRWYEMKKKQESKQEKTITAHDKAFKAAEKKTRLQLAQEKTVAAITHMRKVHWFEKFNWFISSENYLIISGRDAQQNELIVKRYMSKGDLYVHAELHGASSTIIKNHKPDTPIPPLTLNQAGCFTVCHSKAWDSKIVTSAWWVYPHQVSKTAPTGEYLTVGSFMIRGKKNFLPPHPLVMGFGILFRLDESSLASHLNERRVRGEDEALHEMEAESRKKQSNPESDEDIGSEGANKETHEDESNGQTTNIQQNNDLELPDLSSNIGTANSSELLPEIQAEETLDNGSSILKEETIEASVSSQLDDLLDKTLCLGPAKVSGKSSLLTSIPSSLAEDDDDLEVKRPTIRDKPYISKAERRKLKKGQVNDETATDSQNGEAVETPGTSKQEKGKAETKATDSKASQPDTSQQEKGKANTKATGSKLSQPGNSQQEKGKGSTHAGNAKVSRGQKGKLKKIKEKYAEQDEEEREIRMALLASSGKALRKDKPSQDVEETSVKESKPSAGEDDSSKICYKCKKAGHLSRDCPESTSEVDRNDGSISRSRDDTGTNTAPAGGNSPMDEDDVQEIGDEEKEKLIDLDYLTGNPLPNDILLYAVPVCAPYNALQTYKYRVKITPGTAKKGKAAKTAMSLFLHTPDATNREKELMKACTDPELVAAIVGNAKITAPGLTQLKQKQKQKGKKSAKQN

SEQ ID NO: 46767 - protein, 412 aa, Zea Mays
MYDRMEDRFNYLEDRIRKSASLFSASGFCGQPADATLASEEKMFAVGTVACDGEGHLNEKSILLQGSVEHSRGQCVRLDLKDLDHFSLFPGQVVGIEGHNPSGHCFVASKLFDSIPVSVDAQLPSAKKQAIDNESNQNSDAGTLSRALSSIIAAGPYTTTDNMLFEPLQELLSYACRKPPQLLILMGPFIDSDHPDIKKGTIDQSFHDIFHFEVLRKIQDFTQYLGNTVRVILIPSVRDAHHDFVFPQPAFDLNLLEDTTHQITSLANPCLFGSNEINFGCCTVDILKQLSGQEISRKPPGGKPGDRIGRLASHILKQQSYYPLYPPAPGVPLDLSLAKEALEIPSAPDVLLLPSDLAPFVKVLSLGEGSDDDRRFICVNPGRLAKGIGGGTFVELYYNEGIDKTNASIIRI

SEQ ID NO: 46768 - protein, 639 aa, Zea Mays
MFGSTNRSQTAAPTFGQPQFANQAGGTRIKPYSQTPDVDSATSGTQPAAKLDSISAMPEYKEKSHEELRWEDYQRGDKGGPNTSGTQTLAPSFPSPIQHNTFASTSNPFSTNPFSTNNPFAPKPTTTTSSPFNTSFNNASVASSSLFTSSPGTTMFGQPGVSTLPAPASNSPSLFGNINPAPATSSIFATSVTNNPSPFGTGTSLANTQSAPLFSSAFAQPTSSTPAFSSGSLFGSTNPGSLFTSSGPSLFSTPTFQPSAPAQSSNMFSFQPPIQPASTGGLPFFPNTNQALTGQPTSSLSSMVMQSALVSNPFGMLPAMPQMSIGNGGSSPSVQYGISSLPVAEKPLPSRSLSMAVPRHLSQRRIKLLPRKYNPISDGKVPFFADDEESPATPKADAFFIPRENPRNLVIRPIEQWSSRRETGRQYTAKNVTDSNKYEDASIESERGKSAMSPSSRPPAVENDKQHEARAMAQHANGNGTSVERLLPKLPRADYFTEPSIEELAAKERAEPGYCGRVRDFVVGRHDYGSIKFFGETDVRCLDLESIVEFNDREVIVYKDDSKKPPVGEGLNKAAEVTLLNIKCVNKKTGEPCQGARVERYREMLVKKAEEQGAEFVSFDAVKGEWKFRVKHFSAYGLW

SEQ ID NO: 46769 - protein, 867 aa, Zea Mays
MFGSTNPFGQSSTSPFGQTSFGTPQGFGQSSTAANNPFAPKPFGSPTTAFGAQTGSSLFGTTSTGAFGQQQSTPTFGTTSSSQFGSSTPAFGASPTPAFGATSSGSLFGQKPSFGGFGSSSSQSSPFGNTFQQTQPTFGSSTFGSSTPPAFGATAPAFGTTTPAFGTTTAPAFGATTSPAFGSTSTSLFGASSAPMFGSSAFGTSATGFGTSGTTAFGVSSTTPGFGSSSTPSFGTSASAFSFGSSPSFGQTAVSSGSTPFGTTPSPFGAPAPAFGSQTAAPTFGQPQFANQAGGTRIKPYSQTPDVDSATSGTQPAAKLDSISAMPEYKEKSHEELRWEDYQRGDKGGPNTSGTQTLAPSFPSPIQHNTFASTSNPFSTNPFSTNNPFAPKPTTTTSSPFNTSFNNASVASSSLFTSSPGTTMFGQPGVSTLPAPATPLFSSAFAQPTSSTPAFSSGSLFGSTNPGSLFTSSGPSLFSTPTFQPSAPAQSSNMFSFQPPIQPAASTGGLPFFPNTNQALTGQPTSSLSSMVMQSALVSNPFGMLPAMPQMSIGNGGSSPSVQYGISSLPVAEKPLPSRSLSMAVPRHLSQRRIKLLPRKYNPISDGKVPFFADDEESPATPKADAFFIPRENPRNLVIRPIEQWSSRRETGRQYTAKNVTDSNKYEDASIESERGKSAMSPSSRPPAVENDKQHEARAMAQHANGNGTSVERLLPKLPRADYFTEPSIEELAAKERAEPGYCGRVRDFVVGRHDYGSIKFFGETDVRCLDLESIVEFNDREVIVYKDDSKKPPVGEGLNKAAEVTLLNIKCVNKKTGEPCQGARVERYREMLVKKAEEQGAEFVSFDAVKGEWKFRVKHFSAYGLW

SEQ ID NO: 46770 - protein, 154 aa, Zea Mays
MPSPAAAAAAPFHRIACARQHLPQTRLFFLPSRALLKSDRLTVPAPLRVHALRLPPTVPRAASHDAATGVRSPTSGGQMLVFVPPHPLIKHWVSVLRNEQTPCVIFKSAMAELGRLLIYEASRDWLPTITGEIETPVAVASVEFIDPREPVLHV

SEQ ID NO: 46771 - protein, 575 aa, Zea Mays
MGRSRRHEGGGGGERRGAGAGGVAAAAFAALLLGCVVMALVGGAAAQGPRLPSDYKTLSGAAPLVVARGGFSGAFPDSSEGAYSFGASASAPGTAMWCDVQLTKDGVGLCLRDVNMKNCTTVDQTYPGRKRTYVIDGVHKTGWFVPDFTSAELLQSVYLTQAIWSRTERMDGIYPIVTVPDVQSIVNTSPIWLNVQHPIFYKQRDLDMSSYIHSIRKLVRMDYISSPEIGFLRNISARVRRRTKLVFSFLDKKLLDHSVNQTYGSLARNLTFVRSVASGILVPKDYIWPVTADNYLLPSTSIVTEAHEAGLEIYASGFVNDKAVPFNYSYDPLAEYLNFVGDGGFSVDGVLSDYPITASEAIGCFANLNSSKTDHVTGKPLVISHNGASGDYPDCTDLAYHSAVDDGADVIDCPVQVTSDGVLMCMSSINLLDTTNNAAFIAKSLGIDMVDSVTAALSAAGFSNQTTKEVLIRSTDSAVLVKLKQQKTRCKLVYTLPLGIGDASKPSLKDIKAFAEAVVVDRTSVFALSYDFIMGQNRIVRDLQAAGLAVYAQVFRNEEHLYSSGEGYAQVHAAS

SEQ ID NO: 46772 - protein, 244 aa, Zea Mays
MQKDVDDMVHIHFHNHIELLLPYLEQSRQGYLPKRSFHVKTCSKFRHQATILDPSLLNLRPSSRLVWLMVLPSHLVQSHYHHASADDFLQIVQKTFVKDEGQSMAPNQVAGEILSFFTRNNFTVSDRGEVITFEGTMIPNRGQAALLTFCTCISLGSVGLVLSIAVPEGGNNWFWLMTLSPLAGAYYWTKASRKEEIKVKMILSDDGNVSEILVQGDDVQVEQMRKDLKFSEKGMVYVKGIFET

SEQ ID NO: 46773 - protein, 102 aa, Zea Mays
MPGCPTSSASPSSTAPTQPSCGSWYRSRPASAPSASASGRLSIHSISIVFYAIYCIAMGQWMIRICFLRLAHDLSSYTISLIDCSLHLLIYMFTCFNFCQHP

SEQ ID NO: 46774 - protein, 80 aa, Zea Mays
MDKDPDSPIAYEEAKEMASQSCTISDDHSLLLLSIISSEALLLNSTADMAGAGPILSIIYPCMCASYSTLCFNSLEIIQS

SEQ ID NO: 46775 - protein, 82 aa, Zea Mays
MLETANLHTSNKMKQQARKCGICHMSGCKTGNFMLSTMCVDMMLVEMLGPIFNSWGASSSASYACTSPASPAGHRPRMNCCS

SEQ ID NO: 46776 - protein, 93 aa, Zea Mays
MKQQARKCGICHMSGCKTGNFMLSTMCVDMMLVEMLGPIFNSWGASSSASYACTSPASPAGHRPRCTFPPCSVHVPMCHSCFSLFRIVRVLLQ

SEQ ID NO: 46777 - protein, 73 aa, Zea Mays
MQHSSQGQERSSTWHASCLKQGKKHPRQISVAKAGLVKKLCFPPGLSLLSYLFIYVCSNLCWFFTVTEYVCSS

SEQ ID NO: 46778 - protein, 105 aa, Zea Mays
MLETANLHTSNKMKQQARKCGICHMSGCKTGNFMLSTMCVDMMLVEMLGPIFNSWGASSSASYACTSPASPAGHRPRCTFPPCSVHVPMCHSCFSLFRIVRVLLQ

SEQ ID NO: 46779 - protein, 117 aa, Zea Mays
MEPWLISILSFHAILLLVTIISRRNINFQLILSALTFSGVFLAERLNTFLAQNWKSFSTQNYFDPQGLFISVIWSGPLLLITILILVNTLVTLCTLMVRWKRAELRHRARQARDKQD

SEQ ID NO: 46780 - protein, 801 aa, Zea Mays
MAEPEPLPQVSSEPTTPPQEGSGRTKTKNKKNRSKKQPKRAGADTDGLSSGASTMVEDPFFVLAGGKEGGFLDLEEIDEADFGIFGGVLDDVGQSVEEAGKDHGKKKKKTKKRKRGGDGEGFSGDAALVVENDQVDVEKVEKKVEDGEKGDKKGKRKMNMKKRKVKDNEMNRESDEDVASDKAEDMQDDTENMEQNEDDELILGEDDVSAWRELRLHPLLLKAMRRLGFKEPTPIQKSCFPAAAHRGKDVIGAAETGSGKTLAFGLPVLQRLLEEREKATRLQQEDEKMEERSCGSPLRALILTPTRELAKQVCDHLKDVAKFLGIHVVPIVGGLSMEKQERLLKKKPEIVVGTPGRLWEHMSMNNQHLVELHSLSFFILDEADRMIERGHFRELQSIIEMLPLTNGSDEQAARTMPNCETVPILQIKKRQTFVFSATLALSSNFRKKLKRGLSTSKASTPDDVSSIEALSKQAGMKSNAEIVDLTKASILPEKLEESFIECSEEDKDAYLYYILSVHGQGRTIIFCTSIAALRHISSILRILGINVLTNHAQMQQRARMKVYIHRSGRTARKSLAGCSIALISPTDKSRFYSLCKSLSKENLQQFPVDHTYMSGVMNRLSLARQIDKIARKTSQENANKSWLQRNAESMGLILDTSDSEEDHVQGHKKRKATSAHLQKLQQELSDLLQCPLQPKTFSRRYLAGAGVSPLLQKQLEELAKRNASNNSSKSKNKGSGFVVIGQDRVEPLQALQNSGQEVCVNIDKEREKRRVAENWRRKKHEEKKRTQEQKRKDKRKAKEMA

SEQ ID NO: 46781 - protein, 622 aa, Zea Mays
MAEPEPLPQVSSEPTTPPQEGSGRTKTKNKKNRSKKQPKRAGADTDGLSSGASTMVEDPFFVLAGGKEGGFLDLEEIDEADFGIFGGVLDDVGQSVEEAGKDHGKKKKKTKKRKRGGDGEGFSGDAALVVENDQVDVEKVEKKVEDGEKGDKKGKRKMNMKKRKVKDNEMNRESDEDVASDKAEDMQDDTENMEQNEDDELILGEDDVSAWRELRLHPLLLKAMRRLGFKEPTPIQKSCFPAAAHRGKDVIGAAETGSGKTLAFGLPVLQRLLEEREKATRLQQEDEKMEERSCGSPLRALILTPTRELAKQVCDHLKDVAKFLGIHVVPIVGGLSMEKQERLLKKKPEIVVGTPGRLWEHMSMNNQHLVELHSLSFFILDEADRMIERGHFRELQSIIEMLPLTNGSDEQAARTMPNCETVPILQIKKRQTFVFSATLALSSNFRKKLKRGLSTSKASTPDDVSSIEALSKQAGMKSNAEIVDLTKASILPEKLEESFIECSEEDKDAYLYYILSVHGQGRTIIFCTSIAALRHISSILRILGINVLTNHAQMQQRARMKAVDRFRESENSILVATDGFARGMDFDDVRTVIHYQLPHSTDKWKDSTQVIGWLQHCVNLSY

SEQ ID NO: 46782 - protein, 554 aa, Zea Mays
MEERSCGSPLRALILTPTRELAKQVCDHLKDVAKFLGIHVVPIVGGLSMEKQERLLKKKPEIVVGTPGRLWEHMSMNNQHLVELHSLSFFILDEADRMIERGHFRELQSIIEMLPLTNGSDEQAARTMPNCETVPILQIKKRQTFVFSATLALSSNFRKKLKRGLSTSKASTPDDVSSIEALSKQAGMKSNAEIVDLTKASILPEKLEESFIECSEEDKDAYLYYILSVHGQGRTIIFCTSIAALRHISSILRILGINVLTNHAQMQQRARMKAVDRFRESENSILVATDGFARGMDFDDVRTVIHYQLPHSTDVYIHRSGRTARKSLAGCSIALISPTDKSRFYSLCKSLSKENLQQFPVDHTYMSGVMNRLSLARQIDKIARKTSQENANKSWLQRNAESMGLILDTSDSEEDHVQGHKKRKATSAHLQKLQQELSDLLQCPLQPKTFSRRYLAGAGVSPLLQKQLEELAKRNASNNSSKSKNKGSGFVVIGQDRVEPLQALQNSGQEVCVNIDKEREKRRVAENWRRKKHEEKKRTQEQKRKDKRKAKEMA

SEQ ID NO: 46783 - protein, 831 aa, Zea Mays
MAEPEPLPQVSSEPTTPPQEGSGRTKTKNKKNRSKKQPKRAGADTDGLSSGASTMVEDPFFVLAGGKEGGFLDLEEIDEADFGIFGGVLDDVGQSVEEAGKDHGKKKKKTKKRKRGGDGEGFSGDAALVVENDQVDVEKVEKKVEDGEKGDKKGKRKMNMKKRKVKDNEMNRESDEDVASDKAEDMQDDTENMEQNEDDELILGEDDVSAWRELRLHPLLLKAMRRLGFKEPTPIQKSCFPAAAHRGKDVIGAAETGSGKTLAFGLPVLQRLLEEREKATRLQQEDEKMEERSCGSPLRALILTPTRELAKQVCDHLKDVAKFLGIHVVPIVGGLSMEKQERLLKKKPEIVVGTPGRLWEHMSMNNQHLVELHSLSFFILDEADRMIERGHFRELQSIIEMLPLTNGSDEQAARTMPNCETVPILQIKKRQTFVFSATLALSSNFRKKLKRGLSTSKASTPDDVSSIEALSKQAGMKSNAEIVDLTKASILPEKLEESFIECSEEDKDAYLYYILSVHGQGRTIIFCTSIAALRHISSILRILGINVLTNHAQMQQRARMKAVDRFRESENSILVATDGFARGMDFDDVRTVIHYQLPHSTDVYIHRSGRTARKSLAGCSIALISPTDKSRFYSLCKSLSKENLQQFPVDHTYMSGVMNRLSLARQIDKIARKTSQENANKSWLQRNAESMGLILDTSDSEEDHVQGHKKRKATSAHLQKLQQPKTFSRRYLAGAGVSPLLQKQLEELAKRNASNNSSKSKNKGSGFVVIGQDRVEPLQALQNSGQEVCVNIDKEREKRRVAENWRRKKHEEKKRTQEQKRKDKRKAKEMA

SEQ ID NO: 46784 - protein, 840 aa, Zea Mays
MAEPEPLPQVSSEPTTPPQEGSGRTKTKNKKNRSKKQPKRAGADTDGLSSGASTMVEDPFFVLAGGKEGGFLDLEEIDEADFGIFGGVLDDVGQSVEEAGKDHGKKKKKTKKRKRGGDGEGFSGDAALVVENDQVDVEKVEKKVEDGEKGDKKGKRKMNMKKRKVKDNEMNRESDEDVASDKAEDMQDDTENMEQNEDDELILGEDDVSAWRELRLHPLLLKAMRRLGFKEPTPIQKSCFPAAAHRGKDVIGAAETGSGKTLAFGLPVLQRLLEEREKATRLQQEDEKMEERSCGSPLRALILTPTRELAKQVCDHLKDVAKFLGIHVVPIVGGLSMEKQERLLKKKPEIVVGTPGRLWEHMSMNNQHLVELHSLSFFILDEADRMIERGHFRELQSIIEMLPLTNGSDEQAARTMPNCETVPILQIKKRQTFVFSATLALSSNFRKKLKRGLSTSKASTPDDVSSIEALSKQAGMKSNAEIVDLTKASILPEKLEESFIDEEDKDAYLYYILSVHGQGRTIIFCTSIAALRHISSILRILGINVLTNHAQMQQRARMKAVDRFRESENSILVATDGFARGMDFDDVRTVIHYQLPHSTDVYIHRSGRTARKSLAGCSIALISPTDKSRFYSLCKSLSKENLQQFPVDHTYMSGVMNRLSLARQIDKIARKTSQENANKSWLQRNAESMGLILDTSDSEEDHVQGHKKRKATSAHLQKLQQELSDLLQCPLQPKTFSRRYLAGAGVSPLLQKQLEELAKRNASNNSSKSKNKGSGFVVIGQDRVEPLQALQNSGQEVCVNIDKEREKRRVAENWRRKKHEEKKRTQEQKRKDKRKAKEMA

SEQ ID NO: 46785 - protein, 374 aa, Zea Mays
MFKKGRLGAVDNLKLMDDLAVLRPTIFASVPRLYNKIYAAITNAVKESGGLRERLYHTAYNAKRHAMINGRNPSPMWDKLVFNKIKARLGGRMRLMTSGASPLSPDVMEFLRICFGEVLEGYGMTETSCVISTMNIGDRSIGHVGSPNPSCEVKLVDVPEMNYTSEDQPYPRGEICVRGPIIFCGYYKDEVQTREVIDEDGWLHTGDIGLWLPGGRLKIIDRKKNIFKLAQGEYIAPEKIENVYAKCKFIAQCFIYGDSFNSSLVAIVAVEPDVLKAWAASEGIQYEDLRQLCADPRATAAVLADMDSIAKEAQLRGFEFAKAVTLVAEPFTLDNGLLTPTFKVKRPQAKAYFAKEISDMYARLLETELARSKL

SEQ ID NO: 46786 - protein, 489 aa, Zea Mays
MPCVRLIVVVGGDDSNMPSAPATTECKIMTYNRLHNEGKMSPQTFRPPKPEDIATICYTSGTTGTPKGAVLSHENLIANVAGSSLGIKFYPSDVYISYLPLAHIYERANQVALLHYGVAIGFYQGDNLKLMDDLAVLRPTIFASVPRLYNKIYAAITNAVKESGGLRERLYHTAYNAKRHAMINGRNPSPMWDKLVFNKIKARLGGRMRLMTSGASPLSPDVMEFLRICFGEVLEGYGMTETSCVISTMNIGDRSIGHVGSPNPSCEVKLVDVPEMNYTSEDQPYPRGEICVRGPIIFCGYYKDEVQTREVIDEDGWLHTGDIGLWLPGGRLKIIDRKKNIFKLAQGEYIAPEKIENVYAKCKFIAQCFIYGDSFNSSLVAIVAVEPDVLKAWAASEGIQYEDLRQLCADPRATAAVLADMDSIAKEAQLRGFEFAKAVTLVAEPFTLDNGLLTPTFKVKRPQAKAYFAKEISDMYARLLETELARSKL

SEQ ID NO: 46787 - protein, 359 aa, Zea Mays
MDDLAVLRPTIFASVPRLYNKIYAAITNAVKESGGLRERLYHTAYNAKRHAMINGRNPSPMWDKLVFNKIKARLGGRMRLMTSGASPLSPDVMEFLRICFGEVLEGYGMTETSCVISTMNIGDRSIGHVGSPNPSCEVKLVDVPEMNYTSEDQPYPRGEICVRGPIIFCGYYKDEVQTREVIDEDGWLHTGDIGLWLPGGRLKIIDRKKNIFKLAQGEYIAPEKIENVYAKCKFIAQCFIYGDSFNSSLVAIVAVEPDVLKAWAASEGIQYEDLRQLCADPRATAAVLADMDSIAKEAQLRGFEFAKAVTLVAEPFTLDNGLLTPTFKVKRPQAKAYFAKEISDMYARLLETELARSKL

SEQ ID NO: 46788 - protein, 161 aa, Zea Mays
MILSTGTVSCCLLQCAGSGVNCIEWPKSPAYISPVSVDCCLSISFYRIALSALIKIYGCFLFHLASDFDNMRPHLIIVGALKMINIIAPSWRVIPATNMIDKIRKDPQLKKKICFNPYMYRGNLALQIGCKLLSVSLDIKKSLHEVRSSPSVRPPHATLVA

SEQ ID NO: 46789 - protein, 510 aa, Zea Mays
MTPASQAAPPRARRSVVAELEGALLRSADTLPYFMLVAFEASGLPRFALLLALCPLLRLLELAGRGGLALRAAAFVATAGVTRAELEAVSRAVLPKFMADDVDPAAWAAFGSCEGRRVVVTRMPRVMVERFAKEHLGAHAVVGSDLEYSRLRRSTGLLKGACHEAVASRARALFAGDDLPDLAIAGSEMARSFTFCEISPPFTGDHGMNAAPPFRPVIFHDGRLVCRPTPFMSLVILLWLPLGVLVAFVRIAVGLMVPIWSIPYIAPVFGGAVIIHGRAPPPVRPSDAADVGSPPSGVLFVCTHRTLMDPVVLATVLGRRVAAVTYSISRLSEILSPIPTVRLTRDREVDAARMRAELASGDVAVCPEGTTCREPFLLRFSKLFAELSDRIVPVAMNYRVGLFHPTTARGWKAMDPIFFFMNPRPVYEVTFLNQLPAEATCAAGKSPVDVANYVQRILAATLGFECTTLTRKDKYTVLAGNDGVLNAKPAAAGKPAWQSRVKEVLGFLLH

SEQ ID NO: 46790 - protein, 211 aa, Zea Mays
MASPAAVLVSNGGISPHAPPSAAAFLVSTPGAYTTAPGTLLWWTRHLRRLAESATLLARSRPNLLGLPLPRSRALDLDLLSIHSLVNPSVRVAIREMRTRLPMTKDEDLALTALVRGADPISGGGGAGLDVFVHVGTYSPPIFGESGARLAAAGRGRDAAAAKYASWARIRKSLEKMRPPGVTELLLTNDGDHILEGAVTNFFVVCQQGVP

SEQ ID NO: 46791 - protein, 222 aa, Zea Mays
MRSLRHPNIVLLMGAVTQPPNLSIVTEYLSRGSLYRLLHRHAARENLEERRRLSMAFDVAKGMNYLHKRNPPIVHRDLKSPNLLVDKKYTVKVCDFGLSRLKANTFLSSKTAAGTPEWMAPEVLRDEPSNEKSDVYSFGVILWELMTLQQPWSNLNPAQVVAAVGFKGQRLEIPSSVDPKVAAVIESCWVREPWRRPSFASIMESLKLLIKTLPPNQLLEEN

SEQ ID NO: 46792 - protein, 353 aa, Zea Mays
MTGTVIDLDEVMGSNLGLNSSHATNSDCQATFTHLKAGTRRSSQDGSFIMQRSSQEDTQSGLSDPFSDMSLEIEDLIIPWSELVLKEKIGAGSFGTVHRADWNGSDVAVKILMEQDFHPERLKEFLREVAIMRSLRHPNIVLLMGAVTQPPNLSIVTEYLSRGSLYRLLHRHAARENLEERRRLSMAFDVAKGMNYLHKRNPPIVHRDLKSPNLLVDKKYTVKVCDFGLSRLKANTFLSSKTAAGTPEWMAPEVLRDEPSNEKSDVYSFGVILWELMTLQQPWSNLNPAQVVAAVGFKGQRLEIPSSVDPKVAAVIESCWVREPWRRPSFASIMESLKLLIKTLPPNQLLEEN

SEQ ID NO: 46793 - protein, 674 aa, Zea Mays
MMKDAKWPHAVSSAGGRRGPPASSSNAGASYTLLASSPPSSVRNDGCSPHYPPAPASDDDGLSSFDASVAAAKLPFQQLHRNRPQLGVADWLPLQRQSSGSSVGGDDGEVSSTVSFTIANAAEYRYKGDADRAPSSSSKSWAQQAEEAYNLQLALALRLCSEASAAADPNFLDSSIAAADHLQPIASPQSLSHRFWVNGCLSYSDKVSDGFYFIQGMDPFIWTLCNDLHDGGRVPTIESLKAVNPTDSAIEVVIVDKVADYDLRQLISMAIDVSLNRTDSKEIATRLAAVVSTKMGGSVAATEEHELGPRWRDSVGFLKISSGSVVLPIGKLSVGFCCHRALLFKTLADSINLPCRIVKGCKYCKAGAATSCLVRFGHDRECLIDLIGNPGFLSEPDSLLNGLSSISVSSPLRPPKHDSADNSDNFKLFAKKYFLDCQSLNLMFSDPAAGTVIDLDEVMGSNLGLNSSHATNSDCQATFTHLKAGTRRSSQDGSFIMQRSSQEDTQSGLSDPFSDMSLEIEDLIIPWSELVLKEKIGAGSFGTVHRADWNGSDVAVKILMEQDFHPERLKEFLREVAIMRSLRHPNIVLLMGAVTQPPNLSIVTEYLSRGSLYRLLHRHAARENLEERRRLSMAFDVAKGMNYLHKRNPPIVHRDLKSPNLLVDKKSVTLVSPD

SEQ ID NO: 46794 - protein, 252 aa, Zea Mays
MSTLNHRLESAEDRQRQMVSFLAKLLQNPSFVRKLKLHREKKEIDSTRVKRKFLKHVPHGSVESGESSSQHAGENENTGLEGTEATDDIGELIQGFDTQEELDLGSGAELQEMPPASGPLARDPTIGRFKGKNVLCPGLDATSSEGDCLSPLPDNMGLLSGTMLGTAGSMMAADDEQIWGVDASAALQSSCSGTSQQAFGSHASDPYLMDIANRPERFWELDFQALDEADLQLDKCAIDDPALQQQPSMKKL

SEQ ID NO: 46795 - protein, 347 aa, Zea Mays
MAMAEKVKEKMLMLRSSDNQEFEVKESVAMQSMTLKKMVEDGCADKGIPLPNVTSHILVKVIEYCNKHAEPTGPGDAAGTTNRSAEDELNIFDADFVNVEHSTLLDLILAANYLDIKGLLNLARQTITDLINGKMPEEVCKTNIKNDLTIPSTSALATTMPSSERKQMEARFIAYMQETAEERMTGFAVRGEKYRKHGERPPQPPLEIVKYPALLERAWGWDSILPYCPVNSWPLYKTYLQEYYERNSREVLAHQVEANAASGPNLNGADENDLATLFNLCISREVQLLNLLKRRDQKHNVDEISLNEKLTNCARQITFVEYAGFPFPSVALKSTFAPGFERWPSDL

SEQ ID NO: 46796 - protein, 559 aa, Zea Mays
MVMQPMILPMVLTIAESQDKGDFELATLPALVPVFASASGETLLLLVKHADLIINKATQEHLISHVLPMLVRAYDDNDPRLQEEVLRRTVPLSRQLDTKLVNKAVLPRVHGLALKTTVAAVRVNALRCLGDLVPSLDKEGIMGILETVRRCTAVDHTAPTLMCTLGVANAIYKQCGVEFAAEYVIPLIFPLLTAHQLNVQQFAKYMLFVKDITSKIEEKRGVTVTDNGNTEVKSSPSLANGIHSEPMSGQIPVAKSSPAWDEDWGPTKKSGVPSLSVDSSAQTKQPSVDPFDFGTQTKQSTTLPFDLSTQAKQPPSVSHVTAATIPPAQPQPSLQSLAASSGPKISGSCVPVDIEWPPRRSSSSNFNAPLSISKDNGSGRLSSDGVDDIDPFADWPPIPSNVNSISATEHWPSINQNISGFSSGNIVFGGSGNSVGQTKSNQMSWSNTSNLMGTNSTGSYLNQGSAALGFGNPNGGLSTGLSNPSSSSTGLSMMLPKSDSGSLSTSVNNAAHGLLRLAPPPSTSVGRGRGRNQGQSALSRASRPHANSASGQQPILDLL

SEQ ID NO: 46797 - protein, 237 aa, Zea Mays
MVSLRFPTAAIPRLPPSQAPNGVAIAATVAAAAAAAAAVAASLTLTGKSTGRPVPHPAPLWASLSLADAAAPSSVEPRTGATFPTEAAVGRRLLGIGLRKTSVLGLKSIDVYAFGVYADDNDLKQQLKEKYSKFSVSELKGNGELINDALERDIPMTVRLQIVYGRLSIRSVRSAFEKSVGSRLQKFGGQDTKELLQSFVAVFKDEYKLPKGSVIELSRESNHVLKICIAHMLNQIV

SEQ ID NO: 46798 - protein, 1272 aa, Zea Mays
MPSLQLLQLTDRGRGLLASRRRTLAFVSGAVLAGGALAYARSSQSRRRRRRPEASRSGGAGALAANGDGFSQNGAGGGLAAADQRRSGLKSLHFLASILLKKMGPSGTRYLLCLVLTSVLRTAVGHRLARVQGFLFKAAFLRRIPTFTRLIIENLTLCFLQSTLYQTSKYLTGSLSLRFKKILTDIAHADYFENMVYYKISHVDHRISNPEQRIASDIPKFSSELGELVQDDLAAVAEGLIYTWRLCSYASPKYVFWIMAYVLVAGGVIKNFSPAFGKLKSTEQQLEGDYRQLHSRLRTHAESVAFYGGENREASHIMQRFEALVEHLNLVRHENWWFGMIQDFFLKYFGATVAVVLIIEPFFSGNLRPDSSTLGRAEMLSNLRYHTSVIISLFQSLGILSISTRRLNILSGYADRIRELLDVSRELSGVRDRSLDHSSPGNYVSEANHIEFSDVKVVTPAGNVLVDDLTLRVETGSNLLITGPNGSGKSSLFRVLGGLWPLVSGHIVKPGVGSDLNKEIFYVPQRPYTAVGTLREQLIYPLTADQGIEPLTYDGMVDLLKNVDLEYLLERYPLDKEVNWGDELSLGEQQRLGMARLFYHKPKFAILDECTSAVTTDMEERFCKKVRAMGTSCITISHRPALVAFHDIVLSLDGEGGWNVQHRRDDSSFSTEESDFSSSETDRKSDALTVQRAFMSRAKSNASLGSKDHPYCTEVIATSPEVEIEHPARTPRIPHLRCHPRPLPLRVAAMLKILVPRLFDKQGGQLLAVAVLVFSRTWISDRIASLNGTTVKFVLEQDKDAFIRLIGVSILQSGANSFVAPSLRTLTAKLALGWRIRMTNHMLRYYLKRNAFYKVFNMSGKSIDADQRLTLDVDKLTTDLAGLVTGMVKPLVDILWFTWRMKLLSGRRGVAILYAYMLLGLGFLRAISPDFGHLSGQEQELEGTFRFMHSRLRTHAESIAFFGGGSREKAMVEAKFVKLINHSKILLRKQWLYGIVDDFVTKQLPHNVTWGLSLLYALEHKGDRALTSTQDTVVSPNAISAASKETISFHEVDIVTPSQKLLARKLSCDVVQGKSLLLTGPNGSGKSSIFRVLRDLWPTFSGRVTKPSEGMFHVPQRPYTSLGTLRDQIIYPLSREEAKIKVLSLHRSGNNSSASMLLDDHLKTILENVRLVYLLEREGWDSTPNWEDVLSLGEQQRLGMARLFFHHPKFGILDECTNATSVDVEEHLYRLATSMGITVITSSQRPALIPFHALELKLIDGEGNWELCAIQQ

SEQ ID NO: 46799 - protein, 114 aa, Zea Mays
MNYLLEMGLSKKDLCSMIFRFSPLLGYSIELVMKPKLEFLLRTMKKPLKAVVEYPRYFSYSLEGKIKPRFWVLQSRNIDCTLTEMLAKNDELFAEEYLGLGGLLEKPLQSSIGS

SEQ ID NO: 46800 - protein, 235 aa, Zea Mays
MDAAERRLARVAAHLVPSFPVPHATGPPLAPSPAAASSSSSSPAGDSYRRVHGDVPSEPPEWRTATDESGKEFVDIIYEKAVGEGIAKITINRPDRRNAFRPLTVKELMRAFNDARDDSSIGVIILTGKGTKAFCSGGDQALRDSDGYVDFDSFGRLNVLDLQVQIRRLPKPVIAMVAGYAVGGGHVLHMVCDITIAAENAIFGQTGPKVGSFDAGYGSSIMSRLVSYHTINLVR

SEQ ID NO: 46801 - protein, 182 aa, Zea Mays
MDAAERRLARVAAHLVPSFPVPHATGPPLAPSPAAASSSSSSPAGDSYRRVHGDVPSEPPEWRTATDESGKEFVDIIYEKAVGEGIAKITINRPDRRNAFRPLTVKELMRAFNDARDDSSIGVIILTGKGTKAFCSGGDQALRDSDGYVDFDSFGRLNVLDLQVRCVSISDLFILSTFRWFL

SEQ ID NO: 46802 - protein, 219 aa, Zea Mays
MKVHKSLKLWSFYVDLEESLGTLDSTRVVYERILDLRIATPQIILNYAYLLEEHKYFEDAFKVYERGVKIFKYPHVKAIWVTYLTKFVHRYKRSKLERARELFHEAVQQAPPEEKKPLYLQWAKLEEDYGLAKRAMNVYDESVRAVPGSEKMAMYEIYIARAAELFGVPRTRQIYEQAIESGLPDKDVLTMCMKFAELERSLGEIDRFACHLCACIQLC

SEQ ID NO: 46803 - protein, 51 aa, Zea Mays
MLYSCEWTGSNFKSNFSMAIIQIGPLRCWPGGLWACLVRYLTCHTLPNFSA

SEQ ID NO: 46804 - protein, 109 aa, Zea Mays
METYYQESGRAGRDGLPSECILYYRPGDVPRQSSMVFYENCGLQNLYDIVRYCQSKRSCRHGAFFRHFGEVPQDCNGMCDNCASTIEQKDIDVTYHTKIIVSLLHDMQL

SEQ ID NO: 46805 - protein, 856 aa, Zea Mays
MLRLSIAVLTSPLLPTSVPAVRPHPRRLLRLRLRSLAASSSLSPSARSLRLLEWGKVCDAVASFAGTAHGRDATTKQLWEVEDVSYEQSQMLLQETEAAVLLLDNAGGAMDFSGLDTVAIESAIHSVSGGAVIKGLEAMAVTSLMMFVESLQVNIKAAMKLDEGSCSRLTTLTETILDAVINKSLVKSIQDIVDDDGSVKDTASPELRRYREQVQRLENRLYQLMDKLMRNADDEASLSEVCIVNGRCCIRTTMDNSSFFDGLLLSRSDAGSMIEPIVAVPLNDELQESRALVAKAELDVLSKLTDKIRLDLDSIQNLLQETIKLDKIAARAKYSIAYDGTFPDLYLPNFENETVTSATGGSIKQISSAQLPKKAWKLYMPNAYHPLLLQRHQENIHRAKRDVASATAEIRRRRIYGQDIAEEDQLASDLDSMKLRVSQLEKDQPVPVDFMIAEETTVLVITGPNTGGKTISLKTVGLASLMAKIVAKLAAVVTVVVSCRLLVADGATLGLYILASEPVKIPWFNAVYADIGDEQSLTQSLSTFSGHLKQIGAIRAESTSESLVLLDEVGAGTNPLEGAALGMSLLESFAEAGSFLTLATTHHGELKTLKYSNNSFENACMEFDEENLKPTFKILWGIPGRSNAINITERLGLPLDIVESSRRLLGTAGAEINALIMDMERLKQEYQQHLQEAQYLLMQSKELHNNLELAQKSIVDHTSAQRKRKARVISEYAVMARSIIRKKFQQFQESAIAERVKEEENAVNDAKSDRVKDPMPANTSAIGNIQNIDTSLGMTANDDEDEVPEVGDSVYVPKLKNEATVVKIDSSKNEVQVQAGMMKLKLKLKDVKVQKRKVSR

SEQ ID NO: 46806 - protein, 646 aa, Zea Mays
MEGVHSLLARPNSAPFAFSPLPLRRSHRPPPPGPSTCRAASRWADRLFADFHLLPAAADPPAAASSSSSSPFVPIFPEAADRALPLPVDFYKILGAEPHFLGDGIRRAFESRIAKPPQYGYSTEALVGRRQMLQIAHDTLTNQSSRTEYDRALSEDRDAALTMDVAWDKVPGVLCVLQEAGEAQLVLATGEHLLQDRPPKRFKQDVVLAMALAYVDISRDAMAASPPDVICCCEVLERALKLLQEDGASNLAPELLAQIDETLEEITPRCVLELLALPTDEKHKNKRQEGLQGAKNILWSVGRGGIATVGGGFSREAFMNEAFLQMTSAEQMDFFSKTPNSIPPEWFEIYSVALAHIAQAIASKRPQFIMMADELFEQLQKFNIGSQYPYENEMDLALERALCSLLVGDICNCRMWLGIDNESSSYRDPKNIEFVVNNSSMNEENDLLPGLCKLLETWLVSEVFPRSRDTRGTQFRLGDYYDDPKVLSYLERMEGGGASHLAAAAAIAKLGAQATAALGTVKSSALQAFSKVFPLTEQLDMSGKDIPSDDLDKSLEKLAQGSVAGDAIHDSRNDALKIISAGASMGLWRLLTPLMVQRQMKSHWKSLGWTRSWLKTLFAGGKASSPRLWGQNTLSRHCKRSSAATC

SEQ ID NO: 46807 - protein, 517 aa, Zea Mays
MTVDELKLQARASGGHGAKDQFPVGMRVLAVDDDPTCLKILENLLLRCQYHGMPRSSRSPLSLSSPGNDNDDSGKKLQVVSAEGDNGGVNRNKRISRKGRDDNGDDGDDSDDNSNENGDSSSQKKPRVVWSVELHRKFVAAVNQLGIDKAVPKKILDLMNVENITRENVASHLQKYRLYLKRLSADASRQANLTAAFGGRNPAYVNMGLDAFRQYNAYGRYRPVPTTNHSQPNNLLARMNSPAFGMHGLLPSQPLQIGHNQNNLSTSLGNVGGMNNGNLIRGAHMPLQDTSKCFPTGPSGNSFANISNSTQLVTTNNLPLQSLEPSNQQHLGRLHSSADPFNSFVGEPPQFADLGRCNTTWPTAVSSSNVQEIGQKDRIVNRPKLEPLSSFTEASSQIPLLGSEMQSHQVASLASNGLPMPFTQEAVPFAYGSSTNSREMLNNNLALSNSGVNSTLPNLRIDGSVVPGQTLGGSNSGGCVVPPLQDGRIDHQAVSSHLNYNNELMGTGPRRRWRLLH

SEQ ID NO: 46808 - protein, 392 aa, Zea Mays
MPRPEPALGFPARASKPPPQRRRKRQPPTRRRRPAGAAPVGPRGAADPDPAHSSALLPLPSGGSGFASRGTVAPDEEEGRDGASSAESEEVAKATNHSFSHSVRECQKQRRLKSERSALARPTALHELNSAGGVELLVLSPRCLIGNPGGMSKSSTTSSRSRSGTGTGTFPSPGTPNYNRHCAGSMQYSKGWSSERVPLGTGSNRRYGGSGVVLPFNNGRKLPSKWEDAEKWILSPVSCDGMGRMSAPAPHHRRPKSKSGPLGHPAGIPGAYAAVSPLVPCFDGVLAEANFAVHSPFSAGVLIPEHGRIGDFSSGRGRCGDDGSSRSYSAEKEPYILRSASIHAWTETLMEASAFANISEETVQGAKGRRQRSLLGKIYRKQKQRLPFESWR

SEQ ID NO: 46809 - protein, 145 aa, Zea Mays
MSLEKFWSATSKGHQKRDKILTQKRFMRFRQARVVNIKVTDADKDQLLTVALDAGADDVLEPNFDDDDSEEEAERFYKIVTTSENYPVLLSKLQEEGLKFETDNGYELVPLNPIEVDDEAVELNKELVSNLLELDDVDAVYTDQK

SEQ ID NO: 46810 - protein, 228 aa, Zea Mays
MKRNSKIGKEIVAAIKKGGPNPSSNTTLSAILEKARELDVPREILERNIKRASEKGQDTYTEKVYEVYGFGGVGMVVEVLTDKITRSVADIRNVVKDCGAKLADPGSVTFRFRQARVVNIKVTDADKDQLLTVALDAGADDVLEPNFDDDDSEEEAERFYKIVTTSENYPVLLSKLQEEGLKFETDNGYELVPLNPIEVDDEAVELNKELVSNLLELDDVDAVYTDQK

SEQ ID NO: 46811 - protein, 1155 aa, Zea Mays
MDLLIAQITTDLRSSDALRQSLALLQALQQCAAGRDVSALARTAATEILSAPSSAVCKRLALDLLRALPLPPDLLDPLLLSSLRSDLSFPDPDVASSSIASFPSLPSHLLPSLLSSAHAEIANALSSPAESLRLGAVTSLSSFLPRDDLVLMCSTNPSLMAHATTWWARLAELALDSADAVSAGAFEALARLFQELEGRRMSRLAGDKLVDGEGVLAVRAQWAADAIDFIWSRRNMLIARSVVMPAESFRLTVHPLVHAAKMVASGVVNTLQRIAKPGDTTIADSVESSAEKLVGVSDIVSHLLPFLSSLDPPLVFEVGINMLALADVPGGKPEWASAAIIAILTLWDRQEFSSMRETIVRAVVTNLHLLDLGMQVSLFKRLLQMVRNLRAESDRMHALACICRTALCVDLFAKESVRRGQKPVPGTDVISLFEDVRLKEDLNSVTSKNLFREELVASLVESCFQLSLPLPELKNSGTESRVIGALAYGTGYGALNWTEPALDVVEVCRPCVLWDCDGRTYAVDCYLKLFGRLCHIYDTRGGVKTIKAGASQDQILNEMRLRNLQLQLIRDLREVHTPRISSRLIWAISEHFDLEGLDPLLADDPEDPLNIIISNMHKILFNIDSSATTSNRIQDVQAVLICAQRLGARNTRAGQLLTKELEEFRASTSADSVTKHQSRYVLQVIKYVTNHPNNRWVAVGDATGDYPFSHHKLTVQFSEASAAQDRKLEVLVHKAIQELWRPHPSQLTLLQTKGISALHKELPKACTLTGSSDPCYIEAYHLADPTDGRITLHLKILNLTELELNRVDIRVGLSGALYYMDGFSRTVRHLGNLVSQDPVQSSVTVGVSHFERCSLWVQVLYYPFYGSGGSADYEGNYAEEEDSQMMRQKRSLRPELGEPVVLRCQPYKFPLAELLLPLECSPVEYFRLWPSLPAMVECTGTYTYEGSGFKATAAQQYDSSPFLGGLKSISSKPFHQVCSHFIRTVAGFQLCYAAKTWFGGFVGMMIFGASEVSRNVDLGDETTTMICKFVMRASNESITREIESDLQGWLDDITDGAVEYMPEDEVKSAAAERLKISMERISLLKAAKPKVPPAKTEQEEEEERKQSEELDGFGNPKGPSTLSKLTAEEAEHRALQAAVLQEWHQLCKEKAMKAQ

SEQ ID NO: 46812 - protein, 536 aa, Zea Mays
MTLASTDKVVLGCIAFSIFWVLAVFPSVPFMPVGRTAGSLLGAMLMVLFRVMTPEEAYKAIDLPILGLLFGTMVVSIFLERADMFKYLGSALAWRSRGSKDLLFRVCLVSAVASALFTNDTCCVVLTEFILKLARQNNLPPQPFLLALASSSNIGSSATPIGNPQNLVIAVQSGITFGQFLVGVFPAMIVGVAANTCILLCYFWMSRASSVNGGGADADCVGELIRRSDSLSRADTTLGMSMRSRSYNSEGGDIQVAIRSMRASSMSQEMVEVSTVCDRRDDGGAGPRKVTRTTSHQRSVIIEDAPEADAADDDDDGHKGKDGDSVTNKEKRWKVLVWKTAVYLTTLGMLAALLMGLNMSWSAITAALVLLALDFTDAQACLEKVSYSLLIFFCGMFITVDGFNRTGIPNALWELVEPHSRIDSAKGTALLAVVILVLSNVASNVPTVLLLGTRVAASAGTISPESEKKAWLILAWVSTVAGNLTLLGSAANLIVCEQARRAQFFGYNLTFWSHLRFGLPSTIIITAIGLLIVASY

SEQ ID NO: 46813 - protein, 603 aa, Zea Mays
MCMSRTSNKYPCLEEITSIDQRGRHQKQSRPLRGSSQEQQARPPHADRTTERAALTDPSPPPPPRSTMTLASTDKVVLGCIAFSIFWVLAVFPSVPFMPVGRTAGSLLGAMLMVLFRVMTPEEAYKAIDLPILGLLFGTMVVSIFLERADMFKYLGSALAWRSRGSKDLLFRVCLVSAVASALFTNDTCCVVLTEFILKLARQNNLPPQPFLLALASSSNIGSSATPIGNPQNLVIAVQSGITFGQFLVGVFPAMIVGVAANTCILLCYFWMSRASSVNGGGADADCVGELIRRSDSLSRADTTLGMSMRSRSYNSEGGDIQVAIRSMRASSMSQEMVEVSTVCDRRDDGGAGPRKVTRTTSHQRSVIIEDAPEADAADDDDDGHKGKDGDSVTNKEKRWKVLVWKTAVYLTTLGMLAALLMGLNMSWSAITAALVLLALDFTDAQACLEKVSYSLLIFFCGMFITVDGFNRTGIPNALWELVEPHSRIDSAKGTALLAVVILVLSNVASNVPTVLLLGTRVAASAGTISPESEKKAWLILAWVSTVAGNLTLLGSAANLIVCEQARRAQFFGYNLTFWSHLRFGLPSTIIITAIGLLIVASY

SEQ ID NO: 46814 - protein, 341 aa, Zea Mays
MWDSVQAMLLLSCFLDNWRMASQQSLLGNWSMVNCMSSNPTSRVSLVSCRNAFTMVANLSLYGIALLIFTILQSVNVMFQYRWIAYVSISIGSCFVVIFLVGTKEPGSIRHCVDKSLSRISWTYWFKKVLYYQVALVYTLTRLVTNVSQAFLAFYVINDLEMSQSSKALVPAIIYICSLIVSVILQETRWSSWRLKLYFSAGAVLWILSGLGIVFLPSRMHNLMYAISIIIGAANALMTVTSISMEGVLVGEDLNGCAFVYGSLSFVDKVSCGVVLYILESYQGSTEIRSNLGTAFGYSITRLGLGLVPAVCSLLSSIVAYTMDLPDPDTRRRPLVEPLLV

SEQ ID NO: 46815 - protein, 264 aa, Zea Mays
MELFPAHPDLQLQISPPPPATKPMELGFWKRALVDTTTSPATATAVAAATTATTATSHAFASSAPTSAVGYHHAAVGAHHHQVPVPVPAGSHSHSHLGLPLLHHTHPILPAAESGGVLRRPDLGSTRPIRGIPVYSTSQQPLPFLQSHPHYCCDAIAGAGHPRSPKAALRLAGAPAKRGARAPRMRWTTSLHARFVHAVELLGGHERATPKSVLELMDVKDLTLAHVKSHLQLIAASDEPRSLLLASFTISCLYDNDYDYEHVL

SEQ ID NO: 46816 - protein, 78 aa, Zea Mays
MNRYGKSPFDYELDESSGESLHSVIKNVQIKWPEEAGSTYPDSLRQFITWMLQPHPAVRPHIDDIIIHVDKLVMKYSN

SEQ ID NO: 46817 - protein, 240 aa, Zea Mays
MHACFHGGGGGNSRITKSVGFIVKSMKALSLLKVKTAGDGHPHAPRRRRRRHRRRSPEADELQDKDVAAASSSASSSAKIAPAQPHEAADGDLRRDRLPQDEELRRQGGAKHGHCDKCCSPLEDDDEEAAAGTADAAGDGEWAAEPEPGVLMTLWPRGDGSNYLRRIRFSEEYFGDAWAAQTWWADNCDRIVELYSVVVQPEHPSQDGDDDDDDDDPAAPVTPCQSEDDEHQRQAASGLV

SEQ ID NO: 46818 - protein, 228 aa, Zea Mays
MPTRAPPPSLLFLRTRSSLSTSPPPPHLLPPPAPRTQPPKPIPSSVPGKKDKKIKKKKLQETQGEKSVPMENDSVVKNFDIWAVDGKGDSKAKKRSTISVIPAVEVEPAGCSFNPPFEAHQDSLAQAVADEKRKEYMKELGPTPVPLIVPGEAIAEEDKFFLDAGEGDEDEDAAENGDQDADTSIGQRKNTTKRVTRVEMNRRARRKERLRAEAKAKKMENILKEIDR

SEQ ID NO: 46819 - protein, 749 aa, Zea Mays
MLAFEQQVLADLVEDPNGGLVVLSSGLPLASLAATLLLHLHQTPGNAAGGGCLLVLSATDTLKARIRRRLQDKLQVHDVPPDLAAQQRATLYASGAALFLSPRALAADLLTSRLLPSRVQALLLLSAHRSTDTSSDAFICRLLRQRNLLPVYAFSDCPHAMVAGFSKAERTMKSLYVRRLHLWPRFHVLAAADLERAPPDVVDVRVPMTPPMRGIQAAVLATMDACLKELRRTNKVDVEDLTVDKGLFKSFDEIVRRQLDPIWHTLGKKTKQLVADLRTLRKLLDYLVRYDAVTYLKYLDTLRVSEGVRSVWILADSSHRIFELAKRRVYQAVRTDGVNVSIDNKGTPTKKRKVAHNSTKKGKVTGSCSWPLHLQELLQEIAEQRMKSSAGNVHDEDKNDESGIVLVSCKDERTCLQLQECILKGPCQVMREEWEKYLIGKAELHGLNKDKRKSEQPKGVGVLDGEVQMGSSESVCPVSISKLETNALLAAASELRNISNEADVKSSSNSSCSKAGGAKGKPKKTTSKRQGSNRKNKSKEGNDNSQGTGLDSEGQSGKADVQAEIVASKMSAYDASMSASTSNVKFNHSSAFGNLANAKPLPPVQFHALDSDHQVLDVWKPSVIIVYHPDITFVREIEVYKAENSSRKLKVYFLFYEDSTEVQKYESSIRRENEAFESLIRQKSLMMIPVDQDGRCIGPTVANEPEPPLCQNSITRKAGGKKAPEKEMQVIVDMREFMSSLPNVLHQKG

SEQ ID NO: 46820 - protein, 661 aa, Zea Mays
MYYIKKVETMARYYKIPVLLIEFSQDKSFSFQSANEIGDDVSPTNIISKLSLLVLHFPRLRIIWSRSLHATAEIFMSLKTNQDEPDEKKATRVGVPSEDGIVEDDVRSENYNTSAIEFLRRLPGVTDSNYRAIMDGCNSLAELALLPVESKHAENEQQIMGWAGSNPAQELPLSPTFFFVVVGQVVRLFESTLQNDYLNHTSCGAFHAQMESWERILYWMAVLWERGFSHENPQVRCLVMQSFLDIAWERYKDCTQIIPRGFVLGPLIRGLNDVVHHKDFVMNRQLVNLKSSAVCEQVIKVATSLINATEIPLNPLLHFIATIPREFSDYIGPLRVVVQKWFVQKEECSPGDTLLSKLIDFSATFVSQKRNEGSNVFDDEDVDAWEAEARWARTLLVTSEEEHLKRIFRFLEAYGYKLSEQCPSGDFIPIKNFIIVLSFIEELEEKKIPRGQSKVSIKREVQIGLVLEFICWLLRSCMLATPHHINLEGLRTPRCISLTCILAPARRIGTSMSERCIFSFSTLASPAADGNNSRRGGRHRGDSIVTRSSAAANTLPLLRNDDFDLREGLTDVRNVLRQRQKSGCSSRDMMVTVDNLKRLCIDHYFQEEIERAMGACCMGLIHSDDLFDATLAFRLLREAGHGVSAGHRSNTLIIKHKSIHA

SEQ ID NO: 46821 - protein, 894 aa, Zea Mays
MYYIKKVETMARYYKIPVLLIEFSQDKSFSFQSANEIGDDVSPTNIISKLSLLVLHFPRLRIIWSRSLHATAEIFMSLKTNQDEPDEKKATRVGVPSEDGIVEDDVRSENYNTSAIEFLRRLPGVTDSNYRAIMDGCNSLAELALLPVESKHAENEQQIMGWAGSNPAQELPLSPTFFFVVVGQVVRLFESTLQNDYLNHTSCGAFHAQMESWERILYWMAVLWERGFSHENPQVRCLVMQSFLDIAWERYKDCTQIIPRGFVLGPLIRGLNDVVHHKDFVMNRQLVNLKSSAVCEQVIKVATSLINATEIPLNPLLHFIATIPREFSDYIGPLRVVVQKWFVQKEECSPGDTLLSKLIDFSATFVSQKRNEGSNVFDDEDVDAWEAEARWARTLLVTSEEEHLKRIFRFLEAYGYKLSEQCPSGDFIPIKNFIIVLSFIEELEEKKIPRGQSKVSIKREVQIGLVLEFICWLLRSCMLATPHHINLEGLRTPRCISLTCILAPARRIGTSMSERCIFSFSTLASPAADGNNSRRGGRHRGDSIVTRSSAAANTLPLLRNDDFDLREGLTDVRNVLRQRQKSGCSSRDMMVTVDNLKRLCIDHYFQEEIERAMGACCMGLIHSDDLFDATLAFRLLREAGHGVSADDVLRRFTDDDDSGGEFRLDLSKDIRGLLSLHDMSHLDMGGEELLCKARVFSRHHLASAVRYLEPSLGEYVRQSLDHPYHLSLTQYKARHHLAYLQSLPVRDTALERLVAAEFQLNRSLHQKEMQAIKRWWMELGLVQEIPVVRDQVLKWYMWSMTALQGRSFSRHRVQITKIIALVYVVDDIFDLVATLDELSLFAEAVKMWNSTAAESLPSYMRSCYKALYTVTNEIADTAEKEHGLNHVNHLRKAV

SEQ ID NO: 46822 - protein, 256 aa, Zea Mays
MRAWEMHPLCCLAGEWPASGGGLAPGDRSPPAEDAGAAPAVAGVLYKWTNIGKGWRPRWFAIRGGVLAYSKIRRRVAAEPRPEAAGGVRLIGVARGAAGAAERPIGFVPLKISSFSESKSDDKRFYIITPTKTLQLRTGCANDRATWIEALVTARSEYSFNGDLSGDQNDASFSTEKLRNRLNAEGVGEAVIKDCEQIIHSEFSQYQTQMKQRCEEYLSFIGTLPQDVEVVNSVDSTVPEKPRLELFKHDCSSSGK

SEQ ID NO: 46823 - protein, 111 aa, Zea Mays
MSAISDQKKRTLEALQQQYTAAKAKKLQDEQVKSQKKSNFNTPKPKCDAPRGSKGPEITPRRTYAQPSHKGVAFSSSNCQQKPSTSSERWRCWENYKGCQKVETGKRDPFG

SEQ ID NO: 46824 - protein, 332 aa, Zea Mays
MNPVYWLPKGSMSAISDQKKRTLEALQQQYTAAKAKKLQDEQVKSQKKSNFNTPKPKCDAPRGSKGPEITPRRTYAQPSHKGVAFSSSNCQQKPSTSSGEEINPVYAELSCAFHDTLSKGVVSDLDGTEVVHNVIYDIIQKGGDAGKITKGAKKLKLEKGILLDNYVQRGSRLVDSQARSLLIHSKRSKRHMSLKQHKKCGSFDLDGTFHKYDLYKPMHEMWKDYIRELMDLSPKKKFTENLLSADLHGALLIVAECKAASYKGVNGIMIRDTAETFGIISEDNRFRVVPKAGSVFVLQADRWKFTLIGDKLSPREKLKEDQRQQRAQSLIR

SEQ ID NO: 46825 - protein, 330 aa, Zea Mays
MNPVYWLPKGSMSAISDQKKRTLEALQQQYTAAKAKKLQDEQVKSQKKSNFNTPKPKCDAPRGSKGPEITPRRTYAQPSHKGVAFSSSNCQQKPSTSSGEEINPVYAELSCAFHDTLSKGVVSDLDGTEVVHNVIYDIIQKGGDAGKITKGAKKLKLEKGILLDNYVQRGSRLVDSQARSLLIHSKRSKRHMSLKQHKKCGSFDLDGTFHKYDLYKPMHEMWKDYIRELMDLSPKKKFTENLLSADLHGALLIECKAASYKGVNGIMIRDTAETFGIISEDNRFRVVPKAGSVFVLQADRWKFTLIGDKLSPREKLKEDQRQQRAQSLIR

SEQ ID NO: 46826 - protein, 334 aa, Zea Mays
MQHGSGDYASSAPSGHYYQHQYAAPGSNPYPIATDATAPGAVSGGYAPAPSYSLGGGYPDQPPSAPVYSQAPSAPAYAYSAGGGSEPYGARGTAPARSGSALFDDYGRSISAPSDDYGRSISAPSGWEEQQPWGSGGGGGGSGSYGVIAKALPKAETREDASGGAQKFRVKLLPEGAGNSTDVLCQIGLDGIRMLDPSTSRTLRIYPLDSLTRWEVLDATIFAFWAKTSVDIEPKRIRLKSSSYTSNTMLDTVTAATVQFKEIGADARSRGAIETGKPLVQSNEKKKGFDWMFTKPVDEVKDHWVPDEVAKKCHSCAVDFSPFNRRPGKDCSDG

SEQ ID NO: 46827 - protein, 509 aa, Zea Mays
MGGFEDDEPPSKRARASSVESASLPDCFLFSKSANPLGSTMARPLPSQGKEAMVGSKGVIKKEEFVRIISKTLYSLGYEKSGAVLEEESGITLHNPMVNLFREQVIDGNWDNAVVTLNKIGLQDVNIMKSAAFLILEQKFFELLRNDNVMGAMKTLRREITPLGVNRKRVHELSTCMISCSPQQLFLGFSKLGIDSSSSRFKLLEELQKVLPPTVMVPERRLENLVEQALTVQRDACYFHNSVDGLSLYIDHHCGKDQLPSRTLQVLHAHHDEVWFVQFSNNGKYLASASNDKSAIIWEVNEDGELLLRHTLSGHQKSVMMVAWSSDDCQLLTCGQEEAIRRWDVKSGKCLHVYEHPGIGLRSCAWFRDGKQILSGLADQTFCIWDLDGKEVDCWKGQRSATTSDFAVAKDGNLIISLSRDNAILLFDRETKHERIIEEGSTITSFSLSEDGDFLLVNLVSEEIHLWNIRNDPVRVNRYNGHKHSRFVIRSCFGGSEQAFIASGSEDSQ

SEQ ID NO: 46828 - protein, 157 aa, Zea Mays
MYPEIDESDFRKGAQWFAVTRRHALMILADSLYYKKFKLYCKPAEGRNCIADEHYLPTLFNMVDPGGISNWSVTHVDWSEGKWHPRSYSADDVTYDLLKNITTTDENFHVTSDDKKLVMQKPCLWNGSKRPCYLFARKFNPEALDNLLKLFTSYTSV

SEQ ID NO: 46829 - protein, 353 aa, Zea Mays
MTVMMPQRHRATAKKPMWIIVLLSMVCIMLIGAYVFPPRRFSKCYLSASSVFIRDILSMPMPMSKNPKIALMFLTPGSLPFEKLWETFLQGHEGRYSIYVHASREKPVHTSSLFAGRDIHSDAIVWGLISMVDAEKRLLANALEDVDNQVFVLLSDSCVPLHSFDYVYNYLMGTNVSFIDCFKDPGPHGSGRYPIEMYPEIDESDFRKGAQWFAVTRRHALMILADSLYYKKFKLYCKPAEGRNCIADEHYLPTLFNMVDPGGISNWSVTHVDWSEGKWHPRSYSADDVTYDLLKNITTTDENFHVTSDDKKLVMQKPCLWNGSKRPCYLFARKFNPEALDNLLKLFTSYTSV

SEQ ID NO: 46830 - protein, 269 aa, Zea Mays
MVAATIAGMFLVCFESLCTCFGTKRKDESEDHVLAEHSNSLSSYQMRSVSDRISASSLRAPASPSRFSLSSPPSRNEPLNISLEHVVKLTHNFAPTLMIGEGYFGKVYRATLRDGRVVAIKRAKKENFVSLRTEFSNEVALLKSIEHKNLVRLLGYIDKPNERILITEYVPNGNLREHLDGQHGLVLGFNQRLEIAIDVAHGLTYLHLYAEKPIIHRDVKSSNILLTEGFMAKVADFGFARTGPTEPGQSQIETDVRGTAGNPFRTSSY

SEQ ID NO: 46831 - protein, 183 aa, Zea Mays
MVAATIAGMFLVCFESLCTCFGTKRKDESEDHVLAEHSNSLSSYQMRSVSDRISASSLRAPASPSRFSLSSPPSRNEPLNISLEHVVKLTHNFAPTLMIGEGYFGKVYRATLRDGRVVAIKRAKKENFVSLRTEFSNEVALLKSIEHKNLVRLLGYIDKPNERILITEYVPNGNLREHLDGKV

SEQ ID NO: 46832 - protein, 513 aa, Zea Mays
MEPSRGGVGGGGRRWGEAEGDAAEEGRRGEDGGEVSLREWLDRPGRAVEAAECVHVFRQVAEAVAVAHAQGVAVGSARPSCFVVSPPFARVAFIESASGSDASGSCSGSDASEDADGDPDPDPDPDASPPLRRRDSAVPGEERAGRSFPLKSVLAMELSWYTSPEDADDSAATFASDVYRLGVLLFELFYTFETMEDKMRAMANLRHRVLPPQLLFKWPKEASFCQLLMHPVPETRPKMSYMKSHIASSDFEGIVQVWDVTRSQVFVGMREHERRVWSVDFSIVDPTKLVSGSDDGSVKLWDMNQAILFLHLLYVRLLTNDNMVIELAGSIGTIRTRANVCSVQFQPDTARSIAIGSADHKIYCYDLRNIRAPYCTLVGHTKTVSYVKYLDASTILSASTDNSLKLWDLSMNPGRIIDSPVQTFTGHTNTKNFVGLSISDGYIATGSETNEVFVYHKEFPMPVLAYKFSVTDPISGQEIDDQSQFISCVCWRGQSSTLLSANSSGNIKILEMD

SEQ ID NO: 46833 - protein, 555 aa, Zea Mays
MAQGSILLPVANAPCARNQTEDESEFLNQSRNSLEEHEAALRLREEIEEQELLLDFLQQLQKRKQDIADSLQGTIAFLSSDINEVPHQQSTIGHCENFLSDGDKEVCSGTVEEQSDCGSRKRFRPELQGVDMEENNRSVEECSRTVPSSELIQESVLSKSSRLMKNFKKLETAYFLTRSKLMKQVGSQISSCDRVVKNTTGSAVGTEGSSLDDFSLERQYGTRQRGWVNSFLEGLCKYLSFSVNKKIKVFEYNMIVNEHRDIHYPVVEMSNRSKLSCICWNSYMKSHIASSDFEGIVQVWDVTRSQVFVGMREHERRVWSVDFSIVDPTKLVSGSDDGSVKLWDMNQAILFLHLLYVRLLTNDNMVIELAGSIGTIRTRANVCSVQFQPDTARSIAIGSADHKIYCYDLRNIRAPYCTLVGHTKTVSYVKYLDASTILSASTDNSLKLWDLSMNPGRIIDSPVQTFTGHTNTKNFVGLSISDGYIATGSETNEVFVYHKEFPMPVLAYKFSVTDPISGQEIDDQSQFISCVCWRGQSSTLLSANSSGNIKILEMD

SEQ ID NO: 46834 - protein, 120 aa, Zea Mays
MFCATYCCSGRIGPACSYSRVQPDKRWLQQRGVCRFRGDSSTQIWNRTDTEDRTDTEGIIRRKLLIQTLLHECIRLSTAFGLELVRLPPNSKSCIWSHESTVCTVYFLHSGLLDYSYSKV

SEQ ID NO: 46835 - protein, 78 aa, Zea Mays
MAMATSASYPPPPPFYRLYKNFEQDPSSAPEPPPPIDEPFKALGVDYTGDVVIPSLESHNVRQLYPKGPNIGVLILEK

SEQ ID NO: 46836 - protein, 698 aa, Zea Mays
MEEGTTEPGSFSRSSSFVGFEEWVALVRKRNGKASSCGRLGLRSTASSEVLELADPDSNVINPDPCDQVPEGILWERLGRVSMMDIESSDFSWTSLTSLHHTKHTATSTDPSEDDISRSFEVTVNSGGIVFIALFKAIENVDLPSKETAAVIKIAPSRMATQSERFGYELAKWLGVRTPQGRVIHSSSDEWQQVKDAVENARNASIASGDELEEMICAEVLEALELSRCLFLMNYVHGSALLENVMPFESRQAAEKTAEALGRVLILDLVLRNEDRLRCRPLGWRGNYANLLVANREAYANLDSLDDVYDSAIIRYKPEIIRSPQKQKQRRAVSISGSIGSDVSDLTLEDSYASSGHVFSSFNIVAIDSGVPRRPPASKRAKDQESYPKLVELTLNNFDYSSKLLFEVSFGKLGTPGHEEFDVPSDYSYNSPLSESDMVATVHSFRGGFRSALRDLQRFHIFLITLYQKLDGLLKIFFNLMYKCSNEYAREDAGTSDSPLCSVEPQGDSNDTDVPRHLRKPSRTLSRESLDQSSPCRDSFITRHFKGNGDSSRGLRLTMKLRDFNKYAKVRLEHILERISLISDAASTERPSQITDYLYIGGALAARSTHTLKHLGITHILCLCANEIGQSESQKPDLFEYRNFSINDDDNADIGDLFQDGSDFISYVDHLRGKVLVHCFEGKSRSATVVLAYLMLRK

SEQ ID NO: 46837 - protein, 246 aa, Zea Mays
MDLASLLLSQLLLLPVVTVVSGETAAHPGYAHAEEACSGMLEAEAEKATVLVPAPERREEFDGGRIVDISHYYREDMPEWESSEGSGEFLQLARSMRNGSDIANFSELRLTAHSGTHVDAPGHVFEHYYDTGFDVDTLDLAVLNGPALLVDVPRDKNITADVMASLNIPKGVRRVLFRTLNTDRKLMWKKEFDTSYVGFMKDGAQWLVDNTDIKLVGVDYLSVGAFDECIPAHLVFLEKREHVDLA

SEQ ID NO: 46838 - protein, 98 aa, Zea Mays
MVEEEITEGLKNLTVTGDAAASGGEGQRRGGGISSNRIQVSNTKKPLFFYVNLAKRYMQQHGDVELSALGMAIATVVTVAEILKNNGFAVEKRHLLLT

SEQ ID NO: 46839 - protein, 162 aa, Zea Mays
MRNCDILAGVQAVRQDNKQRFSLLEEDGELLIRANQGHTVTTVTSESLLKPILSPDEVSVCVHGTYRKNLDSILQFGLKRMARLHIHFSSGLPSDGEVTSGVRQNVNILIHLDVSKALKGGMKLYISDNKVILTEGFDGVVPVKYFERVETWPGRAPIPFQR

SEQ ID NO: 46840 - protein, 620 aa, Zea Mays
MGQSKAEFLEQFGGDYGYPDAPRGIDDLRAAEFKRLEGMVYLDHAGATLYSEAQMTDVARDLMSNVYGNPHSQNDPSMATSDIVTSARHQVLKYFNASPKDYKCIFTSGATAALKLVGECFPWSRDSCYMYTMENHNSVLGIREYALSKGATASAVDVQEVIDPSKSHESDSMFKVSKHLNQRRGDDVLLHKYQNGSLAPISGNSLNLFAFPSECNFSGHKFNLSLVKFIKEGKFMDLPSQQQGQWMVLIDAAKGCTTEPPNLTLYSADFVVCSFYKIFGYPTGLGALIVKNGTVAASIADIDFVQKRKSIEQALEDGTISFLSISSLRHGFKIINMLTISAIARHTASLATYVRNKMLELKHSNGKNVCMIYGQTSKVNHLKMGPTITFNLKREDDTWFGYREVEKLASLSRIHLRTGCFCNPGACAKYVGLSHSDLVSNFEAGHVCWDGNDVINGKPTGAVRISFGYMSTYEDAEEFLKFLRSSFVSKPVGLNNEYMVNMDTLNLVDDWSQQALSVIRLKSITIYPVKSCQGFSVQSWPLTTGGLKYDREWLLQGLGGEILTQKKEICMSFQLRREKQEVWQGQTDYKRNTTKPTRPQLRRGSSTTTNKKNTLKKNSN

SEQ ID NO: 46841 - protein, 126 aa, Zea Mays
MLQVVRAILKNPNDNTQVSLIYANVSPDDILLKRELDRLASSYPNFKVFYTVDKPSTDWRGGVGFVSKDMVLKGLPGPAEDSLILVCGPPGMMNHISGDKAKDRSQGELSGVLKDLGYTAEMVYKF

SEQ ID NO: 46842 - protein, 392 aa, Zea Mays
MDSNDLERERGITILSKNTSITYKGTKINIIDTPGHSDFGGEVERVLNMVEGVLLVVDSVEGPMPQTRFVLKKALEFGHAVVVVVNKIDRPTARPEFVVNSTFELFIELNATDEQCDFQTVYASGIKGKASLSPDNLADDLGPLFEAILRCIPEPRVEKDGALQMLVSNTEYDEHKGRIAIGRLHAGELQRGMEVKVCTPDDACRVGKVSELFVYQNFSRAPVESVSAGDICAVCGIDDIMIGETIADKVTGTPLPTIKVEEPTVRMSFSINTSPFVGREGKYVTSRNLRDRLYRELERNLAMKVEDGETADTFLVSGRGTLHLTILIENMRREGYEFMIGPPKVINKTVDGKLLEPYEIAAVEVPEESMGSVVELLGKRRGQMVDMEANGK

SEQ ID NO: 46843 - protein, 672 aa, Zea Mays
MRRVAPAMTAASSAAGGEETAVVEKTLLNGDVYRGGSPHGKGRYVWADGCMYEGNWRRGKASGKGRFSWPSGATFEGQFRRGRIDGQGVFVGPDGATYRGAWVADRRHGLGNKTYANGDCYEGQWRRNLQDGHGRYVWANGNQYIGEWRAGVLSGRGALICANGSRYDGVWENGVPKGSGVFTWPTGGSWPGSSVDLPAMSATFFAPPGAVAVSRRSSVEGVGDKATPRICIWESEGEAGDITCDIVDALEASMPMLFKEAAAIAGGATYMRSASGVPRWASAVATTPQSKRPGRTISKRHKNYELMLQLQLGIMHSVGKSSAVPMRELEQGDFDPRENALSWTEFPPEGSKATLPHSTGYFCWKDYCPMVFRHLRKLFAVDTGDYMLSICGNDPLRELSSPGKSGSFFYLTQDDQFMIKTVKKSEVKLLLKMLNSYCKHVDRYKNSLITRFYGVHCVKRHNGQKIHRRFDLKGSSYGRTADKFEDEIDETTTLKDLDLNFVFRLQKSWYTDLHEQLRRDCDFLESEGIMDYSFLIGIHFCDDISASKMGSSTFTASPSGGTTELCFSDDAFDMVPDCSRKSLIRLGAHMPGRAEQASRRSGFVFPNQTGEVHDVILFFGIIDILQDYSVKKRLEHSYKSLQTDPNSISAVEPKLYSRRFQEFIGRIFVEDG

SEQ ID NO: 46844 - protein, 148 aa, Zea Mays
MTTTRDRGAGGGSASRVGDGDVDLGEGWDWGAIPRLLSSACLFLCSGGCFGCCDKTVKQLGELSRNLITQDQITIGEPFWSTTTIEVEPADLSGVTSVNTSNLASGTGSSHNLPGLGNNGLVLWEHTRQEWTETRSLRLKVKQLECSI

SEQ ID NO: 46845 - protein, 152 aa, Zea Mays
MTTTRDRGAGGGSASRVGDGDVDLGEGWDWGAIPRLLSSACLFLCSGGCFGCCDKTVKQLGELSRNLITQDQITIGEPFWSTTTIEVEPADLSGVTSVNTSNLASGTGSSHNLPGLGNNGLVLWEHTRQEWTETRSLRLKVKQVREPVLRYE

SEQ ID NO: 46846 - protein, 254 aa, Zea Mays
MASNMYGTTVACRMCYRDQYRPPPRDFTCEARKSEARRWGNGYHLIPRLCQWKPRGSKSDGSLLGDGHGGRDARCHSCGSHNSCECETRDCDAMEDAAASSYRDFKQHSRGNPQFSDDQVSSKNKSAYASQGLAEACKFVYNDAKFVNERAQNDILLLSRGITRLNKRACQDAAVLGLGFLKLDARARKDTQKIDHTVKERAALLNHFARAFKERAQSDLKKAADKHWSDGALETCDELTWLLNDVPWKTLSWH

SEQ ID NO: 46847 - protein, 312 aa, Zea Mays
MGGTKLCSRHLPQDIIYCVGGVSVFFPLFTQFFDAASDIEKCCHTSVVNDKLVAEVIELVATVLDGNVSNQQQMYLLSGLSILGFLLQSATPQLLTTKTLSALKYMFDILRNCSMSKVLLKDAISQIYLNPQIWVYASYEVQRDLYMFVINYFETDGRLLPLLCGLPWVIDIVCRYYWEKADSRHVVASKPLFHSVTKQVIGERPEVVEIRKLRLLLLSLAEMSLKIKVSPDDIRALVAFIERSQDIACISDVLDMIIRALSQGEVFSSFVGNVNYLGGCCIFINLLKRTGGGMQSSRWIKVSAKASILLSS

SEQ ID NO: 46848 - protein, 410 aa, Zea Mays
MSQYINFMRDSFRREGFSLNGQTEGNVENRTAEPESASVLGLHNASLLAENMHSTRQIIVEQAGALLSSEAVVNSGPALYISPSGPNPLMVQPVPFPGRSVQMGTLFSSLGSQGSVLHPRDVDIHVRTSGSVPGASTNPSDSAGAQAHQNVNRPGDASHANIGEAFSGVAGGTPFSVESGVRLLPLRTVVAMPAGISRAPSGSSSGGLGIIYPFLTRVRQRANTNGNDERNGQSPNESARSSTHLNQQSIPQSSQTHEAGNLRSPVDVNVGDGSETSPGQQNGLVTLSQIMDFFGSMLPGENVRGNTSSQQPPMASTEQGEGRNLATPEVSGASEEALRFAGMVRQIMPFISQVETQNQSAPPDSSSTPAQAASGSADRARDVPNDSTSSRQHNRDQIDEPNSKRQRTSD

SEQ ID NO: 46849 - protein, 465 aa, Zea Mays
MSQYINFMRDSFRREGFSLNGQTEGNVENRTAEPESASVLGLHNASLLAENMHSTRQIIVEQAGALLSQLSTQLGDLENVTDSAIRRDIQSSAVRTGSLFQNLGSLLLELGRTTMLLRINPSSSEAVVNSGPALYISPSGPNPLMVQPVPFPGRSVQMGTLFSSLGSQGSVLHPRDVDIHVRTSGSVPGASTNPSDSAGAQAHQNVNRPGDASHANIGEAFSGVAGGTPFSVESGVRLLPLRTVVAMPAGISRAPSGSSSGGLGIIYPFLTRVRQRANTNGNDERNGQSPNESARSSTHLNQQSIPQSSQTHEAGNLRSPVDVNVGDGSETSPGQQNGLVTLSQIMDFFGSMLPGENVRGNTSSQQPPMASTEQGEGRNLATPEVSGASEEALRFAGMVRQIMPFISQVETQNQSAPPDSSSTPAQAASGSADRARDVPNDSTSSRQHNRDQIDEPNSKRQRTSD

SEQ ID NO: 46850 - protein, 297 aa, Zea Mays
MIPYATAAEAEGALGRTMTWAETAWYEYSAVMPDSWLHCHTTFILFVIYSIAPLPLLLLEQFAPSVVLPYKLQPRVRLPPAASLSCYMDAACIFPLAVGLQFVSYPAVAKILRTRMGLPLPSVRETIAQLVVYSLVEDYLSYWMHRLLHTQWCYEKIHRVHHEFTAPTGFAMSYSHWAENVVLSIPALAGPVLVPCHVTTQWLWFSIRLIEGINTHSGLIPFYGGAAYHDYHHYAGGRSQSNFAPLFTYCDYLYRTDKGYRYHKLKQEKLKSLAENSADKGGNYSFDEGKKNRYFCA

SEQ ID NO: 46851 - protein, 300 aa, Zea Mays
MIPYATAAEAEGALGRTMTWAETAWYEYSAVMPDSWLHCHTTFILFVIYSIAPLPLLLLEQFAPSVVLPYKLQPRVRLPPAASLSCYMDAACIFPLAVGLQFVSYPAVAKILRTRMGLPLPSVRETIAQLVVYSLVEDYLSYWMHRLLHTQWCYEKIHRVHHEFTAPTGFAMSYSHWAENVVLSIPALAGPVLVPCHVTTQWLWFSIRLIEGINTHSGPCRLIPFYGGAAYHDYHHYAGGRSQSNFAPLFTYCDYLYRTDKGYRYHKLKQEKLKSLAENSADKGGNYSFDEGKKNRYFCA

SEQ ID NO: 46852 - protein, 74 aa, Zea Mays
MSSCRRSRLRRPRRKPHRLMRRLGRSCRSAMDMVIIRATIRLRLSDLILAFPYWGSDARCKDRSLVYGCFQGGG

SEQ ID NO: 46853 - protein, 180 aa, Zea Mays
MPSADAGDADAMPAPPPQTRAAISHVIFDMDGLLLDTEGFYTTVQEKILMRFGKVFDWSVKAKMMGKTTAESTRILFEEFGLAGLLTPEQFLEERETMLKKLLPTCVAMPGLLRLINLLHTNGIPIAVATGTHKHHFALKTQNHEDIFSLMHHIVTGDDPEVKAGKPSPDIFLAAMRRFE

SEQ ID NO: 46854 - protein, 671 aa, Zea Mays
MHRWAPVLLNTTLKFCASPSRNSRGCCDATADAALSKQFDAMAISDAACAAVVKSILCAKCSPYSADLFGAGPKIRTVPSLCNSTSSANSAESKETTTTTTQDYCKLVWDTCKDVSIASSPFQPPLQGTAPPPTSPSKLTDAWQSQSDFCGSFGGRSSVCLSGDTVSFNAAGPSPSPRPEPRGVCLERIDNGSYLSLAPHPDGSSRIFLGSQAGKIWLATVPEQGSGGALQFEGAGPFVDLTDQVHFDSALGLMGMAFHPGFATNGRFFASYNCDRTKSPSCTGRCSCNSDVGCDPSKLGTDSGAQPCQYQVVVSEYSARGSAAANVSQATSAADPSEVRRIFAMGLPYTSGHGGQVLFGPADGYLYLMLGDGGKGDPFNFAQNKKSLLGKIVRLDVDSTPSSSGGDLGNTSLWGNYSIPKDNPYADDSELEPEIWALGLRNPWRCSFDSERPSYFYCGDVGQDAYEEVDLISKGGNYGWRALEGPLVYHPQWAPGGNTSLSSIDAIPPIMGYSHSDVNKNIGSASIMGGYVYRGSADPCLYGRYLYADLYASAMWTGAEAPESSGNYTSALIPFSCSKESPIPCDAAAGSPLPSLGYVYSFGEDNSKDMYVLASKGVYRVVRPSLCSYTCPAERQETSPPAAPSSNKASMAEMGMGMLLVSVIVVWVLVT

SEQ ID NO: 46855 - protein, 421 aa, Zea Mays
MGRPRKTKAEPEPAPAFPIGNCKVEIRGSGLRCETTEQGLTISGPRGAKVVVSVSGDQKGASNGVGEGSQFILLNPSDADSQTKSLLEEVLMLYKKELPTMDYAADTGRKSGFLETCTTNGKYKTLILMSSSAAQHEEVIATVSYQIVPADTQYAEIPLAVVRSSYQRVGIGKLLYKELSQRLQNVGVTSIFCWADKVSEGFWLKQGFVSVGEVNTKELPVMQTWEKPQTSLHTVVPDSISPGDTNVSCENMVLQTYKRRVVRNTAKVATNEVSNAYSESSLSEQEPKKRMYKTSSSSLKSKRIRCSNHDDNCQDMNQIGVHDNNLCSSPENSLHVILKEHHIPSTGAHIYSNGSGSPTIMLMNIADEQKKARLTKVVETLRGFVTCDGHSCTHVVTGKARRTMNFCIALCSGRSTICSGR

SEQ ID NO: 46856 - protein, 576 aa, Zea Mays
MGRPRKTKAEPEPAPAFPIGNCKVEIRGSGLRCETTEQGLTISGPRGAKVVVSGEGSQFILLNPSDADSQTKSLLEEVLMLYKKELPTMDYAADTGRKSGFLETCTTNGKYKTLILMSSSAAQHEEVIATVSYQIVPADTQYAEIPLAVVRSSYQRVGIGKLLYKELSQRLQNVGVTSIFCWADKVSEGFWLKQGFVSVGEVNTKGKIRKIPVRADIKRALCFPGGSTLMVAHLNKELPVMQTWEKPQTSLHTVVPDSISPGDTNVSCENMVLQTYKRRVVRNTAKVATNEVSNAYSESSLSEQEPKKRMYKTSSSSLKSKRIRCSNHDDNCQDMNQIGVHDNNLCSSPENSLHVILKEHHIPSTGAHIYSNGSGSPTIMLMNIADEQKKARLTKVVETLRGFVTCDGHSCTHVVTGKARRTMNFCIALCSGAWIISPNWLKESFREGQFVGEAQYVLEDEEYRMQYKSELRDAVMRAKERPNSLFAGYTFCLSKYIQPSFDVLSAIIKSTGGKIIKKLSELDELSRTIFLVCEEEAELALVAAKSGIKTFSSDWFMSCVMKQELDLEAPQFIVSL

SEQ ID NO: 46857 - protein, 80 aa, Zea Mays
MASGHEKALVLGPLLAFGGIETGRSGATGGAHEARTGRNAGGGLEGATPREKELLDRISSLEQMLLATQDEVERLKAKES

SEQ ID NO: 46858 - protein, 494 aa, Zea Mays
MGGRGRPRQRQSGVGSTWHPWDPSRIAEWHWVGSTPLHTVTRATARRGAARGASAEREQATAVRRAGHGAAPCFAPSPVRSRLTQLCSSLSLSHARAFWTGGRTAALLLQAPGRGREADAEEVKVHASTYGILVWDQKRTQQQQRRKARAMDGDAGPEQHGCVHYRRGCKIRAPCCGEVFGCRHCHNEAKDSLEVSVHDRHVLPRHDIKLVICSLCNKEQDVSSLTKQGQCSSATVGVTCHTPHEKKNPSRLSTGAARLCELRSMSRQILLREMQLLRRRCKLSPPFFDVLSEVADGILRANLDVISEVFPLLFSPVLLSRSLAFQVSKNQFHCDGCGICRTGGAENFYHCGRCGCCYTTTLKDSHRCVDGAMHHNCPVCMEYLFDSMKAISVLHCGHTIHLECLYEMRAHQQFSCPVCLRSACNMSDIWQKLDQQVAASPMPAIYQKKMVWILCNDCGVTSNVQFHILAHKCPGCSSYNTRQTRGDPAACSRV

SEQ ID NO: 46859 - protein, 59 aa, Zea Mays
MLDDLLVERLASCPSGTTTDRAPAKSQLTRCGHEFCATPVVIVWRSFPKASLCIFLVFF

SEQ ID NO: 46860 - protein, 50 aa, Zea Mays
MAATASLTTTAPSPPALLKASAPLLISFRPVSRHCKNLCIKTKFGRTVGS

SEQ ID NO: 46861 - protein, 273 aa, Zea Mays
MGGYELVRSDDAAGAAGADLESGSGASKVAGAPPPSPAPSASPAARQQRLASLDVFRGITVLLMIIVDDAGGFLPALNHSPWDGVTVADFIMPFFLFIVGVSLTLAYKRVPDRVEATRKAVLRALKLFCLGLVLQGGFFHGVHSLTFGVDLTKIRLMGILQRIAIAYLLAAVCEIWLKGDDDVDSGYGLLRRYRYQLIGPLYSVLYSSLRHVRSRLGVPDSRPWFQFHREVVLCEMRSERRHRTSLQRSRNGRPYGPRDRPPLQTASLCAHEV

SEQ ID NO: 46862 - protein, 417 aa, Zea Mays
MHVAERDILHDMVKIVKKKSDPRVKEKVLVLIDTWQDVFGGSHARYPQYYAAYHELVRAGAEFPKRPEKPAPLFNGQSQAARNMRSPDQQEAESSAANDFPALSMSEIHNACGIMDVLAEMLNALDPGNREGLRQEVIVELVDQCRTYKQRVVQLVNSTTDEELMSQGLTLNDDLQRVLAKHDAIAAGIAVRVEKKSKSLQALVETKDSTNQDSKKEQGLIDIEDPTSQDAAKDPNQSTSDQSPFEQLALPAPPVSNGAATSAPQSDLGIDLLSWDDTPATTQNPLALVPVTDPLADSTSSNQNALAIVDTFSENSTTNHNAQPADPFGLNPSSAIPGSQLYNTPTQQPFQSQQPPQQAALYANGGAVDPGTSYDQASQFKNVSSGWNGQAANPVVPLPEQALNYEKKVMIVSKLCR

SEQ ID NO: 46863 - protein, 360 aa, Zea Mays
MGMFFSKAEPPPPMVLVPPLFDYPPIAARTRMAVPAYELMFGKVSLHNLFEDYFDQAGNMTSRIMLKPLEDPHVDLIATVSAAADRNSGTEVKGDALFRWQRELDDPHTFVDLLVSTSNPLLQLRLCAYHPKYRIGAFGTLPLLMGNRVRSEDYGVMGVRYGSENLSVGASFVPISLPSEVPFGAWLVGRKGSLSAGVQYKPLSGSKYPMPFTELENWNYAISYGVGSTSPLSPSFIFSLELARSTQLTASFYQHLVVQRRVKNPFEDDQVVGITNYIDFGLELAAKVDKDKVSGDGNSFQLAASWQANKNFLLKGKLGPSTSSVALAFKSWWRPSFTFSVTAVNNFTLSMMGSTGFMAR

SEQ ID NO: 46864 - protein, 802 aa, Zea Mays
MYPANRHMDPYYSHYRNHVPYPYYPPARWEIPSGHPQAMDSSYYYRPPNCGTWPYHDISHPSEFHCCCNRAYLPDYYSFRPPFPQELPPPHLYYHVPSPHHPNACPSYFVPSHPYPFDQTPYGYEKFKSHCCGCPTHVCPGAEKNNVKIEEQRPDVKLESGEHKNADSDSIIQHPNKKYPFIWLPSGNMKGKENGEHYELSPQVLNEWAPVSGKWLGDVKQQGQDNEKGKQFQWPIVWMPAGYDAPNQKAKDMNDTEETPKSPKISEVSPQSPKIIPLSWFGNGHHHDQKSAARNGSGDHNNGSAVKNQPVVTDHQDSMILEGNPKITPAVPKSIHVGKKPPRENCKTIPVVPEKEINEKKASTYRTIPVIKESDEKKIGMREKRESKEANSAEMVEENRKTKHNDSSVVKHSKLPPVCLRVDPLPRKKPGNGSSRSPSPPRKDTDNTKKDVDEAQSQILEPKQSSTSKDITVSEVKEKSPYEMKKEVGFRNETVEAASVEHLQEEEAPTSKDGQKVQAASTTVGDQENAALNSIEEDHVQENAGAGSLNGCDKRKNEDGTVIESETAKDDARTYGVNLSESDAAVRIQSAYRGYDVRKWQPLDKLWKIKHVHEQMQVVRKQIQCLLDSCSKPTQKEQVAIGETIMNLLLKLDAIQGLHPSVREARKSVARELICLQEKLDTLCKAASGDLNHTDSNDDESEGTKNIIQTEAPTVITEASDRQKRTIELGKVQEPCSVDSMEPCNTVPSGVSWEVRPDVDASEEKNEKQESCSTTVDEAHEQAFRGLQCLLEKMHRCGDWLV

SEQ ID NO: 46865 - protein, 1293 aa, Zea Mays
MYPANRHMDPYYSHYRNHVPYPYYPPARWEIPSGHPQAMDSSYYYRPPNCGTWPYHDISHPSEFHCCCNRAYLPDYYSFRPPFPQELPPPHLYYHVPSPHHPNACPSYFVPSHPYPFDQTPYGYEKFKSHCCGCPTHVCPGAEKNNVKIEEQRPDVKLESGEHKNADSDSIIQHPNKKYPFIWLPSGNMKGKENGEHYELSPQVLNEWAPVSGKWLGDVKQQGQDNEKGKQFQWPIVWMPAGYDAPNQKAKDMNDTEETPKSPKISEVSPQSPKIIPLSWFGNGHHHDQKSAARNGSGDHNNGSAVKNQPVVTDHQDSMILEGNPKITPAVPKSIHVGKKPPRENCKTIPVVPEKEINEKKASTYRTIPVIKESDEKKIGMREKRESKEANSAEMVEENRKTKHNDSSVVKHSKLPPVCLRVDPLPRKKPGNGSSRSPSPPRKDTDNTKKDVDEAQSQILEPKQSSTSKDITVSEVKEKSPYEMKKEVGFRNETVEAASVEHLQEEEAPTSKDGQKVQAASTTVGDQENAALNSIEEDHVQENAGAGSLNGCDKRKNEDGTVIESETAKDDARTYGVNLSESDAAVRIQSAYRGYDVRKWQPLDKLWKIKHVHEQMQVVRKQIQCLLDSCSKPTQKEQVAIGETIMNLLLKLDAIQGLHPSVREARKSVARELICLQEKLDTLCKAASGDLNHTDSNDDESEGTKNIIQTEAPTVITEASDRKRTIELGKVQEPCSVDSMEPCNTVPSGVSWEVRPDVDASEEKNEKQESCSTTVDEAHEQVASSMDMISDEAFTADNQEHGIGESNVTSVEQVTEEEKPASEDEVKEPPLVNSTALLYDTTSSGDSSGLKQYTASTDQNLYAESNTGSSPASTEDIDISTLAVESEVAAENDGPINSQVHETVALENVEMKDDVSSAENEHNRSSSPVIHLEDPLVSLKDVEQHGPTPTKDFVVPNTEDQQEARDISLQVQAVDSMKDCGEVPDGTIEASTNDDELELGTSADVEKNDQPTLLEPRSESVSVPELSVLDESDDKMQCGVSGKDEEAHVEEKTVTIAVDKVTGGSANFEDPLCEASRKEPDIEKSHPSLGEEEDDTIGGTVFPGSGSCELSCPQDGGIAVYEGPEMVSPESQTDARKENIHSDVAETDECTKTQKAALAGTEGENSAEDSGVPVSEMDKCNEMPKDAPTLTAAGANPAEDEASLKDLSVQTENKASSASPAPDDPKASDEKTLAEENQKLKELLQKLLASGNDQMGVITDLSEKVKVLERRLARKKRPKVRVHKPSRHASCVH

SEQ ID NO: 46866 - protein, 1294 aa, Zea Mays
MYPANRHMDPYYSHYRNHVPYPYYPPARWEIPSGHPQAMDSSYYYRPPNCGTWPYHDISHPSEFHCCCNRAYLPDYYSFRPPFPQELPPPHLYYHVPSPHHPNACPSYFVPSHPYPFDQTPYGYEKFKSHCCGCPTHVCPGAEKNNVKIEEQRPDVKLESGEHKNADSDSIIQHPNKKYPFIWLPSGNMKGKENGEHYELSPQVLNEWAPVSGKWLGDVKQQGQDNEKGKQFQWPIVWMPAGYDAPNQKAKDMNDTEETPKSPKISEVSPQSPKIIPLSWFGNGHHHDQKSAARNGSGDHNNGSAVKNQPVVTDHQDSMILEGNPKITPAVPKSIHVGKKPPRENCKTIPVVPEKEINEKKASTYRTIPVIKESDEKKIGMREKRESKEANSAEMVEENRKTKHNDSSVVKHSKLPPVCLRVDPLPRKKPGNGSSRSPSPPRKDTDNTKKDVDEAQSQILEPKQSSTSKDITVSEVKEKSPYEMKKEVGFRNETVEAASVEHLQEEEAPTSKDGQKVQAASTTVGDQENAALNSIEEDHVQENAGAGSLNGCDKRKNEDGTVIESETAKDDARTYGVNLSESDAAVRIQSAYRGYDVRKWQPLDKLWKIKHVHEQMQVVRKQIQCLLDSCSKPTQKEQVAIGETIMNLLLKLDAIQGLHPSVREARKSVARELICLQEKLDTLCKAASGDLNHTDSNDDESEGTKNIIQTEAPTVITEASDRQKRTIELGKVQEPCSVDSMEPCNTVPSGVSWEVRPDVDASEEKNEKQESCSTTVDEAHEQVASSMDMISDEAFTADNQEHGIGESNVTSVEQVTEEEKPASEDEVKEPPLVNSTALLYDTTSSGDSSGLKQYTASTDQNLYAESNTGSSPASTEDIDISTLAVESEVAAENDGPINSQVHETVALENVEMKDDVSSAENEHNRSSSPVIHLEDPLVSLKDVEQHGPTPTKDFVVPNTEDQQEARDISLQVQAVDSMKDCGEVPDGTIEASTNDDELELGTSADVEKNDQPTLLEPRSESVSVPELSVLDESDDKMQCGVSGKDEEAHVEEKTVTIAVDKVTGGSANFEDPLCEASRKEPDIEKSHPSLGEEEDDTIGGTVFPGSGSCELSCPQDGGIAVYEGPEMVSPESQTDARKENIHSDVAETDECTKTQKAALAGTEGENSAEDSGVPVSEMDKCNEMPKDAPTLTAAGANPAEDEASLKDLSVQTENKASSASPAPDDPKASDEKTLAEENQKLKELLQKLLASGNDQMGVITDLSEKVKVLERRLARKKRPKVRVHKPSRHASCVH

SEQ ID NO: 46867 - protein, 248 aa, Zea Mays
MAIPRARLTRLLLHFGSRGSRFLAQPFSTSSSAHGLFPSLWPTPSTAGAWRRAFHDGRPRGPLWRSKKLIGKEALFAIQGLKRFKGDEEKLADFVRRYVARLLKADKLAVLGELERQEEMFRIIQKEDWYKPDIYMYKDLIIALAKCKNMEEAMVIWGNMRDENLFPDSQTYAEVIRGFLRYGSPSDAMNIYEDMKKSPDPPEELPFRVLLKGLLPHPLLRNRVKQDFEEMFPERHIYDPPEEIFGMH

SEQ ID NO: 46868 - protein, 535 aa, Zea Mays
MESRGRRPRSPERRRPAARKVPVVYYLTRSRHLEHPHFVEVPLASPEGLYLRDVINHLNMVRGKGMAAMYSWSCKRSYKNGFVWHDLSEDDLVLPATDGEYVLKGSELVDQSPSGPFYPVTVSNGNQKQQSRPKEGARQPLPRDQSDPSSPPSVTVREAKARRSPSVPSQDEEDDTPSPCRDRSMSQPQELEPQRNERRTQPPASGSASPVELRAHRPTTGCTDAATQTDDLGRRPAGRRALELPRKKSLSTDHDAVVREIAEYRQSHPRRSADLHGISRELLRQCITTPLTVPSTCAKSESLESLIRADNVMTDSFRILEEEDVVARTCPKLRPASVLMQLVTCGSLSVKGHGDAGVVRTCKPRFPNLRFLPSPLISRTMMMGELDYLSENPRLMGMKLEEKEYFSGSLVETKKTQRDGPAERYSALKRSSSYNAERAGEALDCTRREEDKADDVSSRTRCLPRTPILSSFLHPKGDSLRSPVSDCRRSSSARRDYDAASGDGSRRFADASVASATTGAESFRKEEKLVKIEES

SEQ ID NO: 46869 - protein, 478 aa, Zea Mays
MASLFGAGRRRSPEDDGEDDRSGRGRTKRFRLSPEEDAASPAEAGPGAATETGWLSGFVYGAKRVISSVLLFSSPEETGSGEDEEEEKDDDDDEEGIHLNEHEATHDTHGAIVPYSEPKLTIEQMVMKETFSRDECDRMVELIKSRVRDSTFPEAHEYVKPEEIPSRNAGITHDFTGTWRSLSRDRNVPESVPLSSMRTRPGSFSQGSPLQASPELCTAAVTEAKKWLEEKRQGLGFKPEDNGPCTLNTDILSSHDDSVSDLGSPVDLAKSYMQSLPPWKSPFLGRQKFNTPPSKYFISSAEVTTKEDYLSSFWTKLEESQRARIGSSGGSADAPKFWNYGSNSRLFENDTSIFSLGTDEKVGDPTKIYNGSGKFAATEPVGGCCLPITPTEDRTDGITEPVDLARNNGNAPQENQVASEILPDKVPEGNDVSSTGITKDTTGHSGDVKAPTSEPHLGETRINSASVSTSKRTLRLSS

SEQ ID NO: 46870 - protein, 727 aa, Zea Mays
MAADALSIIPGAVLRNLSDKLYEKRKNAALEIEGIVKQLATFGEHEKISAVISLLTNDFTYSPQANHRKGGLIGLAAVTVGLTSEAAQHLEQIVPPVLTSFLDQDSRVRYYACEALYNIAKVVRGDFIIYFNKIFDALCKLSADSDANVQSAAHLLDKLVKDIVTESDQFSIEEFIPLLRERMNVLNPYVRQFLVGWITVLDSVPDIDMLGFLPDFLDGLFNMLSDSSHEIRQQADAALSEFLQEIKNSPNVDYGRMAEILVRRAGSTDEFTRLTSITWINEFVKLGGEQLVPYYADILGAVLPCISDEEEKIRVVARETNEELRAIKADPAEGFDIGAILSIAKRELNSEHEATRIEALHWFFTLLDRYCAEFLAYLNDIFDPLLNALSDPSDAVVLLVLEVHARIAEESHHFHHLVSYLIRTFHNNHFVLEKRGALIVRRLCVLLGAEKVYREFSTILESEVDLDFASVMVQVLNLILLTSTELGELRSPLKKSLVDSCGKDLFQSLYASWRHSPMATISLCLLAQAYNHASCVIQSLGEEDINVNFLVQLDKLIRLLETPVFAYLRLQLLEPGKHTWLLKTLYGLLMLLPQTLLGEIIHRGVYMFTQQSAAFKILRTRLKTVPFSENLKRTSSANPYSQILQVTEDGNRNQDMQNYSAINFPFLLQQFENMQLQHRNHLKDQLQSRKSASTLTLSQEIQRYEEAHSSSLSEINRPPSRTSKGIL

SEQ ID NO: 46871 - protein, 613 aa, Zea Mays
MAADALSIIPGAVLRNLSDKLYEKRKNAALEIEGIVKQLATFGEHEKISAVISLLTNDFTYSPQANHRKGGLIGLAAVTVGLTSEAAQHLEQIVPPVLTSFLDQDSRVRYYACEALYNIAKVVRGDFIIYFNKIFDALCKLSADSDANVQSAAHLLDKLVKDIVTESDQFSIEEFIPLLRERMNVLNPYVRQFLVGWITVLDSVPDIDMLGFLPDFLDGLFNMLSDSSHEIRQQADAALSEFLQEIKNSPNVDYGRMAEILVRRAGSTDEFTRLTSITWINEFVKLGGEQLVPYYADILGAVLPCISDEEEKIRVVARETNEELRAIKADPAEGFDIGAILSIAKRELNSEHEATRIEALHWFFTLLDRYCAEFLAYLNDIFDPLLNALSDPSDAVVLLVLEVHARIAEESHHFHHLVSYLIRTFHNNHFVLEKRGALIVRRLCVLLGAEKVYREFSTILESEVDLDFASVMVQVLNLILLTSTELGELRSPLKKSLVDSCGKDLFQSLYASWRHSPMATISLCLLAQAYNHASCVIQSLGEEDINVNFLVQLDKLIRLLETPVFAYLRLQVTWSDNPFLQIYLSVSQAHLNSETWRVLPGFFNLISSATLMA

SEQ ID NO: 46872 - protein, 442 aa, Zea Mays
MLCIICLFLINVLLVLMSVLIPDLVLLFSIEEFIPLLRERMNVLNPYVRQFLVGWITVLDSVPDIDMLGFLPDFLDGLFNMLSDSSHEIRQQADAALSEFLQEIKNSPINEFVKLGGEQLVPYYADILGAVLPCISDEEEKIRVVARETNEELRAIKADPAEGFDIGAILSIAKRELNSEHEATRIEALHWFFTLLDRYCAEFLAYLNDIFDPLLNALSDPSDAVVLLVLEVHARIAEESHHFHHLVSYLIRTFHNNHFVLEKRGALIVRRLCVLLGAEKVYREFSTILESEVDLDFASVMVQVLNLILLTSTELGELRSPLKKSLVDSCGKDLFQSLYASWRHSPMATISLCLLAQAYNHASCVIQSLGEEDINVNFLVQLDKLIRLLETPVFAYLRLQVTWSDNPFLQIYLSVSQAHLNSETWRVLPGFFNLISSATLMA

SEQ ID NO: 46873 - protein, 193 aa, Zea Mays
MVSGAAHNPGGGAAAQTTQRSPPQLGARTALATPPPVSGGAAHSASTSGGTAGSPPSSRSEQHAPDGAVKGPALGTAPAAAAASTPASDSTFLRLNNLDINGDDAPSSQAPTSKKKRRGTRAVGPDKGNRGLRQFSMKVCEKVESKGRTTYNEVADELVAEFTDPNNNIEAPDPDNPNAIKRRSSGRACRGLV

SEQ ID NO: 46874 - protein, 405 aa, Zea Mays
MGLGLGALLKSGGLSVSDHDAIVSINIFIALLCSCIVIGHLLEGNRWVNESITALVMGLITGGVILLVTNGTNSRILVFSEDLFFIYLLPPIIFNAGFQVKKKQFFRNFITIILFGAIGTLISFVIISLGAMGLFKKLDVGPLELGDYLAIGAIFSATDSVCTLQVLNQDETPLLYSLVFGEGVVNDATSVVLFNAIENLDIDNFDAIVLLNFVGKFLYLFFTSTILGVATGLLSAYIIKKLCFARHSTDREVSIMILMAYLSYMISMLLDLSGILTVFFCGIVMSHYTWHNVTESSRVTTKHTFATLSFIAEIFLFLYVGMDALDIEKWKLASSSPKKPIALSAIILGLVMVGRAAFVFPLSFLSNLSKKEARPKISFKQQVIIWWAGLMRGAVSIALAYNKAM

SEQ ID NO: 46875 - protein, 232 aa, Zea Mays
MPNKSLEDHLFRRANPPISWNTRLQVILGAAEGLAYLHEGVEVQVIYRDFKTSNVLLDKDFRAKLSDFGLAREGPTGANTHVSTAVVGTHGYAAPEYMDTGHLTAKSDVWSFGVVLYEILTGRRSLDRNRPAAEQKLLEWVAQFPPDSRNFRMIMDPRLRGEYSAKAAREIAKLADSCLLKNAKERPTMSEVVEVLRRAVQAHAEPDGRTPGPGARGKKAAAAAAAAAPSRR

SEQ ID NO: 46876 - protein, 514 aa, Zea Mays
MLLDLRCGAKKSLADLPKHPLALKSCDISSVCSHQILVGGSDAFARLYDRRMLPPLSSCQTKRKPPPCVKMFCPLHLADSKKTYSHLTHVAFSPNGKEVLLSYSGEHVYLFDVDPDGMSSRYTADYVREQLFVPPFHKVSAKGHAKQKKASVNTTSRSLSRVDMCKKFMQVATRSLETGIIEFDLQRKWKNDVYMAIRDCNRTWKIDVTSYQAHLHMAEALLQLGRLKEASEHAEVANGLLPPHCPLREQVDDFKQRIASAELEKNRADKNGSSKADTHGKLRSLSEILFRPDVGGSSQEGREDSDYDDDTEMDYETTVSGHESRENDQGVFRGSLSFQFHQREDQTNVHTDENGSVESPRKDDYAFQSDVAIDMKQRYVAHCNVGTDIKQASFLGEQGEFIASGSDDGRWFIWEKRTGRLIKMLAGDGAVVNCIQSHPFDCAVATSGIDNTIKLWTPDANATSMVSGPELDVLSAIENNQQKLCRNRHFVLPSEFLERFQMHEFSEGFECAQS

SEQ ID NO: 46877 - protein, 241 aa, Zea Mays
MSGLYNQGFSPARTLSPQIRSNPDADSQYLAELLAEHQKLGPFMQVLPICSRLLNQEIMRVSSMVHDHGFSDLDRRRFRSPSPMSSPIVRPNLHGNGFGPWNGMHQEFNFVGRILGPRGNSLKRVESSTGCRVFIRGKGSVKDTEKEDKLKGKPGYEHLNEPLHILIEAELPANIVDTRLRQAQEVMEELLKPVDESQDLYKRQQLRELAMLNSTLREDSPHPGSVSPFSNGGMKRAKPSQ

SEQ ID NO: 46878 - protein, 154 aa, Zea Mays
MLLDKTRTVKIADFGVARVEASNPSDMTGETGTLGYMAPEVLNGHAYNRKCDVYSFGICLWEVYCCDMPYPDLSFSEVTSAVVRQNLRPEIPRCCPSSLANVMKRCWDANPDKRPEMAEVVSMLEVIDTSKGGGMIPKDQTQGWLSCFRRYRGP

SEQ ID NO: 46879 - protein, 58 aa, Zea Mays
MSEERPVPRRESPWGLPEGDTRQPKAHRCNDRAEDVVQTTIGSSNTNLENKDWIEQID

SEQ ID NO: 46880 - protein, 289 aa, Zea Mays
MEPVRMLQILFSLEDGSVIETVIIPCARGRTTICVSSQVGCAMNCQFCFTGRMGLRKHLSTAEIVEQAVFARRLFSDELGSINNVVFMGMGEPFHNIDNVIKASAIMVDEQGLHFSPRKVTVSTSGLVPQLKRFLQESNCSLAVSLNATTDEVRNWIMPINRKYNLNLLLGTLREELNLRQKQIVLFEYVMLSGVNDSMDDAKRLIELVQGIPCKINLISFNPHGGSQFKPTPDDKIIEFRNVLIQGGLTVFVRLSRGDDQMAACGQLGEPGGYQLPLLRVPEKFQVAL

SEQ ID NO: 46881 - protein, 648 aa, Zea Mays
MPTAPTSQSSTPQAKRGEPGSTPDEIRSMVKSLASPPHRLVLFLQQSSVEWCSSIWLDTLKEIDPTFRRTIIVISKFDNRLKEFTERWEVDTFLSASGYLGDNIHPFFVALPKDHGTISNEEFRRQICQVDIDVLRHLRENVKGGFNEEKYVSCIGFSCLKKYLESELQKRYKEAAPATLALLEQRCTEVSMNLTRLDSKLQAASDVSQLRRSAMLHAASICTNLNALLDGAADPAPEIWGKTTEEEQIHSGIGSWPGINMPVKPANSSLKLYGGAAFERVMHEFRCATYSLECPQVSREKVANILLAHAGRRGSSRLTEAAVAIARAAARSWLAPLIDTACDRLAFVLQNLFDLAMERNRNNDSQYHQNFEDMDSYVGFLAALRCSYYKFVKELSKQCKQIVRHHLDSVTSPYSHICYDDDFFSGVGSVANSTCRFNHFTGVTSFDLADSGSALEEAQENLPPKDQHHMTPPINKGNDSKEVLRESQLTVPETPSPDLPSDIHGGKKKDNGIPNDGGPRKRHARMAAYTSRNHHNSMIGADDMASKSGSSYSTICAISAQYFAKMREVLIERNAPSALNSGFLTPCRERLFLALGFELFAVSDNKFMGMFVLPGAVDGIQNERHSLLKRQKILLSCLNEFKNISRAL

SEQ ID NO: 46882 - protein, 69 aa, Zea Mays
MPSRSSSSSSSRPTSWPSCSGCTSWLPRSNHPGGRHSDGADLRHRRSFASLFIGGTRVGVAHRRQEETW

SEQ ID NO: 46883 - protein, 547 aa, Zea Mays
MCFFAGKKMPTTGVIAGTRDGLSSESISRFLLPASECEFVLNSVIEEIQKDPWPVPADQRASRCTGAALSVAANLLGVCVPGSGARIMAFVGGPSTEGPGPIVSKSLSEPIRSHKDLDKDSAPLYDKAVKFYDQIAKQLVHQGHVLDLFACAVDQVGVAEMKVAIEKTGGIVVLAESFGHSVFKDSLLRIFQSTDDNLGLSFNGILEINCSKDVKVQGIIGPCSSLEKKSPLSSDTVIGQGNTSAWKMCGLDRKTSLCLVYDIAKKDGPDSIAQSANNQFYFQFLTYYQHNEGQMRLRSTTISRRWVSGDNHVEELVAGFDQEAAAAVMARLVSFKMETEVDFDPVRWLDRALIRLCSKFGDYQKETPSSFSLSPRLSIFPQFIFNLRRSQFVQVFNNSPDETAYFRMMLDRENVTNTVVMIQPSLISYSFQSGPEPVLLDATAIASDKILLLDSYFTVVIFHGVTIAQWRNAGYQDQEGHEVFAQLLKAPHEEANLIIKERFPVPRLVVCDQYGSQARFLLAKLNPSVTYNSDNPSPGGDVIFTDD

SEQ ID NO: 46884 - protein, 506 aa, Zea Mays
MRVIEEIQKDPWPVPADQRASRCTGAALSVAANLLGVCVPGSGARIMAFVGGPSTEGPGPIVSKSLSEPIRSHKDLDKDSAPLYDKAVKFYDQIAKQLVHQGHVLDLFACAVDQVGVAEMKVAIEKTGGIVVLAESFGHSVFKDSLLRIFQSTDDNLGLSFNGILEINCSKDVKVQGIIGPCSSLEKKSPLSSDTVIGQGNTSAWKMCGLDRKTSLCLVYDIAKKDGPDSIAQSANNQFYFQFLTYYQHNEGQMRLRSTTISRRWVSGDNHVEELVAGFDQEAAAAVMARLVSFKMETEVDFDPVRWLDRALIRLCSKFGDYQKETPSSFSLSPRLSIFPQFIFNLRRSQFVQVFNNSPDETAYFRMMLDRENVTNTVVMIQPSLISYSFQSGPEPVLLDATAIASDKILLLDSYFTVVIFHGVTIAQWRNAGYQDQEGHEVFAQLLKAPHEEANLIIKERFPVPRLVVCDQYGSQARFLLAKLNPSVTYNSDNPSPGGDVIFTDD

SEQ ID NO: 46885 - protein, 309 aa, Zea Mays
MHDIGLSARAAGATSCSSAAAAAGDGGDESKTRKAHPSFVVSAYTRLHSSHRTVASLLLFLTVAVAAFLAGRARPSVDCAPPRLDARFLALPDAAAASDFGSLGVPWCRSKTGKTVEWTSKDLLNGLEEFVPIYETRPIKNNVYGMGFDHSFGLWFMARWIKPDLMIESGAFKGHSTWVLRKAMPNTRIISLSPRHPEKYLKKGPAYVDGNCTYLAGKDFVDFGSIDWGKLLRNHGISDPDKVLVFFDDHQSELKRLKQALKAGFRHLIFEDNYDTGTGDHYSLRQICDQSYIRGLWLVTLDSKCPWYN

SEQ ID NO: 46886 - protein, 164 aa, Zea Mays
MGFDHSFGLWFMARWIKPDLMIESGAFKGHSTWVLRKAMPNTRIISLSPRHPEKYLKKGPAYVDGNCTYLAGKDFVDFGSIDWGKLLRNHGISDPDKVLVFFDDHQSELKRLKQALKAGFRHLIFEDNYDTGTGDHYSLRQICDQSYIRGLWLVTLDSKCPWYN

SEQ ID NO: 46887 - protein, 179 aa, Zea Mays
MAFFRGLTAVSRLRSRMAQEATTLGGVRWLQMQSASDLDLKSQLRELIPEQQDRLKKLKSEHGKVQLGNITVDMVLGGMRGIIGMLWETSLVDPEEGIRFRGLSIPECRKVLPTAVEGGEPLPEGLLWLLLTGKVPTKDQVDALSKELLARSTVPGNRCSPSNCTSYDTIYRRNNGSSG

SEQ ID NO: 46888 - protein, 144 aa, Zea Mays
MSGGIARGRLAEERKAWRKNHPHGFVAKPESLPDGTVNLMIWHCTIPGKQGTDWEGGYFPLTLHFSEDYPSKPPKCKFPQGFFHPNGWRPAITVKQILVGIQDLLDQPNPADPAQTDGYHLFIQDPTEYKRRVKLQAKQYPALV

SEQ ID NO: 46889 - protein, 277 aa, Zea Mays
MDEKQANTPRRLTPKKDMVTLSSGSDASPGNSLSRAHEDNHEEGSLSTAKRKNAQQTKTKKTKDAGTKTGADQAGNGDAEDDVQDKLTGNSVSQRLPLIFPDKVQRSKALIECDGDSIDLSGDIGAVGRIVVSNGPTAKQDLLLDLKGTIYKTTIVPSRTFCVVSVGQSEAKIEAIMNDFIQLEPQSNLFEAETMVEGTLDGFTFDSDEEGDKLYEPQANQNDLNNNEDEGQPKAKTKRKAEKTTGKAPKKAKVAGKGPKKGTRKTQPAKRGRKAKK

SEQ ID NO: 46890 - protein, 89 aa, Zea Mays
MPGAPRYRRALGHKRAPPASVGPPALLLYLRHLAPTSAPHNGAARRIRGGGACAVDGAVEPVVVWLSLPSYGLTDMLSRPSGTSRSCRC

SEQ ID NO: 46891 - protein, 167 aa, Zea Mays
MLVGAYPFEDQDDPKNIRKTIQRIAAIQYNIPDNIRISDDCRQLISRIFVSNPLRRITMREIKSHPWFLKNLPRELTEAVQLSYFRRDNSVSAFSDQTTEEIMKIVKEARTLPKSSRSGYGYSEECSDEEEKEVESEPKEEEEEAECDKTVREVRESGELDMTSLHI

SEQ ID NO: 46892 - protein, 370 aa, Zea Mays
MGRDGEQTRRRSRKRSRDASPSSSDSDSFDSPSSPSSSPERRSRSSKRNRSSSSHRHSRKKSDRSRRSRDEDRRRRRRRGQERKRHGGDGGRSSDSQSSEEDRAEEAREIVRDILIELPAIAEELRQLLQIIDSGESIDISGISDKLLVKRLKKLFRSLRLKESASGAYLLPSKNVPTLDIVGSLLLASSKLADNKSGKPVSPNREALQQANFDVQNKDKDYIVSEEPKIVDVEEEPPKRRIIGPAMPSRELLAAAAEMTEALRCRDAELEANDDLLIGPPPPAVVAEAASANEAERFEEVTRILAADTNSPYEVLGVNWKMSTDNMKKRYWKLSLLVHPDKCPHPSAQEAFVKLNNAFKDLQDPDKVPA

SEQ ID NO: 46893 - protein, 308 aa, Zea Mays
MQGVQEQHNILRNSIEQLKLSESLRATLISHLKEALNEQELKVEQVRSLLQAAQPRFKRAAELCVGLGSNMEMHEPSNQGHKRSSLSDPLSTVAPGAEKSLQKGQSSAVLYSQEGNGFEHIMTETKLAAGDASDNIRGGDLPSQVNGGNTKLKIEEHTSGNKRQKLEDDTDISQPQSQSPPPPPPFPHPDAFEPPPPPPPEVPPSPEPSPPPPPTSPPPNMIPPPPPAMPPQMISHVPPPAGTFVPFPAGPPGPMYSSYPPFTPVVNFPITSPPAGFPSPSPPPPFQGLVGTFYGPQFPTAPPPADRK

SEQ ID NO: 46894 - protein, 238 aa, Zea Mays
MEMHEPSNQGHKRSSLSDPLSTVAPGAEKSLQKGQSSAVLYSQEGNGFEHIMTETKLAAGDASDNIRGGDLPSQVNGGNTKLKIEEHTSGNKRQKLEDDTDISQPQSQSPPPPPPFPHPDAFEPPPPPPPEVPPSPEPSPPPPPTSPPPNMIPPPPPAMPPQMISHVPPPAGTFVPFPAGPPGPMYSSYPPFTPVVNFPITSPPAGFPSPSPPPPFQGLVGTFYGPQFPTAPPPADRK

SEQ ID NO: 46895 - protein, 776 aa, Zea Mays
MYSWIPLASIFSMDEPNNNFNATVHANEMFDSNGVIHEDEMAHDDEMIHGHAMFLGDEMIRGTEMVEGSEMIHGHDMVQVNDLIHGNEMVPVHDMVNGDKIAHGNELVNSQMTPRISRRRKKKSLVWEHFTIELMPGGSSRACCKLCKQTFAYSSGSKIAGTSHLKRHITLGSCPVMKDQDRKLALPLAGGHVTDNDGEGTAERPTKRRYRYTGYANATFDPQRSTSYLTKMIILHDYPLHIAQQSSFINFIESLQPRFRVVDVETMEGEVYAVFQKAKENLLQAFSTMPGRISLTIGLWTTSQTLGYVSLAGQFIDSDWKVHRRMLNFMMVSSPHSENALSEAISSSLSEWNMKDKLFTITLDNDCSSHDIYSANLRDHLSNKNNVMLKGQLFVVRCYAHILNVVAQDVIASIHGVIYSIRESIKFIKASPSREEKFAEIALQLEIPSTKTLCLDVTTQWNTTYLMLLAALDYKQAFATLETCDDNYNESPSAEDWKKVEASCNYLKLLYDSAHSVMASANPTANIFFHEAWKIQLELANGTEHGSPFFSCIAKDMHERFDKYWKDCSLVLAIAVVMDPRFKMKLVEFSYSKIYGAEAAKYVKVVNDSLHELYKEYVAQTLPLAPAYVEANNVAANTNVNQGNPPPTSDGLLDFDMYLSEIQSSQPAKCELEQYLEESLTPRIQEFDILNWWKLNTLKFPTLSKMARDILAIPMSMVSSGSSIFSAGTGNRMLDDYRSSLRPETVEALVCAKDWLQYSPAATEAPGSEMMKAEAL

SEQ ID NO: 46896 - protein, 582 aa, Zea Mays
MPLFDKKPFSLLEPPKDLDSKEKVFQIRFTKEIFRDYEEYLKRLNLYRQRVWTCNISGKSNLTFEEALVSEHKAMEKAQNLPTELMAQVLRMTQYSPLGLYELVDKIYASLLEEVFEGIELHANKDGNVAPCKILKILDSGGTKMCEVGWIRKGKAITNTSVIKAADLFYRRAPVSRNTLKFFIRDATSQSNPWVIHENLAKKFGITIEPPDSVMKKGRKRQENETVEDGRKKLKTDEEHAYVLIKYPIDDLLVRPNADDPSLFKRPLLATDFRVPRCSVGDLLMVWDFCSSFGRALNLSPFPLTDLENAICHKESNVLLVEIHAALFHLLMKDEGDYFTVPQNKKQKLKVSSVTWAEYLCDFLEMTKNEELSTNIATVRRGYYGLIDTNIKLKILRELVEEAIETSAIREILSDRVDQKQVLNATKRENTRKDKKEQNLNTEIAMKNEENQTDAVQGGHEGVDELVRRKEENDKSNISRGRTEVKRHMHLETEIEKLSIRSSPLGKDRQYSRYWFFKREGRLFVETADSREWGYYSTKEELDALMDSLNVKGIRERALKRQLEKFYSKISVLVLGGLQGVW

SEQ ID NO: 46897 - protein, 304 aa, Zea Mays
MEAEAAAKRTRDSGEDAAAAGISAVIPGWFSEISPMWPGEAHSLKVDKVLFQGKSDYQSVMVFQSSTYGKVLVLDGVIQVTERDECAYQEMITHLPLCSIKDPKKVLVIGGGDGGVLREVSRHSSVEQIDICEIDKMVVDVSKQFFPHLAVGFEDPRVSLHIGDGVAFLKNAPEGPAQELFEKPFFQLVARALRPGGVVCTQAESIWLHMHIIEDIVVNCRQVFKGSVNYAWTTVPTYPSGVIGFMLCSTEGPAVDFQHPVFNIEEDEHPMKSKGPLKFYNSEIHTASFCLPSFAKRVIESKAN

SEQ ID NO: 46898 - protein, 268 aa, Zea Mays
MQRKNEEFLLSYTGRNYGLAAGSWLGPYAMCRAWQTLIRTNREQADAVDGKENFPMALYVVSGDEDGERGGAPVVCIDVAAQLCSDFNKGPSTWSPILLLVPLVLGLDKINPRYIPLLKETFMFPQSLGILGGKPGTSTYIAGVQDDRALYLDPHEVQMTVDIALDNLEADTSSYHCSVVRALALEQIDPSLAIGFYCRDKDDFDDFCSRASELAEKANGAPLFTVVQSIEPSKQMYKQDDGLGCSGSSMANDDDLDGSGEAEEWQIL

SEQ ID NO: 46899 - protein, 426 aa, Zea Mays
MAVTITWVKARQIFDSRGNPTVEVDVGLSDGSYARGAVPSGASTGIYEALELRDGGSDYLGKGVLKAVSNVNNIIGPAIVGKDPTEQVEIDNFMVQQLDGTSNEWGWCKQKLGANAILAVSLAVCKAGAMVKKIPLYQHIANLAGNKTLVLPVPAFNVINGGSHAGNKLAMQEFMILPTGASSFKEAMKMGVEVYHNLKSIIKKKYGQDATNVGDEGGFAPNIQENKEGLELLKAAIEKAGYTGKVVIGMDVAASEFFGEKDKTYDLNFKEENNDGSKKISGDSLKDLYKSFVSEYPIESIEDPFDQDDWSTYAKLTDEIGQKVQIVGDDLLVTNPTRVAKAINEKTCNALLLKVNQIGSVTESIEAVRMSKRAGWGVMASHRSGETEDTFIADLSVGLSTGQIKTGAPCRSERLAKYNQDRGRAR

SEQ ID NO: 46900 - protein, 426 aa, Zea Mays
MAHSTGLVQAILFEVVDRDNIGGSAYGGQRSICCTPDLAKLEGCKQGEVIRRPSSDDPDWPFVLDTHFSANHLSVKLEDEPVRITKTGMYNLFFISCDPKLRGLTMSGKTIWKNPGGYLPGRMAPLMKFYVLMSLAYLLVMIVWFSQYVRFWRDILPIQNWITLIIALGLFEMTLWYFEYLNFNSSGVRPVGITTWVVTVGAIRKTVSRLLILSISMGYGVVRPTLGGLTSKVLLLGLTYFLASELLDIAENVGTINDISGKARLFLVLPDAFLDAFLILWIFTSLSRTLEKLQARRSSVKLDIYRKFTNALAVSVIASVAWIGYEVYFKATDPFSERWQSAWIITAFWDVLAFVLLLVICYLWAPSQSSQRYAYSGEAADDDDEESQSLTKGDGEVGMVKIDKDRNAGVSSAFGLEDEAEEDKRE

SEQ ID NO: 46901 - protein, 99 aa, Zea Mays
MYAFIIPPSIKYHWLFEFQVAIFFRSIIDFGGYGGSVLDVVQSFGPNKCQELFMQGFIDCIRDDDILYNPDTMINTLILNVNVGVGEEILRPGGGMHPP

SEQ ID NO: 46902 - protein, 102 aa, Zea Mays
MVRIPRDYHLPPPSRAPSATIRASYSRALLRRRGSRTLESRQQIPQSSSGDRNRGGLRGRYYDEGEGERSGAAAPFIIIGRAPGGNGCRADEIEERAGGCRP

SEQ ID NO: 46903 - protein, 298 aa, Zea Mays
MNMCEKDQNLPWGYDLFRDPFAPPNGYYGPPPGYCDGHCCDLHHYASHPDETQLHSSQLAYDMYNPSVGIYHPGSTHEHEHEHETVYVEPSSSSPDTGGDGCFEMEEEVGKRFYPMVPVPHVPKINGEIPSIDEATMDHERLTERLRLYELVENKVKGDGNCQFRALSDQLYQSPDHHEFVRSQIINQLKTNRDAYDGYVPMAYDDYLEKVARNGEWGDHVTLQAAADKYGVKIFVMTSFKDTCYIEILPKVQKSNKVILLSFWAEVHYNSIHPQNDAPRSQTTKRRRWWPFSQHHHH

SEQ ID NO: 46904 - protein, 278 aa, Zea Mays
MNMCEKDQNLPWGYDLFRDPFAPPNGYYGPPPGYCDGHCCDLHHYASHPDETQLHSSQLAYDMYNPSVGIYHPGSTHEHEHEHETVYVEPSSSSPDTGGDGCFEMEEEVGKRFYPMVPVPHVPKINGEIPSIDEATMDHERLTERLRLYELVENKVKGDGNCQFRALSDQLYQSPDHHEFVRSQIINQLKTNRDAYDGYVPMAYDDYLEKVARNGEWGDHVTLQAAADKYGVKIFVMTSFKDTCYIEILPKVQKSNKVILLSFWAEVHYNSIHPQNGE

SEQ ID NO: 46905 - protein, 396 aa, Zea Mays
MNSIEPFNRLVKLAARAFYDDVSMKGDNQPKTSRGDNRGMAVVVLDALTRRPWVREEDLAKALKLHSKQLRRILRFFEEEKLVTRDHRKESAKNAKAHNAAAANDGQTVAKEGEEKVKMHTHSYCCLDYAQICDVVRYRIHRMKKKLKDELDSRNTIQHYICPSCNKRYSAFDALQLVSYTDEYFHCETCNGELVAEDDKLASEEMGDGDDNVRKRRREKLKDMQQRIEVEVDILSDGEKEGAESGKDGSELKVIPPWMIKDGMNLTKEQRGEKIESQKLEKSEAKDDKKQDLKDDQSVQEEYIKAYYEALRKKQEEEEAKNRMQQEGKISVPDSQTERQVGKKYKRDDDDDEDIEWEEHQPTAAGNATETYKLADLNAEAQESGDDEDDNVWEEG

SEQ ID NO: 46906 - protein, 376 aa, Zea Mays
MRAVAGSFEAVAGERAAAAYTRLAQRTISRHFRSVRDGVAAQMQAVRRALGEKDADDGGVVPAAAGMMANKGETTPRLRVIDQCLRQHRAYQTGVVLESQPWRPQRGLPERAVSILRAWMFEHFLHPYPSDVDKHILARQTGLSRSQVSNWFINARVRLWKPMVEEMYSEEMKDPKEGACSNANSSVNTGAGYASEELGQPLGHGGACGGVDEQKPTRAQLVHDAGSLASAVSIGSSRDQQQISSINFRMMDHLDFDAYSGDPAAAGGPAAGFGGAGASGGVSLTLGLQQHADGDPHGGVNIAFAAAPSAAHEFLFMAGGGEHRMVAAGAVHPSSSHGHGQFAASMQGDSAGVASSHYHRGLGAATGFQLLHDLAG

SEQ ID NO: 46907 - protein, 301 aa, Zea Mays
MMSIVVLLGLVITSIYWGVNKFVLNDPSLPKADRKKKKEKPKLGMKESLKVLLSSRYVRDLATLVVAYGISINLVEVTWKSKLKAQFPSPNEYSSFMGDFSTATGIATFTMMLLGRIILRKFGWGVAAKITPTVLLLTGVGFFSLILFGQPLTPMLATMGMTPLLAAVYVGAMQNIFSKSAKYSLFDPCKEMAYIPLDEDMKVKGKAAIDVVCNPLGKSGGALIQQFMILTFGSLANSTPYLGGILLVIVLAWLGAASSLDKQFSSLAKQDMEREKAAQDQGKLERSLLTCGFKPARNLPL

SEQ ID NO: 46908 - protein, 391 aa, Zea Mays
MESRALLHARPAALPHRAGLRLHLPLLRPRAVSRSPAAKPALQSPLLASRGPFLQRHDAVLGNGFVKRRAASAGGDVSFRAQAAASAAVPAPQPEESTKKLLGIDVKTLKKIVPLGLMFFCILFNYTILRDTKDVLVVTAKGSSAEIIPFLKTWVNLPMAIGFMLLYTKLSNVLSRDALFYTVIFPFIAFFGAFAFVLYPLRDVIHPTALADKLLAALGPSFLGPVAILRIWSFCLFYVMAELWGSVVISVLFWGFANQITTVDEAKEFYPLFGLGANIALIFSGRTVKYFSNLRRTLGPGIDGWEVSLKGMMSIVVLLGLVITSIYWGVNKFVLNDPSLPKADRKKKKEKPKLGMKESLKVLLSSSSLVQMNIHLSWVISRLQLELQLSQ

SEQ ID NO: 46909 - protein, 171 aa, Zea Mays
MDAGVEKCGDAAAEGGGDLYAVLGLKKECSDADLKVAYRKLAKKWHPDKCSSSSISVKHMEEAKEKFQEIQGAYSVLSDANKRLLYDVGVYDDEDDEDSMQGMGDFIGEMTQMMSQVRPMGRKALRSCSSFLSTCSSLILIQDSAMGLLRAIRFRGKPKVEHAHHGPLLLL

SEQ ID NO: 46910 - protein, 119 aa, Zea Mays
MFQSDIDSGFCNGTAKGHQVQGQAKSRTCSPRSPPTTIVKEAEVSSCNGFNKRGSSAMDSGKPPRPVECGAGQSQAGFCFGVSDTPKPRGPNANRKRNGRKQKLFPKHYVTSEDDTAGS

SEQ ID NO: 46911 - protein, 231 aa, Zea Mays
MAPNIRPGHASPIQDGTDATDYLFTDDLPEDLYSMLYPGTDQFNDSIFLEQTGQEGNNNQTNYMMGIGSYVLPNNFENETPNAELQLDHENNKMDMSNENNDTGITIRRRRATAPPANISLAAGKIKMQVGIKRMVTSNSESINQTMKFTDNSGRRLDLRTDVEHQKKNANNVISAKQSDAANHEAHSNQGYLEGFKRCSSAGFRAYIFVALFVVGVAALVLHYHRSNANL

SEQ ID NO: 46912 - protein, 333 aa, Zea Mays
MLFGTIVGSLADKQGRKRACVTYCISYILSCITKHSPEYRVLMIGRILGGIATSLLFSAFESWLVAEHNKRGFDPQWLSITFSKAIFLGNGLIAIVSGLFANLLAENLGFGPVAPFDAAACFLAIGMAIIMSSWSENYGDPSESKDLMAQFKVAAKAIASDEKIALLGAIQSLFEGSMYTFVFLWTPALSPNEEDIPHGFIFATFMLSSMLGSSIASRLLARKLKVEGYMQIVFSISAVTLVLPVATNILVPTSSVKGGSVSIGGSLQLLGFCTFEACVGIFWPSIMKMRSQYIPEEARSTIMNFFRIPLNLFVCVVLYNARSHSLSQLLCSL

SEQ ID NO: 46913 - protein, 195 aa, Zea Mays
MATTRLLPLLRRRLAAAIAGSPAPYSLRGPSFPAPAAAGLRSLLKAAGASDTATEPQDQQHSETTPPPASVPTPESGLKVRDTSNLKISPRHDLAMIFTCKVCETRSMKMASRDSYENGVVVVRCGGCNNLHLMADRLGWFGEPGSIEDFLATQGEEVKKGSTDTISFTLDDLAGSQVRPCGQKNPGQQDWHLSG

SEQ ID NO: 46914 - protein, 331 aa, Zea Mays
MQSEHNGRTDVDNDHCNGSSQTSIVVTTNMVPEEMMGDCPVDNCNEDSSLCRKVLSGSTEPCPGAKMTGCGNLSEDQVAEGSVLQRVESISPVITDIDDLLVDPYESEAEDEEKSGEQNGQIDVHAEQCFGSSQTIIEVISDMAPDEVMETCSADNREEHSSICRNVLSGSMAPCPGAEIPTSEKMSELAEDSRLQCMEFASPVLANFASKECGETPEPQVLNEIVEDSRLQCIEFNSPAHTILPDKTGAENFASPSFDVVAKDSKPPSLEFTSPAHTVATFQPYADGIPTPKFTASERSFLLSVLELTSPGSRPETSQQPSCKRALLNSL

SEQ ID NO: 46915 - protein, 439 aa, Zea Mays
MRERAFPSRFHWYQVATIQHGTPVHRCLSSTVHPACARSLALSPLALSGASGRPPPRPSVRCPGVASSAPPSGLRRPPRRRAPTSRSHSFDEAEAAENAKSADIDRRILQETKAEQHIHKLLLLGAGESGKSTIFKQIKLLFQTGFDEAELRSYTSVIHANVYQTIKILYEGAKELAQVEPDSSKYVLSPDNQEIGEKLSEIGARLEYPSLNKERVQDVRKLWQDPAIQETYSRGSILQVPDCAQYFMENLDKLSEEDYVPTKEDVLHARVRTNGVVETQFSPLGESKRGGEVYRLYDVGGQRNERRKWIHLFEGVNAVIFCAAISEYDQMLFEDETKNRMMETKELFDWVLKQRCFEVPLSVCEWFKDYQPTAPGKQEVEHAYEFVKKKFEELYFQSSKPDRVDRVFKIYRTTALDQKLVKKTFKLIDESMRRSREGT

SEQ ID NO: 46916 - protein, 72 aa, Zea Mays
MAGMGDMPMRPARPGPPMQHRGPPPMARLRPEPIDREKVSSYTPSPPCSRRQASTVECESRDAPCGGLRSHK

SEQ ID NO: 46917 - protein, 274 aa, Zea Mays
MEVVAAAKQKAKKHIHLFYCSECEELALKVAASSDVIELQSINWRSFDDGFPNLFINKAHDIRGQHVAFLASFSSPAVIFEQVSVIFALPKLFIASFTLVLPFFPTGSFERVEEEGDVATAFTLAHILSMIPKSRGGPTSVVIYDIHALQERFYFGDDVLPCFETGIPLLLQRLRQLPDAENITIAFPDDGAWKRFHKLLQHFPMIVCNKVREGDKRIVRIKEGNPEGRHVVIVDDLVQSGGTLRECQKVLASHGASKATSSLTSGSRTHARTQ

SEQ ID NO: 46918 - protein, 454 aa, Zea Mays
MIGTSTRLPPTQRLVEIKAVAEQFHFKISTLLLHAGKAVEAITWFRKHIRSYARVLGTPEVAFLHWEWFSRQFLVFGELIETTSTTIPDTLSPRFGTADYGLTEWEFQPAYYYQLAATYLREKRYAIECSSSMANLTTEVNGVPESVMPSVYVGQYVRLFEQGDTVSILPLSDTEYTSYALSEAERFQDSYEIIALFRKAYESFQSLGATRIASVCSGGMAMEYYAAGDFSNAKQLFDNVAGLYRKEGWTTLLWENLGYLRECSMKLNSPKDFISYSLEMAALPLFSRSEEENRENKIKSGPAGSPTISRRENIQQEVINVLERNQSSEGTDDGFNNAMEEVTHLDIDQISSLRMVLTTSVAFLDQSVKPGSPLLVSVSLLSHLPSPVVVDQLEVQFNQSDCNFVIHSRQEDSPPFYSNLHDQVVQDTSLTLFTNRWMRLTHEAKSGTDPSASA

SEQ ID NO: 46919 - protein, 186 aa, Zea Mays
MECLEPRGFAFVEFVDPYDASEAQYHMNRQVFFGREIAVVLAAESRKRPEEMRSRTRVRGYSGHEGRRSSYYGRSRSRSPRYRGRPRSRSYSPAPRRGNDYSASPRRQEAHRSSPPRRLPKEHDEDKKRRSYSPASRDDADNVYEKRSPPADSDGSPLHRRSPKEYSGSPPGSRSRSADDSPVASD

SEQ ID NO: 46920 - protein, 305 aa, Zea Mays
MGLSSKPLHRCPIPVADDPNVVVIPKRTPNTIVKKLAYITVDKQDKDPSPLFGGRQNWKQREESFKLNSTMKVHCGFMKNSGADMDIIDVKYIQKCKFVVASGIFDGYDIPHQPSNISRRSQKLFCFLMVVDEVSLDFIQKNTTVKIDSAGGKWVGIWRLLTVHRLPFDEPRRNGKIPKILTHRLFPQAWYSIWIDGKMELIVDPLLILERYLWRGKYTFAVAVHKHHRSIYEEGDAIKRRKRYARPLVDLQMKMYYYEGMEPWSPKKKMPGDVPEGAVLIREHTATTNLFSCLWFNEAHEGALV

SEQ ID NO: 46921 - protein, 367 aa, Zea Mays
MLQPLRVPAWSFAWLELVSHRSFMPKLLMCNSQKGWPFFQRLLVALLKFMEPYLRNAELPEAMDLLYKGTMRVLLVLLHDFPEFLCDYHFSFCDVIPSSCIQMRNVILSAFPRNMRLPDPSTPNLKIDLLAEISIAPRIMSDVDGALKSKQLKTEVDEYLKRPEGSSFLSDLNQKLLLPQNEASVAGTRYNVPLINSLVFYVGIQAVQQLQLNKANPSASVQQINHISPMDIFQIGTATDIFRSLITSLDTEGRYLLLNAIANQLRYPNSHTHYYSFITLYLFSEATQEITQEQITRVLLERLIVNRPHPWGLLITFIELIKNPRYNFWSRSFTHCAPEIEKLFESVARSCGAKVVDEGISVQDGSH

SEQ ID NO: 46922 - protein, 367 aa, Zea Mays
MEVPDILRRCVSRDEAALAVAQKVFKSLYDNTSNTTYVSWLLATLVAIRDVCKLVVKELTSWVIYSDEEKKFNIDIIFGLIRSELLNIGEYNVHLAKLIDGGRNKVATEFAMSLVQALFAHDPVGFTEFQNVLDALSKHTKRPGSPESLQQLIEIARNNVSTTTGFVAVKDEKVKLPKDKKVLATRANKEENTANEITLVDPNQVAVLFSEWCQMCNHVSASDAAYTRFVTQLQQDGLLKGDDISERFFRILTELAVTHSLVSEQIVAPGGSSQQSPQQPHISYFSIDSYAKLVVMVLKYSVEITPNKASILSKILSVTVRSIQKDAEEKKASFNPRPYFRLFINWLYDLTTTDGHHDSSNFQLCLA

SEQ ID NO: 46923 - protein, 184 aa, Zea Mays
MISKLEAAEYKLEELKSNMVALGKEAISAMSAVETQQQWLTLQRLIALVEAERGYHQRVLEILDQLEKEMVSERQKIEAPLTPAADNYMPPPPPSYDEVNGAFASTSVNESVQSVNFFLGEALDSFKAESEFELTLSAGDIVIVRKISSNGWAEGECKGKAGWFPHAYIERREHVLASKVPHIF

SEQ ID NO: 46924 - protein, 81 aa, Zea Mays
MVTTDLLMSGATTKQAKIFINILAEPPDVVADYLVPNVREIPTKQSMKPTYIRFLTGLKAYSRIFSRLAFGARRNKYVTED

SEQ ID NO: 46925 - protein, 161 aa, Zea Mays
MEIITTNTLGLMICCREAINMMRNQPRGGHIFNLDGAGSDGRPTPRFAAYGATKRSVVHLTKSLQMNEVNNVMVHNLSPGMVTTDLLMSGATTKQAKIFINILAEPPDVVADYLVPNVREIPTKQSMKPTYIRFLTGLKAYSRIFSRLAFGARRNKYVTED

SEQ ID NO: 46926 - protein, 718 aa, Zea Mays
MKNPDFAADKALAKDFLSNFTGPHGEPKYLNILQDVANRKIRAVQIELDDLFHYKDVDEEFLQRVTENTRRYIGIFAEAMDEIMPEPTEAYTVDEDQDILMTQRVDEGADGGADGTDPLQKMPPEIKRFFEVYIKAFSKVTPLTIRQVKASNIGQLVKISGIVTRCSDVKPLMQVAVYTCEECGFEIYQEVTARVFMPLIECPSQRCKLNKAKGNLILQLRASKFLKFQELQELAEHVPKGHIPRALTVHLRGELTRKVAPGDVVEMSGIFLPMPYYGFRAMRAGLVADTYLEAMSVTHFKKKYEEYDLKGDEQEQIDRLAEDGDIYSKLARSLAPEIFGHEDVKKALLLLLVGAPHRKLADGMKIRGDLHICMMGDPGVAKSQLLKHIINVAPRGVYTTGRGSSGVGLTAAVQKDPVTNEFVLEGGALVLADMGICAIDEFDKMEESDRTAIHEVMEQQTVSIAKAGITTSLNARTAILAAANPAWGRYDMRRTPAENINLPPALLSRFDLLWLILDRADMETDLEMARHVVHVHQNLESPALGFTPLEPSVLRAYISAARRVIPSVPRELEEYIATAYSSIRQEEAKSNAPTSYTTIRTLLSILRISIALARLRFSETVAQSDVDEALRLMQMSKYSLYSDDRQRSGLDAISDIYSILRDEAARTSSMDVRYAHALNLISRKGYSEAQLKECLEEYASLNVWQIHPSTFDIHFIDA

SEQ ID NO: 46927 - protein, 1048 aa, Zea Mays
MDPDDEPAAQRKAVDLHLPRDTEPASSPACTRRAAPRVLSYCDVPFASASAQRCASFPQRHGELAHARSASFAAWIEGGSASAPAAALERAMSQYGGADGALPEFVGAGGGEGIFRVPLRAAMHPARPPPLEVRPHPLRETQAGAFLRTLACDPRRRQLWAGAESGVRVWGLHEVFRGWWPGAGPRRRGDEEAAPFRESVPVPPALCAAVDGANGMVWTGHRDGRIRAWRMDHAAPAGGYSAGSAPMFKEALSWQAYSRTPVLAIVVTLDAKTRELLKVFGIDGQVDLARPEAPVMPEQFIEEEIKVKPTKRERPQGSFTFFQKSRNALMGAADAVRRVATKGTFVEDNRRTEAVAQAMNGTIWSGCTDGSIIVWDGNGNRLREFHYHSSSVRCIKTLGDKVWVGYASGTIQVVDVEGNLQAGWIGHSCPVIDMAISDSYIFSLAHHGGIRGWPLSSPSSLDDILCYELASRELLYTRLENLKILVGTWNVAQEKASPEALRSWLGGAFFDVGLVVVGLQEVEMGAGVLAMAAAKESVGLEGSANGQWWIDSIGKTLDEGISFHRVGSRQLAGLLIAAWATNDLRPHVGDVDTAAVPCGFGRAIGNKGGVGLRIRVFGRRICFVNNHFAAHQENVSRRNADFDRIYRTMTFTKPQGSAASATAVQLHKAANENQADEGRPDLAEADMVIFLGDLNYRLDGITYDEARDMVSQRSFDWLRERDQLRAEMKAGNVFQGMREGPIRFPPTYKFQRHQSGLSGYDSGEKKRIPAWCDRILYRDSRPVPIAECSLECPVVAAITAYESCMDVTDSDHKPVRCTFSVDIARVDELIRRQEFGKIIESNKKVRSLLRELRSVPDTVVNANNITLENHQEDVILRITNNCETSKAAFEILCEGQTVRKQGGTQSEELLPRASFGFPLWLEVQPSMGLIGPGETAEVVVRHDDFLTQEEYVDGAQRNRWREATRDLEVVLSVTVTGSSSSSAEAVAHRVTVRHCCPAPPAPLPANRRSAAASPRDDVAASDNQSNHLHRSDLASFGSSEVRDLCGGL

SEQ ID NO: 46928 - protein, 1050 aa, Zea Mays
MDPDDEPAAQRKAVDLHLPRDTEPASSPACTRRAAPRVLSYCDVPFASASAQRCASFPQRHGELAHARSASFAAWIEGGSASAPAAALERAMSQYGGADGALPEFVGAGGGEGIFRVPLRAAMHPARPPPLEVRPHPLRETQAGAFLRTLACDPRRRQLWAGAESGVRVWGLHEVFRGWWPGAGPRRRGDEEAAPFRESVPVPPALCAAVDGANGMVWTGHRDGRIRAWRMDHAAPAGGYSAGSAPMFKEALSWQAYSRTPVLAIVVTLDAKTRELLKVFGIDGQVDLARPEAPVMPEQFIEEEIKVKPTKRERPQGSFTFFQKSRNALMGAADAVRRVATKGTFVEDNRRTEAVAQAMNGTIWSGCTDGSIIVWDGNGNRLREFHYHSSSVRCIKTLGDKVWVGYASGTIQVVDVEGNLQAGWIGHSCPVIDMAISDSYIFSLAHHGGIRGWPLSSPSSLDDILCYELASRELLYTRLENLKILVGTWNVAQEKASPEALRSWLGGAFFDVGLVVVGLQEVEMGAGVLAMAAAKESVGLEGSANGQWWIDSIGKTLDEGISFHRVGSRQLAGLLIAAWATNDLRPHVGDVDTAAVPCGFGRAIGNKGGVGLRIRVFGRRICFVNNHFAAHQENVSRRNADFDRIYRTMTFTKPQGSAASATAVQLHKAVSANENQADEGRPDLAEADMVIFLGDLNYRLDGITYDEARDMVSQRSFDWLRERDQLRAEMKAGNVFQGMREGPIRFPPTYKFQRHQSGLSGYDSGEKKRIPAWCDRILYRDSRPVPIAECSLECPVVAAITAYESCMDVTDSDHKPVRCTFSVDIARVDELIRRQEFGKIIESNKKVRSLLRELRSVPDTVVNANNITLENHQEDVILRITNNCETSKAAFEILCEGQTVRKQGGTQSEELLPRASFGFPLWLEVQPSMGLIGPGETAEVVVRHDDFLTQEEYVDGAQRNRWREATRDLEVVLSVTVTGSSSSSAEAVAHRVTVRHCCPAPPAPLPANRRSAAASPRDDVAASDNQSNHLHRSDLASFGSSEVRDLCGGL

SEQ ID NO: 46929 - protein, 998 aa, Zea Mays
MAAPLLPSSVSVLLSLHIALLLVLCSSQVGDSCSSVRDCGTGLYCGNCPAAGRTKLSCIRDLAIQPTSIGLPFNRYSWLVTHNSFSILGEPSRTGVERVTFYNQEDSVTNQLRNGVRGLMLDMYDFNDDVWLCHSLQGQCYNFTAFVPAVDTLKEVEAFLSENPTEIITIFIEDYVHSPMGLSKVFTAADLMKYWYPISEMPTSGKDWPSVTDMVAKNRRLLVFTSDASKEASEGIAYQWSYLLENEPGDPGIVPGSCPNRKESQPLNSRPASLFLQNYFPTIPVQNEACKENSGLPQMAQACYAAAGNRIPNFIAVNFYMRSDGGGVFDVQDRINGRTLCGCDTIAACQALVFIYLDLFPTYCIAESNISFCCELAFSIGMTIYACVLHLDRNFVHINGNRVFSVPSTDGWVTTGPGLGWTQGPALQQPAVQAPGSSSVRVLVDFAFPIPNPAGRRLASPSIFRVSSETSSKSIFRYSALRLPRLLRNPIRRPAAMDPAPQTHPILSYVLSRIPNLSMTKTPTAEFDIEQPPVHTPSPRTPSSAGEFELVERMPGLRHPSVLRAMTRAVADVSAARSALQVLGPRPDHELVDSSRAIVAAAEAGDSRIPAGDVEACRAVVRLDETHDAYEALLHEAESRLERVYRSAMEGTDLDDEAAESVKDQGPVAGPEGGDAAVGEEVVAVLKQAEEGKPVDSVRLVDRQLRHLPEAFGRILGLRVLDVSRNQLEVIPDAIGGLGHLEELFLTANDLVSLPDTIGLLSNLKILNVSSNRLRALPDSISKCRSLVELNVSYNGLTYLPTNIGYDLVNLRKLWIHMNKLRSLPSSVCEMRSLYLLDAHFNELCGLPSLFGKLSGLEILNLSSNFSDLKELPPSFGDLLNLRELDLSNNQIHALPDTFGRLDKLEKLNLEQNPLVMPPEDIVNKGVDAVKEYMSKRWLDILLEEEQRRIAAETPEMSSTPKAWLTRSVSWVTDVSESLAGYLGGNKSEKDAYLDQQF

SEQ ID NO: 46930 - protein, 381 aa, Zea Mays
MSRVNGVTDALSIGPSAGYILFLVIVHILLFFTAYDRSYTLLAIQKVTLLCSACKAPRTDGGDDSQGSSARARQQQHAAVLRSESGEKTLFSGHSSRSPDEMDGNARSAATNQKKPVVADDDLVELLWHNGSVVAQPQAHQRPAPTYDPDRPGTSGLTGEETAAWFPDTLDDALEKDLYTQLWYSTIADAAPQHEGTLPGPTSQPSPSPPVGSSGVESSWAGDICSTFCGSNQVLRTPARIRGKDAALQSELPSNTGAHDGTSSSGGSGSNYGGFGLPSDSVHVQKRKGRCRDDSDSPSEDAECEEASEETKPSRRYGTKRRTRAAEVHNLSERRRRDRINEKMRALQELIPHCNKTDKASILDETIEYLKSLQMQVQICF

SEQ ID NO: 46931 - protein, 779 aa, Zea Mays
MPIGVIFQYIWYQMRSNYDYVCYCCFILVFMWNFSLLSMAYLGALFLYALCVNYGPSYLFWVIILIYTESSITAKDGEWVPVTEFSFLSARNNIEEKHCVAYSWREKLKSLPLPVFDLIRMIVRGLSRYWMSLTHGAESPPYFVQVTMEVSHWPEDGIQPERIESAINRVLAIAHEERCQANLPSSCHCCSKVRIQSIEKSKENCNMALAVLEVVYAAPVECQSKGWHKSLTPAADVEREIHESQKAGFFEEINFPYPIVSVIGGGKREIDLYAYYFGADLAVFFLVAMFYQSILKNKSEFLEVYQLEDQFPKEFVFILMVLFFLIVVDRIIYLWSFATGKVVFYLFNLVLFTYSVTEYAWGTELAHRDIGGLVLRAIYLTKSISLALQALQIRYGIPNKSNLYRQFLTSKVTQVNYLGFRLYRALPFLYELRCVLDWSCTTTSLTMYDWLKLEDIYASLFLVKCDTLLNRANHRQGEKQTKTTKFCSGICLFFVLICVIWAPMLIYSSGNPTNIANPIVDVSVKIDIKALGGRLNLFKTTACEKIPWKYLKAYDDVDPLDYLGAYNVDDIQLICCQPDASTMWLIPPPVQNRFIQSLEEREMLFGKMELILNWDFLRARPKGKELVRYESPIEHCPSVDDVKRVLNGTANSFSIIDAYPRYFRVTGSGEVRRLEAAIDSVSGELLLNNGTPWWSFYDTNPSDLAGCQGLNGPMAIVVSEETPQGIIGETLSKFSIWSLYITFVLAVARFIRLQCSDLRMRIPYENLPSCDRNVGGFLI

SEQ ID NO: 46932 - protein, 348 aa, Zea Mays
MLYAHLHLRRPCSPFAYCPYSKLSVSIPTLNPLPRGPLSRRACACAHRYLRHVASPADEEEAGYGEGSVEGDDLGPASAAAVAATIRRASSASPVRFRCVLGEAVEEPRGEEGLADPSPDFRRLCAEQLEIFRVLISRDAVLSVYVRPAGSYIMDQLELRRVALYPGINNLSEKDTPVLVCNFSISSGLRAAEAFLVKQQMEVIREFGAIVLPMVKHPFVVGFLVVELPELHGGRAMNSYTADTELPPNTFMDKSSDVTPHTAWDIQTYGDQAKGYSQLVNEWKNSALMISRTLAMAYVMDQKAYLLQQTSWQNNVRMSGLVEQIWGPLSSIRALAKMLSFHTKRNPL

SEQ ID NO: 46933 - protein, 244 aa, Zea Mays
MTLIKLAKFEREQATCNSLRRRAGEIHNFANSVLKMSRSQIKLNSEMVKHLGSIHEYLEMMISVHHAFTDRSNALYYVQSLSADLFSLHTRAGGLESSSARDMGHEWSTYQKVEGLKEAIRSAEAAKSDAVREYESIKENNMIEIKRFDKERRHDFIEMLKGFVVTQVSYSDHFANMWTKFDYLCRRVLFNNLLKLHEYTVYTRTALHRLLELRRGREGGESIGFEVVTLDGRTGPLSSRKVSR

SEQ ID NO: 46934 - protein, 546 aa, Zea Mays
MEMVSYLGELVQKQEMTINIAGSASEILIKMVCSGNTAIRKATLDVLVQISSHHPNAKTLVDAGAVPVMVEELFIRKIDDEPMGSKTEAAAVLANIVESGLDPEAITVNKEGHVITSKYSVYNFAHMLKCSMPDTLNLSIVRVLLALTALPKPLATVVSVMKEQDSGQTVIELMGSLTESLVIAAMRLLIALSPQMGHTIAEKLCKAPGQPGRLVKSIGLHGRIMERHAMSATLLAKLPYQHIALNLALINQGAMVTVLAKIEEMQRGETRASRHAKAYMEGLMGVLVRLTTTLYDPDVLLAAMDHNLTSVLTDLVRSAGSDEVQRLAAIGLENLSSQSPNLSQPPTEERRPKKKNILRRLREAHAGRVHDNRRPPAHSRVCPVHRGVCSPSTTFCLVEAGAVEGLLCVLESSENGRVVEAALGALCTLMDDAVDVTSGVAVLAEHDAARHVLRALRQHRDDGRRGGGGAAAGETVTRRCFWAVERFLAHGSERCVREVTSDRALPSLLVGAFHKGDAATKQVAESVLRCLHRMPDYSATYESVEL

SEQ ID NO: 46935 - protein, 599 aa, Zea Mays
MKFNSSSDPIAAEKAGEVLENLEKCPKNIKYMAESGYLDPLQRHLVEGPEDVQMEMVSYLGELVQKQEMTINIAGSASEILIKMVCSGNTAIRKATLDVLVQISSHHPNAKTLVDAGAVPVMVEELFIRKIDDEPMGSKTEAAAVLANIVESGLDPEAITVNKEGHVITSKYSVYNFAHMLKCSMPDTLNLSIVRVLLALTALPKPLATVVSVMKEQDSGQTVIELMGSLTESLVIAAMRLLIALSPQMGHTIAEKLCKAPGQPGRLVKSIGLHGRIMERHAMSATLLAKLPYQHIALNLALINQGAMVTVLAKIEEMQRGETRASRHAKAYMEGLMGVLVRLTTTLYDPDVLLAAMDHNLTSVLTDLVRSAGSDEVQRLAAIGLENLSSQSPNLSQPPTEERRPKKKNILRRLREAHAGRVHDNRRPPAHSRVCPVHRGVCSPSTTFCLVEAGAVEGLLCVLESSENGRVVEAALGALCTLMDDAVDVTSGVAVLAEHDAARHVLRALRQHRDDGRRGGGGAAAGETVTRRCFWAVERFLAHGSERCVREVTSDRALPSLLVGAFHKGDAATKQVAESVLRCLHRMPDYSATYESVEL

SEQ ID NO: 46936 - protein, 642 aa, Zea Mays
MSPPAPAAAAAAAPRTVASAVLRVQMALLDGAAVSSEALIHAAASALLSRADYDDVVTERTISDVCGNPACPNPLSSSSAAATGPRFHIALSEHRVYDLEEARKFCSERCLVASKALAASLPHDRPYGVPLDRLAAVVALVEGAAAGDGSGLGFQGLDGNGKVEDGGRKVEIKEKQVAGAGEVLLQDWVGPSDAIEGYVPRHDRSAHGQKPQVQQNEGAGPELSRTENVDYGAAAPGEDGMTSSPSLVKTHVSSEVIVERMGSLVLGENTRTPRKKKTKTPSKMLEQEEDNSMLSSCISDSIAKQLEDVVLEERKGSQKNKMSKASSRAQKGKSTKRPASTNMEENAMNQYNYLSSSVLVDNHPSSSQSSEKDSTQAYSEQLCEEFSEAVNIGNDETSDEKMRPAWKSSLKVAGSKSSRQSVTWADENGSVLETSKAYESPSSSIKRPEEGIDNSLRRASAEACAAALVEAAEAISSGTAEAEDAVSNAGIIILPDMLNQQEHDNGKNSGGDDDPEIDRDVIKWPKKPVLLDTDLFEVDDSWHDMPPEGFSLTLSAFGTMWAALFGWISSSSLAYVYGLERGSVEELLIANGRECPEKTVLKDGLSLEIRRALDSCVCNAVPVLISNLRLQIPVSKLEITLV

SEQ ID NO: 46937 - protein, 307 aa, Zea Mays
MAKNIMSMDPGEEETERLRLEYITFMKGVVSAPLNFPGTAYWKALKSRASILGVIERKMEDRLEKMSREKSSVEEDDLLGWALKQSNLSKEQILDLLLSLLFAGHETSSMALALAIFFLEGCPKAVQELREEHLLIARRQRLRGASKLSWEDYKEMVFTQCVINETLRLGNVVRFLHRKVIRDVHYNGYDIPRGWKILPVLAAVHLDSSLYEDPSRFNPWRWKSNNAPSSFMPYGGGPRLCAGSELAKLEMAIFLHHLVLNFRWELAEPDQAFVYPFVDFPKGLPIRVQRVADDQGHRSVLTESTRG

SEQ ID NO: 46938 - protein, 376 aa, Zea Mays
MLGWARSPTPPPCATWTYTWRLRRSTPRPASPLAALTASPGSSSSRWPPALPRTRARRPSAGALGCTTDERTRASNTPCSAAAPPRSIANSSRTVTPPQVSTSRLGSASSRNWWITTRRPSGSEDTHMRSCLKYLQITGSLHTQSLVYIVTNEERRPYRLFCSMIGSNKDAILMLEEPDENIFLNIRHTKDFRYITLNVFSDTHSKVYLINASNPLSQMTLVWEGESQVHCIVEHHRGHLYLFTDAAREGVPVDSHYIMQSVVESSGPNSWKNVLVEEPGVILEDVDFCDTHMVLTLRQGRKLRLCSVKLPLTEDIKVPTHLSDLRPIDLPLPSDVCQIVSGPNYDYYSSTMRFTISSPVMPDAVVDYNLLNGQCK

SEQ ID NO: 46939 - protein, 54 aa, Zea Mays
MHGWESVGCFFRYYFLVRQICLTQMKVFLKCGKNNCLINCQRACFQQSFREDGM

SEQ ID NO: 46940 - protein, 249 aa, Zea Mays
MAALVPEWATKEPCLMGIDEAGRGPVLGPMVYGCVYCACSYNNTLATLKFADSKTLKEEQREELFESLKANSSIGWEVDVICPKDLSAKMLKRSKVNLNEISHNSAMGLVRKVLDMGVLLAEVYVDTVGDPEKYRTKLTEKFPGVKFVVAKKADSLYPVVSGASIAAKVTRDRALRNWVFDETALSLHMRTGSGYPGDPDTKQWLEDHKHPVFGFPTLVRFSWGTWSLMKLMKKGLTMEVPSDKSSFQA

SEQ ID NO: 46941 - protein, 221 aa, Zea Mays
MAALVPEWATKEPCLMGIDEAGRGPVLGPMVYGCVYCACSYNNTLATLKFADSKTLKEEQREELFESLKANSSIGWEVDVICPKDLSAKMLKRSKVNLNEISHNSAMGLVRKVLDMGVLLAEVYVDTVGDPEKYRTKLTEKFPGVKFVVAKKADSLYPVVSGASIAAKVTRDRALRNWVFDETALSLHMRTGSGYPGGSLMKLMKKGLTMEVPSDKSSFQA

SEQ ID NO: 46942 - protein, 321 aa, Zea Mays
MARKCSHCGNYGHNSRTCGLGLGLGHREIMLCEGGDDNNGRSGLRLFGVQVRIGGGGGAGSASMKKSYSMDCLQLAAPHACSSLVSSPSSSSLCSSSSPSSLLLSIDDGLQRGAADGYLSDGPHGRAVQERKKADVSKQKQYSGYIPTTPGVPWSEEEHRQFLAGLDKLGKGDWRGIARSYVPTRTPTQVASHAQKFFLRQSSMGKKKRRSSLFDMVPICENSASISDPLDVARHGVASADSERAAVDVDLMNSTTEGDDGRSRDVVSSASGAGTALRFPAAAAQTEPLHPSSSHGHGRGHHCSPLDLELGMSLPAPSVGT

SEQ ID NO: 46943 - protein, 213 aa, Zea Mays
MKQLRLRDTSASLHIIESLLGWSVAADVSKQKQYSGYIPTTPGVPWSEEEHRQFLAGLDKLGKGDWRGIARSYVPTRTPTQVASHAQKFFLRQSSMGKKKRRSSLFDMVPICENSASISDPLDVARHGVASADSERAAVDVDLMNSTTEGDDGRSRDVVSSASGAGTALRFPAAAAQTEPLHPSSSHGHGRGHHCSPLDLELGMSLPAPSVGT

SEQ ID NO: 46944 - protein, 318 aa, Zea Mays
MLAELVHSVADFANQALLAYGLSSSRRAPDALHPYGYSKERFVWSLISAVGIFCLGSGATIVHGVQNLWNSHPPENIHWAALVIGGSFLIEGASLLVAIKAVRKGAEAEGMSIWDYIWRGHDPTSVAVMTEDGAAVTGLAIAAASLVAVQMTGNAMYDPIGSIIVGNLLGMVAIFLIQRNRHALIGRAIDDHDMQRVLEFLKSDPVVDALYDCKSEVIGPGFFRFKAEIDFNGVVLVQNYLERTGRGSWAKQFREAAMSKDDTELLRVMANYGEDVVEALGYEVDRLESEIQKLVPGIKHVDIEAHNPEGLALRAEVL

SEQ ID NO: 46945 - protein, 370 aa, Zea Mays
MRRPLASAALRLRFFSSTSPARLLSPCPFLLSRRDDDGGREASSSPLPPLPPSGSAFSPRPLLFSASAAAGLFSLHGGWWRQALPPAASRPLGSVSDAAPVRLTISRSYSLRVAKGKKKAHFDDEHSHRAVNMALWCNFLVFSLKFGVWISTSSHVMLAELVHSVADFANQALLAYGLSSSRRAPDALHPYGYSKERFVWSLISAVGIFCLGSGATIVHGVQNLWNSHPPENIHWAALVIGGSFLIEGASLLVAIKAVRKGAEAEGMSIWDYIWRGHDPTSVAVMTEDGAAVTGLAIAAASLVAVQMTGNAMYDPIGSIIVGNLLGMVAIFLIQRNRHALIGRAIDDHDMQRVLEFLKSDPMLFMIAKVR

SEQ ID NO: 46946 - protein, 431 aa, Zea Mays
MRRPLASAALRLRFFSSTSPARLLSPCPFLLSRRDDDGGREASSSPLPPLPPSGSAFSPRPLLFSASAAAGLFSLHGGWWRQALPPAASRPLGSVSDAAPVRLTISRSYSLRVAKGKKKAHFDDEHSHRAVNMALWCNFLVFSLKFGVWISTSSHVMLAELVHSVADFANQALLAYGLSSSRRAPDALHPYGYSKERFVWSLISAVGIFCLGSGATIVHGVQNLWNSHPPENIHWAALVIGGSFLIEGASLLVAIKAVRKGAEAEGMSIWDYIWRGHDPTSVAVMTEDGAAVTGLAIAAASLVAVQMTGNAMYDPIGSIIVGNLLGMVAIFLIQRNRHALIGRAIDDHDMQRVLEFLKSDPVVDALYDCKSEVIGPGFFRFKAEIDFNGVVLVQNYLERTGRGSWAKQNDVKEAYYVLVSSCYKRADLVQL

SEQ ID NO: 46947 - protein, 231 aa, Zea Mays
MALMRSFNRQGSTHKDGLRIGLKVGKPVENGGVVEYFFGSDGNEPLHFDKFSKILKELHDEIIQLEFSHYDVKSSKTIPAKDFALSMVASADMNHINKLLDRVDSLVKEPDLKDIRITFEEFKAFADLRRRLEPLSMAIFAYGKLNGLLTKEDLKRAAQHVCGVDLTDRVVDIIFHVFDTNQDGNLSPEEFLRALQRRETDIREPTIPGPLGFLSCWFSGRKCSSLKHVVI

SEQ ID NO: 46948 - protein, 269 aa, Zea Mays
MESPPLTAEAIAFTEKKMDMTLEDIIKMSKKKNPGGKNPPRQPIKKRPFQNANTNKGNGKVQRFMESRSTIRQGVLAQRRSNLGGSQFAATKQAAKKAAAMPMRSGAVYWKKPSASTLVQRRSVGDAFQNTKLLEAICNQRKGREAQVKRFSADEQGKQTDNSSCLVQTGSSSRSRNWMMNRIREGEIKGGEEIGRRGPGREMRGWSGGLPGGGGGRWQFVRVGGAQPLTVAAARLGLLCSCAGAGVTKYSEGHTGKLSALQSILLIPR

SEQ ID NO: 46949 - protein, 347 aa, Zea Mays
MRPHAVGMGGGGVGRRKAGAAAAAASREWLVVPASGPARVEEAGKHAVMARTGLPARDLRVLDPLLSYPSTILGRERAIVVNLERVKALITAAEVLLPNTKDPAFARFVRDLQTRVLASSSDQAAELTDMEGESPIVASPFPVPSSSKGHEMEMTKKTAAVVPEMTSSSSMPNLAVAKDGNTKVLPFEFRALEVCLESACRSLEEETSTLELEAYPALDELTSKISTLNLERVRQIKSRLVAISGRVQKVRDELEHLLDDEMDMAEMYLTEKLTQQEISEASSRAEVDDASLTEDDRDEDYRSEPDGSNGSVIGYKPNIEELEMLLEAYFVQIDGTLNKLSHKIISI

SEQ ID NO: 46950 - protein, 314 aa, Zea Mays
MEGESPIVASPFPVPSSSKGHEMEMTKKTAAVVPEMTSSSSMPNLAVAKDGNTKVLPFEFRALEVCLESACRSLEEETSTLELEAYPALDELTSKISTLNLERVRQIKSRLVAISGRVQKVRDELEHLLDDEMDMAEMYLTEKLTQQEISEASSRAEVDDASLTEDDRDEDYRSEPDGSNGSVIGYKPNIEELEMLLEAYFVQIDGTLNKLSHLREYVDDTEDYINIMLDDKQNQLLQMGVMLSTATVVITAGVAVVGLFGMNIGISLYADPTTEEETRAANRKFWETTFGTVAGCVILYIIAMGWGKRSGLLQ

SEQ ID NO: 46951 - protein, 319 aa, Zea Mays
MEASATGAADPHFPIYISSDEEDGHAYFIESYSPEEVQIQQTILLSLYTSRAQTAAACSASSSYPTGASSTPKAGTSSTPKETPIDHKRKRKLKLEDDTNDSKMKRSTRNRFNCAICFEMVLAAEKFVVSHCPHAFCNSCIGRYVAGKVADNVAVIGCPDPACETGFIEMDLCRDIIPPELFDRWSVVLCEELLGDDKFYCPFKDCSALLLNDDSAKIRETECPHCHRLFCARCHVPWHDGIECKEFRKLGDDEKGENDLMLKKLADKEKWQRCPKCRMYVSRKSGCLLINCSTSVTIVLHQWIGKLTIVRIASTREVD

SEQ ID NO: 46952 - protein, 305 aa, Zea Mays
MGGYENGESTAAAALADGGVILGVDGGTTNTVCVCLPAAMTPPESPATVPVLARAVAGCSNRNSVGENAALETLEQVMTQALALANTDRSAVRAVCLAVSGVNHPSDQLRMLEWIRDLFPDNAKNYVENDAVAALASGTMGKLHGCVLIAGTGCIAYGVTEDGKVARAAGAGPVLGDWGRWTYADPSWARIAALVPVVVSSAEDGDEVANKILHDSVQELADTVIAVVQRLRLCGEDGKDMFPLVLVGGVLEGNKKWDISGEVIKCISKVFPGTDPIWPEVEPAIGAALLAWSHHHKGLKLENGS

SEQ ID NO: 46953 - protein, 370 aa, Zea Mays
MPARLFPSGDPTMFEEFWRGTGAAAEIVIPGWQTMSYFSDVGNVCWFLEPGLDQEVRRVHRLVGNAAVDGYHVVVGTGSTQLFMAALYALSPPAGAGAGAAPMSVVSTAPYYSSYPAVTDFLRSGLFRWAGDASSFRGDTYIELVCSPNNPDGAIREAVLSSAGSGVAVHDLAYYWPQYTAITKRADHDVMLFTVSKSTGHAGTRIGWALVKDRDVARKMAKFIELNTIGVSKDSQLRAAKVLRAVSDAYELPEAGDARRRRLFDYGRRKMVERWRMLRGAAAASGIFSLSEETSALCNFTKEMAVTNPAFAWLRCDREDVEDCAGFLRAHRILTRSGDQFGADPRYVRVSMLDRDDAYDIFVKRLSSLR

SEQ ID NO: 46954 - protein, 329 aa, Zea Mays
MPTELPRRNARRNRTVVTCQVRSLSTGPPQLEYSPRAPRRAPPLPSRAPTPSGVLQPAPLPTGLLFPFRLGFPIPFPSRALPKFESPASRALAPPRRRCPPSGRPRTPWTKPPPPPPPPPPPPRASVPPPRAPRSAPPAPSPAAAAAPRTLTLAPAARAPRTTPPPRPPARATASPSRAPSRTPPRSPRPWPRSPPPPPRPRRPARGVAARAPSRSSGARPTRSRCSRALPPSRTAPALRRASRTWASCSTPSGTPSHRISTRPRCTTSSSASRASSSTPCRVTPAPRTSTGCATWAQPSGAPSSRALKRTLPRRPPMQTTLTGIGRGP

SEQ ID NO: 46955 - protein, 364 aa, Zea Mays
MMQGAAAGGTSVSGASWARATRGRAAVLASRHVGVGASSSDYYYNHFGPRGATAAPLLRARGGGRLRPLPLLSGSGKNGEVAKAAAAAASVPADDASAAAVTTDGGGIAATAQLGAMIVAWYLLNIYFNIYNKQVLGALPLPLPYTITAFQLAFGSLLIFLMWATRLHPAPRLSAAQVPSLPVLGSLVPIVGGVALASFTEVSFNWTGFWSAMASNLTNQSRNVLSKKLLAGDKDVMDDINLFSVITVLSFLLSCPLMIFAEGIKFTPGYLQSTGLNLQELCVRAALAGLCFHGYQKLSYLILSRVSPVTHSVANCVKRVVVIVSSVLFFSTPISPVNALGTGAALAGVFLYSRLTRTKKPKDA

SEQ ID NO: 46956 - protein, 335 aa, Zea Mays
MAVLMAGGCHVLAPKFDARSAFAAIQEHGVTCFITVPAIMADLLSYARKEEMAPGCGRTTVTKILNGGGGLPLHLVNAASQSFPRAAIFSAYGMTEACSSLTFMALTTPKLQEPEPEPETQPCGHHGGVCVGKPAPHVEIRIGMDDDGTTAGSSPTGNVLTRGLHTMVGYWANGKADSSECDRNGWLDTGDTGWVDEEGNLWLLGRHKGRIKTGGENVYPEEVESVLSQHPGVARAVVVGVPDSRLGERVVACVSVKDGWNWVDARAEHEHRGGGEEVSPQILHGHCRTKELSRFKVPRSYYQWRQPFPVTTTGKIRREELKRELLAAIRLPSNL

SEQ ID NO: 46957 - protein, 850 aa, Zea Mays
MTSTEIQAFFRGRSWLFRCKIPTTAVSSALFKPCNSWRKTRSRSSGHSLQSLRTSYPTSQMNSSDQFQMASVAAIVDYYGWKMVTAVYIDDDYGRNGVSSLDDELAKRRLKILYKAAIRPGARKSEMAAVLVKAAMMESRVFVLHARDDSGIDVFSLAYNLSMTSGGYVWIATDWLTACLDSAPRLGTGLLNTMQGVLTLRQHTENTSRKKALVSRWSEVAKEEEEEDGGSLPNTYGLYAYDTVWMLAHGLDAFFNSGGNISFSPDPRLRAVVGGALNLDALSVFDEGTLLLERIRNVSFMGATGPVKLDSDGNLIQPAYDIVNVVGSGLRTIGYWSNYSGLSVVSPETLYKKPFNVSANQELHAAIWPGETVTRPRGWVFPNNGNELRIGVPDRVSYRQFISVDNQTGTVGGFCIDVFAAAINLLQYPVTYRFVPFGNGRENPSYTELIGRILTNEFDAVVGDVAIVTNRTKVVDFTQPYVASGLVILTAVKTQSSDAWAFLQPFTIRMWSVTGVFFLVVGAVIWLLEHRINDDFRGPPAKQVITVFWFSFSTLFFAHREDTRSTLGRVVVIIWLFVVLIIQSSYTASLTSILTVQQLTSPIKGIDSLIASDEPIGFQVGSFAESYLVHELGVSPSRLKALGTPDEYKNALELGPRKGGVVAIVDERPYVEVFLVQHDKFAIVGAEFTKSGWGFAFPRDSPLAVDLSTAILALSENGDLQRIHDKWLSNGPSPQSTTDLEPERLRVQSFSALFLLCGAACLAALAIHGCILARQYSLHVASQPPDAVATGADGAIRRSSRSSIRSFLSFADRREAQCPRGSCKDPAAALGGSSSSGVSSFTSSNASVSR

SEQ ID NO: 46958 - protein, 988 aa, Zea Mays
MKSMLQVWGIFCCVCSCALGQNTSARPSVVNVGALFTFHSTIGRAAKVAIAAAVNDINRDPSVLQGTKLVVQMQDTNYSGFISIVQALQFMEKDTIAIIGPQSSVVAHVISHVANELQVPLMSFAATDPTLTPLQYPFFVRTVHSDQFQMASVAAIVDYYGWKMVTAVYIDDDYGRNGVSSLDDELAKRRLKILYKAAIRPGARKSEMAAVLVKAAMMESRVFVLHARDDSGIDVFSLAYNLSMTSGGYVWIATDWLTACLDSAPRLGTGLLNTMQGVLTLRQHTENTSRKKALVSRWSEVAKEEEEEDGGSLPNTYGLYAYDTVWMLAHGLDAFFNSGGNISFSPDPRLRAVVGGALNLDALSVFDEGTLLLERIRNVSFMGATGPVKLDSDGNLIQPAYDIVNVVGSGLRTIGYWSNYSGLSVVSPETLYKKPFNVSANQELHAAIWPGETVTRPRGWVFPNNGNELRIGVPDRVSYRQFISVDNQTGTVGGFCIDVFAAAINLLQYPVTYRFVPFGNGRENPSYTELIGRILTNEFDAVVGDVAIVTNRTKVVDFTQPYVASGLVILTAVKTQSSDAWAFLQPFTIRMWSVTGVFFLVVGAVIWLLEHRINDDFRGPPAKQVITVFWFSFSTLFFAHREDTRSTLGRVVVIIWLFVVLIIQSSYTASLTSILTVQQLTSPIKGIDSLIASDEPIGFQVGSFAESYLVHELGVSPSRLKALGTPDEYKNALELGPRKGGVVAIVDERPYVEVFLVQHDKFAIVGAEFTKSGWGFVSPSRFTFTSHAYVTFFFGLLITVLVRRSRVTRLWPWTCRRRSWRCRRTATCRGSTTSGCRTGRRPSPRPTWSRNGCGCRASRRCSSSAARRASRRWPSTAASWPGSTPSTWRPSRRTRWPRGPTAPSAAPAAAASGRSCPSRTAGRRSARGGAARTPPRRWEGPPAAASAASRQATPAYRGSRVRWTGIRTARYVDASAQIVHTTVRARRP

SEQ ID NO: 46959 - protein, 1382 aa, Zea Mays
MSSGTVAASDPGGGETKLVAGDDVTISEAAGDMPAFAADLKVEEKATLTMDVAHERGDMAVSDPLYATESAGMVGTEGHGDEPVEDVDAVNGEDGGEEGTQEAGAGGLLTETERKPVLVVDVPAAAGSAAPEHAEAESNKVEENHVNAEPGRKNNESDHGVVPSDKEIQNNVPGDMEESSEEHEGDGAPVVDQPNNTSEMLPQTGEQFPDSGNSPDSNLEAASLGNVDQGARYRLPPLDKGRFQVADLVWGKVKSHPWWPGEIFDPTDASELALKHRKKGSHLVAYFGDSTFAWCDESQLKPFVTNYSQMEKQSSSDGFVGSVNNALEELSRRVLSGLSCSCLAEELADNGMSYTVDNAGLKDGVTCSAVNRPEILNCFSPENLLNYIKELALFPGQGGDLLELVIACSQLTSFYRSKGCPELASFQTSDAWVEDDLDGIDTLSTQNVMVEEPVINEVQPTQDKPKRGRGRPRKQKAGHDQVVMEKRSTSNQVNDTSYNEKKRNLKSFEDSEKSSAPTGGGSFKIGECIRRAASQLTGSSSIMKAQNEPTVYNNAAEGENGEFDVSSDDAGDELTVEKRAKRRRLHINHAADPRELLSQLCLVATEPMNGYSFSAMIIGYFNDYRNYIVSTTTEANIVDKGTSRRGRKRKEVIPSPEVETTDHMQDSYWSGLSLYNHPVHDLKRESPTTRPRRKRRSSRHAYIPLSELGEPVPKKQIQVMERSIIHVDEKMVDELKPTALVLTFGRSASIPSELDLVKMFSLYGPLKERGTKVHRETNTVKVVFKKRVDAERAFSAAGKYSTFGPSLRSYRLVSMPLSPETQSANNPENHGLEIPGLNMSEAPKDSMEVDLVQKTDKVKVTGELSSEEVETVRQTCLVEAADSTFVSEVDRLEKAGNIDAELIVHVNQIGEGAEAASVSEESSQQVGDIEQAYTQKAASVSDLPTEIETLHSDAIIKELPQKAPDNMQTDIATAPKQSHNPGDNAVFEAVTEVPSTAQDHSEDDVGDEVPEEHTVFPVLQSQTPGEKLVGQSETEQKVGPEDPKSQAENLTVEPVVQGAVEQVEIELESKTTVEVSCEQGYSIEQTVNMEAVIEASGGQLEVGRRISEDESMADANIEHSMVMVDETVEAKVVPLEESTENNAATIGVVEETAEGETKEEAPDEKGKIENNEDADKLAGETRAGEITVEAPDEKTEIKADADTPAGETKECEITVEAPDEKIANKGIVEPIIREITEDQTAAGEPDEEATTTEETVEDVKVLDDKSTADGKPVENATVATNEDSTTVENTLKDAMVAPPGTNTTNAEETALGATVKALDEDALAVEKTIEDTSVEASDVQAGRCNAELKVKREERKESLCIYVQCRCDEHLKKKETNYSLWV

SEQ ID NO: 46960 - protein, 1345 aa, Zea Mays
MSSGTVAASDPGGGETKLVAGDDVTISEAAGDMPAFAADLKVEEKATLTMDVAHERGDMAVSDPLYATESAGMVGTEGHGDEPVEDVDAVNGEDGGEEGTQEAGAGGLLTETERKPVLVVDVPAAAGSAAPEHAEAESNKVEENHVNAEPGRKNNESDHGVVPSDKEIQNNVPGDMEESSEEHEGDGAPVVDQPNNTSEMLPQTGEQFPDSGNSPDSNLEAASLGNVDQGARYRLPPLDKGRFQVADLVWGKVKSHPWWPGEIFDPTDASELALKHRKKGSHLVAYFGDSTFAWCDESQLKPFVTNYSQMEKQSSSDGFVGSVNNALEELSRRVLSGLSCSCLAEELADNGMSYTVDNAGLKDGVTCSAVNRPEILNCFSPENLLNYIKELALFPGQGGDLLELVIACSQLTSFYRSKGCPELASFQTSDAWVEDDLDGIDTLSTQNVMVEEPVINEVQPTQDKPKRGRGRPRKQKAGHDQVVMEKRSTSNQVNDTSYNEKKRNLKSFEDSEKSSAPTGGGSFKIGECIRRAASQLTGSSSIMKAQNEPTVYNNAAEGENGEFDVSSDDAGDELTVEKRAKRRRLHINHAADPRELLSQLCLVATEPMNGYSFSAMIIGYFNDYRNYIVSTTTEANIVDKGTSRRGRKRKEVIPSPEVETTDHMQDSYWSGLSLYNHPVHDLKRESPTTRPRRKRRSSRHAYIPLSELGEPVPKKQIQVMERSIIHVDEKMVDELKPTALVLTFGRSASIPSELDLVKMFSLYGPLKERGTKVHRETNTVKVVFKKRVDAERAFSAAGKYSTFGPSLRSYRLVSMPLSPETQSANNPENHGLEIPGLNMSEAPKDSMEVDLVQKTDKVKVTGELSSEEVETVRQTCLVEAADSTFVSEVDRLEKAGNIDAELIVHVNQIGEGAEAASVSEESSQQVGDIEQAYTQKAASVSDLPTEIETLHSDAIIKELPQKAPDNMQTDIATAPKQSHNPGDNAVFEAVTEVPSTAQDHSEDDVGDEVPEEHTVFPVLQSQTPGEKLVGQSETEQKVGPEDPKSQAENLTVEPVVQGAVEQVEIELESKTTVEVSCEQGYSIEQTVNMEAVIEASGGQLEVGRRISEDESMADANIEHSMVMVDETVEAKVVPLEESTENNAATIGVVEETAEGETKEEAPDEKGKIENNEDADKLAGETRAGEITVEAPDEKTEIKADADTPAGETKECEITVEAPDEKIANKGIVEPIIREITEDQTAAGEPDEEATTTEETVEDVKVLDDKSTADGKPVENATVATNEDSTTVENTLKDAMVAPPGTNTTNAEETALGATVKALDEDALAVEKTIEDTSVEASDVQAGRCK

SEQ ID NO: 46961 - protein, 215 aa, Zea Mays
MTGGDVAPLGSQAVTKIHQLFDWAKKSNRGLLLFIDEADAFLCERNKTYMSEAQRSALNALLFRTGDQSKDIVLALATNRPGDLDSAVADRIDEVLEFPLPGEDERFKLLKLYLDKYVIRAGDKREKSWLRFFRRQPQKIVVKGVTDDLIREAAAKTQGFSGREIAKMMASVQAAVYGSKDCELTPGLFREVVDYKVAEHQQRRRLAGEEPKQDA

SEQ ID NO: 46962 - protein, 218 aa, Zea Mays
MGIRRARRFLFLATSVFGLFQCRGDLSASDCAACVSRAMSSWPGVCGASVAARVQLAGCLALYEVSGFPQVSGVQMLFKTCGTGSGGGGGDFEMRRDTAFSALEGGVATSSGGFVATSYQAVYAMAQCEGDLSTGDCSQCVTQAVQHVEVECGGAPSGQVYLDKCYISYSYYPHGVPHGGGTGADSKDCSHCARGSRRPGFRGHLLAFRQEPGQEEGW

SEQ ID NO: 46963 - protein, 309 aa, Zea Mays
MDRAALTVGPGMDMPIMHDGDRYELVRDIGSGNFGVARLMRNRADGQLVAVKYIERGEKIDENVQREIINHRSLRHPNIIRFKEVILTPTHLAIVMEYASGGELFERICNAGRFSEDEARFFFQQLISGVSYCHSMQVCHRDLKLENTLLDGSTAPRLKICDFGYSKSSVLHSQPKSTVGTPAYIAPEVLLKKEYDGKVADVWSCGVTLYVMLRITIPEIRNHPWFLKNLPADLMDDSTMSKQYEEPEQPMQSMDEIMQILAEATIPAAGPHGLNQFLNDGLDLDDDMDDLDSDTDLDLESSGEIVYAI

SEQ ID NO: 46964 - protein, 252 aa, Zea Mays
MSCSKNCRCSDLCTNRPFRKDKKIKIVKTKRCGWGAVALEPLERGDFVIEYVGEVIDDATCEQRLWDIRRRGDKNFYMCEISKDFTIDATFKGNVSRFLNHSCEPNCKLEKWQVDGETRVGVFASRSIEVGEPLTYDYRFVHFGEKVKCHCEAVNCQGYLGSQIKNPIQSILATVAPQVQLREYSPMHHEAPRLKPINHLLPWTNCIEVSFNLRSKRKIDRLCWARKKKRTSLVPSSTSMPASPSEVPAADF

SEQ ID NO: 46965 - protein, 576 aa, Zea Mays
MPDLSTSYLPPFPELSLDAGALAVDHAGNAAAAASADAASAYASSSASVGSGVDDLVIPAECRWKGHVRTFDMAGAGAVTTCPAARRGGGKKLSLIPSLEPARTQASASAPTLEERVSEWAAKKAAAGVPTHHCVLPFLTGAPMAVECRLCSKIIYVGEEIKCSVKKCPQMFHLKCVAEDTSNFTVESFRCPQHGCMVCKQKMFFWRCGRCTVAAHTKCAPWPVVHLKNDQGSAICWRHPSDWLLQNKEVFCRLPLPYVNEDLNIDSIIRDYAEAVYKPPPYTSIRRNVYLIKKKRTGVRVDIGCTNCRADSTCKEDCECRGLSMSCSKNCRCSDLCTNRPFRKDKKIKIVKTKRCGWGAVALEPLERGDFVIEYVGEVIDDATCEQRLWDIRRRGDKNFYMCEISKDFTIDATFKGNVSRFLNHSCEPNCKLEKWQVDGETRVGVFASRSIEVGEPLTYDYRFVHFGEKVKCHCEAVNCQGYLGSQIKNPIQSILATVAPQVQLREYSPMHHEAPRLKPINHLLPWTNCIEVSFNLRSKRKIDRLCWARKKKRTSLVPSSTSMPASPSEVPAADF

SEQ ID NO: 46966 - protein, 389 aa, Zea Mays
MGKIHFEKIQMKPGKPLTFAEITTQDTPKPSKTVLAFGLPGNPVSCIVCFNLFVVPAIRLLSGWSNPHLQRVHVRISHPLRADPHRTEFHRAAIRWVLDDGSGRPGFVAESTGHQASSRLLSMKSANALLEIPSTGQILAAGTSIQAILISDIITSSDKLPTPSNPYPSRGPSAKSISADVSQIASPQDAEVKVAILTVSDTVSSGAGPDRSGPRAVSVVNSSSEKLGGATVVATAVVPDEVDKIKGILVQWSDIDHVNLILTLGGTGFTPRDVTPEATKMVIQKEAPGLTFVMLQESLKITPFAMLSRATAGIRGSTLIINMPGNPNAVAECLEALLPALKHALKQIKGDKREKHPRHTPHAAAAPVDQWERSFRAASSGSGGCSCDP

SEQ ID NO: 46967 - protein, 450 aa, Zea Mays
MLLACAIQQKCKVVDLGIAEDTEESLKEHMDAALRSNADIIITSGGVSMGDRDLVKPCLAKMGKIHFEKIQMKPGKPLTFAEITTQDTPKPSKTVLAFGLPGNPVSCIVCFNLFVVPAIRLLSGWSNPHLQRVHVRISHPLRADPHRTEFHRAAIRWVLDDGSGRPGFVAESTGHQASSRLLSMKSANALLEIPSTGQILAAGTSIQAILISDIITSSDKLPTPSNPYPSRGPSAKSISADVSQIASPQDAEVKVAILTVSDTVSSGAGPDRSGPRAVSVVNSSSEKLGGATVVATAVVPDEVDKIKGILVQWSDIDHVNLILTLGGTGFTPRDVTPEATKMVIQKEAPGLTFVMLQESLKITPFAMLSRATAGIRGSTLIINMPGNPNAVAECLEALLPALKHALKQIKGDKREKHPRHTPHAAAAPVDQWERSFRAASSGSGGCSCDP

SEQ ID NO: 46968 - protein, 368 aa, Zea Mays
MSMLAIKHGAINLGQGFPNFDGPDFVKEAAIQAINAGKNQYARGFGVPELNSAIAERFLKDSGLQVDPDKEVTVTSGCTEAIAATILGLINPGDEVILFAPFYDSYEATLSMAGANVKAITLRAPDFAVPLEELEAAVSKDTKAIMINTPHNPTGKMFTREELESIAALCKENDVLLFSDEVYDKLVFEADHISMASIPGMYERTVTMNSLGKTFSLTGWKIGWAIAPPHLTWGLRQAHSFLTFATCTPMQAAAAAALRAPDSYYDELKRDYSAKKAILLEGLEAAGFIVYPSSGTYYIMVDHTPFGFDSDVEFCEYLIREVGVCAIPPSVFYLDPEEGKKLVRFTFSKDEGTLRAAVERLKAKLRRK

SEQ ID NO: 46969 - protein, 216 aa, Zea Mays
MAIKSLFSTPQNNLRIFVNGSLAFGGMGGGADSVHPADTLKCLEDLSKISGLKLPDFTELLSETIFRSEVLGNLLATQKLDDHDIEGVIHLYYNIISQPCLVCKNLTDVELLRKYTFLHSLPLDKSLKIVRDFLISATAKDCSLMISFRPRENGSTDSEYDSVFLESVKRTYEYKAYFLDLDVKPLDKMEHYFKLDQRIVNFYTRNGGGLAISKGQ

SEQ ID NO: 46970 - protein, 95 aa, Zea Mays
MMCPLMTTLGQQKCLSLSLERNRRHWKGLTLVPLLHTHMSWRPKHRAGSRVHQLSLHTVFPQRQLFRRHTQLPSSHWIFSLRDLQRRSLNGLRGL

SEQ ID NO: 46971 - protein, 135 aa, Zea Mays
MRTAYDVSINDDSWPTEVFELVTGEKSKTLERLDPGATASHTYVLETKTQGRFQGSPAIITYRVPTKTALQEAYSTPIFPLDILAERPPEKKFEWAKRLVMKYGSLVSVVSFVGLFIYLVASPSKSSSKASKKRR

SEQ ID NO: 46972 - protein, 224 aa, Zea Mays
MGCLFFPDEESEGARRDPFPTSAAPRLVARTLATKPEAREQPWRGASRSSPSSYSASPPPPPRPTRPSSSRTRKFRSPAPSRASSASLSPSTSTTRDPRLPMMCPLMTTLGQQKCLSLSLERNRRHWKGLTLVPLLHTHMSWRPKHRAGSRVHQLSLHTVFPQRQLFRSPPPHFISTVKCLQVVQLIAISRPSWFGPITINRPSRSARTTSKSSDLKTLLLYII

SEQ ID NO: 46973 - protein, 128 aa, Zea Mays
MGWIPELILCSDAMRTKETLKILQEHVQGLSEAVVHFIPSFYSIAAMDGQTAEHLQKAICEYSSDEILTVMCMGHNKGWEEAASMFSGDSVALETCNAALLEAAGKSWVEAFSVAGLGGWKLHGIVKP

SEQ ID NO: 46974 - protein, 215 aa, Zea Mays
MSSTQPIGHSYRKMRAPAPPVPALLSRCSSPPSSAPLRLLTSSRTPAAFRPPPAVARSVSVSVDAPAAATEPAVLGAPSSMPRRRLILLRHGESTAGGRSTRDHDRPLSKAGRADAISVSNKLQQMGWIPELILCSDAMRTKETLKILQEHVQGLSEAVVHFIPSFYSIAAMDGQTAEHLQKAICEYSSDEILTVSAWGIIKDGKKQPLCFLVIQ

SEQ ID NO: 46975 - protein, 203 aa, Zea Mays
MSSTQPIGHSYRKMRAPAPPVPALLSRCSSPPSSAPLRLLTSSRTPAAFRPPPAVARSVSVSVDAPAAATEPAVLGAPSSMPRRRLILLRHGESTAGGRSTRDHDRPLSKAGRADAISVSNKLQQMGWIPELILCSDAMRTKETLKILQEHVQGLSEAVVHFIPSFYSIAAMDGQTAEHLQKAICEYSSDEILTVIITQVHGA

SEQ ID NO: 46976 - protein, 263 aa, Zea Mays
MGWWWWCLPVAALLAAILPSSDATLSPAGINYEVVALMAIKTELEDPYNVLDNWDINSVDPCSWRMVTCSSDGYVSALGLPSQTLSGKLSPGIGNLTRLQSVLLQNNGISGPIPGTIGRLGMLKTLDMSDNQLTGTIPSSLGKLKNLNYLKLNNNSLSGVLPDSLASIDGFALVDLSFNNLSGPLPKISARTFIIAGNPMICGNNSGDKCSSVSLDPLSYPPDDLKTTTRHWKEPSYCYNMWSNCWFSSFYRLCSRYTSLVAS

SEQ ID NO: 46977 - protein, 420 aa, Zea Mays
MVAASPCALAVAPLAYATAISSLASKGILLKGGHVLDALSSCQSIAFDKTGTLTTGKLMCKAIEPIHGHLGVKSGRSNPSCCTPNCESEALAVAAAMEKGTTHPIGRAVLDHSVGKELPVVAVESFECLPGRGVVATLSGVKVRENENELSEASIGSVDYISSLYRSNGESEQIRAAAKSSAYGPEFVQAALSVDKKVTLFHFEDEPRSGVCEVISTLREKAKLRIMMLTGDHESSAQRVAKAVCIEEVHFSLKPEDKLNKVKAVSREGGGGLIMVGDGINDAPALAAATVGMVLAQRASATAVAVADVLLLQDNICGVPFCIAKARQTTSLVKQSVALALTCIVFAALPSVLGFLPLWLTVLLHEGGTLLVCLNSIRALNTPTWSLVDDIRKLVDSLRNYFPSKFNSSPSSYTANTAPL

SEQ ID NO: 46978 - protein, 141 aa, Zea Mays
MARAFGDFCLKDHGVISVPDVSYHHITEKDEFVVLATDGVWDVLSNDEVVNTVSRVTSRASAARFLVESAHRAWRTRFPTSKVDDCAAVCLFLNTNEASESSSSLANNLADAVQVSTAQCSKTIQVSAPIDGNEVSVVETR

SEQ ID NO: 46979 - protein, 210 aa, Zea Mays
MGKHRQQPQRVPTAARGGGLGLHLQRLHLHAAEPQLPPPPPLLRRGRGRVLPGPRRRLRRGRCPPPPHGSRRWLPQCRGVPGVLLSVQPRRRRRRCRALRRRPRRARGRHVCRRRRVRHLGWRGHRPAEEAHDQEPRVRRAVPRAQAGVRPRAGDEGAAAAAGEREPPRQVRRAAGVRGGGGADGEEDPAEDAVRAVLRTLTGDESKQTM

SEQ ID NO: 46980 - protein, 101 aa, Zea Mays
MSSAPPHVRSCSKDSCTSPASLGGDHHRSMDLGEWRSRIYSTGVDEVCFPVLEKRRRNRSSCTAESSPPSRKGITPLHPRSLNRSGLSLHVHVSLCSLGSY

SEQ ID NO: 46981 - protein, 132 aa, Zea Mays
MSSAPPHVRSCSKDSCTSPASLGGDHHRSMDLGEWRSRIYSTGVDEVCFPVLEKRRRNRSSCTAESSPPSRKGITPLHPRSLNRSGKPWPFPQIFPLSFHPLASITPPTVLLLFHLLSVESMLHLTVNSGNH

SEQ ID NO: 46982 - protein, 336 aa, Zea Mays
MWWVGNLLLSQQFGGQHTARLCVPEKISSLRLRQRRVDRRRREALNRLVDLKGIVRVFYRARPLVHTNSLHAQSPVTVEQERITVRAAGIKEFGADRVFGQESTQGLYACLSLFLTHLFQCVVHADDMFEEVKPILRSTLDGHNICILAYGQTGTGKTYTMEGTDSNKLGVMPRTIQELFSRASEDGSCAYSFSMSMLEIYLGSLRDLLAALRQPLYREQSAKQRHVASAYWQRKVCGWHLEGRILITVISKTSRNNALLYRRENPLSLRCSFRSLKARNNRSSVVAPKDYCETYIQFLRDKRIVPDSDPPSPKDVDLLYQFIDKSKRLMVVTGQE

SEQ ID NO: 46983 - protein, 260 aa, Zea Mays
MFLPCMLQSKQFYHSMLVGVLLVLFFDSGDGVSHTVPIYEGYALPHAILRLDLAGRDLTDSLMKILTERGYSFTTSAEREIVRDIKEKLAYIALDYEQELETAKNSSSVEKSYELPDGQVITIGAERFRCPEVLFQPSMIGMEAAGIHETTYNSIMKCDVDIRKDLYGNIVLSGGSTMFPGIADRMSKEITSLAPSSMKIKVVAPPERKYSVWIGGSILASLSTFQQMWISKEEYDESGPAIVHRKSRSLHRLRGSTVSG

SEQ ID NO: 46984 - protein, 248 aa, Zea Mays
MFLPCMLQSKQFYHSMLVGVLLVLFFDSGDGVSHTVPIYEGYALPHAILRLDLAGRDLTDSLMKILTERGYSFTTSAEREIVRDIKEKLAYIALDYEQELETAKNSSSVEKSYELPDGQVITIGAERFRCPEVLFQPSMIGMEAAGIHETTYNSIMKCDVDIRKDLYGNIVLSGGSTMFPGIADRMSKEITSLAPSSMKIKVVAPPERKYSVWIGGSILASLSTFQQMWISKEEYDESGPAIVHRKCF

SEQ ID NO: 46985 - protein, 601 aa, Zea Mays
MSKVKNNNGYHGVTEPISLSGPTEKDLMQTAEVEKYLSDAGLYERQDEAILREEVLGKLDQTVKAWIKKATRISGYGEQFVHEANAKIFTFGSYRLGVHGPGADIDTLCVGPRHATRNEYFFRWLHDILAEMPEVSELHPVPDAHVPVLGFKINGVSIDLLYANLAHAVIPEDLDLSQDSILHNVDEQTVRSLNGCRVTDQILRLVPNILSFRTTLRFIRCWGKRRGVYSNVMGFLGGINWAILVGRICQLYPNASPSMLISRFFRVYSKWKWPNPVMLCHIEEGYLGLPVWDPRRNYRDRGHQMPIITPAYPCMNSSYNVSVSTRYVMVQEFTQAFEICQAIDEGKADWDALFEPYPFFESYKNYLEVNITARNEDDLRNWKGWVESRLRTLVLKIERYSHEMILAHPYPKDFSDKSRPLHIFYFMGLWRKQTTQAQETEQFDIRGIVNEFKNTICAYQHRKEGMDIEVSHVKRKEIPLFVFPGGVRPSRTSRTTHKNSRAIPTRDVSADDQVGNLLGVASCSDAQHVPCKGSYMKQPEPDFAGGFQLPGSISLLPPSLPNKVVLNGSANFHAESIESEHPEHYQEIQKGNVQAVLQTTC

SEQ ID NO: 46986 - protein, 215 aa, Zea Mays
MSAATEVAPVQQPSHPAAAGWLGLGLLFQILLRIIRSSWAQLLSFVRLRHRLLPVTASPELAFVQLPPEAPADASPPPLRRLMVVLDLDETLVCAYESSSLPSTMRTHAVEAGLHRFDMEEYREHVKDLSCLSKDFQRIVLVDNNPYSFLLQPLNGIPCVTFSAGQPVDDQLMGTMFPLLKHLALQKDVRPALYEAFHMPEWFQRQGIPQIEQAV

SEQ ID NO: 46987 - protein, 172 aa, Zea Mays
MSAATEVAPVQQPSHPAAAGWLGLGLLFQILLRIIRSSWAQLLSFVRLRHRLLPVTASPELAFVQLPPEAPADASPPPLRRLMVVLDLDETLVCAYESSSLPSTMRTHAVEAGLHRFDMECVLSEKDTEGRQRINRVTVFERPGLHEFLQRTSEFADLVLFTAGLEGNTESM

SEQ ID NO: 46988 - protein, 194 aa, Zea Mays
MSAATEVAPVQQPSHPAAAGWLGLGLLFQILLRIIRSSWAQLLSFVRLRHRLLPVTASPELAFVQLPPEAPADASPPPLRRLMVVLDLDETLVCAYESSSLPSTMRTHAVEAGLHRFDMECVLSEKDTEGRQRINRVTVFERPGLHEFLQRTSEFADLVLFTAGLEGYAKPLVDRIDAHNRFTHRLYRPSTVNT

SEQ ID NO: 46989 - protein, 365 aa, Zea Mays
MGALTLAPQECSQRVVVRMGVGLAAVVVEPLQLLCHQVRRLNVKSCDPPMPGTGIAVAVKRLNHEGLQGHREWLAEVNYLGQFCHPNLVKLIGYCLEDEHRLLVYEFMPRGNMENHLFRRGSYFQPLSWNLRMKVALGAAKGLAYLHSAEAKVIYRDFKTSNILLDTDYSAKLSDFGLAKDGPVGEKSHVSTRVMGTYGYAAPEYLSTGHLTAKSDIYSFGVVLLEMLSGRRAIDKNRPQGEHNLVEWARPYLTHKRKIFRILDTRLEGQYNLNGAQTIAALALECLSYEAKMRPTMDAVVAILEELQGSGEAEKKLQEPKAGTKQAPAAVSASMSSSRKPRRKSLGDTKETVGVPDPKPLAHSR

SEQ ID NO: 46990 - protein, 179 aa, Zea Mays
MAPDIDWGKNIRIILDVGCKSAGFGIALLEKDVITLSLGLTNDQTDLAQVALERGIPATVGSLGSRRLPFPSGAFDAIHCGECNIPWHSNGGKLLLEINRILRPGGYFIISSRSADLESEEGISASMTALCWNAIAYNSDDVSEAGVKIFQRPVSNEVYDLRAKKDPPFCKEEQNKASA

SEQ ID NO: 46991 - protein, 441 aa, Zea Mays
MSAPGFDDPQLPPLRLRASCGGAIASPRSCSSSDTFVSMPSTPSGMLNPCGLWSPPPRAPSEASSSEMEFGTAREYDTTDAFFTDNWLYDNHLLHSTESDGSEGEDKFIVGPDVSLQRTETPELGDGCGLRHVHRDCNADSHGCTQAKNACSSPPCGCCYNEELLRDSCSAVSVYGRYHTMEDHTEGLDECVAEAFLFRLNSLVDASEQLVDFKKGEDDGLNLSALEKELQMLTPYLADEDALESTGLEDDVRGNTNLDVCMVTNEENANGKEFLKDSYCILPSPESAVPFDVYGVEDFKTEDTDLQNPTARKFQEDPKIDPALSKFQQEYEVFDLKIFHRKNRTGFEENKEFPIVMDSVIAGRYRINEYLGSAAFSKVVRAHDLRTGVDVCLKIIKNDKDFFDQSLDEIKLLKFVNKYDPDDDHHILRLYDYFYYQPYCS

SEQ ID NO: 46992 - protein, 450 aa, Zea Mays
MGSIFLAILLIMKNTGKSNKRLHFLRVSGPLTAVVLGTIFVKIFHPPAISVVGEIPQGLPRFSIPQGFEHLMSLVPTAVLITGVAILESVGIAKALAAKNGYELDSNKELFGLGIANICGSFFSAYPATGSFSRSAVNHESGAKTGLSGIIMGIIIGGALLFMTPLFTDIPQCALAAIVISAVTGLVDYEEAIFLWAIDKKDFFLWAITFITTLVFGIEIGVLVGVAFSLAFVIHESANPHIAVLGRLPGTTVYRNTLQYPEAYTYNGIVVVRIDAPIYFANISYIKDRLREYELNLPSSNKGLDVGRVYFVILEMSPVTYIDSSAVQALKDLHQEYKARHIQIAIANPNRQVYLLLSRSGIIDLVGAGWCFVRVHDAVQVCLQHVQNSSSNALKLPVQASGVLTDSVSTPKPEQQHQKQHGLFKDLWKAQDSNADAGGEVQPLLRQNLV

SEQ ID NO: 46993 - protein, 491 aa, Zea Mays
MEGSSYASRSYSELAAAASGGGRTLRVIPLRHPLGSLSTSSTSPWWRAVVGRARGMGPLDWAEAALPCVAWTRNYRWKQDLQADLASGITVGVMLVPQAMSYAKLAGLHPIYGLYTGFVPLFIYAIFGSSRQLAVGPVALVSLLVSNVLGGIVNSSSKLYTELAILLAFMVGILECLMGLLRLGWLIRFISHSVISGFTTASAIVIGLSQIKYFLGYNVTRSSKIIPLIESIIAGADEFSWPPFVMGSIFLAILLIMKNTGKSNKRLHFLRVSGPLTAVVLGTIFVKIFHPPAISVVGEIPQGLPRFSIPQGFEHLMSLVPTAVLITGVAILESVGIAKALAAKNGYELDSNKELFGLGIANICGSFFSAYPATGSFSRSAVNHESGAKTGLSGIIMGIIIGGALLFMTPLFTDIPQCALAAIVISAVTGLVDYEEAIFLWAIDKKDFFLWAITFITTLVFGIEIGVLVGVAFSLAFVIHESANPHIGIVG

SEQ ID NO: 46994 - protein, 249 aa, Zea Mays
MSRMPFLIVSCVRRFRCSHHLGILFLRAWFVAFVVLVMALSRLLVLGSSVSLLWSLLLVFLLVVMILLCVHKSSHCRALLVFVDDMIITGNDTHYIVKARLSEQFLMSDLGYLRYFLGIEVSSTPKGFVSFRENTFRGFLIWLLLLINALLRLSWSSTFVFVALIANILWFLLAIVTMLVVWSTFVLLALISRILCIFRVSLYLLPLSFLQPHAYCDAIWLVILRSSVFFLPIVFFLVVPLLLGRLKSS

SEQ ID NO: 46995 - protein, 1170 aa, Zea Mays
MSVPCCLHWHCHREESCRDMPPRVQPANMYIPWCSSWIVFVDVRADYGICFATVMEGTINACIAGFALLSYVLGLLVSQPQIPLTMNVIFPKISGESAYSLMALLGANIMAHNFYIHSSVVQGQKKSSAVGLGALFHDHLFSILFIFTGIFMVNYVLMNSAAAESTNTLLITFQDVVELMNQIFVNPLAPTIFLVVLLFSSHIISLTSAIGSQVISHHLFGINLPLSGHRLLLKVFAIVPTLYWAKVAGAEGIYQLLIICQIIQAMLLPSSVVPLFRVASSRSIMGAHRVSLHLEILVFLAFLLMLFSNIIFVAEMLFGDSGWMNNLKGYTGSPVVLPYTVLVLVALISVAFSLYLAVTPLRSGSHEAESHEWSVHSQRELLNTSQEREDVKVDNVTYEEDQRSDVVPSPRDVPDSHPELALDYIDTSDTAVESDHDSQQSTAYASTAPETCSSPSFTREESKSVVAVNWPEPLEKVPTSTVMEESTVENVVSRITTERDVLVETDVVSGKDKEDIRTLESEKSIVDSTPYVSDDGPPSLTFSRGKGSDAGNGSGSLSRLSGLGRAARRQLAATLDEFWGHLFDYHGKLTQEASTKKFGILLGIDLRTPSTSVRTDKQAAEILKSPLVRDSMRGAAFLSSSVDMMSPKNETSNLELAYGLQRGPGMGLSSWSQGMQLPNTQLQSSSNSLLEQSARLNSNFSSSYSDNNQFYQPATIHGYQLTSYLKQMNASPSLYSSMPLDPQRLPKSSVSAVPNYADSMMHARNHNLLASLGGTTTQLPATSRVGSMMPERSYYDPSSVDGNENAGSPAYSKKYHSSPDMSGIIAASRAALLNEAKLGAAIGPQSYLSRLAAERSQYASSTARPAAPLAFDELSPPKLQSDIFSAQSSMRPSARSLWAKQPFEQLFGMSSAELSKGDFNLPGRSGGVAKDDFSYKESETKLLQSLRLCIMKLLKLEGSGWLFKQNGGCDEDLIDRVAAAEKLLMQGTAENQLLLHGGDLQQHSSDQAGIQYMRTLPNCGEDCVWRASLVVSFGVWCVRRVLDMSLVESRPELWGKYTYVLNRLQGILDPAFSKPRGALTICTCLQKDTRVRNSPPHSGLTAMGPVPTPIRGAFTTAGVVLEMIKDVEAAVSGRKGRSGTAAGDVAFPKGKENLASVLKRYKRRLASKGQ

SEQ ID NO: 46996 - protein, 1273 aa, Zea Mays
MDAPDVQQSMGYKESRGGMPKFFHALGPALLISMGYIDLGKWVAAVEAGSCFGFDLVLLALLFNFTAIVCQYLAACIGTVTGKNLAEICHQEYNQPTCIFLGVQAGLSLLTSELTMIFGIALGFNLLFEYDDLITGICFATVVPNLLPYAISHLGKKMEGTINACIAGFALLSYVLGLLVSQPQIPLTMNVIFPKISGESAYSLMALLGANIMAHNFYIHSSVVQGQKKSSAVGLGALFHDHLFSILFIFTGIFMVNYVLMNSAAAESTNTLLITFQDVVELMNQIFVNPLAPTIFLVVLLFSSHIISLTSAIGSQVISHHLFGINLPLSGHRLLLKVFAIVPTLYWAKVAGAEGIYQLLIICQIIQAMLLPSSVVPLFRVASSRSIMGAHRVSLHLEILVFLAFLLMLFSNIIFVAEMLFGDSGWMNNLKGYTGSPVVLPYTVLVLVALISVAFSLYLAVTPLRSGSHEAESHEWSVHSQRELLNTSQEREDVKVDNVTYEEDQRSDVVPSPRDVPDSHPELALDYIDTSDTAVESDHDSQQSTAYASTAPETCSSPSFTREESKSVVAVNWPEPLEKVPTSTVMEESTVENVVSRITTERDVLVETDVVSGKDKEDIRTLESEKSIVDSTPYVSDDGPPSLTFSRGKGSDAGNGSGSLSRLSGLGRAARRQLAATLDEFWGHLFDYHGKLTQEASTKKFGILLGIDLRTPSTSVRTDKQAAEILKSPLVRDSMRGAAFLSSSVDMMSPKNETSNLELAYGLQRGPGMGLSSWSQGMQLPNTQLQSSSNSLLEQSARLNSNFSSSYSDNNQFYQPATIHGYQLTSYLKQMNASPSLYSSMPLDPQRLPKSSVSAVPNYADSMMHARNHNLLASLGGTTTQLPATSRVGSMMPERSYYDPSSVDGNENAGSPAYSKKYHSSPDMSGIIAASRAALLNEAKLGAAIGPQSYLSRLAAERSQYASSTARPAAPLAFDELSPPKLQSDIFSAQSSMRPSARSLWAKQPFEQLFGMSSAELSKGDFNLPGRSGGVAKDDFSYKESETKLLQSLRLCIMKLLKLEGSGWLFKQNGGCDEDLIDRVAAAEKLLMQGTAENQLLLHGGDLQQHSSDQAGIQYMRTLPNCGEDCVWRASLVVSFGVWCVRRVLDMSLVESRPELWGKYTYVLNRLQGILDPAFSKPRGALTICTCLQKDTRVRNSPPHSGLTAMGPVPTPIRGAFTTAGVVLEMIKDVEAAVSGRKGRSGTAAGDVAFPKGKENLASVLKRYKRRLASKGQ

SEQ ID NO: 46997 - protein, 239 aa, Zea Mays
MPVNPPPPPPGSSSLAPAGASYFPLPFHLQQHQPPPPQVPPPMAASSYQQYQQQLHQAHQLFQRDAQTITPEALQSVKAALATSDVLDPVAAANARLSDPSTSKKPIPRRAAGQSWEDPTLTEWPENDYRLFCGDLGNEVNDDVLSKAFSRFPSFNMARVVRDKRTGKTKGYGFESMLGTALLNCVRVTGRRGQMLRLWKDKRIMSRGSLKFPRRLFFTSRDTKALPRVNASSCYYTFC

SEQ ID NO: 46998 - protein, 1148 aa, Zea Mays
MGLGCPISQIWTRHRQDNLSMAGVIVSSSAARTEKSQEQDRLTRTRVDERQSARGCDRGRGQQVGEEEYGEGREDERDVRRWRNRWCVHDVKRPRGRAIATVRVGPGLVSDEYGKGAHAPTPSAENGVVRSWRHKGREKISRMATEMVATEARTIIIVRRGTGGATEHSAEVRPSEGVAGAVVRGRSSDQRGVSMADNEGTLDAVLKEAVDLENIPLEEVFENLRCSRGGLTSEQAQQRLQLFGPNKLEEKEESKFLKFLGFMWNPLSWVMEAAAIMAIALANGGGKPPDWQDFVGIITLLLINSTISFIEENNAGNAAAALMARLAPKAKVLRDGRWAEEEAAVLVPGDVISIKLGDIIPADARLLDGDPLKIDQSSLTGESLPVTKGPGDGAYSGSTVKQGEIEAVVIATGVHTFFGKAAHLVDSTNQVGHFQKVLTAIGNFCICSIAVGMFVEIIVMYPIQHRAYRPGIDNLLVLLIGGIPIAMPTVLSVTMAIGSHRLAQQGAITKRMTAIEEMAGMDVLCSDKTGTLTLNKLTVDKNLIEVFEREVTQDQVILMAARASRIENQDAIDTAIVGMLADPKEARAGIQEVHFLPFNPTDKRTALTYIDSDGKMYRVSKGAPEQILNLVYNKLEIERRVHAVIDKFAERGLRSLAVAYQVVPDGRKESPGGPWHFVALMPLFDPPRHDSAETIRRALNLGVSVKMITGDQLAIGKETGRRLGMGTNMYPSSALLGQNKDESIAVLPVDDLIEKADGFAGVFPEHKYEIVKRLQARKHICGMTGDGVNDAPALKKADIGIAVADATDAARSASDIVLTEPGLSVIISAVLTSRAIFQRMKNYTIYAVSITIRIVLGFMLLALIWEFDFPPFMVLIIAILNDGTIMTISKDRVKPSPLPDSWKLAEIFTTGIVLGGYLAVMTVIFFWAAYKTNFFPRIFHVESLEKTAQDDYQKLASAVYLQVSTISQALIFVTRSRSWSFAERPGFLLVFAFLVAQLIATLVAVYADWGFTSIEGIGWGWAGVVWLYNLVFYFPLDLLKFLIRYALSGKAWDLVIEQRIAFTRKKDFGKEERALKWAHAQRTLHGLQPPDAKLFPDRVNELNQMAEEAKRRAEIARLRELHTLKGHVESVVKLKGLDIDTIQQSYTV

SEQ ID NO: 46999 - protein, 162 aa, Zea Mays
MSAGLLFGNVTGTIIVSVGGTLAAAVAFLIARYFARERILKLVEGNKKFLAIDKAIGENGFKVVTLLRLSPLLPFSLGNYLYGLTSVKFLPYVLGSWLGMLPGSWAYVSAGAFGRALIQDESEIGLGGNEQLWTLGVGLLFTAIAAAYVTRLAKDAVKEIDD

SEQ ID NO: 47000 - protein, 491 aa, Zea Mays
MGFWDWLCRYLRVRKVSLMDVSKKYETDYRILHAITTGHSWYGQWGFKLNKGSFGITSEEYLKAMDNLSLTPLSHFFPHSRYPRNQLQDTISFYRSLSKQPLTTIRELFLYVLGLATSKSSNMHYGSMHKEHSHTHVQDTWPDEEIKRATEIAIKVLRAVEKTRWVTMRILKAAMYHSIGSPQLVDYCLKTLGTRTIDGMMVAVRCNSDTNTLEYRLMDEPIVLPNVSMPTQDHLRRDIKFLHDALLHPHTMHPYKPENCYEHGKRSAMVLLDCKQFTKHYDLEQEFLPQNPSMLHLWCQVEVLDQVGDPPCIPPELLTLPQTATVSDLKVEATRTFRGIYLMLHSFVADRLVDCGTASESTQLKLLFGANGTVRVQGRCASGERRVGIYRMERGVDKWTVRCSCGAKDDDGERMLSCDSCHVWQHTRCVGISDFDQVPKKYVCNSCKLLNKRKSRGHGPVYNIGPSKRFKIGAGGFSSRWGIFLRPPADM

SEQ ID NO: 47001 - protein, 73 aa, Zea Mays
MELYLYLSSTEPESDEDGVLRRGGNLVVKFLENEDISGFGKFCKVKFKKVSLLRPKATRPSSREIYMICEGLR

SEQ ID NO: 47002 - protein, 528 aa, Zea Mays
MGTERKRKVSLFDVVDETSVSGKLGRAASNGAAATAAGTNPSVNRWNGRPYTARYFEILEKRRTLPVWQQKEEFLRRLRDNQTLILVGETGSGKTTQIPQFVLETEGLGNRSMVACTQPRRVAAMSVSRRVAEEMDVTIGEEVGYSIRFEDCSSHKTVLKYLTDGMLLREAMADPLLEKYKVIVLDEAHERTLATDVLFGLLKEVLKNRPDLKLVVMSATLEAEKFQGYFSDAPLMKVPGRLHPVEIFYTQEPERDYLEAAIRTVVQIHMCEPAGDILVFLTGEEEIEDACRKINKEINNMGDQVGPVKVVPLYSTLPPAMQQKIFEPAPAPLKERGPPGRKIVVSTNIAETSLTIDGIVYVIDPGFSKQKVYNPRIRVESLLVSPISKASAHQRAGRAGRTQPGKCFRLYTEKSFNEDLQPQTYPEILRSNLANTVLTLKKLGIDDLVHFDFMDPPAPETLMRALEVLNYLAALDDEGNLTQLGEMMSEFPLDPQMSKMLVISPKYNCSNEILSISAMLSVSPLCIC

SEQ ID NO: 47003 - protein, 711 aa, Zea Mays
MAHEREPLLQQRQTGVGNACGAKDSSSAPAPSAAALPSLARTVLKFLMWAVFLTWAAGIFLYPTKPVQAVFRKWVGLTRDSMFGIAGGIFLTFSAPILIIALLAYVYISFFPSEHVVEKRKLRSLSFRLWTFPVLVDGPFGVVSAVEFIGIVLFIVFVVYSMTYYAVEAVSLVSKFDIPSMTESELILDVIGLRLGAVGLFCMLFLFLPVARGSVLLRLIDIPFEHATRYHVWLGHLTMALFTLHGLFYVISWSMQGRLREELRQWKEIGVANLPGVISLAAGLLMWVTSLHPVRKRFFELFFYTHQLYVVFVVFLAFHVGDFIFSICAGAVFLFMLDRFLRFWQSRAKVDIISAACRPCGTVELVFSKPASLHYNALSFIFIQVRELSFLQWHPFSVSSSPMDGRYHMSVLIKVLGTWTEKLRSIITDVQEKNGGDSELQCGRMTACVEGPYGHESPYHLMYENLVLVAGGIGISPFLAILSDIIHRIEEGKQCMPKNVLVLWSVKKSKELSLLSAVDAQTISSSVSDRLQLDIQAFVTQEPHPPLEDGIVGDDQKVPGMFVKNGTAMSGLVGTGDNFWAAMYFLASTLGFLLAYALVQVYYVKPHNVVAWWYLGLLFMLCMVAGVALPGGLVVLLWHLSEKQRLEDDKWDASQSPRAEQTGPLAAAGGGDDDAAPSVSLAALRTTRYGCRPNFEARPGELNDRPICLWT

SEQ ID NO: 47004 - protein, 89 aa, Zea Mays
MGSGDPAADPLSSFLRHPGAFSFSRRVAMARDATATSVPALRPWIVDLLPLLVVLLIAAHVLALARHGRVQAARAEQEALRGRRPRPDA

SEQ ID NO: 47005 - protein, 224 aa, Zea Mays
MYVPPPPTGGAGEQPRVYQVWRGSNEFFLQGRFIFGPDVRSVFLTMFLIIAPVVVFCVFVARHLINDFPDSWGISVMVVVVVFTVYDLTLLLCTSGRDPGIIPRNTHPPEPESIDGINDTGVQTPQQFRLPRTKEVVVNGISVRVKYCDTCMLYRPPRCSHCSICNNCVERFDHHCPWVGQCIGLRNYRFFYMFVSSTTLLCLQHTRISGIAMTGAIIHITEVL

SEQ ID NO: 47006 - protein, 235 aa, Zea Mays
MEITLLHDESDAGSTSLLPPLLSYGPRSMVPIQVPSSSDLESILSPDPVCSDLQLKEINYNAAAMDESTELLHLILGGNDEGYNTTTELQVWDVLDFYVSENFSALQFDSLMGFTNEVSTSYNDCMNLVDMVEWPVARLSLDDTPKLSNSDDAVLADNVTTDPDETSLYLRTKPTDSETESSSDAGDVETEYLDQKLLSRCLPDLMDVDSPNHLLKTPVRTKHVTLVLDLDGKQY

SEQ ID NO: 47007 - protein, 1337 aa, Zea Mays
MSTEDEKLLKEAKKLPWDERLQHKNWKVRNDANIDLAALCDSITDPKDARLREFGPLFRKTVADSNAPVQEKALDALLAFQRAADADASRYAKEVCDSIVAKCLTGRPKTVEKAQAAFLLWVELEASEVFLEAMEKAVKNKVAKAVVPAIDVMFQALSEFGTKVVPPKKILKMLPELFDHPDQNVRASSKGLTLELCRWIGKDPVKSILFEKMRDTMKKELEAELANVSGLAKPTRKIRSEQEKELEEESVPETSGANTSEEAATDAPVEIDEYDLVDPVDILTPLEKSGFWDGVKATKWSERRDAVAELTKLGSAKKIAPGDFHEICRTLKKLITDVNLAVSVEATQAIGNLARGLRAQFSGNARMLLPVLLEKLKEKKPTMTEALSQTLQAMHKSGCFTLIDVIEDVRAAVKNKVPLVRSLTLTWVAFCIETSNKATVLKLHKEYVPICMECLNDGTPEVRDASFSVLTAIAKMVGMKPLERSLEKLDDVRKKKLSDMIGSSSDSVLSSGTAPITTSGAATSARGVADSMSMKRSAASMLSGKKPVQAAAATKKSGPSKSTAAKKTDGGSQSKASAALEIEDVEPAEMSFEEIEERLKSVVKAETISQLKSSVWKERLEAIGVLKQEVENLTELDKSAELLIRLLCAVPGWSEKNVQVQQQVIEVNTYIASTVNKFPKRCVVLCLLGVSERVADIKTRTSAMKCLTAFCEAVGPGFVFERLYKIMKEHKNPKVLSEGILWMVSAVEDFGISNLKLKDMIDFCKDTGLQSSAAVTRNATIKLIGMLHKFVGPDIKGFLSDVKPALLSALDTEYEKNPFEGAAAAAPKRTVRVLDTASSVSAGLFDGLPREDISAKITPTLLKNLGSPDWKVRLESIDAVTKIVEEANKRIQPTGTADLFSALRGRLYDSNKNLVMATLSTIGGLAYAMGPSVEKSSKGILADVLKCLGDNKKHMRECTLTALDSWIAAAQLDKMVPYIIVSLGDQKTGSEGRKDLFDWLSKHVSKMSDPSEALPLLKPSASSLMDKSSEVRKAAESFMNEILRICGQEVVGRNLKDLPSPTLAIVSERLKLSTVHEGFSESVKMVTTSMSLPSKAGLKNNKHGLNDRGSNVGKLVSQRGLPARASVTMVSTQDPAQSQALFNIKDSNKEERERRVLVRKFKFEEPRREQIDELKIDLFKHFREDVSLRLWNSDFKRQIDGIELLQKALPSSWKEVIELLDILLRWFVLRFCESNTTCLLKVLDFLPELFDILKDQSYMLTEAEAAIFLPCLIEKSGHNIEKVREKMGELIKQMINIYSLPKLIPYILEGLRSKNNRTRIECVDIVGYFIDHHGTEH

SEQ ID NO: 47008 - protein, 390 aa, Zea Mays
MDLPRPQAPCCRRPADLRPAPCCIDAPRPSDLRGCAPAAGALWKPSASYPRAAVPPASVRLHDISVRGEEDEQKEMLQQMTDGVRAMLGSIGDGAINISAYDTAWVALVKSLEGGNGPQFPSSLRWIVENQLPDGSWGDEEFFLVYDRMINTLACVIALESWEIHADMCEKGLSFIRENLWRLEHSGSDDWMVVSFEITFPQLLEMARDLGLDVPCDEPSLRAIYARRDAKLARIPKELLHASPTTLLLSIEGMPGLDWERLLKLQCSDGSFMSSPAPTAYALMQTGDTKCLEFLNGIVSKFSGGVPFTYPVDLFEHLWVVDRIERLGIGRHFTGEIKECLEYVHRYWGDEGLPATRDGPVSDVDDTAMGFRLLRLHGYDVSPCGLSRRG

SEQ ID NO: 47009 - protein, 381 aa, Zea Mays
MPGMLAAQFTALSLSQSPSPQSSLRLAIRPSLAARARFVAPRTAASAAAVSAKPAAVSSPLIEDRTVVRIGLPSKGRMAEQTLSLLKIPNLEVWFQRPKDIVRKLQSGDLDLGVVGFDIVSEYGNGNEDLVVVHDALEFGHCRLSLAVPKEGIFENIHTMEDLLKMTEWTEERPLRVVTGFGYLGNKFLREKGFKHVRFLSADGALESYPPMGMADAIVDLVSSGTTLRENNLKEIDGGVVLESQATLVASRKSLHKRKGVLEVTHELLERLEAHLRATAELMVTANMRGNSAEEVAERVLSQTSIWGLQGPTVSPVYRRRDGKVDVEYYAINVVVPQKLLYKSIQQLRSIGGSGVLVTKLTYIFDEETPRWRNLLSELGL

SEQ ID NO: 47010 - protein, 101 aa, Zea Mays
MRMEVASSCWNKGPPRSGRKAHSCWRNPRPKSIAVAPPSILGSWHPLRQRPPSSPLPTLTPASDGQRTMQARDPSLPTPPPTMPSPSPHSRPSPHPLAPPH

SEQ ID NO: 47011 - protein, 226 aa, Zea Mays
MVVNMEWGNFWSSHLPRTPYDISLDDETQNRNDQGFEKMISGIYLGEIARLVLHRMALESDVFGDAADNLSTPFTLSTPLLAAIRKDDSPDLSEVRRILQDHLKIPDTPLKTRRLVVKVCDIVTRRAARLAAAGIVGILKKLGRDGSGIASSGRTRGQLRRTVVAIEGGLYEGYPEFREYLDEALVEILGEEVARTVTLEVTVDGSGAGAALLAAVHSSNRQQGSI

SEQ ID NO: 47012 - protein, 491 aa, Zea Mays
MGRVGLGVAAGCAAATCAIAAALVARRAAARSRWRRAVALLREFEDGCATPPPRLRQVVDAMVVEMHAGLASDGGSKLKMLLTFVDALPAGNEEGTYYSIDLGGTNFRVLKVEVGDGSVVTRRKVELPIPEELIKGTIEELFNFVAVTLKEFVEAEDGKDEQRALGFTFSFPVRQTSVSSGSLIRWTKGFLIEDVVGKDVAQCLNEALARSGLNVNDTVGTLALGHYHDEDTVAAVIIGAGTNACYIERTDAIIKCQGLLTNSGGMVVNMEWGNFWSSHLPRTPYDISLDDETQNRNDQGFEKMISGIYLGEIARLVLHRMALESDVFGDAADNLSTPFTLSTPLLAAIRKDDSPDLSEVRRILQDHLKIPDTPLKTRRLVVKVCDIVTRRAARLAAAGIVGILKKLGRDGSGIASSGRTRGQLRRTVVAIEGGLYEGYPEFREYLDEALVEILGEEVARTVTLEVTVDGSGAGAALLAAVHSSNRQQGSI

SEQ ID NO: 47013 - protein, 204 aa, Zea Mays
MHKMIIDAGAYPSPLGYGGFPKSVCTSVNECMCHGIPDSRELQDGDIINIDVTVYLNGYHGDTSKTFLCGEVDEASKRLVKVTEECLLRGISTCKHGTSFKKIGRRISEHAERNGFGVVECFVGHGVGRVFHSEPIIYHQRNNRPGQMIEGQTFTIEPIISMGSIECDMWDDGWTAVTTDGSLAAQFEHTILITRTGAEILTKC

SEQ ID NO: 47014 - protein, 218 aa, Zea Mays
MASEAAIARAQCLLRFRRWSPLPLLPLPSPPATTRAASCRRSVRMASSLFKQWLRNLQSEKGVLTYGRLSLTRVLIQGVDMFGKRVGFLKFKADIVDEETKTKVEEETGIKLNIEDMVDLTALLDPATGGRMLPSPGGCDEEIGLFLYRGRVDEETIRSLQGKETGLRDHGELIKLRVVPYSELWRSTGDAKALSAIALYEMAKREGLLPQPTPSANL

SEQ ID NO: 47015 - protein, 55 aa, Zea Mays
MAELVGPRVYSCCNCRNNVCLHDDILSKAFQALAKLKNLISWCSAKGTKFACSSP

SEQ ID NO: 47016 - protein, 516 aa, Zea Mays
MTPSPSSRLEHELEKPPHPHGLDAHFMRRLVSRSWEESRLLWRLAFPALLTEVFQFSIGFVTTAFVGHLGEVELAAVSVVENILDSSAYGVLFGMGSALDTLSGQAVGAGQLDRLGTYTQQSWIICGATALALAPAYAFAPRLLHSFLHQPDHVSRAAGPYARWAIPRLFAHAVNIPLLMFFQAQSRIWAVAAISGAVLGVHAALTYVAVTRLGYGMPGAAVAGDISHWLVVAAQFAYMTGGRFPDAWKGFTVRAFDNLGAFVKLSLGLEFWYYTTLLVLVGLLKHGKLQIDIMSVCLNFEFLTVMVALGFSTAIGIRVSNELGANRPKEAKFAVLVAVSTSMFMGAVFMCVVLIWRTSLPKLFSDSEEVKRGASKLGHLLALTVCVSSIWPVLSGVAVGAGWQVRVAFINVGCYYLVGIPMGILLGFKLKHGTMGIWMGMLTGTFLQMSILLATIFTTKWDKQAALAEVRMAEWGGKNENLTLTETTHTDDLMAPVQEKMLANDSQKNVELVRID

SEQ ID NO: 47017 - protein, 519 aa, Zea Mays
MTPSPSSRLEHELEKPPHPHGLDAHFMRRLVSRSWEESRLLWRLAFPALLTEVFQFSIGFVTTAFVGHLGEVELAAVSVVENILDSSAYGVLFGMGSALDTLSGQAVGAGQLDRLGTYTQQSWIICGATALALAPAYAFAPRLLHSFLHQPDHVSRAAGPYARWAIPRLFAHAVNIPLLMFFQAQSRIWAVAAISGAVLGVHAALTYVAVTRLGYGMPGAAVAGDISHWLVVAAQFAYMTGGRFPDAWKGFTVRAFDNLGAFVKLSLGSAVMICLEFWYYTTLLVLVGLLKHGKLQIDIILNFEFLTVMVALGFSTAIGIRVSNELGANRPKEAKFAVLVAVSTSMFMGAVFMCVVLIWRTSLPKLFSDSEEVKRGASKLGHLLALTVCVSSIWPVLSGVAVGAGWQVRVAFINVGCYYLVGIPMGILLGFKLKHGTMGIWMGMLTGTFLQMSILLATIFTTKWDKQAALAEVRMAEWGGKNENLTLTETTHTDDLMAPVQEKMLANDSQKNVELVRID

SEQ ID NO: 47018 - protein, 901 aa, Zea Mays
MGGASKLLSSFLLTSSPLRLRPATAAAAALFLSPPAAASRRLFLLSLPSPHRTLYISSASASLPHGSSSACPPPPLRAPFPEWSRLVDRLAATGYGSGLPFSADDLALVSGCVLSDGEQAAVSTCLAFARDRPDLLSSLQRKDVEVLVGNVAPSLFKDGEASGQRLRRYLAGEETDVTVSERAGTVDIVRYLLSYIYGSSDICSEDKELTDLAVRNIMVELVSFSALSQSSTSVELTPNQICSSQHEQFSRPPGQNIEMKRGDWICTSFMNFARNVRCLECNEQRPKKMLTGGEWECPQCDFYNYGRNMSCLKCDCKRPATIPPHPTSVGADLGGVVQQLLKVTTSVGKSEIERKLAENDEKAERWLSKVSQLHDSADLSSLAEDEDFPEIMPMRKGVNKFVVSTRKTPLERRLANAQYSSNNILTLSDPKISQTLDRILGSSAPTAAPNNQSVTSDATMEAPKKSIDHLSGIDPVPFEPLSADLFAKPESNDRQRNENEKNNVEDGSSMANNTVPLPERRSMESLDTAEKWSEKVAELDNVKDSPSAISDENFPEIMPIRKGENRFVVSKKKDRSLTSQQYKRRSILEQADSSDFVPFVPFPPGYFGKKDTPIESTTHTGIMSGDGQPKGNLNNENWNRNYYQYQSQSQEFRPSGNAYTGSGNTGNSEGNINGSRGESTYHEANFEKRSYYNSGYSNNGYWSSDNNNSNNAWSDNSNYNNNNAWSGNNSYNGCIRNDNTSCNSNRDYNYNDTWSASSNSAWSSSNNNNQSGPFADNSNATRSSSSVNANHSVHSSGYGGNSNRGYTGKSLEGSAVKDPDPLDMSEEAKAERWFRRAAQIKDISELANIPDEDFPEIMPMRKGVNRFVVSKRKTPLERRLTSPQYRRNLPIVSSETDKDAN

SEQ ID NO: 47019 - protein, 116 aa, Zea Mays
MKKREVKFVQRPSGVRFNRYCVYRVRESRQLPLGLGLGAPSLYGHLVVEGLLIAVIVFQLSRKSYKPPKKPLTEKEIDELCDEWEPELLCPPIKEGAKIDAPTLESAVGPHTIVDC

SEQ ID NO: 47020 - protein, 222 aa, Zea Mays
MKEHRPLAPAVPSRPAPPITEKQASPAPTPVTEAPAFSPNPQSGGFQDPEVDAHAIYVRSLPLNATPQQLEEEFKRFGTIKHEGIQVRSNKIQGFCYGFVEFEDASAVQAAIEASPVTIGERQCFVEEKRTTGSRGGSRGGRFPPGRGGNFRGEGIRGRGTYNGGRGYGRGEFSYRSDYGGRGGGRGGSLHGGDVGYQRVDYSGTSSGRGARAPSAAAAMAK

SEQ ID NO: 47021 - protein, 196 aa, Zea Mays
MLLLLQQYGVRKLEFLIAFLVFLIATCFLVELGYSKPNAPEVVRGLFVPELKGNGATGLAISLLGAMVMPHNLFLHSALVLSRKVPRSVHGIKEACRFYTIESAFALTVAFLINISIISVSGSVCGSGNLNPEDQANCSDLDLNKASFLLKNVLGNWSSKLFAVALLASGQSSTITGTYAGQYVMQVFGTYTLFQF

SEQ ID NO: 47022 - protein, 313 aa, Zea Mays
MAASSLLRSFTRRSCAGPSAFAYRHHQRQQPWSPFSTSAAAVTQDEAAKRFPGLGPTAKGEKARVVVLGTGWAGSRLMKDLDTQGYDVVCVAPRNHMVFTPLLASTCVGTLEFRSVAEPVARIQPAVSKSPGSYFLLARCTGVDPDGHTIDCETVTDGEKDSLEPWKFKVAYDKLVFACGAEASTFGIHGVTDHAIFLREVHHAQEIRRRLLLNLMLSDLPGISEEEKCRLLHCVVVGGGPTGVEFSGELSDFIIRDVKQRYSHVKDYIHVTLIEANEILSSFDVRLRQYATKQLIKVLGLCKELLRMCSPTK

SEQ ID NO: 47023 - protein, 286 aa, Zea Mays
MLSDLPGISEEEKCRLLHCVVVGGGPTGVEFSGELSDFIIRDVKQRYSHVKDYIHVTLIEANEILSSFDVRLRQYATKQLIKSGVRLVQGIVKDVQPNKIILDNGEEVPYGLLVWSTGVGASPFVKSLPFPKSPGGRIGVNEWLRVPSVHDVYAIGDCSGFLESTGKEVLPALAQVAERQGKYLASLLNHVMKAGGGHANSETEADLGRPPFVYKHLGSMATVGRYKALVDLRQSKESRGISLAGFVSWFIWRSAYLTRVVSWRNRFYVAINWLTTLLFGRDISRI

SEQ ID NO: 47024 - protein, 830 aa, Zea Mays
MGVVARARSSQCARAWRRPCLSRRRVRSSALPRPAVREGAGVTASRSSAISLCPARGPAVKLLGRWDLETWAPTVSVHMYDFLSGMAGAFGRRERGRGACGCRGAQWPRLNIRCNPQDVLVCIQIMNERQRQAVVRKGFFNILDMTIDALGSRTHLCWLMEKLDPKDMTLRIGPGKELKITKETVHLILGLPNTGGGKPLNIDEVNAAVNLRSSLGISKDEFGVAKLQERLRLGGDDDLSIRCFFLILFNRLLFPTASWSISNNEVLLTEQLDRFPHIDWCHLIFNDLCEAAHKWHNRSTTNVSATIYGCSIVVLVYYLDHLHHAVAPNNKSDTPRIKYFDKKTIKALSMADKRKPRQGGEPFGHCDFRSSSETCYAPTPEFHGQFEFQFSSDAFDVAQNAPCGHHTISIQVPLIKDMISSKIQQLPAYHHPKFEAKLRAYDSEVGKSFATINQRLSKIVKKQYDLADTFGELIDEVLRAEINSPDNKDDMIEPSNPSASDPLMTATQLESQMIVTQVEAIYKRQQEMCRAFESSRDESVTPQNIRGDTTEDDALQLDSGLVLDQILSGNETYMMHKTRHDSVPLTQMDCVRALRQFLCAKVMDLNRNVIDFGEYVGTCRDIQRSFADGECLDNVFMQCFIDCVRDDATNHIPPLTAHQLILDAIVGAILNFEEQEQHSNTHRPYDPAILENYLSKTLPSFKQLDEYKSIMVPMLRAGHWTLYVINFQNRCIHILDSNPYGPELGETTWESYHYVQMDIGKRKLPWARLIMVRLNMALQHVRPRSNLPRFDNFPIDMAPNCPTMKAGSNDCGFFAMRIIQVTSALLPCIT

SEQ ID NO: 47025 - protein, 177 aa, Zea Mays
MEALFGCNKHGGDKAADLASFIIVQAALEVPRLLGLLAMVKILHNEIFTSGGDQNLINRILSKNKNATDFENKDDGESDDDNDEEGDDEDAENQEDDGGDEGSDDNGNEEEDDDDDDNDPAANGEGGSDDDDDGGEDEEEDDDDDDDGDGDNEEDEEEEEEEDDDDDVPQPPTKKRK

SEQ ID NO: 47026 - protein, 401 aa, Zea Mays
MEGGNILFKGEHFPPGERFPTWDGISTRWLLYTEQAPSAWLNFALCGLVGIVTAYAFVWISKYYTDYKHEPVRLLALSSSTGHGTNIIAGVSLGMESTALPVLVISVAIISAYWLGQTSGLVDESGNPTGGLFGTAVATMGMLSTAGYVLTMDMFGPIADNAGGIVEMSQQPESVREITDVLDAVGNTTKATTKGFAIGGLTQMLQVDIAVPEIFVGGLLGSMLIFLFSAWACSAVGKTAQEVVKEVRRQFIERPGIMDYKEKPDYGRCVAIVASASLREMIKPGALAIISPMAVGVVFRILGHYTGQPLLGAKVVASMLMFATVAGILMALFLNTAGGAWDNAKKYIETGALGGKGSESHKAAVTGDTVGDPFKDTAGPSLHVLIKMLATITLVMAPIFL

SEQ ID NO: 47027 - protein, 439 aa, Zea Mays
MQEASALRREEARRATEQKILEEMIRTEKEKAEIDQETNRVKAIAEAEARVHEDKQSEEVVKRMLLERMKGEKEKWLTAINTTFSHIEGGFKALLTDRSKLMMGIGGVTALAAGVYTTREGARVTWSYINRILGQPSLIRESSMSKFPLPMSRLLKPSSASLSEGAGFEKVILHPSLKRRIEHLARATANTKSHGAPFRNMLFYGPPGTGKTLVAREMARKSGLDYAMMTGGDVAPLGSEAVTKIHQIFDWAKKSKKGMLVFIDEADAFLCERNSTHMSEAQRSALNALLFRTGDQSRDIVLVLATNRPGDLDAAITDRIDEVIEFPLPGEEERFQLLKLYLNQYILKEEGKGSSWSALFKKQQRKIQVNGISDDLLREAARKIDGFSGREIAKLVASVQAAVYGRPDCILDPQLFSEVVDYKVTEHHQRIKLASEGMV

SEQ ID NO: 47028 - protein, 341 aa, Zea Mays
MASLVPGVLLKLLQHMNSDVKVAGEHRSSLLQVVSIVPALAGSDLFTNQGFYLKVSDSSHATYVSLPDEQHDLILSDVIQLGQFVHVDRLEAATPVPILRGVRPVPGRHACVGSPEDLVVTSSSTFLLGSGKAAQASSTNGSSKDAGALSLEKEQGRLEKINAPPKSNGTESKKPQLTKSNSNLSKQALNGLLSDKKDVVSSKAKSTSARSTPSSPTSAHSLPASFDKFSSDMKQRVRTKGAEKSPPSRLSLLEKAASVLKATTAGRKSSLGNSISNTLLSFESGPKALRRSWEGKADAKDKGNSDSKPAKAEKKSENRSSSTPRRKSLAEEKPSNKDDRN

SEQ ID NO: 47029 - protein, 243 aa, Zea Mays
MYRAASLGAERGGGTPAQLLQRRYSCSGDERGGPKEEFLCCPPPPPLKRARMGYESMQGSHGVSDARTTAGGGGLYCIDDYMQAMAVGWRIKEEGLIRWQRRDAAAATPSNLQAMGCLVQESGPFKVRRPEAHRLGSALKQQDGDDSSKEDGNDGRPQSSNAATKEDEASEQCSLSLSLGNLDAKCGRGMAAAASSRSGESSCILTASPARRSSSDCSGHSGCFVVGPGGVVSLELSLSICGS

SEQ ID NO: 47030 - protein, 311 aa, Zea Mays
MGSGRNGAVVRRYVRSKEPRMRWSADLHRSFVQAIDSLGGQHKATPKLILQFMGARGLTISHVKSHLQMYRAASLGAERGGGTPAQLLQRRYSCSGDERGGPKEEFLCCPPPPPLKRARMGYESMQGSHGVSDARTTAGGGGLYCIDDYMQAMAVGWRIKEEGLIRWQRRDAAAATPSNLQAMGCLVQESGPFKVRRPEAHRLGSALKQQDGDDSSKEDGNDGRPQSSNAATKEDEASEQCSLSLSLGNLDAKCGRGMAAAASSRSGESSCILTASPARRSSSDCSGHSGCFVVGPGGVVSLELSLSICGS

SEQ ID NO: 47031 - protein, 383 aa, Zea Mays
MQMAAAVAPTDAPASASAAAAPSRPHAHAAAAVAAASPHPHALHPHHHMPQPRWVVIPYPPPHHPMVAAPPPPSLQFVKHFTPPSSVTPPPPTGSGGNGGEDNRTIWVGDLQYWMDENYLHSCFGSSGEVVNIKVIRNRHSGVSEGYGFIEFYTHVSAEKALQNFSGHVMPNTDRAFKLNWASYSMGEKRSEISSDHSIFVGDLAVDVTDAMLLELFSNKYRSVKGAKVIIDANTGRSRGYGFVRFGDDNDKIHAMTEMNGVYCSTRPIRVGPATPRRSQGDSGTSPPRQSHVDSTNRTVYVGGLDPNVSEDELRKAFAKYGDLASVKIPFGKQCGFVQFVNRVDAEEALHGLNGSTIGKQAVRLSWGRSPASKQVLYGRDPL

SEQ ID NO: 47032 - protein, 1370 aa, Zea Mays
MPLVRFEVRNEVGLGDPGLYGGGAAAAAAATAAAGEEEPKALLEGVAVAGLVGILRQLGDLADFGHTRFAADVFHDLHEQVIATSARGRKVLTRVQNIEAALPSLEKAVKNQKSHIHFAYVPGSDWHTQLQNEQNHLLATDLPRFMMDSYEECRDPPRLYLLDKFDNAGAGACVKRYSDPSYFKKAWDTMRADKNANVQREKRSQKIKRKGSRLREPYHGQAMPRHRGTEFQRSLTAGQLVNRQFASPSNDGQGISEHKSTPDARSNPDNMSRSSSLSSKTQLSSVEQAIDTKPSAVSHENGHGKSLDTKLHKPGGLPSPVLLNSTTVDDHSDHLKQGSPPDGMVARSPYVKWDEKTAIIMSTSSIYCDDVVMDEVEDAEPTCISSVQKETDHKVMDTLHQQDALLKKTKSLLVPSVLNHHDDIPGEADNYMDALNTLESETETESEFQTKNRVPAPSFKAEAPQVGAIDNIVPQCLDSSAADFIDTCQESDIICTSERAIDFPSLSNADSLEVSQLELSDYTSVSPYKESSVITNIHESGAEGARGDPCEIIEPLQVHSAILANDGSPVCNEIPKSKPDDDLGYFQEIPQPGFSTCMVIPSNKESAVANKNLEGDAKSDDDLIDGTADNVVSGPKIANMVVDEVGFKMAPANRSSPGDPSDDSCVIPESRPQDYAVKSYEGVGDCGVTEVSKLCSEPLNKPSDNICATQDVPTNTSTMSAGASEVSSSWSEPVTELIDDRCATQGVPANASTTSTVVPSVKLWTNAGLFGLEPSKPPVFGNGPREDTPPGFKEAQPVHSTEFTEVHCSKPTESAAVDVPNGNTSITSSFVEKLVGIRPGSANLNSSGANQSAARIPDPIHSHTDGHSDFSSSFEHNNMTGKHTSISELLEFEGSADTGTKIYSTDMRNNAVSASSFSSIAQRFLANTLQRRTSKYTDLPMSSERANADTSAKSESTLNPVVEPSEAVFAEETKFENKTENGMDGLSKTSIFSSRHYSEKSSPPLEYMKISFHPMSAFEMSKLNLDFCDGNIHEISDDMMLPTFQLLSESSIPQPGSGSESEDDTFGRSYSYSSYDDLSPRLYSNSEAWDQDDGTGLEEHELYDDSNQIGSSTAPLSSYMGFEQMNLSDMKSDISLANIGDQNVIGTLQSCTVEELPNFDTLMSRSDDQNGETPIPHNLGNMTPDEDQLPPPPPLPPMQWRMTRQTTSLEEETCITTKDMLRKTSSLPHIHTSAQEEHCPPTAPLDLQGHAGEVGVQKTGGVREITNPPSIIDIKSSLLQQIRDKLKLNGHERSKKAVGGDIKSLDEREELLQQIRSKTFNLRRTNASKADGSSQSTASSNVAAILEKANAIRQAVASDEGGDDDTWSDI

SEQ ID NO: 47033 - protein, 1369 aa, Zea Mays
MPLVRFEVRNEVGLGDPGLYGGGAAAAAAATAAAGEEEPKALLEGVAVAGLVGILRQLGDLAEFAADVFHDLHEQVIATSARGRKVLTRVQNIEAALPSLEKAVKNQKSHIHFAYVPGSDWHTQLQNEQNHLLATDLPRFMMDSYEECRDPPRLYLLDKFDNAGAGACVKRYSDPSYFKKAWDTMRADKNANVQREKRSQKIKRKGSRLREPYHGQAMPRHRGTEFQRSLTAGQLVNSRQFASPSNDGQGISEHKSTPDARSNPDNMSRSSSLSSKTQLSSVEQAIDTKPSAVSHENGHGKSLDTKLHKPGGLPSPVLLNSTTVDDHSDHLKQGSPPDGMVARSPYVKWDEKTAIIMSTSSIYCDDVVMDEVEDAEPTCISSVQKETDHKVMDTLHQQDALLKKTKSLLVPSVLNHHDDIPGEADNYMDALNTLESETETESEFQTKNRVPAPSFKAEAPQVGAIDNIVPQCLDSSAADFIDTCQESDIICTSERAIDFPSLSNADSLEVSQLELSDYTSVSPYKESSVITNIHESGAEGARGDPCEIIEPLQVHSAILANDGSPVCNEIPKSKPDDDLGYFQEIPQPGFSTCMVIPSNKESAVANKNLEGDAKSDDDLIDGTADNVVSGPKIANMVVDEVGFKMAPANRSSPGDPSDDSCVIPESRPQDYAVKSYEGVGDCGVTEVSKLCSEPLNKPSDNICATQDVPTNTSTMSAGASEVSSSWSEPVTELIDDRCATQGVPANASTTSTVVPSVKLWTNAGLFGLEPSKPPVFGNGPREDTPPGFKEAQPVHSTEFTEVHCSKPTESAAVDVPNGNTSITSSFVEKLVGIRPGSANLNSSGANQSAARIPDPIHSHTDGHSDFSSSFEHNNMTGKHTSISELLEFEGSADTGTKIYSTDMRNNAVSASSFSSIAQRFLANTLQRRTSKYTDLPMSSERANADTSAKSESTLNPVVEPSEAVFAEETKFENKTENGMDGLSKTSIFSSRHYSEKSSPPLEYMKISFHPMSAFEMSKLNLDFCDGNIHEISDDMMLPTFQLLSESSIPQPGSGSESEDDTFGRSYSYSSYDDLSPRLYSNSEAWDQDDGTGLEEHELYDDSNQIGSSTAPLSSYMGFEQMNLSDMKSDISLANIGDQNVIGTLQSCTVEELPNFDTLMSRSDDQNGETPIPHNLGNMTPDEDQLPPPPPLPPMQWRMTRQTTSLEEETCITTKDMLRKTSSLPHIHTSAQEEHCPPTAPLDLQGHAGEVGVQKTGGVREITNPPSIIDIKSSLLQQIRDKSEQLKLNGHERSKKAVGGDIKSLDEREELLQQIRSKTFNLRRTNASKADGSSQSTASSNVAAILEKANAIRQAVASDEGGDDDTWSDI

SEQ ID NO: 47034 - protein, 313 aa, Zea Mays
MLVTLMNLLRACWRPSSNRHARTGSDVTGRQDGLLWYKDAGQHVNGEFSMAVVQANNLLEDQCQIESGPLSFLDSGPYGTFVGVYDGHGGPETACYINDHLFQNLKRFASEQNTMSADVLKKAYEATEDGFFSVVTKQWPVKPQIAAVGSCCLVGVICGGMLYVANVGDSRVVLGRHVKATGEVLAVQLSAEHNVSIESVRKELQSMHPEDRHIVVLKHNVWRVKGLIQVCRSIGDAYLKKQEFNREPLYVKFRLREPFHKPILSSEPSINVQPLQPHDQFLIFASDGLWEHLTNQEAVDIVHSSPRRAVLGG

SEQ ID NO: 47035 - protein, 114 aa, Zea Mays
MFLGENLEECSIEELHNLEVKLAKSLHVIRGKKTQLLEQQISKLKEKERTLLQDNKELRDKRNLQSPPEAPPDLNRCVPPWPRSLPAPSNDMDVETELYIGLPGRERSSNRDSD

SEQ ID NO: 47036 - protein, 380 aa, Zea Mays
MQEILDQQVAEEAAEAEGAGAMATITNQRRTANRKGAGATVTPRKGTQEKSKVQGKGYKDKCYESIRMAVEARFNKLLTELVFVEDLMEALEEAKAIGDELGDIYDYVAPCFPPRYEIFQLMVNLYTERFIQMLRLLSDRANDIQNINILKVTGWVVQYQENLIGLGVDESLAQVCSESGALDPLMNMYVERMQATTKKWYSNILEADKTQPPKSTEDGKLYTPAAVDLFRILTEQVQIVRDNSTDVMLYRIALAVIQVMLDFQAAERQRLEEPASDVGLESLCALINNNLRCYELSSELSSSTLEALPQNYAEQVNFEDTCKGFLEVAKEAVLQTVSVIFEDPGVQDLLVKLYQKGIPLFRKMKLRDKFRRCCSQDLSP

SEQ ID NO: 47037 - protein, 470 aa, Zea Mays
MRQPLETTDNPQTLVRALRVVEMQEILDQQVAEEAAEAEGAGAMATITNQRRTAKKGAGATVTPRKGTQEKSKVQGKGYKDKCYESIRMAVEARFNKLLTELVFVEDLMEALEEAKAIGDELGDIYDYVAPCFPPRYEIFQLMVNLYTERFIQMLRLLSDRANDIQNINILKVTGWVVQYQENLIGLGVDESLAQVCSESGALDPLMNMYVERMQATTKKWYSNILEADKTQPPKSTEDGKLYTPAAVDLFRILTEQVQIVRDNSTDVMLYRIALAVIQVMLDFQAAERQRLEEPASDVGLESLCALINNNLRCYELSSELSSSTLEALPQNYAEQVNFEDTCKGFLEVAKEAVLQTVSVIFEDPGVQDLLVKLYQKDWLEGMVTEYLVATFADYFGDVKMYIEERSFRRFVEACIEETIVVYVDHLLSQKNYIKEETIERMRLDEEVLMDFFREHINVTLKAECGFWQI

SEQ ID NO: 47038 - protein, 82 aa, Zea Mays
MGLGGRGVVGDRWSQRILWICALGSAASTSWRWRGRLRIVRGRWRRASRRSTAPGMTCDSGGRCRAEGLLWFTCSQNLIALQ

SEQ ID NO: 47039 - protein, 624 aa, Zea Mays
MRTGRPKTFTDDRAESRVEYPEPIYVSRDEEFEEGKNEMLSEGALKALLHNFMPLLVSSVSPDFRDFAGFHDVDNLFKEGLRLKQALQDQLFQKIPFVRKVQENSEGLLRYDTPDIIKRDKFAWLRDDEFARQALAGINPVNIERLQAFPPMSKLDPAVYGPPESAITEEHIIGRLDGMSVQQALEDNRLYMLDYHDIFLPFLDRINAQDGRKAYGTRTLFFLTGAGTLKPIAIELRLPPMTDGCARAKRVLTPPADATSNWLWQLAKAHVCSNDAGVHQLINHWLRTHACMEPFIIAAHRQMSAMHPIFKLLKPHMRYTLKINALARQILINGDGVIESGFTPGRYCMEMSSFAYRELWRLDQEGLPADLIRRGMAVEDPTKPHGLRLLIEDYPYATDGLLLWSAITRWCGAYVATYYPSDESVQADTELQSWYTEAVQTGHADKRGAPWWPRLTTPGDLASLLTTLLWLTSAQHAALNFGQYPLGGYIPNRPPLMRRLVPAEGDPEHAHLVADPHRFFLSALPGLTQATTFMTVIDTLSTHSADEQYLGERPDEAWTADPAALAAEREFADEVRRAEEEIGRRNTDAGRRNRCGAGVLPYELMAPTSGPGITCRGVPNSVTI

SEQ ID NO: 47040 - protein, 119 aa, Zea Mays
MMREYRAQLDAERAQKLANGRNHSRSNSKSSSSKKERKDKDAKKRSKKRRKHKSSSESSSSSSSESSSSDDEDRGSRKSRSRSRSKRTRKEKKSRSRSKRRGSESEEEGPVRLSKFFGK

SEQ ID NO: 47041 - protein, 236 aa, Zea Mays
MHFQGQKVPGGSAAKPIPSSAGPSGRGPHMNRGGSAPEAQAQNVDPLIGRKVMSRWPEDNSFYEAVIYEYDAETMGPEDIRWQEDDSGIDPVTYLRSRGGPTSGVRKPAGRGGPMPGSVRGRGLQKNMPKKDFPPPQNGVGKRSSDDIDILHTESLIKEVGKVFSVSNPDPQEVEKAKKALKEQEQSLIDAIARLAEASDGESDGHNRGRRNLYAANQHQASYVGAMPVGDRAGAM

SEQ ID NO: 47042 - protein, 237 aa, Zea Mays
MIMQAMWKPGWLEALDTQKFFVACSFHEHAKKNEKNICCLDCCTSICPHCVAAHRAHRLLQVRRYVYHDVVRLEDLEKLIDCSSVQSYTINSSKVVFLKKRPQNRQFKGSGNICTSCDRSLQEPYFHCSLDCKVEYILRQKKKLSAYLRPCKTLQLGPDFFIPHDADDDTTHSTLVDVDEPMGSSDSENLSVPCTNFVRKKRSGPYICARSANRVSEEDMATNMSRRKGVPQRSPLC

SEQ ID NO: 47043 - protein, 960 aa, Zea Mays
MSGGGLEVQVHVVGGARSCFAALPLHLIHDLERTSATGDLPPVLALELRGPAGARWSLAWSGAASRSSAIEVAQELADCISLPDGTIAQLSVARSLAKADSISIEPYSEDDWEILESRADLAEETILKQVGIVYEGMKFPLWLDGHNIVKFVVLSSFPEKTVVQLVPGTEVVVAPKKRKEKPSQDLQKQSALKEQVKIKALLRVQAADRKYAHTFKYEGVEIGVVVSYAVLIHPDTAASISVGNLQLVAVSPKSSKKGLPLKGKEVGRKKGISVTKERSHEAIVYILLSDSVAKGHVMLPYSIRHFISADVHSWVYIKTYSANIKEDEPLVTISPLKFKMHVKDAHDSSKLVSQEVDTSRITRIPSENGDFFQKARYSENKNIRGADIESISESVSRQKFFIKHWLIGHLKEMGLHASHTEMNSIVLPTNILLHLEATDKEGTKGVEFLYFLKLTSENSNFNDSQLNIETTWSVPTSNADDLELHFGKFELGEPVSFDSLVDSGSSDGFKLTRSSLGWMENAMSDVTKRLSVLLSATSLRLFNRIKFPFPGHVIVYGPRGSGKTALTRASAKYFEDHKDILAHIIYIDCSKLALGKAKETRQEIEDSMSEALLHSPSIIIFDDLDSVVSVSSDPQVSQSSSSSDSLVQYLADIMDEYKIQNTCGYGPIAFMASVQSLQSLPQDLTSSGRFDFHIELSALAVPERKALLQHQVEEHDLLCSEEVLSEIASKCEGYDAYDLEILVDRAVHTAAYRFLLPSNACHNSLKRTLLMEDFFKAMHGFLPVAMRDLRKYAPDDKDGGWEDVGGLDEAVTIIKETLELPSKYPNIFTRAPVRLRSNILLYGPPGCGKTHIVRAAAAACSLRFISVKGPELLNKYIGSSEQSVRDFFAKAVAAAPCLLFFDEFDSIAPQRGTHSAGVSDRVVNQFLTELDGVETLTGVFVFAATRFHWQVMPVSKMLLL

SEQ ID NO: 47044 - protein, 154 aa, Zea Mays
MSIIYTATSHPLPRTVGTKMTTPPRRSPPLRGRGHAGLRALAPMVNIHERSPVPACVPAHPDPSSSISPDDWRRLEGATFSVMCKIHPTVSSQHLRARVIDYVQRLFRLHHDGYQETLAGYARNSILVLASSARFFRRPRVSLPTKSTGFSGTH

SEQ ID NO: 47045 - protein, 269 aa, Zea Mays
MEKVDQNLGKNNLLRRSIMLIKHWCYYESCILGAQRGLVSTYALETLVLYIFHVFHKSLDGPLAVLYRFLDYYSKFDWDNKGISLFGPISLSSLPELVTEPPYTRDDGFLSREAFLKDCAKAFSVPPINSEENPQVFSKKFVNIVDPLKQSNNLGRSISKGNLGRIRKEFYFGACKLGKILQAPACFSANEINRFFRNTLSRADVPVSSPDDVLQAASVSASPGNKGVEGVSKGSSPNNSCDVLCNQFGYIKISDSNNALQNLVVDRPA

SEQ ID NO: 47046 - protein, 271 aa, Zea Mays
MSIIYTATSHPLPRTVGTKMTTPPRRSPPLRGRGHAGLRALAPMVNIHERSPVPACVPAHPDPSSSISPDDWRRLEGATFSVMCKIHPTVSSQHLRARVIDYVQRLFRLHHDGYQVISFGSVPLKTYLPDGDIDLTLLCAAISDENLENEVCAILKSEEQRKDSEFEVKDVKYVPAEVKLVKCKVQNIAVDISVNQIGGPNKVYFLEKVDQNLGKNNLLRRSIMLIKHWCYYESCILGAQRGLVSTYALETLVLYIFHVFHKSLDGPLAVS

SEQ ID NO: 47047 - protein, 104 aa, Zea Mays
MKLEVMPKPKQRVLEAQQREEAMEMSGLDLWKHEKPPRICPLPPSLPPPPPAFDEAALVPPLNFAVVDDGIFRSGFPGTANFRFLKSLNLRSIVNHLSTYPTTK

SEQ ID NO: 47048 - protein, 810 aa, Zea Mays
MDVDSRMTTESDSDSDAAAAAARGGNAGGSGSGSETSSSSAPSTPGTPGTPAAAPNPAPVGAVGPRPAPGYTAVNAVIEKKEDGPGCRCGHTLTAVPAVGEEGAPGYIGPRLILFGGATALEGNSATPPSSAGSAGIRLAGATADVHCYDVSLNKWSRLTPLGEPPSPRAAHVATAVGTMVVIQGGIGPAGLSAEDLHVLDLTQQRPRWHRVVVQGPGPGPRYGHVMALVGQRFLLTIGGNDGKRPLADVWALDTAAKPYEWRKLEPEGEGPPPCMYATASARSDGLLLLCGGRDANSVPLSSAYGLAKHRDGRWEWAIAPGVSPSPRYQHAAVFVNARLHVSGGALGGGRMVEDSSSVAVLDTAAGVWCDTKSVVTTPRTGRFSADAAGGDAAVELTRRCRHAAAAVNDLIFIYGGLRGGVLLDDLLVAEDLAAAETTNAANHAAANAAATNLQAGRTPGKYAYNEQTRQTITESGPDGAVVLGTPVAPPVNGDMYTDISPENAVLQGQRRLSKGVDYLVEASAAEAEAISATLAAVKARQVNGEMEQLPDKEQSPDSTSTSKHSSLIKLDSALSNNLAAPPGVRLHHRAVVVAAETGGALGGMVRQLSIDQFENEGRRVSYGTPENATAARKLLDRQMSINSVPKKLKAPVKIFGDLHGQFGDLMRLFDEYGAPSTAGDIAYIDYLFLGDYVDRGQHSLETITLLLALKVEYPQNVHLIRGNHEAADINALFGFRIECIERMGERDGIWTWHRMNRLFNWLPLAALIEKKIVCMHGGIGRSINHVEQIENLQRPITMEAGSVVLMDLL

SEQ ID NO: 47049 - protein, 893 aa, Zea Mays
MDVDSRMTTESDSDSDAAAAAARGGNAGGSGSGSETSSSSAPSTPGTPGTPAAAPNPAPVGAVGPRPAPGYTAVNAVIEKKEDGPGCRCGHTLTAVPAVGEEGAPGYIGPRLILFGGATALEGNSATPPSSAGSAGIRLAGATADVHCYDVSLNKWSRLTPLGEPPSPRAAHVATAVGTMVVIQGGIGPAGLSAEDLHVLDLTQQRPRWHRVVVQGPGPGPRYGHVMALVGQRFLLTIGGNDGKRPLADVWALDTAAKPYEWRKLEPEGEGPPPCMYATASARSDGLLLLCGGRDANSVPLSSAYGLAKHRDGRWEWAIAPGVSPSPRYQHAAVFVNARLHVSGGALGGGRMVEDSSSVAVLDTAAGVWCDTKSVVTTPRTGRFSADAAGGDAAVELTRRCRHAAAAVNDLIFIYGGLRGGVLLDDLLVAEDLAAAETTNAANHAAANAAATNLQAGRTPGKYAYNEQTRQTITESGPDGAVVLGTPVAPPVNGDMYTDISPENAVLQGQRRLSKGVDYLVEASAAEAEAISATLAAVKARQVNGEMEQLPDKEQSPDSTSTSKHSSLIKLDSALSNNLAAPPGVRLHHRAVVVAAETGGALGGMVRQLSIDQFENEGRRVSYGTPENATAARKLLDRQMSINSVPKKVIASLLKPRGWKPPVRRQFLLDCNEIADLCDSAERIFSSEPSVLQLKAPVKIFGDLHGQFGDLMRLFDEYGAPSTAGDIAYIDYLFLGDYVDRGQHSLETITLLLALKVEYPQNVHLIRGNHEAADINALFGFRIECIERMGERDGIWTWHRMNRLFNWLPLAALIEKKIVCMHGGIGRSINHVEQIENLQRPITMEAGSVVLMDLLWSAFSATPNPFMIGILFISYLVLTFTGLIQQRTTVLKD

SEQ ID NO: 47050 - protein, 79 aa, Zea Mays
MPRIPLIRFPKRNLKAPSPSAPGAKAEAPSSGEIKNYRFRSDVPCPPSHTAVGGPASLLPKRKPLTEEEIEAIMLGGSI

SEQ ID NO: 47051 - protein, 216 aa, Zea Mays
MPDAMVHHGFYSAYYNTTLRYEILKSIKWARKTYGNLPINVVGHSMGGALASFCALDLSVKFGSQEVELMTFGQPRIGNPAFAVYFGEQVPRTIRVTHQNDIVPHLPPYYYYLGEWTYHHFAREVWLHESIDGNVVTRNETVCDDSGEDPTCSRSVYGMSVADHLEYYDVTLHADSRGTCQFVIGAANQVYNYVREVDGSIILSRYPQEPQALESM

SEQ ID NO: 47052 - protein, 107 aa, Zea Mays
MALAASSPLHAVPPAPALHTPPEKRGGTPSTGCTAGRHSVAHPSRWSGPPPSQHDSTSGDQVTSARSPRLTASAVQVLAFCCPRLRASRRMCIPSFGRENPFWRICH

SEQ ID NO: 47053 - protein, 769 aa, Zea Mays
MDASELSENGLVDCTSNSIEIVNESSGTELLIALTNGSQNIVERPAEREDSIDEYQDASPFLHPSDSEDGAAPSSAFSTEMSNLNAIPSGSSVTTDVNSLGTNGLLKDQISGEPNMTEISADSKAGRNLEEGALRLAKHEVNLKLGGPYEQSVNVDYTYTDMVDSKSDEASVHSVMIEPLDASPLQETRLTILEPESESTCSKMVEGFMEDRMHVLLTMPEASPKSKVVGSDNVQLETITNPSTNPMSTGSDLNVVYTDNTATDCSMELPRLNWSVEDVPGDSQPVENSSKKTLRCPTAVFEDDLPVTKMDDTPVTNVDDVEFTFHEKPQTDTVEENLSIQKTNGFTKEEVCNKQINPEIPTEDQFSRGQKHDTLLMDRVPSVKNPFNLDDDRNDDLFELPTESCFLEVPNVVESRKQVDSTSRMVVPPIVSNQIRMAEVQQCHNSIERILSSSSASENGEVVGPEDITVRSSSELVNKTCLTDHALQENGHTSGDIFVPSQAASTELSTISMQDISALSEVEIMQTEDASAKDMTAVCSIDCIEMKQAINTTANDTYAAIVEEKKLIEGTTARMNGVRETYYVEEQTQASDTKELSAVQNIGNSEENKQTENTDAKETNARFNANDVEHKTQTAKEIAAAESTSSVEEKQQLNIVVVQDGSNKKMNEEIASTGAQLNSGRVRVPLKVLLAEASMENQVKKPSTKERMLSFRRQVTKDNNLSVKSGSRKSGPDDHHWSSPAKLPHKDVDKISREKKQPWMPFICCHSVR

SEQ ID NO: 47054 - protein, 121 aa, Zea Mays
MGINSHLSTCVGTQSPKYLEMAQRHISLSVGPAARPRRGSRWLPPLRDGRPPRREEATGASSFAQPTAAVCGSATRAPMVKVAASGSTATPLCGGASVDDHLSAYCYFFSRPTATSSPAWV

SEQ ID NO: 47055 - protein, 334 aa, Zea Mays
MVRGVVAAVRSTEHNNLSVLRPPSPQDRERGSSRRGGSQIDIFSHLFVLRRGGESENPSLSGRRRVRDGRRPAGADMHNRSSSSAAAASSLPLSPADGFLRVKDGVDGMIKYVANEPSVGLYFVQQHARASMPLLLDVKGKLVEKTREVTLHTEDMEDSICAVRSMADFGLPLADDMIKDINRSLQIMSKTQPKRGWGFQSRKSSGTWDELGSTNGSSSRNYLSSMFNTAKQKASGLRWPQPNFATKDDTSENSASSSALESPQAGGQGASTPDTEKDELPISSRLSEGTAANRSLPATGVSETVEAYNKFKEEQELKLREWLRDSEEAVNDKD

SEQ ID NO: 47056 - protein, 278 aa, Zea Mays
MPRRLKTKLGGATEECDFDSKGNLGNLLLIIVPTVCDEDGNPFGDDSSTCRSRSLSYLSLSMALGCLFIWTHTYSLMQKSGKLYNKMQSKSIQCPADSDEEHEHAKEDGPAGCADEEAPLPTSVKPREHEHGEEEEHQMEAPPLSCESEVADKGFWTKLKDAIHQFIEELMAPRTISAIIGFVVGLVPWLKSLIVGDGAPLKVIQDSLQLMGASEVGAKACGDRRDHVCPLRAPPADRHRRVRAAYELGFLSRDPLYRYMLIAVPPAMNIGTMAQLFD

SEQ ID NO: 47057 - protein, 145 aa, Zea Mays
MASLTELSFNWTGFINAMISNISFTYRSIYSKKAMFEGPRLMQHGFSDAIAKVGLTKFVSDLFLVGLFYHLYNQIATNTLERVAPLTHAVGNVLKRVFVIGFSIVVFGNKISTQTGIGTSIAIAGVAMYSYIKAKIEEEKRKKSA

SEQ ID NO: 47058 - protein, 253 aa, Zea Mays
MPWFAGKRVAGQLTLRLQQLDVRCETKTKDNVFVNVVASIQYRALADKASDAFYKLSNTRSQIQAYVFDVIRASVPKLHLDDAFEQKDEIARAVEEELEKAMSAYGFEIVQTLIVDIEPDEHVKRAMNEINAAARLRAAANEKAEAEKIVQIKRAEGEAEAKYLSGLGIARQRQAIVDGLRDSVLGFSVNVPGTTAKDVMDMVLITQYFDTMKEIGASSKASSVFIPHGPGAVRDIATQIRDGLLQGSSVAKH

SEQ ID NO: 47059 - protein, 194 aa, Zea Mays
MEWLSWRTVCCLSVLCTVLFLRPVEGIRFVIDREECFSHNVEYEGDTVHVSFVVIKADTPWHYSEEGVDLVVKDPNGAQVRDSRDKTSDKFEFIVQKRGVHRFCFTNKSPYHETIDFDVHVGHFSYFEQHAKDEHFAPLFEQIAKLDEALYNIQFEQHWLEAQTDRQAICKYPPFTFSLKYYLECFSPYAPCLV

SEQ ID NO: 47060 - protein, 244 aa, Zea Mays
MLEMIASELEALSNQLAELEEKMKFLLLPSDPLDSRNILLEVRAGAGGDEAGIWAGDLVRMYQRYCERNNWKFKPVSCSEAEMGGYKTYVMEVKGKQVYSKLKFESGVHRVQRVPLTEAMGRVHTSTATVAIMPEADEVDVVIDPKDIELKTARSGGAGGQNVNKVETAVDLIHKPTGIRIFCTEERSQLQNRERAFQLLRAKLYEIKLREQQESLRNQRKLQVRCQFFLKRSYLPKVVAVESN

SEQ ID NO: 47061 - protein, 399 aa, Zea Mays
MKCLMRVLGIANIAGQIVHEITAQLVGILMEVCNNPKNPDFNHYLFEALAAVIGRTGEQDPTLLPAFETSLFPVLQRILVEDISEFWPYAFQIFAQLVNLSRPPLSQNYMQLFGVLLSNATWDRPPCVPALVRLLRAFLRKILNELNQEGRLPNILAISRSLLSRSSTEDSAFYMLNTLVENVGFDILNPYISEIWSALFTRLQTRQTVKFVNSLVVFMSLVLVKYGSSVLVNSVDAIQPNLFTQILQRFWIPNLNLIKGALEVKLTAVASIKLLCESAVLLDAAAAQLWGKLLDSIVTLLSRMNQDGSQQEHNDGTDAVDTQKTSSYSVSFVRLQYAGKSEDDLLKEVNDPKQFVVTSLATISAQFPGRFGPVIEQHVDLANKSVLLQLCAAYNANIV

SEQ ID NO: 47062 - protein, 581 aa, Zea Mays
MASQVAGSTPAVAALGFLLPTFWEIEVTCAAAMILVALYVAYELLNPRSSQAAAAGDADELLVRGLDGADKFKGGVSGPSAYVVKLELLAAKNLMAANLNGTSDPYALITCGAEKRFSSMVPGSRNPMWGEEFNFFVDSLPVKINVTIYDWDIVWKSTILGSFTVTVESEVPSGPIWHTLDSTSGQVCLHIKVIKVHESSSRAINSSAEAGARRRISLDKQGPTVVHQKPGPLQTIFELPPDEVVDHSYSCALERSFLYHGRMYVSSWHICFHSNVFSKQIKVVIPLRDIDEIRRSQHAVINPAITIFLRMGAGGFGVPPLGCPDGRVRYKFASFWNRNHTFRALHRAMKNFVMMIDAEKQERAQSALRAHSSSRKNSKKEINVPEDCAALTGKLQPFVKEEVLVPVFNGTFPCTAEQFFSILLSDDSNYITEYRTDRKDKDINLGQWHVADEYDGQVRELNCKSICHSPMCPPYSAMTEWQHIVLSADKMDLVFETVQQVHDVPFGSFFEVHCRWCVKTISSNSCSLNISAGAHFKKWCIMQSKIKSGAVDEGSSTLIDMITYRYRCKKNDLPSYHNSSA

SEQ ID NO: 47063 - protein, 811 aa, Zea Mays
MAPRDPKEDGFGVGGAADPEADIEAPLLVSSGSSFLLDPALEDGGGGDEEQRRRRRRFLHGSHTHSNTTSQVALVGADVCPIESLDYELIENDVFKQDWRARGRGHILRYVALKWALCFLVGALAAAAGFVANLGVENVAGAKFVVTSDLMLDGHGSAFAVFLASNFALTMLAAVLTVYVAPAAAGSGIPEVKAYLNGVDAPNIFSLKTLIVKIVGCIAAVSSSLHVGKAGPLVHTGACIASILGQGGSRKYRMTCRWLRYFKNDRDRRDLVTCGSAAGIAAAFRAPVGGVLFALETVSSWWRSALLWRAFFTTAMVAVVLRALIDFCQSGKCGLFGKGGLIMFDVTADYVTYHLIDLPPVITLGVFGGILGSLYNFFLDKVLRLYNLINEKGKAYKLLLAATVTVCTSCCLFGLPWIAACKPCPTDTREACPSIGRSGNFKKFQCATDEYNDLASLFFNTNDDTIRNLYSAGTDDEFHISSILVFFIASYFLGIFSYGLALPSGLFVPVILTGAAYGRLVGMLIGSQSTLDHGLFAVLGSAALLGGSMRMTVSVCVIILELTNNLRMLPLVMLVLLISKVVADAFNANVYDLLVRLKGFPHLEGYAEPYMRQLSVSDVVTGPLQTFNGIEKVGHIVHVLKTTGHNGFPVVDEPPFSDTPTLYGLILRDHLLVLLRKKDFIRSCTASTLNALNHFSHAEFAKRGSGKHDRIEDIELCPEELEMFVDLHPFTNTSPYTVLETMSLAKALILFREVGLRHLLVLPKSSKRAPVVGILTRHDFMPEHILGLHPFLFKSRWKKVRLGKVKVTNIF

SEQ ID NO: 47064 - protein, 712 aa, Zea Mays
MASLVPGVLVKLLQHMNTDVKVAGEHRSSLLQVVSIVPALAGSDLFTNKGFYLKVSDSSHATYVSLPEEQHDLILSDKIQLGQFIHVDRLEAATPVPILRGVRPVPGRHACVGTPEDLVVTSSSSFHGSKKAQPSNGTNDASILSLEKETSKLEKINASRKLTGTENKKPMLTKSNSSLSRQALNVIGDKKEAVKSKRNRVKGAEKASSSRLSLLEKAASVLKATSAGRKPSAANSISSSVLSIGSGPKALRRSWEGNTDIKGKGNSESKTAKPDKKSDNKMPMTPRRKSPVDQKVPPKDDSQKAARKSTASAPSDDADKAAKKHIPTVKRTSGVLGNSNVTNLVKIPPNRKKLTDISTSWTSLPPSLAKLGKELLKYRESAQIAAAEAMQEASAAESLLRCLSSYAEVSSTAEEHNPQPAVEKFFTLHAALSRATVITDTLTKSATSAASPDCSAASDAGTVGSATDEETAAVTAERRRRATSWVSAALATDLSAFGIYNLKPVPATVSSPLAVVVVDESAKPATAAATATKSSPSPKSRMSPAKGKARTGAATAAAAALTKTSAPTEWERGEGAEERGELAKRLGEESRGWFLGFVERFLDSDVAASAPWDRERAARMLPQLKRVNDWLGEIAKRSETQSLPPADADGEATTTSTAPVPPNDGCGVPEETIERLRKKIYEYLLTNVDSAAAMLGGGGGSAAAALTNGKKG

SEQ ID NO: 47065 - protein, 456 aa, Zea Mays
MASLVPGVLVKLLQHMNTDVKVAGEHRSSLLQVVSIVPALAGSDLFTNKGFYLKVSDSSHATYVSLPEEQHDLILSDKIQLGQFIHVDRLEAATPVPILRGVRPVPGRHACVGTPEDLVVTSSSSFHGSKKAQPSNGTNDASILSLEKETSKLEKINASRKLTGTENKKPMLTKSNSSLSRQALNVIGDKKEAVKSKRNRVKGAEKASSSRLSLLEKAASVLKATSAGRKPSAANSISSSVLSIGSGPKALRRSWEGNTDIKGKGNSESKTAKPDKKSDNKMPMTPRRKSPVDQKVPPKDDSQKAARKSTASAPSDDADKAAKKHIPTVKRTSGVLGNSNVTNLVKIPPNRKKLTDISTSWTSLPPSLAKLGKELLKYRESAQIAAAEAMQEASAAESLLRCLRWSRTWINTFLNCLRMLLYCIMMLTDAVQEVSPAVLVAACCCLLLKVPVYLHC

SEQ ID NO: 47066 - protein, 337 aa, Zea Mays
MEGYDREFYQFSDQLRLQTAAFSGLSLGDSIWSPAGRRNNSNDVLFAASASPADAAAKSNAVVGLKLNDGGPGLIGSGKLAFGGGAGGGGTNKADRYNNNNLPNTDNKTVYNTSSSSFMGNGSSYAKNNNNNADMLAFDKMGSYGYNGGGNTNNNSNGVEVKSYFNKSAGRAASNNNNNNNSHAGGGNKKGGAGEYGRKKHAKSEGAAAATDKQRFKTLPASEALPRGQAIGGYIFVCNNDTMDENLRRELFGLPSRYRDSVRAIRPGLPLFLYNYSTHQLHGIFEVRVATRKIYDPLEEDAFRPILHHYDGPKFRLELSVTEALALLDIFADKDDA

SEQ ID NO: 47067 - protein, 330 aa, Zea Mays
MEGYDREFYQFSDQLRLQTAAFSGLSLGDSIWSPAGRRNNSNDVLFAASASPADAAAKSNAVVGLKLNDGGPGLIGSGKLAFGGGAGGGGTNKADRYNNNNLPNTDNKTVYNTSSSSFMGNGSSYAKNNNNNADMLAFDKMGSYGYNGGGNTNNNSNGVEVKSYFNKSAGRAASNNNNNNNSHAGGGNKKGGAGEYGRKKHAKSEGAAAATDKQRFKTLPASEALPRGQAIGGYIFVCNNDTMDENLRRELFGLPSRYRDSVRAIRPGLPLFLYNYSTHQLHGIFEAASFGGTNIDPTAWEDKKCPGESRFPAQVPYCTVCFDPQSSTLV

SEQ ID NO: 47068 - protein, 62 aa, Zea Mays
MMGSQDPNLEDHNHVYLFGYSFVVSYAMASCCIFLRRYLNHKTVFVCTTVPFSSVASAGDEY

SEQ ID NO: 47069 - protein, 319 aa, Zea Mays
MYIAKCGTDGNFSEGEMVPFGPIALSPSSGVLNYGQGLFEGLKAYKKTDGSILLFRPEENAERMRTGAERMCMPAPSVEQFIDAVKQTVLANKRWIPPTGKGSLYIRPLLMGSGAVLGLAPAPEYTFIIFVSPVGNYFKEGLAPINLIVEDKFHRATPGGTGGVKTIGNYASVLMAQKIAKEKGYSDVLYLDAVHKKYLEEVSSCNVFVVKDNVISTPAIKGTILPGITRKSIIDVALSKGFQVEERLVSVDELLDADEVFCTGTAVVVSPVGSITYQGKRVEYGHQGVGVVSQQLYTSLTSLQMGQTEDWMGWTVQLN

SEQ ID NO: 47070 - protein, 780 aa, Zea Mays
MVVLVRVLVACAKFRCPAANLLLSASTSRVRAQPGGPLLRQRTSKVSLRSIAMSTTQASEAAADKGLPLAVDATMIDEYASQSKLLQEFVKIPTIGKAWIFNSKDDDMSKAVVSIGKSDLLANKRRQFLLNTHISKSPSKSVDFQWSPFPTEISGVSAIVPSPSGEKLLLVRNSEDDSPTKLEIWGPCQLENEIHIAKSVHGSLYTDEWFEGISWNQEETFIAYVAEEPPQPKPVFNDYGFKKEGLSEKDCKSWKGQGDWEETWGETYSKKRIPALFVINISSGEVRPVKQIPRSLSVGQVIWAPSSSYSLVFVAWSSDNGFQGTPRKLGIKYCYNRPCALYAAPDPFGQEAEKSLTEGNKGETTTMIKLTANLSSAFFPRFSPDGKYLVFISAKSAVDSGAHNATNSLHRIEWCTDGKLDGSLGVADVVPIVLCPKDNCFPGLYCFGLLRDPWLTDGQTMIISSVWGSREVILSVNVVSCELSRVSPQDSDYSWNVLAVDKNNILAVSSSLITLPQMYYGIKVSQTESNWEWQGVSTPFPKPSDKISSVLAEHKFSILKIPISNPSDELANGAKLPFEAIFVSHKDSASNPTIVVLHGGPHSVYPSSYSKSLAFLFSQGYNLLVVNYRGSLGFGEEALQSLPGNIGSQDVNDVLTALDLVIKRGLIDPSRVAVVGGSHGGFLTTHLIGQAPDTFVAAAARNPVCNLSLMVGTSDIPDWCFVEIYGKEGKKYFSESPSVDDLCQFHQKSPISHIAKVKTPTLFLLGAQDLRVPVSNGLQA

SEQ ID NO: 47071 - protein, 348 aa, Zea Mays
MFCELSRVSPQDSDYSWNVLAVDKNNILAVSSSLITLPQMYYGIKVSQTESNWEWQGVSTPFPKPSDKISSVLAEHKFSILKIPISNPSDELANGAKLPFEAIFVSHKDSASNPTIVVLHGGPHSVYPSSYSKSLAFLFSQGYNLLVVNYRGSLGFGEEALQSLPGNIGSQDVNDVLTALDLVIKRGLIDPSRVAVVGGSHGGFLTTHLIGQAPDTFVAAAARNPVCNLSLMVGTSDIPDWCFVEIYGKEGKKYFSESPSVDDLCQFHQKSPISHIAKVKTPTLFLLGAQDLRVPVSNGLQYARALKERGIETKTIVFPEDIHGIDKPQSDFESFLNIGVWFKKHMGK

SEQ ID NO: 47072 - protein, 164 aa, Zea Mays
MVDAGDITAGGPPRAHEEEQAGTPAYGSVVLGGTFDRLHDGHRRLLKYAELIEPVDKRIKGVEDYIKSIKPELIVQVEPIEDPYGPSITDEKLDAIIVSKETLNGGLAVNRKREEKGFPLLKVEVVDLLSGGVEGEKLSSSALRKLEAEQAQQSETKSGSLEAS

SEQ ID NO: 47073 - protein, 396 aa, Zea Mays
MAVPSRLLLCSAVVAVALLVAPGEVAGAAGHGHTHTRRLRPKKSAAAAAAKLYPANATRAEAIERQFTRWVRFVGGRLGHGTYNYNRPALTLLPARTLVVDRRPGAGDFTSIQAAVDSLPLINLARVVIRVNAGTYTEKVNISPMRAFVTVEGAGADKTVVQWGDTADTAGSWGRPMGTFGSATFAVNSMFFVAKNITFKNTAPVPRPGALGKQGVALRISADNAAFVGCNFLGAQDTLYDHLGRHYYRDCYIEGSVDFIFGNALSLYEGCHVHAIARNYGALTAQNRQSLLEDTGFSFVKCRVTGSGALYLGRAWGTFSRVVFAYTYMDNIIIPRGWYNWGDPTREMTVFYGQYKCTGPGANYAGRVQWSRELTDEEAKPFISLDFIDGFQWLRL

SEQ ID NO: 47074 - protein, 464 aa, Zea Mays
MKTSVVVVAALAAVLFLAQSYASLAGASGPRVIIVGAGMSGISAGKTLWEAGVRDLLILEATGRVGGRMHKHNFGGINVEIGANWVEGLGGDQLNPIWPLVNSTLKLRNFYSDFDSVVGNVYKENGGGLYDEEYVQKRMDRAYEVEELGANLTKKMHPSGRDDISVLAMQRLFNHQPNGPTTPVDMALDYFIYDYEFAEPPRVTSLQNTQPTPTNADFGEDNYFVADQRGYESIIHSIGSSYLSTDGNGKLKDRRILLNKVVRQIAYNKQGVVVKTEDGSSYRADYVVVSTSLGVLQTDLIQFKPQLPAPVGRVYFTGEHTSERYNGYVHGAYLAGIDSANILINYIFKNEEYKVRGKYDVDDLIAQSGSRHRDRSRPIINGLGLGTTTPCVMGRMGAPKQDPEGGENEFLGQAHEASSLGAMDKTGRGNPPYLTFLFLHSFLRERDRLHLIIVHVKIKMATPE

SEQ ID NO: 47075 - protein, 75 aa, Zea Mays
MYSCQRRQETKNAYGSGLFLNVHELELQAYQSTVRAFHAAGPLTWEQESLLTNLRLSLNISNEEHLLQLRHLLSL

SEQ ID NO: 47076 - protein, 990 aa, Zea Mays
MRNSKPPSKLAMLMALLSLSFLFCYGVEKVHCSTVHENNQDFHSLLDFKKGITNDPNGAMSNWTNNTHFCRWNGVKCTLTPPYRVMELNLTGNDLAGRISTSVGNLTYLSLLALPNNRFSGPIPPLNKLQNLSYLSLDNNFLNGVIPESLTNCSNLDTLGLSKNNLTGVIPPSIGSLTKLKVIFLYKNNLSGVIPSSLGNITNLSVIALSENQLNGLIPTELWQMPHIASLYLFCNNLSGEIPQTISNLSSLQELSLAVNMLSNTLPSNFGHALPNLKLLYLGGNLFEGQIPDSLGNVSGLVHLDMSYNKLTGKIHSIFGKLLGLSFLNLEENMFEASDSASWDFFVDLIACSSLTVLSLASNNLQGAIPNSIANLSTNLRNLLMSDNHLSGVVPPSIGKLNGLIELELDGNNFTGTIEDWMPKLTSLQKLYLHDNSFEGTIPPSISNLAHLTLLDFSNNKFTGSIPPSMGNIQLLINLSLSNNNFRGTIPAKFGDLKQLVFLDVSSNELGGEIPNSLGQCQNLAAIKMDQNVLIGNIPTSFSNLKSLSLLNLSHNKLSGPLPNYLNDLKLLNKIDLSYNNFHGEIPKAGILDNSTLVSLDGNSGLCGGAMNLHMPSCHTISRRARTISDLVKILIPMFGLMSLLHLVYLVFGKKTSRRPHLSQRSFGEHFEKVTYNDLAKATRDFSEYNLIGRGSYGSVYSGKLKEVEVAVKVFNLEMQGADKSFLVECETLRSIQHRNLLPIITACSSIDTTGNSFKALIYELMPNGNLDKWIHHKDNEALPKRLSLAQRIAVVVNVADALDYLHHDCGRPTIHCDLKPSNILLGDDMNAVLADFGIAHLYSDSQSTWTSSFSSIGVKGSIGYIPPEYGGGGSVSTSGDVYSFGVVCLEILIGKRPIDPVFIGGLDIISFVKNSFPDQIFHIMDSHLVEECEHLIQDNKVTNEEMYQCLVDLLQVALSCTCSLPSERSNMKQVASKLHAIKTSQIGYK

SEQ ID NO: 47077 - protein, 401 aa, Zea Mays
MDTEPLLPAHLLHSLPEHSEVFHFSPPPSPSCPSPASSYKDRIIFGAHPPPPQPPPPPPLPPSHSHRAHRRRSSVDGLYDFDLPSCSSSPPSPPSDPEDPSSAAAAGASSLFEFIANAASARTNLHRSRTAPAMAPLSAVTLAAAAAAGDQAPAPPERPSIVLHTFLFLLAYLALGVTFYAAAPANFSSSAGPTHPVADALYFCIVTLCTIGYGDITPATPAAKLFSISFVLIGFGFVDILLSGMVSYVLDLQEHLLITALKNPTSARKHRHNYIFDVKKGRMRIRMKVALALGVVAVCVGVGAAVLRRVESLGWLDAVYLAVMSVTTVGYGDQAFRTLAGRLFASAWLLVSTLAVARAFLYLAEMRIDKRHRAMANWVLSRDMTVSEFLAADIDNNGYVT

SEQ ID NO: 47078 - protein, 247 aa, Zea Mays
MLCYKTQIDLQNKRRKSSQKKITGFQFVPGDSSMVIITSADSRIRVLDDFELVHRFKGFRNTSSQISACLAGNGRYIISASEDSRVYIWRNDDGSKPSKKKGIVSVTNTHEHFHCESVTVAVTWPFTSTTMTSLMNPRKQELELGSENGYSPQDLQTKLAKAQEMTDVEYRSTNITSYNSKHNSDRTSPAWPEELVTPPNQSLSATTCHANEGDQALNRSAWGLVIVTAGRGGQIRTFQNFGFPVRV

SEQ ID NO: 47079 - protein, 291 aa, Zea Mays
MPEVFCEKLKCGAASGGARKLYVGNLHSNITEDQLRQVFEPFGQVELVQLPLDAMTGLCKGYGFIQFARLEDAKAAQSLNGQLDIAGRVIKVSAVTDHVGVQASGATTGDLDDDEGGGLALNASSRAALMLKLDRSGTATSLTGGIGAAGVAVPATSVIGAAGAASLLSPTVSAVGSVPGAPVLPITAQNVIMSTPTEFLLLKNMFDPSLETDPDFDLDIRDDVQDECSKFGAVKHIFVDKNTAGFVYLQFDSVTAAGKAQQALHGRWFAGKMITATFMSDQEYSTKFPNL

SEQ ID NO: 47080 - protein, 298 aa, Zea Mays
MEKNKMEIESLESKMLVANQSIETTTSEIIRLRESELFPQLLELIAGLMSMWRGMYECHQVQTHIVQQLEYLNNARNTNPTSNVHRQAALQLEIEVDRWYSAFCSLVKSQRDYVYSLTGWLRLSLFCHHDPLTKAQNSDIYGLCEEWQLAIDRIPDKVASEGIKTLLTVIHAVVIQQAEEHKQKKRSESAFKEFEKKAEELRALESKYVGAEGYREMSRKSSVADKRAKVEALRSRADEEKIKYEKSIGVTRAMTLNNLQTGFPNVFQAMTGFASVCMEAFESVYNFKRSSDPKRLLT

SEQ ID NO: 47081 - protein, 292 aa, Zea Mays
MFKYDTVHGQWKHHEVKVKDSKTLLFGEKEVAVFGCRNPEEIPWGSVGAEYVVESTGVFTDQEKAAAHLKGGAKKVVISAPSKDAPMFVVGVNEKEYKSDINIVSNASCTTNCLAPLAKVINDKFGIVEGLMTTVHAITATQKTVDGPSSKDWRGGRAASFNIIPSSTGAAKAVGKVLPVLNGKLTGMSFRVPTVDVSVVDLTVRLEKSATYDEIKAAVKAEAEGSLKGILGYVEEDLVSTDFQGDSRSSIFDAKAGIALNGNFVKLVSWYDNEWGYSTRVVDLIRHMNSTK

SEQ ID NO: 47082 - protein, 69 aa, Zea Mays
MLHCYLNQEDLVEEGKEEEKKEKLSNMFVLITVKNRFGVSFSVTKYLLKCIALYTLTCKTMVYALAYYV

SEQ ID NO: 47083 - protein, 324 aa, Zea Mays
MILKTLCALLALVLEPFGAYGDGEFKWNYGYPYIAAVINFSQTWALYCLVKFYNATHEKLQAIRPLAKFISFKAIVFATWWQGVGIAIICQTGLLPKEGKVQNALQDFLICIEMAIAAVAHAYVFTVEPYQHVPALPPDHGEVMCQESKMEVEVDVDDDTGGTPASIAQQETHVEAPGGTSIKESVQDVVLGGGQHVVKDVALTISQAIGPVEKGVGKIQEKFHHISLKPGDKKEPQVAVEEHVTENVVDGKPAVAVNAEVEVQQKAQDRRGEEEGVQLKRTEKEGRLSHLRVPWWKMQRKREQVQEQAESKAEAVRGPDGEQG

SEQ ID NO: 47084 - protein, 52 aa, Zea Mays
MGQTRKEVVLALDSRFTSMMTDQRSSRTPCCIAISTKRTWWRKERRKRRRRN

SEQ ID NO: 47085 - protein, 335 aa, Zea Mays
MHGRRHLAASLTRALIQAPSRSISSTPSLLQTLDPSVPSPPAAGAGRLAELRRRLQADAPSLGDFTYSVEVGTRQRPLPKPKWMKETVPGGAKYAAIKAKLRELKLHTVCEEARCPNLGECWSGGETGTATATIMILGDTCTRGCSGHFAETVQKLKALKPEMLIEALVPDFRGDPSCVEKVATSGLHVFAHNIETVEELQRNVRDYRANFKQSIDVLEMAKEYAPPGTLTKTSIMLGCGETPDQVIRTMEKVRAADVDVITFGQYMRPSKRHMPVSEYVTPEAFEKYRALGVEMGFRYVASGPMVRSSYKAGEFYIKAMIEAERAKGTAADSSA

SEQ ID NO: 47086 - protein, 226 aa, Zea Mays
MAVDLMGCYAPRRANDQLASCRPRSCPPGGRQRGAAAAEPDAGLHEAEPGRVGRHVRHLHVLLLVGHGRRGQRLQGPEPHVLREAAAVRPQAEALRRRPLRGHHQRQPLPLLQEKEEPREEDHQSAGDQLEGRRHPFGRVLVEEVRPEAHQGLPLPTGLLQVQHCAGMPGEEARGAGHRRPGHAGGDVRGRAPPHAGRGPGAEPPGDRVAGARRRLRRQRARCLVY

SEQ ID NO: 47087 - protein, 235 aa, Zea Mays
MARLAVAARAFSAAASGGGVSLVQGASRGIGLEFVRQLLRRSDGGRVVATCRTPGSAAELQKLREEHAPGRLTVLPLDVTDESTIEAAAASITETHGSLDLLINSAGILSIPNVIQPETTLSKVQKSSLMLAYEVNAVGPILVIKHMWPLLKIGGRSETRRGFALVANMSARVSSIGDNALGGWHAYRASKTALNHDQDSVGGVRQEGQHRLRPAASWNRGHRPLEAVSEECPRG

SEQ ID NO: 47088 - protein, 196 aa, Zea Mays
MGEEDASAGGDPQRLKRIAAAAYDYENDARWAGYWSNVLVPPHLASRPDVVDHFKRKFYQRYIDPGLVVEPMSSMTSTQSSRPAAKSSATPSSENVRARDSGSSTRSTGTSQHPPAERTANSLQLDGRTINFSINAWVLVVASLGILPVLPNHISSKAYRLSLLGTICSSAYSLYGTYGLLYFLCFAGRLIMLLDS

SEQ ID NO: 47089 - protein, 210 aa, Zea Mays
MALHAAAPACAVFCRLPSPSPSHAGSRRSLPAVASPRGVVSAAPLRTRAVPTKAIVNSDGIPETSDSPHVVCFGELLIDFVPTVNGVSLAEAPAFKKAPGGAPANVAVGIARLGGSSAFIGKVGDDEFGYMLADILKQNNVNNQGLLFDPHARTALAFVSLRSDGEREFMFYRNPSADMLLEEKELDLDLIRKLPELLKMLEYLFHMIQI

SEQ ID NO: 47090 - protein, 899 aa, Zea Mays
MAAGSGGGGFLGDVNDPWLKPRLLRAVVTGRLPQPGAAAELSPTEVASILEVVRTHGLLTEDLPGRGALVNPKLAEAWRAAVDAWVERVVALVESDSTYSCWLGTCFLGVTFQECRNDRFAESHSIWFEKILSNLQQSSSFQLVIVISCTSMSDLFVRLAKFSNLKKEGSSFAGRVVEPVLRLLNQNGLVADEAIDLLRTVIKLYPSSVNRHYNKVESAIAAKIMSNVKPSENSPSLTYTVSMLQKFARTLALLPSVRVSEDSWSLMIRRILIVVNNLLNDAFIGLEEEKKGHDIMLLLVPPGTDPLPTLGDEVMPGGNVHIMKKFRVFTVPTISALTLCCSVMLTSYYPVQVNVPIHALIALMRRVLLVDGSLHNKLFPSTTSLHQELICFDLPSLHSTFLDLLNATIKGMRSQLLPHGASIIRLITEYFKIAKLPTLRTKTYSILQLLLTSMGVGTSLHLLEATVRNAVADLNDDGEINMTMINTNSSQLTNESSSKVYSKKRKQEPQMQNSTISGSEKVAISPRKRKGSSIPITSKGVAPESTGDVTLSTPHSVKIAALETLEVLLNVGGSLRMDRWRSEVDMLLINVARSACGMGGSYEQKPSTFGEPNISDFQLASLKGLLASFLSSHARPPYLANGIELFRKGKLEIGTKVAEFCSHALLALDVLVHPRALSLERTVPASSGFNYTAQKKTVFGAGTHQISPFGDQPQAMEVEDMYDDWLISNNNEPPEVPVNGSDAVVSKGVLVEDGKQLNPIAEDPKVDPPRITDAAQDAPASTKTDVKVVDAAAATAAKPNTAENPSSSNAVPSPVRTTDSDSRKHASFPEQDSPHENKSAAVHPGEASATPGVGSSHHRHEAPEARSASFTELFGSESGIESESEDLMPDIVDGDPDSD

SEQ ID NO: 47091 - protein, 317 aa, Zea Mays
MNRGQFRASPLQQQVIWSADTATASSSSVVMSAFNFNSCHEDQEAFSPNNLPSLSSPSLLFSHDQQQSFPHTGTTTTSPGHQLLANRGAAAGGCLPSLHDGGQENHHMPESWSQMLLAGLVGGDQERCTAALLSKGMDDWGDHAATASAACMVGGGGTKKDEGSAVPQQPPYSFYGSHGHLAAGGDEHEMPAPASKAQLSQMLLASSPRSCVTTSLGSNMLDFSNSAPPMELKRHHHHSDNSSECNSTATAAGSAVKKPRVQAASSSAQSTLKVRKERLGDRITALHQIVSPFGKTDTASVLQETIGYIRFLLGQIE

SEQ ID NO: 47092 - protein, 231 aa, Zea Mays
MRFISKDPEGYVPISVVAGFKKIKALVQSNSMLASALRTSSKLVVSDDGARVKREQPFTESDLEELQARIVVAENLPDDHCYQNLMRLFSVVGSVRTIRTCYPQTPNGTGPATNRSAKLDMLFANKLHAFVEYDTIEDAARAIVELNDERNWRSGLRVRLLSTCMGEVYGHPTFIFGDSAILMGGFGDVDDKWQSVPLVIIVQFFRMAQNGEMTKTKVVIVEIYFALDLFI

SEQ ID NO: 47093 - protein, 356 aa, Zea Mays
MALSSSRAPLLPLLCLLLTVVAAAKHPKQEKPTPAALAPVVTLEGCPDKCGNVSIPYPFGTKDGCFRPGFFVVCNDTFDPPRPFINSSLALGTDDTRTQIVVEDLYYLTAEDGMPETTPTRSAWPIELAGVSLSDAKARLLGAFSYECRLNETHHSVRRQRINFGVYRSPFLLSDADNVLMGIGSNVVAEQTTGPLCQSYLNLISLSDGPVNGSCSGQGCCQANLPPVRSDSTVTIQKGTMYEDGGYGGGGGGRVDCSYAMIVEKAWYNFSSVDLDSDAFLRRNAAGVVPVVADFTIDGGGCPDAGEPTPKDFACISDNSKCVDRLVYDNSRGHYCSCSVGYQGNPYIHGGCQAYC

SEQ ID NO: 47094 - protein, 78 aa, Zea Mays
MVGAPQAMFHSCVTFAAFSCIMDGLSKQQAAMALTLDVKSPTVKYEEGRVIPPFTLPPLLDALDPLGSFCQTLIKPKH

SEQ ID NO: 47095 - protein, 106 aa, Zea Mays
MCLLRRLRGKDDMINAGMAGCCTGIALSFPGAPQAMFHSCVTFAAFSCIMDGLSKQQAAMALTLDVKSPTVKYEEGRVIPPFTLPPLLDALDPLGSFCQTLIKPKH

SEQ ID NO: 47096 - protein, 304 aa, Zea Mays
MHAPPLVAFAGGACPASAASSLSPWLASLRPAIVAAPARLLWFRRGALRLEAKAAWRATGGGRGPRVPAKGAVLASYMGAEEVVGPLSLLDEEELILHIRKERDNGKLPADVAINLEELYYNYRNAVLQNGDPNAYEIMLSNMTALFDRVLLDVQNPFTFPPYHKAVREPFDYYMFGQNYIRPLVDFRNSYVGNISLFHDMEEKLHQGHNVVLMSNHQTEADPAIIALLLEKTNPWISENIVYVAGDRVVTDPLCKPFSMGRNLICVYSKKHMNDFPELIEMKRRSNTRSLKEMALLLRYLPLQ

SEQ ID NO: 47097 - protein, 560 aa, Zea Mays
MPSSLCSCSSSPSTLRRAPSGSTSSISKSIVTVNGQFPGPTVFAREGDFVVIRVVNHVPYNMSIHWHGIRQLRSGWADGPAYITQCPIQSGQSYVYKFTITGQRGTLWWHAHISWLRATVYGPIVILPKPGVPYPFPAPYDEVPVLFGEWWTADTEAVISQALQTGGGPNVSDAFTINGLPGPLYNCSAKDTFKLKVKPGKTYMLRIINAALNDELFFSIAGHPLTVVDVDAVYIKPITVETIIITPGQTTNVLLTTKPSYPGATYYMLAAPYSTARPGTFDNTTVAGILEYEDPTSSPPPHAAFDKNLPALKPTLPQINDTSFVANYTARLRSLATAEYPADVPREVHRRFFFTVGLGTHPCAVNGTCQGPTNSSRFAASVNNVSFVLPTTALLQSHFAGKSRGVYSSNFPAAPLVPFNYTGTPPNNTNVSNGTKLVVLPYGTSVELVMQGTSILGAESHPLHLHGFNFFVVGQGFGNFDPAKDPAKYNLVDPVERNTVGVPAAGWVAIRFRADNPGVWFMHCHLEVHVSWGLKMAWLVLDGERPNEKLLPPPSDLPTC

SEQ ID NO: 47098 - protein, 416 aa, Zea Mays
MTRVIHDSGDGMQKEALDLVSSDVNFPKGCFPDYRIGPNNQIIDPEETHEAVPLKEVVAKETAQLLEQHRRLSVRDLKEKFEKGLSSASKLSEEAKRREAASLDRQVLLKKLRDVLDTLKGRVAGRNKDDAEEAISLVEALAVQLTQREGELIYEKAEVKKLANFLKQATVDARKVAEEERALALAEIEKARAAIEKVEKAFHVHDSTKSSREEEIEELRKEVREARRIKMLHQPIKVMDMEFELQALRTLISQKTQLCNQLNKELATIKRLEVDSSDLFELEGSNTLGSQFCIIPRVDGAPNIANCPIQWYRVISGGSRGLISGATKFTYAPEPFDVGRLLQAEIILNADKIIVQTDGPIDNGSSNPNEWEGLLVEFCPCFSYWKAENKTSKRMVYKSKRVIFHHDEVMWEPWWW

SEQ ID NO: 47099 - protein, 259 aa, Zea Mays
MLHQPIKVMDMEFELQALRTLISQKTQLCNQLNKELATIKRLEVDSSDLFELEGSNTLGSQFCIIPRVDGAPNIANCPIQWYRVISGGSRGLISGATKFTYAPEPFDVGRLLQAEIILNADKIIVQTDGPIDNAAGLEHYVDSLMKRTDIEFNVVVTQMNGKDYSSNSVHVFHIGKLRIKLQKGWSTKARELYSTTMKLCGSRGGGNAAARAVFWQARKGLSYTLAFETDRDRNAAIMIARKFASNCNIALAGPGDQDT

SEQ ID NO: 47100 - protein, 101 aa, Zea Mays
MERVASSYCVSLLAQRRAYTVAAAMAKKGAAARRVDEKKAAAALTKRVMGKKEVNTAAAAAAEEKAWVPDPVTGYYRPAGSAKEVDAAELRAKLLTEAAAN

SEQ ID NO: 47101 - protein, 66 aa, Zea Mays
MYLNTNTTLYNAVLKAEGESVLLTEEARRAATTLHIDFQKGGIHLPKDKLENANQLNLEIAQLGRK

SEQ ID NO: 47102 - protein, 143 aa, Zea Mays
MLSRAAAIRRGAAAAFSTVSEKPETGLYGFDVLRTAKGFRRFVDDAIHRSDELVARVARLPSSTEIVRTMDEISNTVCSVIDSAELCRNTHPDREFVDEADKASMRIYEHLQRKLEGQQLPCILTFKKEGFIFLKINLRMLIS

SEQ ID NO: 47103 - protein, 515 aa, Zea Mays
MSGFLAVVGKVGTFLLWVLFLVLQTATRIVGSLLASSAEQQDDHHQESAAARRRSPPASPHPELYEPASASLAQLWDPPPLPHLAFAPAADESSSSSSLRRRASAPLPRADEDFVVPSSAYSRPTVGVAHTHSVSAPPLRAIETRAVPSRLVTAGGKRPRLERKYSKIVDQYRSLDEVIEALAQAGLESSNLIIGIDFTKSNEWTGKNCFNGMSLHNISDNPNPYEQAISIIGKTLSAFDEDNLIPCFGFGDASTHDQDVFAFYPDERPCNGFQEALARYREIVPHLRLSGPTSFAPIIDMATTIVEQSGGQYHVLVIIADGQVTRSVDTEFGQLSTQEQMTVDAIVQASQFPLSIILVGVGDGPWDMMKEFDDNIPARSFDNFQFVNFTAIMSKKISQSKKETEFALSALMEIPLQYKATLELGILGRRIGESPERIPLPPPFASYSTVSRAEPSRANSYRSVPSHPREEPAVNSTITASVTSPSAAESRVLEPQPKVMGIANFPRANTCCPPK

SEQ ID NO: 47104 - protein, 359 aa, Zea Mays
MSGFLAVVGKVGTFLLWVLFLVLQTATRIVGSLLASSAEQQDDHHQESAAARRRSPPASPHPELYEPASASLAQLWDPPPLPHLAFAPAADESSSSSSLRRRASAPLPRADEDFVVPSSAYSRPTVGVAHTHSVSAPPLRAIETRAVPSRLVTAGGKRPRLERKYSKIVDQYRSLDEVIEALAQAGLESSNLIIGIDFTKSNEWTGKNCFNGMSLHNISDNPNPYEQAISIIGKTLSAFDEDNLIPCFGFGDASTHDQDVFAFYPDERPCNGFQEALARYREIVPHLRLSGPTSFAPIIDMATTIVEQSGGQYHVLVIIADGQVTRSVDTEFGQLSTQEQMTVDAIVQARWSMGYDEGI

SEQ ID NO: 47105 - protein, 153 aa, Zea Mays
MEHDAPYGRQPLADMISVFACKFPDLNTYKSCDLLPSSWISVAWYPIYRIPTGPTLQDLDACFLTFHSLSTTPDGTISGCPETNNLHNSKVASVPGKITLPLIGLASYKLNGSLWTSNQHHEQQLTTSLLKAADDWLCQRQVDHPDYRFFLTH

SEQ ID NO: 47106 - protein, 127 aa, Zea Mays
MAAMVRGPAMASAAGPGATSSAAAAAAAAAEEMRWRQLDSGVSAVSFGFVATAILVSMFLAMAILEHFLRPPTTAHAPPRGRGVLRRLRLFLLGRSGGAPGGTDLEAARKLHGHAPLEKNLHSSLHR

SEQ ID NO: 47107 - protein, 331 aa, Zea Mays
MEVRSEQGLMAGRDLFGLTKSPPAPAPPSSAAMQSVRMAYTADGTAVFAPVSSSPATPSYQPQGAAHGASMSAATVVGGNGAPAAPSMGEPLAKKKRGRPRKYGPDGSMALAMVPASAASGSPATGQGFSGPFSPPALNPASSLVVASPDGFKKRGRPKGSTNKPRVDAAGSSGAGFTPHVITVQAGEDVASKIMSFSQHGTHGVCVLSANGSISNVTLRQTATSGRTVTYEGQFEILSLSGSFFLAEDGVQRSRNGSLSVSLAGPDGRLLGGGVAGLLVAASPVQYWEASILEAERSHKSRLLQNPHRLHRGLLRQPGWEDPAALLQEAH

SEQ ID NO: 47108 - protein, 136 aa, Zea Mays
MASSPRTAMFFLALSLALLGDDLRRCSASQVYVVYMGKAPQGDRAPRRRRHAGLHRQMLTAVHDGSSEKAQASHVYTYSAGFQGFAAKLNEKQAIRLAEMPGVVSVFPNTKRRLRTTHSWDFMGLSTSAEGQVPGL

SEQ ID NO: 47109 - protein, 85 aa, Zea Mays
MFPAWMMYQQGRLLEIVDASMGSYPEKEVLRYIKVGLACTQATPSSRPTMRQSEWDTTRKGTTELEAQIPKKRGHILLQDDYNIL

SEQ ID NO: 47110 - protein, 68 aa, Zea Mays
MAPLQLPSLSLSLLRGGSATEGRRSVYTHRQRALEWVECGEEGDDGAIATERGDRSQGPDPLHWWTSP

SEQ ID NO: 47111 - protein, 882 aa, Zea Mays
MASASFQPVAASAASAPPRPAPRHPFAAAAAARRSSLSLRPAAHRPVIPLRSSAVAANTLRATHRRAVSARSRRRAQGLGAAPALAASTWGGGDKGGCLSCFPKSRRGRSGLAPCALPHASGLSFRSRLSGSKVRPSHILHAAGPDEPHVASPTWSDTSLDTTDMDHAISKEELEDVLNTPLPEHPKLIRGQLKNGLRYLILPNKVPANRFEAHMEVHVGSIDEEEDEQGIAHMIEHVAFLGSKKREKILGTGARSNAYTDFHHTVFHIHSPTKTKEYGEDLLPFVLDALSEIAFHPKFSSSRVEKERRAILSELQMMNTIEYRVDCQLLQHLHSENKLSNRFPIGLEEQIHKWDPDKIRRFHERWYYPANATLYLVGEIDDIPRAVREIEAVFEHTLSENEGNPVPSANPFGAMASLFAPKLPGGFTSNLTGEKSPATDKIKPAKRERQAVRPPVEHKWSLPGVAQDAKPPAIFQHELIQSFSINMFCKIPVSKVQSYKDLRSVLMKRIFLSALHFRINTRYKSSNPPFTSVELDHSDSGREGCTVTTLTVTAEPQNWRSAIKVAVHEVRRLKEFGVTMGEMTRYMDALIKDSEQLAMMIDSVPSVDNLDFIMESDALGHTVMDQLQGHESLLAVAETVTLEEVNTVGAEVLEFISDFGKLNAPLPAAIVACVPQKVHVDGAGETEFEIYPEEITEAIKAGLEEPIYREPELEVPKELITQSELDDLKSQCNPSFVPLTKEENAVKVFDSETGIAQRRLSNGISINYKITQNEARVGVMRLIVGGGRATEDSESKGSVIVGVRTLSEGGCVGNFSREQVELFCVNNLINCSLESNEEFIFMEFRFALRDNGMRAAFQLLHMVLEVRRAVTTFTAEVDSSVS

SEQ ID NO: 47112 - protein, 672 aa, Zea Mays
MGEMTRYMDALIKDSEQLAMMIDSVPSVDNLDFIMESDALGHTVMDQLQGHESLLAVAETVTLEEVNTVGAEVLEFISDFGKLNAPLPAAIVACVPQKVHVDGAGETEFEIYPEEITEAIKAGLEEPIYREPELEVPKELITQSELDDLKSQCNPSFVPLTKEENAVKVFDSETGIAQRRLSNGISINYKITQNEARVGVMRLIVGGGRATEDSESKGSVIVGVRTLSEGGCVGNFSREQVELFCVNNLINCSLESNEEFIFMEFRFALRDNGMRAAFQLLHMVLEHNVWLEDAFNRATQLYLSYYRSIPKSLERSTAHKLMLAMLNHDERFVEPSPHSLQKLTLQSVKNAVMNQFVGGNMEVSIVGDFTEEEVESCVLDYLGTVRASSSLNTEERIEKISFRPFPSDVHFQQVYIKDTDERACAYIAGPAPNRWGFTTEGNDLFNVIRISDADAEVSEPVSLDLTGKRHVDVRSHPLFFGITLSLLAEIINSRLFTTVRDSMGLTYDVSFELNLFDKLGLGWYVIAVTSTPSKVHKAVDACKGVLRGLHSSRIVERELDRAKRTLLMKHEAETKTNAYWLGLLAHLQSSSVPRKDVSCIRELTTLYESATIEDLYLAYEHLKVDDSSLFACIGIAGAESGEDTNDDELDVDLHGMAPMGGRGLSTMTRPTT

SEQ ID NO: 47113 - protein, 1180 aa, Zea Mays
MASASFQPVAASAASAPPRPAPRHPFAAAAAARRSSLSLRPAAHRPVIPLRSSAVAANTLRATHRRAVSARSRRRAQGLGAAPALAASTWGGGDKGGCLSCFPKSRRGRSGLAPCALPHASGLSFRSRLSGSKVRPSHILHAAGPDEPHVASPTWSDTSLDTTDMDHAISKEELEDVLNTPLPEHPKLIRGQLKNGLRYLILPNKVPANRFEAHMEVHVGSIDEEEDEQGIAHMIEHVAFLGSKKREKILGTGARSNAYTDFHHTVFHIHSPTKTKEYGEDLLPFVLDALSEIAFHPKFSSSRVEKERRAILSELQMMNTIEYRVDCQLLQHLHSENKLSNRFPIGLEEQIHKWDPDKIRRFHERWYYPANATLYLVGEIDDIPRAVREIEAVFEHTLSENEGNPVPSANPFGAMASLFAPKLPGGFTSNLTGEKSPATDKIKPAKRERQAVRPPVEHKWSLPGVAQDAKPPAIFQHELIQSFSINMFCKIPVSKVQSYKDLRSVLMKRIFLSALHFRINTRYKSSNPPFTSVELDHSDSGREGCTVTTLTVTAEPQNWRSAIKVAVHEVRRLKEFGVTMGEMTRYMDALIKDSEQLAMMIDSVPSVDNLDFIMESDALGHTVMDQLQGHESLLAVAETVTLEEVNTVGAEVLEFISDFGKLNAPLPAAIVACVPQKVHVDGAGETEFEIYPEEITEAIKAGLEEPIYREPELEVPKELITQSELDDLKSQCNPSFVPLTKEENAVKVFDSETGIAQRRLSNGISINYKITQNEARVGVMRLIVGGGRATEDSESKGSVIVGVRTLSEGGCVGNFSREQVELFCVNNLINCSLESNEEFIFMEFRFALRDNGMRAAFQLLHMVLEHNVWLEDAFNRATQLYLSYYRSIPKSLERSTAHKLMLAMLNHDERFVEPSPHSLQKLTLQSVKNAVMNQFVGGNMEVSIVGDFTEEEVESCVLDYLGTVRASSSLNTEERIEKISFRPFPSDVHFQQVYIKDTDERACAYIAGPAPNRWGFTTEGNDLFNVIRISDADAEVSEPVSLDLTGKRHVDVRSHPLFFGITLSLLAEIINSRLFTTVRDSMGLTYDVSFELNLFDKLGLGWYVIAVTSTPSKVHKAVDACKGVLRGLHSSRIVERELDRAKRTLLMKHEAETKTNAYWLGLLAHLQSSSVPRKGIDDII

SEQ ID NO: 47114 - protein, 496 aa, Zea Mays
MHHLVLIMNVTKDSQSCDQSFKEMVAMCLVKDQTKRPTAEKLLKHSFFKNAKPPELTIKSILSGLPPLWDRVKALQLKDEAQLALKKMPSSEQEALSLSEYQRGVSAWNFDIEDLKAQASLIHDDEPPEIKEDEDIARNIEVEKDLSSRNHLGKSFANECNSRQRAFVTTLKSDGNRPTTNEAFDFDFDFSEAATTRRADGHERNIRENDSLPSTAKRDPESNHWTSDVGQRQLSSGGSNSSTAERGYGFERDAVVQTIPEKQRSEARKTASLSGPLSLPTRASANSLSAPIRSSGGFVDSSGDKSKRSVVEIKGRFSVTSENVDLAKVQEGPLSSLSRKSPEGSLLKKSASTGDCLINTKLMRNANQLKEFCNSSVSSSVLIPHLNNLVQQTMFQQDVIMNLLSNLQQDEKVDRTQPGISSQVRTMENGKVADTANSEKERSLLVKISELQSRMITLTDELIAAKTKHVQLQQELNALYYREEIEDVRDEDIEET

SEQ ID NO: 47115 - protein, 122 aa, Zea Mays
MVFNCTQKVNIAEEAVRRLTGITLMLPTAFEKPTSSAPLSSCPSDAASASASAAIEDSVKHFLQAPLENSGIIPNAAVFQTKPASLHRVASLENLQKRIVGDAMYSETASTTFSDPEALADR

SEQ ID NO: 47116 - protein, 98 aa, Zea Mays
MLPTAFEKPTSSAPLSSCPSDAASASASAAIEDSVKHFLQAPLENSGIIPNAAVFQTKPASLHRVASLENLQKRIVGDAMYSETASTTFSDPEALADR

SEQ ID NO: 47117 - protein, 552 aa, Zea Mays
MVAMEESGIPIGASTWNAVIAGCVRAENGELAIELLGKMVSVGGVVPSVATFNTVLHVISALRGVNVLRELHAFVLRNAEVVGLGPVDLDRLQESLAAGYMCSSCVQYAGRVFRDVRISTCFLGNLMISGFLDTGQRNQALGVLREMAFGCGHEAQHLPSASLTLVLPEVNLATKRGLEIHAYAYRHGFECDTSVCNALMAMYARGGKICRSDKVFQGLDAKDVVSWNTMISGYATVHDFDLSFELFREMQRNGTRPDDYTFTSVLNACSFACNHRTVMALHGQMIRMGLCHSYVDDMNSLMDAYGKCGFIAEAQKIFDETERKDTVSWNIIISCYGYSGFPQRAIRLFHQMQDQSYKPTRVTFIAVLAACSHAGLVDEALRYFEAMHGDYSITADEAHYACIVDCFGRAGQLQRAYEFIRGMPVVPNACVWGALLSSCRIHGNIGLAEIAAKKLVELDPQHSGYWMLLKDMYSKAKRWNDVSQLRAAMRDNGVKKCPGYSWIEGRDSEVHRFLTADKLHSQSHQIYEVLGGLTEQLMDEGYEIDVDLTYTE

SEQ ID NO: 47118 - protein, 141 aa, Zea Mays
MERNIKASSGKCGIAVEPSYPLKKGANPPNPGPTPPSPTPPPTVCDNYYSCPDSTTCCCIYEYGKYCFAWGCCPLEGATCCDDHYSCCPHDYPVCNVKQGTCLMGKDSPLSLSVKATKRTLAKPHWAFPGNTAADGMKSSA

SEQ ID NO: 47119 - protein, 183 aa, Zea Mays
MLCEGTGLRMQSLVRNVCRAGSRGAAARLLEAAAVHPGAAQPSSAVRHLRHPCGFARPIGVDQPKPVQRRTILRDGGRVPAAASGFGLCAKVLVATRGLSTAGNAAEVASDSDDSTSPAVEHPPRIKFKRPDKTARHIMNILNKEAVEKVRSERAIPDVQPGCIIQMRLVIPLLCVPALALFL

SEQ ID NO: 47120 - protein, 257 aa, Zea Mays
MDGGREQQAPPESQPGKNLIKIPSYQEVFGTGASTSSSKPPSYNPPVATSAAAAASSSSSSSGSFSQAFSFLKSSEFYSPPPPPPPQPTTTPRPTQASPSAPTPQSKNSILVSHRQRGNPLLKHIRNARWTFADVVPDYVLGQSSCALYLSIRYHLLHPDYLYYRIRELQKNFRLRVILCHVDVEDVIKPLHEITRTALLHDCTLLCGWSLEECGRYLETIKVYENKPADSIREHMDNDYLSRVYILPGNPLQNKII

SEQ ID NO: 47121 - protein, 328 aa, Zea Mays
MFLGTNTKVSCLKQLTLEFLGGTCTCPEYGGCLKAEKGPWKDPNILKIVQSGGVHCARQIVTISNGEEKFITYAKPKRHAMRGSDTSTAESGSEADDAVSPKALRSYISHPKLTPVREEVKMVRATSFSTRVPEYDVPVVDKAVDATWKREQPRKAPSVPQDSSVKTASKPSGRPWDKIAANLMACLMAIVMLVRSIKDLATMRLSSKGGSEESYCTLYPDSVQKEEFRPPSPFPGFAEADLFAVVLQRLGELEEKVQMLQEKPSEMPCEKEELLNAAVRRVDALEAELIVTKKALHEALIRQEELLANIDSKEIARAQRKKKTMFCY

SEQ ID NO: 47122 - protein, 426 aa, Zea Mays
MMLEEIWMMLVLSVSKQLVQWCGQEFDGLLVFDECHKAKNLIPDAGSQPTRTGKTVLEIQEKLHEARVVYCSATGASEPRNLGYMVRLGLWGEGTSFQTFPQFLGALEKGGVGALELVAMDMKARGMYVCRTLSYKGADFYIVEAPLEERMMNMYRRAAEFWAELRLELLSASELFADGNSNQIWRLYWASHQRFFRHMCMSAKVPAVVRLAKEALAENKCVVIGLQSTGEARTEEAVTKYGVEMEDFVSGPRELLLKLVEENYPLPPKPDSFQQGEETVTEIQRKRALDVSFKGRVRKVAKVVDVSDDDTDDYSPSESDHESTESDEEFHMCQICNTEEEQSLLLHCSGCSRHVHPHCLTPPWTGTITDDWACYTCKIVEDEEKKQDAHVADCLKRISLLMSMKRIPCSGGKDVVISCMELPEKD

SEQ ID NO: 47123 - protein, 533 aa, Zea Mays
MPPGAAAVAATSQQADCCGHGPGPGPSWRGGGGCDVPGGASCSYLPLRKRLSVDGKFPAPRICIWECDGEAGDITCDIVAAPIRRSCSARAMPPPPAASLFRRMMTPPPSRPRPPQREVEDAVAARRPGETISKGHRSYGLMLNLQLGVSYSVGKSSALPFRKLSSSDFDPREKVWTRFPPEGSKLTPPHHSVDFRWKDYCPAVFRHLRKLFGVDPADYMLAICGSDTLRELASPGKSGSCFFVTQDDRFMIKTVKKAEMKVLIRMLRSYYEHVCRYKSTLLTRFYGTHCIKQAGCPKVRFIIMGNFCCSEYKIHRRFDLKGSSHGRTIDKAEEKIDEATTLKDLDLDYAFHLQRFWYDELMRQIQMDCTFLETQGIMDYSLLLGVHFRDDFSMSKIESTGKRKSFEGGGDVCELCFTESGCKDRDFIVDSRKPLVQLGKNMPAQAERRSKRVLDKFLLNERHLFITTSSGGFQDVYLFFGIIDILQDYDITKKLEHAYKSFQVNPGCISAVDPKLYSRRFQEFSRRVFIREH

SEQ ID NO: 47124 - protein, 90 aa, Zea Mays
MRLTLSYKKRKQWPFMRPGRKQSKKEERGRSWIECSKRTGVKWRKHKERKLLSSSRKSWNDIWSWKGYKGKERKRCAERKWRRKKREPTS

SEQ ID NO: 47125 - protein, 223 aa, Zea Mays
MMMRGMTAKNFDPVRYSGRWFEVASLKRGFAGQGQEDCHCTQARSIQVDTFCVHGGPDGYITGIRGRVQCLSEEDIASAETDLERQEMVRGKCFLRFPTLPFIPKEPYDVLATDYDNYAIVSGAKDTSFIQIYSRTPNPGPEFIDKYKSYVANFGYDPSKIKDTPQDCEYMSSDQIALMMSMPGMNEALTNQFPDLKLKAPVALNPFTSVFDTLKKLLELYFK

SEQ ID NO: 47126 - protein, 122 aa, Zea Mays
MGASESLLSRQQLQQPRPQWADEITTVSEGRRDDADADPLVRRIRSLTIAPPLLSSQSEAEAESSLTDILVGKPSNSSATSGNLNPNVLAELFAMYREWQEENAKKISRKQIQHGTSWCRRR

SEQ ID NO: 47127 - protein, 193 aa, Zea Mays
MSPPKSAARPPASLTSPKTGANKRQRKAASAVPLGDITNLLVLAESPTPSKPRRTARRALPATSDVSAVSSTCSSSASVTPAPKPSSAAVFEEEHSVVKSPTISTVHRRTTGAQERCRRNPASANNKGKEPVAATASCPPLGKSARTHSRKKDTRPISASVPCHEEAAHCKHTQLTRGPFGEAESILCRYRCL

SEQ ID NO: 47128 - protein, 436 aa, Zea Mays
MAALLGLFFLLLLQLGPSSCSNVYIAYMGERSPELRPALVRDAHHGMLAALLGSEQAARDAILYSYRHGFSGFAATLTDSQAARLADSPGVVRVVRNRVLDLHTTRSWDFMRVMSPSHSAGILSNSRLGEDSIIGVLDTGIWPESASFRDDGIGEVPRRWKGRCVAGDRFNASNCNRKIIGAKWYIRGYEAEYGKMNTTDIYEFMSARDAVGHGTHTASTAAGAPVADASFRGLASGVARGGAPRARLAVYKVCWATGDCTSADILAAFDDAIHDGVDVLSVSLGQAPPLPAYVDDVLSIGSFHAVARGIAVVCSAGNSGPYSETVINSAPWIVTVAAGTIDRTFLAKIALGNNSTYAGQTLYSGAHPGRSMSLVYAEDIASNDADDTDARIPEFYSSEGKGGALLPNKGSEISFGGGGDRQESSWRRCHLRPVLN

SEQ ID NO: 47129 - protein, 211 aa, Zea Mays
MPREIITIQVGQCGNQIGMEFWKQLCLEHGIGKDGLLEDFATQGGDRKDVFFYQADDQHFIPRSLLIDLEPRVINGIQNSEYRNLYNHENIFVAEHGGGAGNNWASGYHQGEQFVDDIMDMVDREADGSDSLEGFVLCHSIAGGTGSGMGSYLLETLNDRYSKKLVQTYSVFPNQDCRRAPSSIKSYVCTNKLFGLHGYVCKHNYFKVILR

SEQ ID NO: 47130 - protein, 275 aa, Zea Mays
MIDTVKSLCRHIVFSQIRIAVERLHLSNPTFAQTNSLVSTVMSASTTTLRYPGYMNNDLVGLLASLIPTPRCHFLMTGYTPLTVERQVNMIRKTTVLDVMRRLLQTKNIMVSSYARTKEASQAKYISILNIIQGEVDPTQVHESLQRIRERKLVNFIDWAPASIQVALSRKSPYVQTTHRVSGLMLANHTSIRHLFSKCLGQYEKLRKKQAFLDNYRKFPMFADNDLSEFDESREIIESLVDEYKACESPDYIKWGMEDPGEANVVAALDSKLVV

SEQ ID NO: 47131 - protein, 331 aa, Zea Mays
MSLNRYCHRLGATPIMELMIAARKAVPELQLVYGIAVDRVYTGTLMTSLDMAGLSITIMKSGESILKRLDAPTKAPAWPVGSEGNRPPAKFPVPLPPSPSMKDDEILAPSQELSKQGCILEAVIEASATEIINLMDSLNEWDSKVGDGDCGSTMYRGATAILEDMKKRYPMNDAAGTINEIGATIRRVMGGTSGILYAILCKAAYASLKQSSTVTANKWADALEASIAAVSKYGGASAGYRTMLDALIPASAVLKQRLEAGDDPVTAFIASSEAASAGAESTKQMQAKAGRSSYIAPDLLASIPDPGAMAAAAWYRAAALAVKNKVHGSKS

SEQ ID NO: 47132 - protein, 422 aa, Zea Mays
MALQGKKLINNPDDVVTEFIEGLVETYPGLQYLDGFPQIKVVLRADVERGSYDKVAVISGGGSGHEPSHAGFVGPGMLTAAVSGDVFASPPVDSILAAIRAVTGPMGCLLIVKNYTGDRLNFGLAAEQAKSEGYKMEMVIVGDDCALPPPRGIAGRRGLAGTILVHKVAGAAADAGLSLAEVAAEAKHASEVVGTMGVALSVCTLPGQITSDRLGPRQMELGLGIHGEPGVAVVELQPVDVVVEHVLKQILSQETQYLPVTRGCNAVLLVNGLGATPIMELMIAARKAVPELQLVYGIAVDRVYTGTLMTSLDMAGLSITIMKSGESILKRLDAPTKAPAWPVGSEGNRPPAKFPVPLPPSPSMKDDEILAPSQELSKQGCILEAVIEASATEIINLMDSLNEWDSKVGDGDCGSTRCNSYS

SEQ ID NO: 47133 - protein, 470 aa, Zea Mays
MEEPTESRPAGAEDLANGAKDPEGPPPEVEEEEVEEPPRSATAKQEEAKEVLGSEGSRPFTMRELLGELREDGETAVGGSTARSAFGDGNGVGSADAEGSSYSQDSAQFSSHHDVAMDLINSVTGVDEEGRSRQRILSFAAKRYVNAIESNPDDPDAYYNWALVLQESADNVDPNSSSSKDALLEEACKKYAEATRLSPTLYDAYYNWAIAIADRAKMRGRTKEAEELWKQAILNYEKAVQLNWNSPQALNNWGLGLQELSAIVPARDKQTIIKTAISKFRAAIQLQFDFHRAIYNLGTVLYGLAEDTMRSGKPDVSPNELYSQSAIYVAAAHALKPNYSVYRSALRLVRSMLPLPYLKVGYLTAPPANNSIAPHGDWEVSQFILNHEGLQQADASDQPPSQSPGHLDRGRKPVRINVADIVSVSACADLTLPSGAGLCIETIHGPTFLGVENSAIARNLQAKNGVVWLG

SEQ ID NO: 47134 - protein, 230 aa, Zea Mays
MAAAAGRKVAVAAVQFACTDVEAENVATAERLIREAHKKGAKIVLVQELFEGHYFCQAQRLDFFRRAKPYKGNPTIISLQRSWKLSYLSVFSKKQTMHIIIRWLLSMLMALILDSIANHTFQMDQDIKRSFISTPVTLALRLSKPSMPPLVLESAGISGFQSVQEQWHFWGLKYCFIPLQLDPNPRIVTWIPVNIGSGLCKAMLVPTWSLLLLPTGLAEKLLTLSMARAR

SEQ ID NO: 47135 - protein, 415 aa, Zea Mays
MAATASNPFPFPSRRSPEDSLFYAVYPILLPSHLPAPALHASLQSLHLSLLSHLAPFLSSHLFHRDPFTLTLPADPAAPCALCASPPVPHLHGALRFGDSLPDEWIAVSLLFALTRAFPDIAARAWDSDGEFLLIEAAFALPRWLDPESAPNRVFIFRGELHILPPSLFPETPSLEAALAAIYDDSIDTRAADAIQAAIQRRIAGLPEKAAENLHTARVIVPAPVAKVLKEEPCLIARAIEGFYDRDIDTMKHAARMEKFLKGPGGEGIEIVRTTVRMTRAMYAQLVQQNFQAPRGYPMPRREEGPEKWMEAELGMKIACGFEMMYQERKRQGEEGKCSTWDVYRKSLEATGCLDGLYPGSIEYKRVIEDAMQYYKSSNLYSRTREILSEPVRRIDEILSMLYSTDEFKERTGRA

SEQ ID NO: 47136 - protein, 247 aa, Zea Mays
MDVDDVLSNLRVVGVPTKSAIYIWGYNHSGQTARKGKECHLRIPKSLPPKLFKLGNGKSLRWTDIACGREHTAAVASDGSLFTWGANEFGQLGDGTEDSAKEPKKVKSLETEFVKSVSCGAHCTAAVAEPRENDGTVSKSRLWVWGQNQGSDYPRLFWGAFTPNTVIKQVSCGAVHVMALSEDGLLQAWGYNEYGQLGRGRTSQGLQGARVLNAYARFLDDAPEQVKIVRVSCGEYHTAAISENGEV

SEQ ID NO: 47137 - protein, 332 aa, Zea Mays
MRRWWRCRRGRCWSRTAGTGVGGGGGGPRKRVFVCPEPSCLHHDPAHALGDLVGIKKHFRRKHGGRRQWVCARCAKGYAVQSDYKAHLKTCGTRGHSCDCGRVFSRVESFIEHQDACNSSRIRGEAVAVAVPAPPSALPVIRPAVPRHQPTVAPAPPPPELQLLPASAAASAPLASTPTASLSTTTNASQEQEPHAAAAATTTTKLQLSIGPTVIAPGADAAAATASAVGEEDDSEAKELRRAMKEKAAADAARARARGEAAAAERALDEARRARQRARADLEKACALRDHAARLLAQVTCHACRQRSLAVAGGPAVACDSIIRGGGGEAGI

SEQ ID NO: 47138 - protein, 272 aa, Zea Mays
MLHEDPGNVSYSAVGGLSDQIRELRESIELPLMNPELFLRVGIKPPKGVLLYGPPGTGKTLLARAIASNIDANFLKVVSSAIIDKYIGESARLIREMFNYAREHQPCIIFMDEIDAIGGRRFSEGTSADREIQRTLMELLNQLDGFDELGKVKMIMATNRPDVLDPALLRPGRLDRKIEIPLPNEQGRMEVLKIHAAGIAKHGEIDYEAVVKLAEGFNGADMRNLCTEAGMAAIRAERDYVIHEDFMKAVRKLNDAKKLESSAHYSADFGKD

SEQ ID NO: 47139 - protein, 473 aa, Zea Mays
MTSTAAGAGSGSLNPPHSNPSGDGGPRIRSPPGKGNKPVALADITNTGKPNAARSITVPDLVKENTKLLTLLNEKTKIIDLSRVEIYKLRLALQASKQQNLHLTQTNSQMLAEINTGKDRIKMLQHELSCTTALLKVKDSELDRKKNAGNVQQKGVKSQVLKTKASTVAVEAHHVGDSVTSGVEHHVVESQSAVSSNTVCQEPPQDGKQKRMPQRRRSSRLNQGSCEIRGVSQNTLHENPVVPVAPSTLSLEKQYGQTTGKHMKSLQNECSATVHEVIMASEFEKTEINELPQKTDLKEIPEACSSETEVQSHKIGDKAFNSKQNHLTGSQSSLSFNTVDTPEPPEDNTVKRCSKKRSSIEDVNAKLDTITSEPLRHEEKRKSRRKISARLNSVSSEHTDIVVETEHKDVIVSLAGSTSNVSMEQRTNQEQDGDCFSRKSNENQILGRRSLRRAAEKVVSYKEMPLNVKMRRP

SEQ ID NO: 47140 - protein, 189 aa, Zea Mays
MKAAAVHSVPPPSAVTLVSVVARRALVPAALRGNARRGAALVASAAPDGQMRRSPGPAVAKLTDVMSRPVQVATPGQRLSEVDDAFFAARQYSGLLPVVDDDGRCVGVISNKDKAKAPNGMESTVAEVMTSPAITLTLYKTVLGKQAAALMLKEKVHRIPVVNEQQHVIGIVTRSDVFQALEATSKAWE

SEQ ID NO: 47141 - protein, 240 aa, Zea Mays
MITHHPSLIRPSVLTLRADVLRRRPTLHAVASAPPPRLWSLRATTGGTSPVSGDGGKRAVPLPTRGPALLGFVRSNFLPLALIGGIILGLLDPTLGCLAHKYSLSKYSTFGIFVISGLTLRTRELGAALEAWPAGLYGLGSILLFTPFLAQFIMQVQFFPPEFITGLAMFCCMPTTLSSGVTLTQLVGGNSALALAMTVASNLLGIIICWRGGLYRLQPPRDGGGAAHARAEGRRYCSSA

SEQ ID NO: 47142 - protein, 195 aa, Zea Mays
MPLIFWHLFLTRSANCLSDYFFQFLYFYWSSMEHPAPAISLLMYYIIVYNCRDLFCCLHPFLLSLLCKFSSSPLNLSLVYGSSTCLLFMMDFLSSFHHFLLPSINSYFCAPYSLFFWHLTGLAMFCCMPTTLSSGVTLTQLVGGNSALALAMTVASNLLGIIICWRGGLYRLQPPRDGGGAAHARAEGRRYCSSA

SEQ ID NO: 47143 - protein, 761 aa, Zea Mays
MRLSTPARTCFPSTLPPSQLPPLLLLPSRPPHRLASALSPRSAPRRRGLPSPPPPVVSAMRQRGRRRAALPPAAAGGGGGGELAAPDSQEKRGGTDLKTLATRFWKVAAPYWWSEDKTQARLRLAAVFALTLGTTGISVGFNFLGRDFYNALADKDQEKFTTQLLYYLGAFAGGIPFFVLRDYARETLSLRWRSWMTSYYMKRYFKNRTFYKIQSQSIIDNPDQRINDDLSAFTGTALAFSLTLFNAAVDLVSFSNILYGIYPPLFIVLVVYSLGGTAISVFLGKNLVNLNFMQEKKEADFRYGLVRVRENAESIAFYGGEENELQLLLDRFRRAFENLSELLIASRNLEFFTNGYRYLIQILPAAVVAPMYFSGKIEFGVINQSVSAFNHILSDFSLIVFQFQSISAFSAVIDRLGEFDDLLDGNESSQSSQRDSIDGINIVFKSSGPCVPSSNGSLTQSDPCMVLEIRNLTLLTPRSGNVLITGLTMELKDKDHLLVMGPSGSGKTSLLRALAGLWTSGTGEIIYHVRGSTQLQKPNPSSDKPSSMNLKGEEESLQSSKQRRDNGIFFVPQRPYMVLGTLRQQLLYPTWTEEVQHSPDNDDKNSDPLPFLSEVSTSDLVGAKSEVPSTAELIEVLEDVKLGYILPRFNGLDSTHDWASVLSLGEQQRLAFARLLLATPTLVLLDESTSALDEANEAHLYSQIEAAGITYVSIGHRKTLHKFHNKALYISMSDSTDTNPRNWELKPADKLPAEEPSQFPS

SEQ ID NO: 47144 - protein, 611 aa, Zea Mays
MLLLDQEKFTTQLLYYLGAFAGGIPFFVLRDYARETLSLRWRSWMTSYYMKRYFKNRTFYKIQSQSIIDNPDQRINDDLSAFTGTALAFSLTLFNAAVDLVSFSNILYGIYPPLFIVLVVYSLGGTAISVFLGKNLVNLNFMQEKKEADFRYGLVRVRENAESIAFYGGEENELQLLLDRFRRAFENLSELLIASRNLEFFTNGYRYLIQILPAAVVAPMYFSGKIEFGVINQSVSAFNHILSDFSLIVFQFQSISAFSAVIDRLGEFDDLLDGNESSQSSQRDSIDGINIVFKSSGPCVPSSNGSLTQSDPCMVLEIRNLTLLTPRSGNVLITGLTMELKDKDHLLVMGPSGSGKTSLLRALAGLWTSGTGEIIYHVRGSTQLQKPNPSSDKPSSMNLKGEEESLQSSKQRRDNGIFFVPQRPYMVLGTLRQQLLYPTWTEEVQHSPDNDDKNSADPLPFLSEVSTSDLVGAKSEVPSTAELIEVLEDVKLGYILPRFNGLDSTHDWASVLSLGEQQRLAFARLLLATPTLVLLDESTSALDEANEAHLYSQIEAAGITYVSIGHRKTLHKFHNKALYISMSDSTDTNPRNWELKPADKLPAEEPSQFPS

SEQ ID NO: 47145 - protein, 179 aa, Zea Mays
MEALAGAASSSVLPARHPPSRVAAQSLALRPSRCGPLRAVSAGGVSGKDDAHAANGSPVLKLNSDSSLNGVLPIAADKSQKASSTNVSTDSSGSRAGLFRTPISGGVQSATFAHGLPPPALAVRNLMEQARFAHLCSVMSGMHHRRTGYPFGSLVDFANDSMGRAWMEWTVERASHHIW

SEQ ID NO: 47146 - protein, 236 aa, Zea Mays
MEQARFAHLCSVMSGMHHRRTGYPFGSLVDFANDSMGHPIFSLSPLAIHTRNLLADPRCTLVVQVPGWSGLSNARVTIFGDVYPLPAEQQEWAHKQYVAKHQQWASQQWGNFYYYRMHNISDIYFIGGFGTVAWIDVKEYETIQPDKIAVDGGDLQSLKELNAIFSKPLREVLSSEGEVDDAALISVDSKGIDIRVRQGAQFNIQRLAFDVPHKVETLEEAKKALHKIIKDKQQIK

SEQ ID NO: 47147 - protein, 98 aa, Zea Mays
MLNIVTVRCGHCTSLLSVNLRGLIQSLPVQNHHYSQQQENFTVQNMGFTENYPEYAPSYRMPTTLSAKGDLDHMLHVRGKLIDSYMHVYATALYILLC

SEQ ID NO: 47148 - protein, 106 aa, Zea Mays
MVYDVTPFMDEHPGGDEVLLAVTGKDATADFEDIGHSDSARDMMEKYHIGQIDASTIPAKRTYVHPQQAPSHSDKNNDLLIKILQFLVPIMILGLAFGIRQYTKSE

SEQ ID NO: 47149 - protein, 840 aa, Zea Mays
MAELMKKANGTYFPEEKLLRWFAQLALAVDYLHSNFVLHRDLKCSNIFLTKEQDIRLGDFGLAKTLKADDLASSVVGTPNYMCPELLTDIPYGFKSDIWSLGCCMYEMAAHRPAFKAFDMAGLISKINRSSIGPLPTFYSSSMKTLIKSMLRKSPEHRPTASEIIKNPYLQPYVNQYRPFANILHPGRSPEKPGTDSRSSQKSMSGSQCSSISGTGSDMDSIQSNERNTSGLASSSSNTIDTEGAETTELQRHKDTACPGLKRQDSSKSVQDNQHPGHENKQPKIIKKILTTLREESKFRESNSPVRASRVKLNSPSNRERSSDDSKQSDISSSSRSSEVMSHESANASCEPVKRGHASPPLKHLSPIVEHSPKVKIKVDELLHPHLAKQVGEVVDAAAGKVKNRTPPIFIKCTSIPTRRQGVASPSRQHTGVKRAHNKVMAEHARNPCQHLHSPSNALVKLPSVPMVPPSHLEDLKRKPDNTRAKSAPPRALATKEDNSACSSSTIGNAENTNQSEPSEPDSPTYLVSSCKCLIPDTIIQKHGITSKKSSEIITTNCEKKMTSNGDLSLSAAMVQSSDIPEQEFICKDGMLSSQVGQCSETVTVPSDEDKFTVRELLSSVPDLCSLVPTTMMNTEPGRGPTLTQSSEKPSGPHLNPPPVEDIIHVISHSSFHVNGEQAVKETGSESIDVDKRLNMVREEIGVRSTEPNLIPSGPIDSDTVKPNVVEANITFQKPSSTDAIKLPTIPEGNFSTLETNNGFKQEAAPAKEILDVTSFRQRAEALEGLLELSAELLEHSRLEELAIVLKPFGKAKVSPRETAIWLAKSFKGLMNDEASRSST

SEQ ID NO: 47150 - protein, 237 aa, Zea Mays
MLQCIFLLSDSGEVMVEKQMAAHCVDRAICAWFWDYVVAHAAGDPSKVLQVVVSPTHYLFQIYRNGVTFLACTQVEMAPLMAVEFLSRVADVLTDYLGDLNEDIIKDNFVIVYQILDEMMDNGFPLTTEPNILKEMITPPNIVNKMLNVVTGKSSTLGSKLPDAAASFVPWRRTTVKDASNEVYVNIVEELDACVNREGVLVKCEAYGEVQVNCSLPGLGNQIRSYHLFLPTGSSSS

SEQ ID NO: 47151 - protein, 299 aa, Zea Mays
MMDNGFPLTTEPNILKEMITPPNIVNKMLNVVTGKSSTLGSKLPDAAASFVPWRRTTVKDASNEVYVNIVEELDACVNREGVLVKCEAYGEVQVNCSLPGVPELTMSFANPAIINDVTFHPCVRFRPWESNQILSFVPPDGQFKLMSYRVQKLKKTPIYVKPQLTSDSGNCRVSVMVGIRNDPGKPIDSITVQFQLPPLIVSADLTANYGTVDILADKTCLWTIGQIPKDKAPALSGNLRLEEGLAQLHALPTFQVKFRIMGVALSGLQIDKLDVKNTPNAPYKGFRAQTQAGKYEVRS

SEQ ID NO: 47152 - protein, 94 aa, Zea Mays
MKVTGKRKRNAQHLQENSALCKVCVNDKSFIVRCCVKGSLLEINERLIKQPDLLNTAADREGYIAVFQPKPADWLKIKDKFLSYEDYKNLRGVC

SEQ ID NO: 47153 - protein, 519 aa, Zea Mays
MMVSGGSSVRHVLNAAASTSALDMGIAVVVSVNIPSAYSLAYDWPSWLQTPVNLPDLKTLNSTTIGVKAVVQKKRPLIYVYDLPAEFDSHLLEGRHYRFQCVNRIYDDMNRTIWTQQLYGAQIALHESILASPHRTLNGDEADYFYVPVLDSCLITRSDDAPHLLLPRDLRRRSYHALEYYRMAHGHIAQQYPYWNRTSGRDHIWFFSWDEGACYAPKEIWKSMMLVHWGNTNTKHKNSTTAYWADNWDDIPLDKRGNHPCFDPRKDLVLPAWKEPNPGAIWLKLWARPRNNRTTLFYFNGNLGSAYEGGRPEDTYSMGIRQKLAAEFGSTPNKQGRLGRQHAADVTVTYLRTEKYYEELASSVFCGVLPGDGWSGRMEDSMLQGCIPVIIQDGIFLPYENVLNYNSFAVRIQEDDIPGLISTLRGINDTQVEFMLGNVRQMWQRFFYRDSILLEAQRQKKLFSEEAPWSVEVSKLPDDDDVFATFIQVLHYKLYNDPWRQDFLQTKDTRLPNICSRTS

SEQ ID NO: 47154 - protein, 527 aa, Zea Mays
MMVSGGSSVRHVLNAAASTSALDMGIAVVVSVNGYFGIDCSIPSAYSLAYDWPSWLQTPVNLPDLKTLNSTTIGVKAVVQKKRPLIYVYDLPAEFDSHLLEGRHYRFQCVNRIYDDMNRTIWTQQLYGAQIALHESILASPHRTLNGDEADYFYVPVLDSCLITRSDDAPHLLLPRDLRRRSYHALEYYRMAHGHIAQQYPYWNRTSGRDHIWFFSWDEGACYAPKEIWKSMMLVHWGNTNTKHKNSTTAYWADNWDDIPLDKRGNHPCFDPRKDLVLPAWKEPNPGAIWLKLWARPRNNRTTLFYFNGNLGSAYEGGRPEDTYSMGIRQKLAAEFGSTPNKQGRLGRQHAADVTVTYLRTEKYYEELASSVFCGVLPGDGWSGRMEDSMLQGCIPVIIQDGIFLPYENVLNYNSFAVRIQEDDIPGLISTLRGINDTQVEFMLGNVRQMWQRFFYRDSILLEAQRQKKLFSEEAPWSVEVSKLPDDDDVFATFIQVLHYKLYNDPWRQDFLQTKDTRLPNICSRTS

SEQ ID NO: 47155 - protein, 634 aa, Zea Mays
MEFIGSGKDVVKKIQLVAAGGLSTELPSSSSSRGEGDALPALLVKAPSQTVAGFDCVGADDVAVSLHEMDDKVEELQGRPGSNKDTAIRAYDDAHVVPYSVSLSMPASPSGFHLSQFMPVAPTDHVHRPEPTARSPRLVKQTRFHSQPIVLNMNLHPSSSTNKNVDEARRWDSARDKRFDPFKTFSGRLERQLSNLRGRPQDPVDGVSSSPDSEEETDQVPAADRYFDALEGPELDTLRATEVPVLPKDEKWPFLLRFPISAFGMCLGVSSQAILWKTLASAPATAFLRVSPAVSHALWYVALALTALVSSTYLLKVVFYLEAVRREFYHPVRANFFFAPWIACLFLALGAPRLVVAEMHRGVWYALMAPILCLELKIYGQWMSGGQRRLSKVANPSNHLSVVGNFVGALLGARMGLREGPVFFFAVGLAHYLVLFVTLYQRLPTNVTLPKELHPVFFLFVAAPSVASMAWAKINGQFDNGARIAYFIALFLYMSLAVRINFFRGFRFSLAWWAYTFPMTGASVATITYATEVTNVLTRALSIGLSGISTVTAAGLLVTTVFHAFVLRDLFPNDVSIAITRKKPKFSKILAQVRSSSSDMKELVLSLSNKPAAQSDCGDTETDPSVTAKSRAEP

SEQ ID NO: 47156 - protein, 776 aa, Zea Mays
MTSANKAKLQLQERVPLPRTAWKLADLAVLSLLLALLARRASSLVSSGGTAAACTWCWVAALICEAWFTVVWLLNMNAKWNPVRFVTHPERLAGYWAGDDELLPAVDMFVTTADPKLEPAVVTVNTVLSLLALDYPAGKLSCYVSDDGCSAVTCYALREAAEFAKLWVPFTRKHGAKVRAPFAYFSSSSGGGAAERGGGGGAADADAEFLRAWTSMKNEYEELVRRIESAEEKSLVRRGDGAFAEFVGADRGNHPTIIKVLWDNDSSKSESDEQAAGDGVPSLIYVSREKSRTQPHHFKAGAMNVLTRVSAVLTNAPIMLNVDCDMFANNPQAALHAMCLLLGFDDEVHSGFVQAPQRFYGGLADDPFGNQMQKVGHGIAGLQGIFYCGTGCFHRRKVMYGVPPGSGTGATKADSPSYKELQKKFGSSKELIESARSIITSKEAPAAVADLTSRVEVAKQVSACSYETGTSWGQEVGWVYGSMTEDVLTGQRIHAAGWRSALLSPDPPAFLGGAPTGGPASLTQYKRWATGLLEIVLSRHNPFLLSASKRLRFRQCLAYLVIDVWPVRAPFELCYALLGPYCLIANRSFLPKASEPGFVVPLALFLAYNAYNLGEYVDCRLSARAWWNNQRMQRITSSSAWLLAFLTVVLKTVGLSETVFEVTRKEQQQQQGSPDGDGADADPGRFTFDSSPVFVPPAALAMLSVVAVAVGAWRAVTGGGGGPGVGEFVCCAWLLLCFWPFVRGLVGGRGSYGIPWSVRIKAALLVAAFVHLSTRK

SEQ ID NO: 47157 - protein, 844 aa, Zea Mays
MCQAKLDTNTLSASVSSIYIHDHVPVPTGSVCVFLWFSRATVLRGDQEESVVRPARSLPAMTSANKAKLQLQERVPLPRTAWKLADLAVLSLLLALLARRASSLVSSGGTAAACTWCWVAALICEAWFTVVWLLNMNAKWNPVRFVTHPERLAGYWAGDDELLPAVDMFVTTADPKLEPAVVTVNTVLSLLALDYPAGKLSCYVSDDGCSAVTCYALREAAEFAKLWVPFTRKHGAKVRAPFAYFSSSSGGGAAERGGGGGAADADAEFLRAWTSMKNEYEELVRRIESAEEKSLVRRGDGAFAEFVGADRGNHPTIIKVLWDNDSSKSESDEQAAGDGVPSLIYVSREKSRTQPHHFKAGAMNVLTRVSAVLTNAPIMLNVDCDMFANNPQAALHAMCLLLGFDDEVHSGFVQAPQRFYGGLADDPFGNQMQVIFEKVGHGIAGLQGIFYCGTGCFHRRKVMYGVPPGSGTGATKALAAADSPSYKELQKKFGSSKELIESARSIITSKEAPAAVADLTSRVEVAKQVSACSYETGTSWGQEVGWVYGSMTEDVLTGQRIHAAGWRSALLSPDPPAFLGGAPTGGPASLTQYKRWATGLLEIVLSRHNPFLLSASKRLRFRQCLAYLVIDVWPVRAPFELCYALLGPYCLIANRSFLPKASEPGFVVPLALFLAYNAYNLGEYVDCRLSARAWWNNQRMQRITSSSAWLLAFLTVVLKTVGLSETVFEVTRKEQQQQQGSPDGDGADADPGRFTFDSSPVFVPPAALAMLSVVAVAVGAWRAVTGGGGGPGVGEFVCCAWLLLCFWPFVRGLVGGRGSYGIPWSVRIKAALLVAAFVHLSTRK

SEQ ID NO: 47158 - protein, 151 aa, Zea Mays
MGIARLNRSSGGGVLLLQSIFYLVFRALADQIFRNPDYHKHVRKAVVKQLKEFRKHYEGYVPMEYKVYLKKMKRSGEWGDHVTLQAAADRFAAKICLLTSFRDTCLVEIVPRDATPTRELWLSFWCEVHYNSLYAVEDLPTRKTKKKHWLF

SEQ ID NO: 47159 - protein, 146 aa, Zea Mays
MEGFTGAHVSSRVISACAAPSPTVVLPVKPPVETPPSRVASMSAQICLARHPVVFLPETPWPASSPRSSSSRRCRLPGPLPACFHAFASVCSERLHFLYESRLAVGKSSEGFQALQQSTPGPASRPLLHRRVRLIVPSLSFTSSHG

SEQ ID NO: 47160 - protein, 212 aa, Zea Mays
MAECKDDDSGRRSPSSSMDSSTHPPALSTASSASRRPPERRDQLSPDLQLGLSLSPASSALLVAETNNSIVPSTPRNQALPDWPPIKPFLRSALTASARRRRTLFVKVYMEGVPIGRKLDMLLLDGYSSLLAKLCHMFKASITYADAVEYHQRVPHEKAAHVLTYEDHDGDWMMVGDVPWELFLGSVKKLRIARTDRKDFAEQSGVVMLRLY

SEQ ID NO: 47161 - protein, 380 aa, Zea Mays
MNCSYVKDYEFVVIFDADFQPQADFLKRTVPHFKGKDDVGLVQARWSFVNKDENLLTRLQNINLCFHFEVEQQVNGAFLNFFGFNGTAGVWRIKALEESGGWMERTTVEDMDIAVRAHLKGWKFLFLNDVECQCELPESYEAYRKQQHRWHSGPMQLFRLCFVDIIKSKIGFWKKFNLIFLFFLLRKLILPFYSFTLFCVILPMTMFVPEAELPAWVVCYIPATMSILNILPSPKSFPFIVPYLLFENTMSVTKFNAMVSGLFQLGSAYEWVVTKKSGRSSEGDLVALVEKHSKQQRVGSAPNLDALTKESKGTEEEKNKKKRKKKHNRIYRKELALSFLLLTAAARSLLSAQGVHFYFLLFQGVSFLVVGLDLIGEQVD

SEQ ID NO: 47162 - protein, 117 aa, Zea Mays
MSSPKLQKSLPCLSSLFSGATQNVLRFPSPDPARGGQELPMIRTATVRARLLLSRSYVAQAQAASRWPLVRWKASHLGSVRSFYQMDITRQYKNKSLTARGCHSSPESQGEWLGTDH

SEQ ID NO: 47163 - protein, 214 aa, Zea Mays
MSSPKLQKSLPCLSSLFSGATQNVLRFPSPDPARGGQELPMIRTATVRARLLLSRSYVAQAQAASRWPLVRWKASHLGSVRSFYQMDITRQYKNKSLTARGCHSSPESQELAMKSCVPCNSKDLGPMSEDSAKKLLEQVNGWELITEGGVLKLHRTWKVKNFVKGLEFFQLVAAIAEEEGHHPDLHLVGWNNVKIDVWTHSVTMEKPNVEDTSP

SEQ ID NO: 47164 - protein, 494 aa, Zea Mays
MTAAAVRFESHRLTHPSTSPPPESMVERRYTEEEEALEIKSLRRIIAAYANYQDAAERDVERYERSFKMLPTAHKKLLFHLGLKYQSLRWCISMNASFIMKMLEAFEPPFDMSQYVDDDVHAHPSILHDHSHMDCTHSSERGDCSIIAISRSNLSLDEQHDSPKEYTKRHEPSRETDNNKGGEDHMAGCSQPVGNMGMSQGAGIACNGDKNTGAAAYFQDKDVSASSAIENVALRHCTASSLKLNVPPIDVDKVRCIVRNIVRDWGDEGQKERDECYKPILEELNRLFPNRSDQRPPSCLVPGAGLGRLALDISSLALKKLMSGPYILGYIATAILFLTTINFVLFHFLTFIPQGITEGFSMCAGDFVEVYSEESQESAWDAVVTCFFLDTAHNIVEYIEIISKVLKDGGVWINLGPLLYHFADSYGPDDDMSIELSLEDVKKVAYHYGFTMEVEKMIETTYTANMKAMMQNRYRAAFWTMRKDASRSKACKPR

SEQ ID NO: 47165 - protein, 665 aa, Zea Mays
MTAAAVRFESHRLTHPSTSPPPESMVERRYTEEEEALEIKSLRRIIAAYANYQDAAERDVERYERSFKMLPTAHKKLLFHLGLKYQSLRWCISMNASFIMKMLEAFEPPFDMSQSNLSLDEQHDSPKEYTKRHEPSRETDNNKGGEDHMAGCSQPVGNMGMSQGAGIACNGDKNTGAAAYFQDKDVSASSAIENVALRHCTASSLKLNVPPIDVDKVRCIVRNIVRDWGDEGQKERDECYKPILEELNRLFPNRSDQRPPSCLVPGAGLGRLALDISSLGFVSQGNEFSYYMLICSNFILNHTQEANEWSIYPWIHSNCNSLSDNDQLRPVSFPDIHPSSAGITEGFSMCAGDFVEVYSEESQESAWDAVVTCFFLDTAHNIVEYIEIISKVLKDGGVWINLGPLLYHFADSYGPDDDMSIELSLEDVKKVAYHYGFTMEVEKMIETTYTANMKAMMQLLDIRPDWLYMGWVSATFESSVQKKLRREAEKTSCGRWPAEAQSFAGDLVAGLPPNVLATIAAVEEDAGLFFVSFSFSTCRAPAPAVKVKFFSLCIVMNKVMWSLLVGQGEVLLFMYLYQLSCDMRVSRKFRYMKVCSCIRSGIVNISFFICLSFVKLGICLSSRFTSVRLLRWRLLLFMLMHLDVMNYKPKIWELFNYGSHEFYPH

SEQ ID NO: 47166 - protein, 631 aa, Zea Mays
MPSPSLLLRAPPLCPSPSHPPRRFAPPSLITSSPPARLLPLRLPSAASRHTPRAGDTRVPDDLIPIARCYEGRLARLELAGAARREQAVAAAAAAGGGASAEDHLAAGSDAMVVEAFLPGPHGGGTTASSTRVILQAKEVKDKASKIEKQFGSDFFFANQPDSESMLAMAFKQVVIQRLSNFRLEVFPPGSERDFQDFGKPRKGSLDCSISSSDGKLLSSLAEAIFSCVIEDVRKNHFGSIGSFFQKRQLNCSMDSSVCIHKTSEAEVVKNAKRCLEIVSLMKSSHEVRETKNGWWPPPHHESLVKIGGPELVLWANEYIPTYKLQINANALENSNLEVEGLYELESNRREVLLTHSQLVELGNVLDMYFEDQFTLPGKTFHPYWNPDLSKIKKNNGYLNNLFTFLAGTCIFLFVTIFAQLCWPQSFRDKRLFKESSNASLSQNYCSDIKSLYNSEVQAYCMSLVKKMKDSYGCPGDVMVDSHIGAWVGELPNCFKAISSEDAAASGSFQYPDTLSQENQSQPVPVNTKMSHLEQNDRTQEFPLQNIASFQVVMSEEGKVVGFQPTNLPAVNHWATNPLATLLYQGRSLSPGIIEPRLKISRPAKAAPIELLMSVNQDSFFALARPVEDPR

SEQ ID NO: 47167 - protein, 96 aa, Zea Mays
MDVALPSYTAMAVPPCSSPVTGPSPSHVMLVPCLLPHRPTSPATRKVSPSRQLPWPPSALAALALVPAARRQPLSIFHRCRSACPRYIDVDNWKSM

SEQ ID NO: 47168 - protein, 177 aa, Zea Mays
MFEHEELFGGSWIGAYSALCFSCGYFAYDQLDMLRYRLYNGWIPGILMHHLILLICFTLALYRNVTINYLILSLVCELHSIFLHVRKVRRMVGFRDFDRTMVKLEWLLNWTTFVTARVICHILITYKLVADAHKFGKGIELPLALLGMAGMNLLNIFLGLDLLKAFTRERNQQSHQD

SEQ ID NO: 47169 - protein, 193 aa, Zea Mays
MGSPGAGSSGGHECSFKFLLIGDSGVGKSSLLVSFVAASYLDGDIAPTIGVDFKIKFLTVGGKKLKLTIWDTVYDVTKRESFSNLADVWTKEIEANSTNKDCIKMLVGNKVDKDDERMVTKEEGLAFAEEYGCLFLESSAKTRENVEKCFEELALKILEVPSLLEEGSSSVVKRNILKQKQESDAKNGSGCCQ

SEQ ID NO: 47170 - protein, 293 aa, Zea Mays
MYRLSQTLVDERDGSIYGAVLEWDRRALLAGYAPFRPAGAPAAVVALRGTLLSGATFRRDVVDDLRFLAWDSLKGSVRFAGALAALRSAARRHGTGNVCVGGHSLGAGFALQVGKALAKEGVFVECHVFNPPSVSLATSLRGFAETAGEMWGYVRAWLPYVGSAAAADAGGEAKEVSLGRAGTAKWLPHLYINTNDYICCYYTDTAAGTATVTARGGSGGSKVAGGDGGIGKPGLARMLTVSKGPTKFLDAHGLQQWWADDVELQVALNHSKLIDRQLRSLYAAQPASPQVNQ

SEQ ID NO: 47171 - protein, 272 aa, Zea Mays
MTALRRSWRRRWSTCPRRGTSRSCSDGMGTWIWPPSGRTPSIGFGRFLSTYEFPEGRAWMTQLLAVACLSLASKIEETFVPLPLDLQVAEAKFVFEGRTIKRMELLVLSTLKWRMHAVTACSFVEYFLHKLSDHGAPSLLARSRSSDLVLSTAKGAEFVVFRPSEIAASVALAAIGECRSSVIERAASSCKYLDKERVLRCHEMIQEKITAGSIVLKSAGSSISSVPQSPIGVLDAAACLSQQSDDATVGSPAVCYHSSSTSKRRRITRRLL

SEQ ID NO: 47172 - protein, 173 aa, Zea Mays
MPQAGQHDPRPQQSKKKPVANHSHHQRLLGVARLLSQMSEPVMKAAIQITFLLARSFFVDLCTAVLSLLARVRVLIQQMLLDVVSIYNKVTDLTERKQAVKISISGVQAFREYYPSMNDACTVLECVWIKDKFVLHEKVKDISQETQVENQKCCGPESTVQYETIALISEDST

SEQ ID NO: 47173 - protein, 508 aa, Zea Mays
MATKGGNARGVPVGVLLVAALLLCSLAPASASSYPARVVSGFLSNAASAVVKRLWSLKSTTKIASGGKSMVKYEGGYTVETVFDGSKLGIEPYSVEVTQGGELLVMDSMNSNIYRMALPLSRYSRPKLVAGSPEGFPGHVDGKLREARMNHPKGFTVDDRGNIYVADAMNMAIRKISDTGVTTIAGGKSGRGGHVDGPSDEAKFSTDFEVRYIGSSCSLLVIDRGNQAIREIQLHFDDCVYQYEAGFPLGVALLLAAAFFGYMLALLQRRVLGMYSNGDDHESPVKAKLTSIPPPYQKPLKPYVHPLLIPNDDEPVKQEEEEGLFTSIGKLVGGAKSSIAEIIGAAFSRKKRVNVHHHQLGRPTSWPAQESYAIPRDETPPPLDTRAPTPRKNYAFMSKEPEKIHHIRHGRPQLHGWTGEAAPQQQQPQQVRHQQYVQHHRQYSAGPQTYYEPSCDATKEIVFGAVQEGDTSRRPVEIKAVNHGDAAPYEQNGLRFRSSYSVRYNGNN

SEQ ID NO: 47174 - protein, 1381 aa, Zea Mays
MSVPGSASAAAPPPQAGAAPPAQPQQPSGAAFTNQKLTTNDALVYLKAVKDKFQDKREKYEEFLEVMRDFKSERIDTNGVIVRVKTLFNGYPELILGFNAFLPKGYAIKLQEEKKPVDFVEAINFVNKIKNRFQHDEQVYKAFLDILNMYRKDNKSIQDVYHEVAMLFKDHKDLLEEFQHFLPDTSVAPQAVASKGGLVKREDRSSLVPPANKILHNDKRDRVYLSHADRDFSVDRPDVEHDRQRRRLDKDKERKVERDRRDYEREDKDGEHDSRDLELGQRKRKPFSRNIEDNVGAETHQGGPSENHGIHSVSASSYDDKDALKSVYTHEFHFCEKVKEKLEHEAYQEFLKCLHIYSQEIITRSELKNLVNDILQHYPDLMEGFNEFLEHCENIDGFLAGVFNKRPSTRAVKTEDKEKDRDRDREDKDRDREKEREKERERLDKGSTFNSKEGSSHKPSMFSGKEKYNLSKPISELDLSNCQRCTPSYRLLPKNYPMPPASNRTDLGASVLNDHWVSVTSGSEDYSFKHMRKNQYEESLFRCEDDRFELDMLLESVNAATKRVEELIEKMQDNSVKPESPIRIDEHLTPLNLRCIERLYGDHGLDVMDVLRKNASVALPVILTRLKQKQEEWSRCRSDFNKVWAEIYAKNYHKSLDHRSFYFKQQDTKNLSTKSLLTEIKEINEKKRKEDDVLLAIAAGNRRPIVPNMSFEYIDSEIHEDLHKIIKYSCAEVCNSSDQLDKVMRVWTTFLEPVLGVQQKHGSEDPDLVKTKSRTTKLGLANVRESNTIAGIVSKQSNGDESEQDRIARKGEEPSNAILNGRVHGAVSADETLSLITQNIASTERPAENAAAVRTEQHKANLVLTPGMNASRSSHDAVEVAGEGKTGNETLLSAEGGERLGPSLNGTSEGIKGRLNNDGSVPHTSKVEREEGELSPNGDFEEDHFVPFEDGTSKGKEDSTSRPFHGRPGEVVPSSAEAAGENDADADDEGEESAQRSTEDSENASEAGEDASGSESGDGEECSREDHDEEEEDMDHDDQDAKAESEGEAEGTTETHDVEGGISLPLSERFLYSVKPLAKHVPTALHDREFSRVFYGNDSFYVLFRLHQILYERLLSAKTNSFTAEKKWRNSKDTNPPDLYAKFMSALYNLLDGSSDNTKFEDDCRAIIGTQSYVLFTLDKLIYKVVKQLQAIATDEMDNKLLQLYLYEKSRSPGRFFDLVYHENARVLLHDESIYRFECCSSPTRLSIQLMEYGHEKPEVTAVSIEPNFSSYLFSEYLCSTPDKKLSEGVYLGRNKRKYSNNDEPSDSLKAMDGINVVNGLECKISCKTSKVSYVLDTEDFLFRLRKRRKILRGGNVPDRLQISSISAAKVQRFNRFLSKP

SEQ ID NO: 47175 - protein, 898 aa, Zea Mays
MTNAAGTAPHPTPPTPLQQQQHQPPKDQQQKALALNAFRLKGIGDRIRFHLKGMSVPPVAELAHLIYAFARGIDFAVSAGDIPLTAGDIPEILRKVYELRKETIIQSSLMILAISCKNACSNKWFQPADSRDILRMVNELSGNFCTSTGQAASDSTVLEIISQIMPRYYPRLKFERLITSIEAKVGYDILMADFFIERSLSRDEKIRLIVVQKENLDASSCVSSPPHVSFLVNGKGVDKRTNVSMEQGPQLPTDITKMLKYGANIIQGVGYFNANYIIAVAVVNDLTSFSAPKLDDYAQPITVYPADSDVLEGPSRVSLNCPISFRRIKTPIKGRLCKHYQCFDYDNYMEMNSRKPNWRCPYCNTSSSFTDLRIDQKMMKILEETGDDVTDVLVFADGSWKVVPAQDEKSDRHRGDTIQQAGDAVETGSPSRDVIDLINGNDDGDMQMDWASAPEDSKPVLNSQDLSVSDYLTDFPMTAQTEDLNRGDGNNGGSNMASTSRQNLLLPPTSGLGSSSLGTLESILPQNVLHPVITDAVSPSLETSSASGMQHVSQETHCGTVQLQPQIGPVHGSEVRRLPIPRNPRREPIGVQGLTVPPQNPGSSTRLQPNILNCPPPIPLSSPSSSTYQAHQVKNPDSVIASRNSGSGPLPRTPSVAAASLHLQSTARDIRNTSSHLPSRVVGLPAPHLMGARPPPGISVQAGGANAYRTMQQTPTMDPLRHTRMSMNQTALAAAGQTTAAAYVRPTQADIQNHLFPVQQSQAPRSQQVPRTTTPPLQRAPPHLQPPSVPPTVPSTPQAGPSHGLPPELPVDDSWRPTGQMRGSLTGNAYSSAIRHYRGHSEQQQGEPRPPNTSGTRFALWQIKMRDILTQTEVDDTLDKFSKKDPKSWTHEEKIVRP

SEQ ID NO: 47176 - protein, 587 aa, Zea Mays
MTMHNLSLFILQRGCVEPRTFGFGSVGRLLTTENSDVLEGPSRVSLNCPISFRRIKTPIKGRLCKHYQCFDYDNYMEMNSRKPNWRCPYCNTSSSFTDLRIDQKMMKILEETGDDVTDVLVFADGSWKVVPAQDEKSDRHRGDTIQQAGDAVETGSPSRDVIDLINGNDDGDMQMDWASAPEDSKPVLNSQDLSVSDYLTDFPMTAQTEDLNRGDGNNGGSNMASTSRQNLLLPPTSGLGSSSLGTLESILPQNVLHPVITDAVSPSLETSSASGMQHVSQETHCGTVQLQPQIGPVHGSEVRRLPIPRNPRREPIGVQGLTVPPQNPGSSTRLQPNILNCPPPIPLSSPSSSTYQAHQVKNPDSVIASRNSGSGPLPRTPSVAAASLHLQSTARDIRNTSSHLPSRVVGLPAPHLMGARPPPGISVQAGGANAYRTMQQTPTMDPLRHTRMSMNQTALAAAGQTTAAAYVRPTQADIQNHLFPVQQSQAPRSQQVPRTTTPPLQRAPPHLQPPSVPPTVPSTPQAGPSHGLPPELPVDDSWRPTGQMRGSLTGNAYSSAIRHYRGHSEQQQGEPRPPNTSGARRPQ

SEQ ID NO: 47177 - protein, 915 aa, Zea Mays
MPPGGRRGAKQRPNWTREPQLGDLVLAKIKGYPRWPAKISRPEEFNHEPTPKKFFVYFYGTDEIAFVPLADLEEFTEKTKNDLLDRAPNMKVKRKYVQVFNDAVEQICKAYNELPKTSEAANGALPDQSEKPSEHLVRSQDVGEIPGLGQMEGDSPTDYSHTSAKRPGTEEDVKDDGHEICDHSLAVYQKKTSLLEDPKHPMTKKSAASKSSLDIYMEQEHSPTSVRAEREAEEVKIEKESCPLDGFILEPNLEVVCALEVPKKSKSNKPLRNAERKENKRAGIGSPIERIVAEAASDVVLNMSADKESREFKKSKIMTKQSLTTDSEKMDYNKIVHGGPDEQLTGKSSAGFSSNKKSLPDSGQHKMDSSADTRPGKKPRLMDRAGETDKTVDKSEMKSNIDYGKHYAVKHERPTSMETCKNTILKTSTSDDRALRSGGVVSPISRLHSEVMEPACGSVTLSTVADSVKKGSSMKEDASRVDRQLVKPKRRACRFDEDEDEGQRTPLHRTSAKSLSTHIVPTEKAGIRGKFSSHVGNVFGKKLGPAREEKSRSVRMSPVKHEPIFSSPSQDKVHARHQVVEKRLITGLVETPAVIGNKMSLVDGKSSAQVKMPASSEVKKLRSSSSKPSHLTSGNSHSRNYPAPEKIPLLPQPEETKAKSKLATSVEHKVGTTLSTEQSGKRDHLKEERSSYVDKAVSSEPNPGSAKSIKHLIAAAQARRNLMASVHAKFDGSSTDNADITSTPYGLPGLSPSPVFRIPSPPRIAFPGSPGQRILKSPIEFDNGHGKSPKSRQASGSPSGGTDAAIARDALEGMIETLSRTKDSIGRATRHAIECSKYGIAGEIVELLIQKLQSEPNFHRRIDLLFLVDSITQCSHSQRGLHMFPLFKRHCLVFSVLLLHLELVLVKTGASALKF

SEQ ID NO: 47178 - protein, 256 aa, Zea Mays
MGPIRCSRCKAYINPFMKFVDQGRHFICNLCGFRNDTPRDYMCNLGPDGRRRDADDRPELSRGTVEFVATKEFLVRDPMPAVYFFLIDVSMNAIQTGATAAACSAISQAISDLPEGPRTMVGIATFDSAIHFYSLKRAQQQPLMLIVPDVQDVYTPLQTDLILPVSECRDNLEQLLESIPSMFENNRVADSAFGAAMKAGFLAMKSTGGKLLVFQSVLPSLGIGSLSAREAEGRANITTGDKVCIVAYLHILILSY

SEQ ID NO: 47179 - protein, 543 aa, Zea Mays
MASSPQPPPPFAAQNPTAQGSGQGPPGSGVGALPGAFANLQISRGAAPPPGAPRGLTPQQAPPTLAARPGPPPSAARPAFPGSPPAPPFVRAPTPSTSASPPFGGQPGVMSQPPPPFGGPPGASSQPPPPFGVPPGVVSQAPSLFGGPPATASQASSPFVGHSVAASQAAPFGAPPVAGSHPPPFGGPPGAGPQPAPPLRQTFAGQPGPMAAAAAWTQPPPPSFGAPQQPPPPFGSRPAGQPLFATQSAPAAQQLPFMGPPRVNAPAFGPPSWQTQGAGSGAMQPPLRMPGIPGSMQPNTLGPPGTPTIPYSPHAGTQVSTPSKIDPNQIPRPMRESSVIIYETRQGGQATIPPAASSEFIVKDTGNCSPRLMRCTVNQIPCTGDLLTTSGMPLALMVQPFSLPHPSEEHIQLVDFGEMGPIRCSRCKAYINPFMKFVDQGRHFICNLCGFRNDTPRDYMCNLGPDGRRRDADDRPELSRGTVEFVATKEFLVRDPMPAVYFFLIDVSMNAIQTGATAAACSAISQAISDLPLHPNLGWCRRQ

SEQ ID NO: 47180 - protein, 397 aa, Zea Mays
MLLQGGTGIPHLKWFGVDGEYNVMVIDLLGPSLEDLFNYCNRKFSLKTVLMLADQMISRVEYMHTRGFLHRDIKPDNFLMGLGRKTSQVYVIDYGLAKKYRDLQTHRHIPYRENKNLTGTARYASVNTHLGVEQSRRDDLESLGYVLMYFLRGSLPWQGLKAGTKKQKYDKISEKKMLTSIEALCKSYPSEFVTYFHYCRSLQFEDKPDYSYLKKNFRDLFIREGCQPDYVFDWTVSRQAADNNRLRLSGKTGGLVGPSVDRAERAAAKQDVPHRFTGPADALAKRTGSGSGHYGEHTKHRTLLDSLMASNMRNGSTSRKALLSSNRGSGDPSEPNRSSHLVPTTTSSSRPSTNQRLHHSTGLEGRTPSFPKPGRIGYDDPTMRSFERLTISAERRK

SEQ ID NO: 47181 - protein, 453 aa, Zea Mays
MGPPQPARPGVINIEACARPIAVDHRISLPYYFRIAGSLLRQANIYRNESNFLDLYVILLRYSSLLCETIPRHRDYHAFKLREKAFFDKLVDVIKELETLKPVVQRQIADHNRGGTVESNMNSLNGDNGTTHRIEQHTPSSYTPQPFVGSTNGASQKSFHAGRQVASLLSVQKQYMNLPYPKEETLARHSILGPNGLNGRWNGPVTGIKVQYPSNFELTQNDITSLVPSILNQDDPQGPSTAPPPPDSPSNDNDDMKSVLSLDDGRWSVSADEHTSFTSANLEEELLQLNIKQPSPPPVLAEVQRPISPSRVADPTPGLPTSGTARFQNLHVPIKLMDCFLRVAESNTKRSLETCGVLAGTLKNRTFYVTTLIIPKQKSTSVTCEATNEEELFEVQDMGSLFTLGWIHTHPTQSCFLSSVDLHNHYSYQVMLPEAIAIVMAPTDTTRWYGRDP

SEQ ID NO: 47182 - protein, 491 aa, Zea Mays
MMFLDRQKQSKNPKYILVHCTHGHNRTGFMIIHYLMRTHVSCVAEAISIFAQRRPPGIYKRDYIEALYSFYHEVPDNMMIACPPTPEWKRPDDLDLNGEAKQDDDDDNGDPGPLHNESEDKVITNDDVLGDEVPYDQQEALRVLCYRLLEMPLGRGHAHFPGSHPVSLNSENLQLLRQRYYYATWKADGTRYMMLIMRHGCFLIDRNFSFRRVQMRFPHRSLQGLQDMTLIDGEMIIDTVPDSGLKRRYLAYDLMALGSVSKTRLPFSERWKMLEDEIIQPRNNEKGLERGAKSNPLYKYDMELFSVRRKAFWVLLTVKKVLKVFIPSLCHDADGLIFQGWDDPYVTRTHEGLLKWKYPEMNSVDFLFELTNDNRQLVFLYERGKKKLMDGARISFTDDVDPSSVAGRIVECSWNKEEQCWACMRIRSDKSTPNDINTYRKVMRSITDNITEEKLLEETDEITLLPMYADRMNVRVHTKMAQHRRRLPPQC

SEQ ID NO: 47183 - protein, 538 aa, Zea Mays
MTFYTNMDLNASPVPDDDEQQPYDDSVEVGYAQTEHVESAVATLRREREERRKRLKREQQDDGSRLHSQQIRNDYAPQPKRHSRIKEAPQGWLDCPAFGEPIDKIIPSKVPLDETFNESVPPGKRYSSKQLVNKQRKAGREIGLVIDLTNTTRYYSPAEWTKQGTKYAKIACKGRDAVPDNESVNKFVYEAMMFLDRQKQSKNPKYILVHCTHGHNRTGFMIIHYLMRTHVSCVAEAISIFAQRRPPGIYKRDYIEALYSFYHEVPDNMMIACPPTPEWKRPDDLDLNGEAKQDDDDDNGDPGPLHNESEDKVITNDDVLGDEVPYDQQEALRVLCYRLLEMPLGRGHAHFPGSHPVSLNSENLQLLRQRYYYATWKADGTRYMMLIMRHGCFLIDRNFSFRRVQMRFPHRSLQGLQDMTLIDGEMIIDTVPDSGLKRRYLAYDLMALGSVSKTRLPFSERWKMLEDEIIQPRNNEKGLERGAKSNPLYKYDMELFSVRRKAFWVLLTVKKVLKVFIPSLCHDADGLIFQLEHFVVDV

SEQ ID NO: 47184 - protein, 433 aa, Zea Mays
MPTGIMAHIAKASGCTSVHDLLKKGSDVVSAAQAILKVNGSDKGTKRSRGTDAAAEVATEKDVNIGIDINTVIADEGDENIGVDLNSLPSVDTKKRQKRQKLKHRTKKDPADATSHGVNTEPLQMDGNLDFLNSKTVRPRGTPVTKIAGAELDDEDTGAAIQFIEFCRAFTEIFQIKKGQPEKILQDLVGGRELRFVSSVVAGFHINLLSVIQEGKGKKPLAYTRDGDAWVIDIGKYISESASISKGFPLNHINQGISGYKNLSPSCKLRVLNFLCDETLSTDKLRNWIDMQNDIAAEPVNAAREKARAAKEMVKELKERLKDNMNKIIVSPNEAAASNSEANKYIISQIKEAQEVKRAAINDMATMEKQGGFWTKPLMVEKGAAYWKLDGYCDNSAILLQEYGGDELMANKDKWFMFTEDEEKIIEKHLATR

SEQ ID NO: 47185 - protein, 1025 aa, Zea Mays
MTPDENDETALIWYSHKKEKFLRLSSVSKVIPGQRTAVFRRFLRPEKDYLSFSLIYKNGQRSLDLVCKDQVEVEVWFSALEALISSCHRNSSVDEHKDRVSFSDDVSYYRDGHPYDSTLDIASSISRSFNTADYCRGSSFSFRRSDAGSDRANMIRTSGADSTRLSISSAPSSSSQGSGTDDIESLGDVYVWGEVWTDAAPSDGHTSSSCSKVDVLIPKPLESDVVLDVNQIVCGSRHVALTTRQGEVFTWGEELGGRLGHGTDTDISRPKLVESLSVTIVDFISCGEFHTCAISASGDLFNWGDGSYRAGLLGYDTGASHWLPKRVSGPLEGLQVLSVACGSWHSALITSTGRLYTFGDGKFGALGHGNRESAAYPKEVEALNGFRTVKVACGVWHSAAIVEASVQTGMNVVSKKLYTWGDGDKNRLGQGDKEARLIPTCLQALLEHNFHQLGCGQNMTVALATSGHVYTMGSSDNGQLGNPKSDGKHPCLVKDKLANELVEEISCGAAHVAVLTSRSEVYTWGLGANGRLGHGDLNDKKTPTIVEALKDRHVKSISCGSNFTTCICIHRWVSGADQSVCTGCRQAFGFTRKRHNCYNCGLVHCHACSSRKVLKAALAPTPGKPHRVCDSCFLKLKNADTSSSNANRRNAATRRSTDSREKPEIRPPRLVATPSAEPGKYMEVKASKSDMKPADSIMKASQASALLQFKDLGFGAQFGGLQPMGMPPALAMSPAIPAFSLAPPSPYTKKMKSPPTSAIPQSSKVDVDHLQKSNDLLNQEVLKLQSQVEDLKQKCEAQHEQLQKSDKKAKSVASMATEESSKRNAAVEFVKFLDNELKGIADKLPVDVADSLKALQMRTQSLLREQSGHPLELVNPMERDHLHLSSGGSGRYDLVTHKSGGVGYLTMSQDGSSASGSAMSITSESPSHRFMENSSKAHGDFAPKQGTHGEVQLIEQFEPGVYVTLIQLKDGTKVFKRVRFSKRRFAENQAEEWWRENQERVFKKYSHPTHAPHGNTTSHEEEHHS

SEQ ID NO: 47186 - protein, 196 aa, Zea Mays
MNQRMPLIYVKLYMYQICRALAYLHNCVGVCHRDIKPQNILVNPHTHQLKLCDFGSAKVLVQGEPNISYICSRYYRAPELIFGATEYTTAIDVWSAGCVLAELLLGQIFHKRMPSEAVDFVSRLLQYSPNLRCTALEALIHPFFDELRYPNSRLPNGRSLPHLFNFKPNELRGVPEEFVVQLIPQHAKKQCAFLGV

SEQ ID NO: 47187 - protein, 129 aa, Zea Mays
MLRVGDLDRAINFYEKAFGMELLRKRDNSEYKYTIAMMGYGPEDKNAVLELTYNYGVKEYDKGNAYAQIAISTDDVYKTAEAIRVNGGQITREPGPLPGITTKITACTDPDGWKTVFVDNIDFLKELEE

SEQ ID NO: 47188 - protein, 133 aa, Zea Mays
MSWSIQKENPLLRLTVENCELSSIGVIILLDCLTNAKQLLDVLSIADNHLGSPVAAALARFLGSHVRALNATDIGLGTVGFQILEETLPTEVALSHINIRRIGLLVDKEAPALVLVLLLQLQHQHRLLLAHRL

SEQ ID NO: 47189 - protein, 109 aa, Zea Mays
MSDAAKKLQDTASLCYTDEDVVDGFKLTQVARSLDELAETLEVTAIDCQVSMMDPTTILEAGYGSEDSAVWEDVFRDREIMNQPLEAETLAEHCAKWGLNYNEIRDRSV

SEQ ID NO: 47190 - protein, 324 aa, Zea Mays
MVSAGLTALSCSSYDLPQAASGQNTMKILCIGHGGGSLPLFLASKFRGATIHIVEIDPVVVSASVESMGFPASPVKGLSPESMLPSDADDLLWGGIHDRVFLHTADAEDFIGSDGNEYDIVFIDAYDGDDVFPRKLWDVDGAFMKSLEKRVHPVHGTVVVNLHSDSDSEAAEGNADFQSALPMGRHVSQVCRAYMQHFGVAFTAAVPWLCNITLVACRAGGMAGGARRGLSRRDLVLGKLLSKSDTVERALGLPFPCLPYIKNGFTMPTDIKDYACCTKEMAGNILQARVGAAVAVHKRLDYCDSGNRMREVVAAAAAGSGART

SEQ ID NO: 47191 - protein, 855 aa, Zea Mays
MGRRKERRLAAMAAAGRRVKLDLFLDLPPGEASHNDGIGGENRDQQTVVPTSSSDKKENPLALLGQYSDDEEENEETTDQPTDEAKRSPGDASAKLSSPCVDTAGNNGVARTEPSVSVGDQQEAPQAGDIKNYTQSVTENTIAPEPILQDENVKSTESVPDSSGMQIVGEVGGNWRAIMHEQSNQCYYWNTVTGETSWDIPNGLASGAATASVPSDVGYSIEAQAHVLPHSTLEAYPSDMSVGNGTSTFANFGMACGSAQVTQDAYAYAAPIASHEPMDIDPLYLAKYGDDLLQRLNLLERLCGLNEGLELIRREIGIRISDCNALSSYGSSLLPLWMHAEVHLKQLDSSISRMEMSYHADTEHRNSKTEVVEHNAPDGADLTTPSNGEALKSEVSPGITIDENVEIDKPTSILSAQDSQGRDIAAVPPKVESDNDQDMDVEMEVDEDNVEEQAHCSSVPKKEHPPSEQLSSTNLPSFEDPTPEDNSVPPPPPEEEWIPPPPPENEPAPPDPPKEPAASYVQVDAIPQPYIAQENVGYTISGMEYYGIVGTEGTNANYYMQVSEPHVLQAQQHSYYAPVSGSGVSVSVDGTSIAPESYYTHPSVTMAASAVAAEHSVYYASSISAISSSAADIKTSSASLVSANSNSDLKGPDKLISNDASIVPLTQAVVATSGAGTPSVLGSSTQPSSSTKNLTKVTRNKKRAVGITSSLRSNKKVSSLVDKWKAAKEELRNEEEEEPESALEALERKRQKEIEEWRKQQIASGEAQENANFIPVRGDWRDRVKRKRAQAKNESKDDIVAASLGSSEQHKGPPDLAELSKDLPTGWQAYLDEYTKQVYYGNNLTSETSWERPTK

SEQ ID NO: 47192 - protein, 691 aa, Zea Mays
MQIVGEVGGNWRAIMHEQSNQCYYWNTVTGETSWDIPNGLASGAATASVPSDVGYSIEAQAHVLPHSTLEAYPSDMSVGNGTSTFANFGMACGSAQVTQDAYAYAAPIASHEPMDIDPLYLAKYGDDLLQRLNLLERLCGLNEGLELIRREIGIRISDCNALSSYGSSLLPLWMHAEVHLKQLDSSISRMEMSYHADTEHRNSKTEVVEHNAPDGADLTTPSNGEALKSEVSPGITIDENVEIDKPTSILSAQDSQGRDIAAVPPKVESDNDQDMDVEMEVDEDNVEEQAHCSSVPKKEHPPSEQLSSTNLPSFEDPTPEDNSVPPPPPEEEWIPPPPPENEPAPPDPPKEPAASYVQVDAIPQPYIAQENVGYTISGMEYYGIVGTEGTNANYYMQVSEPHVLQAQQHSYYAPVSGSGVSVSVDGTSIAPESYYTHPSVTMAASAVAAEHSVYYASSISAISSSAADIKTSSASLVSANSNSDLKGPDKLISNDASIVPLTQAVVATSGAGTPSVLGSSTQPSSSTKNLTKVTRNKKRAVGITSSLRSNKKVSSLVDKWKAAKEELRNEEEEEPESALEALERKRQKEIEEWRKQQIASGEAQENANFIPVRGDWRDRVKRKRAQAKNESKDDIVAASLGSSEQHKGPPDLAELSKDLPTGWQAYLDEYTKQVYYGNNLTSETSWERPTK

SEQ ID NO: 47193 - protein, 414 aa, Zea Mays
MHGMATPVAPLLHDEPQAAGILLPGTTQHSDQTNSDSRVGELILPNGDTYRGALSGNTPHGPGCYIWSDGCVYEGDWRRGLRHGRGKTLWPTGATYTGDYSGGYIYGQGTYTAGLNSYRGGWKLNLKHGHLGLQTYPNGDTFQGSWVHGQMQGHGTYTWANGNTYVGAMKDGVMSGKGILTWNNGDSFEGNWLDGAMHGYGIYTWKDSGYYVGTWTRGVKDGKGTFYPKCRGIPVTDIDDLRNRGVLPGAESQTHGSRILHSASSDMADMVASRNQDSVGISSVRSLNFEKTRSTNVLLERRWSLGVAIEKFLGRETNESSAIERCENKADSNLPILEREYMQGVLISEVVVDASFSNPLKRVSRRQKKIVKDIKKPGQTIIKGHRSYDLMLSLQLGISVNKMRRRTRWRLSVI

SEQ ID NO: 47194 - protein, 763 aa, Zea Mays
MHGMATPVAPLLHDEPQAAGCYIWSDGCVYEGDWRRGLRHGRGKTLWPTGATYTGDYSGGYIYGQGTYTAGLNSYRGGWKLNLKHGHLGLQTYPNGDTFQGSWVHGQMQGHGTYTWANGNTYVGAMKDGVMSGKGILTWNNGDSFEGNWLDGAMHGYGIYTWKDSGYYVGTWTRGVKDGKGTFYPKCRGIPVTDIDDLRNRGVLPGAESQTHGSRILHSASSDMADMVASRNQDSVGISSVRSLNFEKTRSTNVLLERRWSLGVAIEKFLGRETNESSAIERCENKADSNLPILEREYMQGVLISEVVVDASFSNPLKRVSRRQKKIVKDIKKPGQTIIKGHRSYDLMLSLQLGIRYTVGKITPIQRREVRASDYGSRASFWMNFPKNGSRLTPSHHADNFKWKDYCPMVFRNLREMFKIDAADYMVSICGSDALRELSSPGKSGSVFFLSQDDRFMIKTLRKSEVQVLLRMLPEYYHHVRTYENTLITKFFGLHRVKPSSSQKFRFVVMGNMFCTELRIHRRFDLKGSSLGRSTDKVKIDENTTLKDLDLNYSFYLEPSWRQTLLAQIETDSKFLKQHAIMDYSLLLGVHFRAPQSLRTQASFHQAILPDRLAVLSEEGALEEDVLNSPEGLVLVQRASDQNDVVIGSHIRGARLRSSSASFEEVDLLLPGTARLQIQLGVNMPARAKQTVEDDDSEDNGQVYDVVLYLGIIDILQEYSIRKKIEHAYKCIQYNSLSISVVEPSLYSERFLKFIQTIFPENS

SEQ ID NO: 47195 - protein, 513 aa, Zea Mays
MAFLVPFLLGLSSVLAAWIYSEFLGYRASSSHEKVHSDVHVGDKTIKENDRAVLLEEGESKPPSTKAPNMSARAKLIRFITLDESFLVGNRATLRAIAEFGIILVYFYTCDRTNIFAESKKNYNRDMFLFLYILLVVASTITSLKKHPENSVVSGKTVFYLNRNQTDEWRGWMQVLFLMYHYFAASEIYNAIRVFIACYVWMTGFGNFSYYYKKKDFSIARFAQMMWRVNFFAMSCCMVLDNDYMLYYIAPMHTLFTLMVYGSLFVLNKYNEIPSVMAIKIAGCLLTVILIWEIPGVFEIFWAPFTFLLGYKNPEPSKMNLPLLHEWRFRSGLDRYIWIIGMIYAYFHPNVERWMEKLEESETKVRVLIKGTIVTASLMAGYLWYEYIYKLDKHTYNKYHPYTSWIPITIYVCLRNCTQQLRSTHLSLFVIPNGQPKLLLSFLPDYPMLNFLLTTTIFLSVSFRVFKLTNVLKEAFIPTRDNKCLYQNFIAGVAVFACLYCSSLFFKTYQQYS

SEQ ID NO: 47196 - protein, 211 aa, Zea Mays
MVYPHMAFMQILILITEKNRLKTSINLSLTPILNQYNLTCFEWQHYKFLHDLCGQFCIIICPFEIHQCILSDQWSICFHNAGVMVPLTWSIRMKIALGAAKGLAFLHEAEKPVIYRDFKTSNILLDEEYNAKLSDFGLAKDGPVGDKSHVSTRIMGTYGYAAPEYIMTAMVLYYWSSSRAGSHWTSPGQSGSRCWQTGHSHCWHRRRRCLA

SEQ ID NO: 47197 - protein, 96 aa, Zea Mays
MASRCLAAASEAAVVFLIRPILAIVFVFTLILLGWYVAWTTVLVHVPLVQEIAGLRPKKPSKPKPANRGRVAKFYRNQAEAAQSWELDTWIGMEEK

SEQ ID NO: 47198 - protein, 493 aa, Zea Mays
MEISDEQRMQVECQRLPPSWQGNGSDADVEVDHHLWPSKDGPLPIFLKFENVEYRVSGGERKRTSIGNEILVDPSLLLLDEPTSGLDSTSASKLIFILQRLAKTRRTIITTIHQPSSRMFHMFDKLLLISDGHAIYHGKARDCMHHFSSLGFVPEIPMNPAEFLLDLATGNLDDISVPEALRGSPDPQEFRSQVIRHLQLKYRAGAEAPAGRRTPTEQLRLAVRAHNKDRRRRSIGWLQQFAVLSRRTFRERASDYLDKMRLAQAVGVALLLGLLWWKSQTGNEAQLRDQVGLIFYICIFWTSSSLFGSVYVFPFEKLYLVKERKADMYRLSAYYASSTLCDAVPHVVYPPGHRGAAGRRHPQRQEGGGHGVARAHALPPHRRLLRPAHPQVHPLAQVRLLHALRLQPAAQSAVPRPPHVQLCQPGRLPAPAVVAVVRHRGPRRRHARGLDPARHGARIPTPRLLLPPQADQPHALVIIHLIKLGRNFACLCE

SEQ ID NO: 47199 - protein, 296 aa, Zea Mays
MGVRSSGDQVPRRGGRHQFQLGGLPRRHEADVPPEQGGVRSRAPAAEHGVPPGQLQVQGRDAPQVRAVGGAHGPVPRQEVCRSYVYLGLFDTEEEAARAYDRAAIKCNGKDAVTNFDPSIYAEEEVAPAAATGGAAGDEHNLDLSLGSSAGNKRGSLDGGGGGGGDDKSSDQRVPMAFDIDWQTAARRSTKAKLLSNGDPGTAAGGLSLAIGGGGGHWPPQLQHQQQQQRLHGARNNGGGTSWPPPPHPCPPPVPAAAATAAAASSRFHPYVVTSTTQSPAGWVQKNGFHSLARPT

SEQ ID NO: 47200 - protein, 92 aa, Zea Mays
MLLDRGYLLVSMHSTRCGCVVNISLFRFALSSSCVVYLIKLPFLFCILSFLFYKGAPVKSVETEVTSLVISKSWRMHASSSLFVSLSLSTVL

SEQ ID NO: 47201 - protein, 514 aa, Zea Mays
MEGKAVAVGCGGARVDPADDLKYISGLSTILVATIQEVKDQVSQMEFIFCSQLFPHIQAKSKLVQAHLADTMKASEVEWRKTEAGLVKQLEEVSRGKMLAEERLLQLGTSLEEMKRKLVDSEQLAARHEAEKKQLLGRLEDETRKGEVVRQLQREIEEKDAEVVRQLQREIEEKAAEVVREREAHQRLQQQVDLKDKNLLLEQSKRRDLIEDYTQLKTNYKHLKSQYTFLLGKIDQHEGSKPPEDIPADRRNTESPPSKRKFKDLEHTNKERIQILPNTRDLKNDSAPGAKAQAAQHASSVRSPIRNSHLAVPSRPMNPLANHSANNSKLQASTSVASPCLNWRETRARKEQGVADPHDDFLDTPLEAVKNTIRNPATPEEALALAASPQVMDFDNSDDETQDLNIATQALRHIPNMPVTKQQNTISVHPPKKDFKYRESVRKKADRENLKGVECKQCKKFYDAVLPGGRADGDGAGSTSLRCEHHDGVSRHRYRYAPPLTPEGFWNIGFESEM

SEQ ID NO: 47202 - protein, 325 aa, Zea Mays
MEGKAVAVGCGGARVDPADDLKYISGLSTILVATIQEVKDQVSQMEFIFCSQLFPHIQAKSKLVQAHLADTMKASEVEWRKTEAGLVKQLEEVSRGKMLAEERLLQLGTSLEEMKRKLVDSEQLAARHEAEKKQLLGRLEDETRKGEVVRQLQREIEEKDAEVVREREAHQRLLQEFEQLAARHESEKKQLLGRLEDEMGNGEVVRQLQREIEEKAAEVVREREAHQRLQQQVDLKDKNLLLEQSKRRDLIEDYTQLKTNYKHLKSQYTFLLGKIDQHEGSKPPEDIPADRRNTESPPSKRKFKGTAIRICQSNNFFELLQFFSE

SEQ ID NO: 47203 - protein, 605 aa, Zea Mays
MQQRQQQLLQSFAQTQPSQIGIPHQPQLPPSLAQPGIAVPVRTPVNNGLCSRRLMQYLYHKRRRPENNPITYWRKLVEEYFAPTARERWCVSSYEKRANASVSTAQTAQDVWRCDICKTHGAKGYESTYEVLPRLCQIRFDHGVIDEYLFLDMTKPNEFQLPNGLMVLEHTKVVQKSVYEHLHVIHEGHLRIIFTPELKIMSWEFCSRRHEEYITRRVLAPKVNNLLQVAQKFQTAATENGPAGVSNNDAQTICNMFVAASRQLAKNLEHHTLNEHGLSKRYVRCLQISEVVNNMKDLIEFTNRNNFGPIEGLKNYPKPNVSELPGQNPRETKQTTAAGGLPNDQNNTEAMGTKQETSARVDNGASVAGAVGNSAPQNAAALNGYQNLPRSSSANQSQLQQGASGAFKGPAATRNGMQMEASRSFCGPNQVQLARFQHPGSFQHPMPQHNNLQGLGLQNNHRGLGVSPQYQQHALNQLIQEVKNAKRHTLPQQPPLDIPNISSGITSGGANTNSAGTGDQGQRMAVNGAATIYTGPTSVINNSTARSNNFKSVSSNLAVAAAPAGGNAATLKAKPFHEFDDLEHLIANELVGSGLLNGNELAWNS

SEQ ID NO: 47204 - protein, 698 aa, Zea Mays
MPIHHSLEVLSCSQQSPPQDQAQKQRSSSLTSHPIIEAGGALHAPKKLRIDVRQDELQQQLIQRLLHGQGSLHLQGQQNPQLQALIQQHNLAHMQQRQQQLLQSFAQTQPSQIGIPHQPQLPPSLAQPGIAVPVRTPVNNGLCSRRLMQYLYHKRRRPENNPITYWRKLVEEYFAPTARERWCVSSYEKRANASVSTAQTAQDVWRCDICKTHGAKGYESTYEVLPRLCQIRFDHGVIDEYLFLDMTKPNEFQLPNGLMVLEHTKVVQKSVYEHLHVIHEGHLRIIFTPELKIMSWEFCSRRHEEYITRRVLAPKVNNLLQVAQKFQTAATENGPAGVSNNDAQTICNMFVAASRQLAKNLEHHTLNEHGLSKRYVRCLQISEVVNNMKDLIEFTNRNNFGPIEGLKNYPKPNVSELPGQNPRETKQTTAAGGLPNDQNNTEAMGTKQETSARVDNGASVAGAVGNSAPQNAAALNGYQNLPRSSSANQSQLQQGASGAFKGPAATRNGMQMEASRSFCGPNQVQLARFQHPGSFQHPMPQHNNLQGLGLQNNHRGLGVSPQYQQHALNQLIQEVKNAKRHTLPQQPPLDIPNISSGITSGGANTNSAGTGDQGQRMAVNGAATIYTGPTSVINNSTARSNNFKSVSSNLAVAAAPAGGNAATLKAKPFHEFDDLEHLIANELVGSGLLNGNELAWNS

SEQ ID NO: 47205 - protein, 585 aa, Zea Mays
MGNVCFCGTTSTSPDQPEPATAGKAPPQGATNRRPATPPSSQQGSSQEPSPAPGANKPGPKARPKATTKANPYDWAPPAAAHASRASASVSASRVLDGVVPHHPRLRVTDKYHLGRELGRGEFGVTRLATDRATRERLACKSIPKRRLRTAVDVADVRREVAIMASLPDHPALVRLRAAYEDADAVHLVMELCDGGELFDRIVARGRYTERAAAAAARTVAEVVRACHAHGVMHRDLKPENFLYAGKSDDAQLKAIDFGLSVFFRPGERFTEIVGSPYYMAPEVLRRSYGPEVDIWSAGVILYILLCGVPPFWAETEQGVARAILRGNLDLQREPWPRISEGAKSLVRQMLQMDPKKRPTAQQVLEHPWLQNARKAPNVPLGDVVRARLQQFSAMNKFKKKAMRVIAEHLSVEEVEVIRDMFALMDTDKDGRVTLEELKAGLRKVGSKLAEPEMELLMEAADVNGNGYLDYGEFVAITIHLQRLSNDAHLRKAFLFFDKDSSGYIERAELADALADEAGHADEAALDNVLREVDTDKDGRISFEEFVAMMKAGTDWRKASRQYSRERFKTLSNSLLKDGSLRMAR

SEQ ID NO: 47206 - protein, 691 aa, Zea Mays
MASRMTPSKRPFQRRSSDYDGRGKWQKTKHPSPHKSQFKIEPGVPIFRILCPASKSGNVIGKGGAIIAKIRQETRMRIRVDRAAPGCDERVIFITAANKDEEAGSEQGGENDGGAAASTGGDHEKDKDNNSKEQNVDPEENNCNEQNDDSEKGSGKEEIDGFEKDHGTEEKNDSEKEHNKGEKDDPLVAKVTKLEPERVIPLALKAVSLVFDRIFATEGNNETGNASAASAPVSLRMLVLYSQAGWLLGKGGSVVKQMAADNGCEIRVLKDNLPSCALLNDKLCQITGEIDSVRKGLNAVSEVLLAHPPKETDAVADVHSSGSSSRSLFSQPDGLPSGMQSNFHIPLQGPPSQANGPFDIVDLQPPIHGHASVAIESLSFRMLCPQDKVGSIIGKGGNIVKTIQNDTGCEIKVLDTVPKTDDRIISISGPAHPSDGISPAQNAILHVQRKIMLPSSDKKEGPATCRLIVSGNQVGCVLGKGGSIIAEMRKLSGAFIVVLSKDKIPRGVPEHDEVIQVTARLRNHLFRDRMPAVGPNMRPPFGLLDPQFGPFSGNHESSSLFHKDFMGRPLDGIAAPWTVKGMRDLSDPVSISDIPGAGHREAGGFPGPGQPSMMPNLTAEVLVPRLVIPVLCGEDGGCLDRIREFSEAKITVAEPTADAMDTAVLISGTPEQMHAARSLVEAFVMSESFGP

SEQ ID NO: 47207 - protein, 497 aa, Zea Mays
MAGVRPRPPGEAQQVRQVLVLVLLVRRGGGPRPPRRQGDRRARMGPVAQHPAREAHMEPHVFICSWWIIYSDDGARTTVSLFGTHGTGDDEQLLVQGEGERVPSAQGRDRAGVRAPDAAGQPGRRLDGAAEAPGEDGGGGRAGAEAQHVHALHEHHRRRPPAAHHVRGEQARVAGLGVGRRPRPRLRLHQVPQGPPGRRRQHPHQRRHRLHRGIRRHPLRQGQGSARRLPCRRAHRHRHLRQLRPRRLRAAVPPPRAHPRGRQGPGPRALRPARQGPLPARRQDGAVPRRPPPPLLPAVAGPGARPAHRQARLRLRQHRREAVHAGVHADERGGRGRPLRPPRQGVLQGRAPQVPQRRAHDAAPGLAPARLLHRRQGPARPRRVHRSRRLRDRRQGPLRAPPRYGLRWERDHAHVPGHPGGAARPAGGPHGDAPRLRQPDGGRHPPPRRARPVRGRVPGPAQGVVRGRPGEAPRGGVEVQRRLRNGGRPAGARSGRR

SEQ ID NO: 47208 - protein, 1005 aa, Zea Mays
MATQPPSTATAAVDLYETASQPDAPAAGDAYTFLEFNTQGDDFDYPDFPELSQPPPRSTPLTSSIPGAGTSSSSWPAPPPPPSDAASPEPDLTSQDVHTPPASSSSPSPRSASKARPSAAADGLASGVVALNFEDPVGTGAVEDGYDYSKGDFVEHACRYCGIHNPACVARCNVPSCRKWFCNSRGNTSGSHIVNHLVRAKHKEVCLHKDSPLGETILECYNCGCRNVFLLGFISAKAENVVVLLCREPCLSVNALKDMNWDLSQWCPLIDDRCFLSWLVKVPSEQEQLRARQISAQQINKVEELWKTNPDASLEDLEKPGVDDEPQPVVLKYEDAYQYQNVFAPLIKLEADYDKMMKESQSKDNVTVRWDIGLNKKRVAYFVFPKEDNELRLVPGDELRLRYPGDSSHPTWQSVGHVIKLTAQEEVALELRASQGVPTELNVGFSVDFVWKSTSFDRMQGAMKTFAVDETSVSGYIYHHLLGHEVEHQIIRNTLPRRFGAPGLPELNASQVLAVKSVLQKPVSLIQGPPGTGKTVTSAAIVYHMAKQGQGQVLVCAPSNVAVDQLAEKISSTGLKVVRLCAKSREAVSSPVEHLTLHYQVRHLDTSEKSELHKLQQLKDEQGELSSSDEKKYKALKRATEREILQSADVICCTCVGAGDPRLSNFRFRQVLIDESTQATEPECLIPLVLGVKQVVLVGDHCQLGPVIMCKKAARAGLAQSLFERLVILGVKPFRLQVQYRMHPCLSEFPSNCFYEGTLQNGVTVNERQSSGIDFPWPVPNRPMFFYVQMGQEEISASGTSYLNRTEAANVEKIVTTFLRSGVVPSQIGVITPYEGQRAYIVNYMARNGSLRQQLYKEIEVASVDSFQGREKDYIILSCVRSNEHQGIGFLNDPRRLNVALTRARYGIVILGNPKVLSKQPLWNSLLTHYKEHECLVEGPLNNLKQSMVQFQKPKKIYNDRRLFLGGGQGVMHGTNFGAGASSQAADKRSGRGKGACPRTKSNIP

SEQ ID NO: 47209 - protein, 523 aa, Zea Mays
MGLLSSLPPHRRGAFSGGGWQWSFLDVVWGVFLIAVVVFLALVFTPRRGDPILTTPSVARAGGTVPPCAASEVDLLPCEDPRRSSRLSREMNYYRERHCPTRGEALACLVPPPRGYRIPVPWPESLHKIWHDNMPYGKIAERKGHQGWMKHEGSYFIFPGGGTMFPDGAEQYIEKLSQYVPMKTGVIRTGLDMGCGVASFGGFLLKENIMTLSFAPRDSHKSQIQFALERGVPAFLLMLGTRRLPFPAQSFDFVHCSRCLIPFTAYNGSYFIEADRLLRHGGYLIISGPPVRWKNQEKEWDELQAMAGALCYKLITVDGNTAIWKKPAEASCLPNQNGFGLDLCSTDYDPDEAWYFKLNKCVSKISVAEETAIGSILKWPDRLSKPSARASVINNGANLFEVDSQKWVRRVSYYKKSLGVKLGSTNIRNVMDMNAFFGGFAAAIISDPVWVMNVVPGQKPLTLGVIYDRGLIGVYHDWCEPFSTYPRTYDLIHADAIDSLISGPISGTSSFYGTLLLYRMSDN

SEQ ID NO: 47210 - protein, 532 aa, Zea Mays
MALGVVGLVLASPLLFLLTRAAWITVSCYYLTPARIRTILAGQGVHGPPPRLLVGNLHDVSALVSRATAGDMSCLSHDIVGRLLPHYVQWSKMYGRRFVYWYGSEPRVCVTDAGMVRELLSSRHAHVTGKSWLQRQGAKHFIGRGLIMANGATWSHQRHVVAPAFMADRLRGRVGHMVDCARRTVRALREAVARDGNEVEVGAHMARLAGDIIACTEFDTTYDTGKRIFRLIEELQRLTACSSRYLWVPGSQYFPSKYRREIKRLNGELEQLLKESIQRSREIADEGRTPSSACGMGLLGMLLAETEKNRNRTKSSNGELGLGYDAQTMIDECKTFFFAGHETSALLLTWAIMLLATNPSWQDKARAEVASVCGDAPPTADHLPKLTVLQMVINETLRLYPPATLLPRMAFEDITLGSGADELRVPKGASLWIPVLAIHHDEAVWGADAHEFRPDRFAPGRARPWAGRFLPFASGPRNCVGQAYAMVEAKVVLAMLLASFRFGISDEYRHAPVNVLTLRARHGVPVRLLPLT

SEQ ID NO: 47211 - protein, 498 aa, Zea Mays
MTTVAHHHHLAAATVLFFVAFTMAPLAAGDPVGQLCGTSGNYTLNSTYQGNIRRLAATLPKNASTSATLFATDTFGAVPDIVYALALCRGDTNASACSGCVAAAFLDAQQLCAYNKDATMFYDPCLLRYSNQNFLADPSSDGRGTALILMNTQNVTARFKVFDAAVAALLNATAAYAAANSSKRFGTGVEAFQNFDSNRPRIYGLAQCTPDMTPADCQSCLSGIIQTGPKYFSGKQGGRILSVRCNYRYEQYPFFTSTPLLQLAEPTVGAPAPAPAVVNGTPTPPTTGGARRGNKTGRVLAITLPIVAAVLATVVLCSCLWRRKRKTQGKSSLPDTTNPEDIQSIDSLIIDVSTLRAATENFAEANKLGEGGFGSVYKGILPDDQEIAVKRLSQTSRQGMEELKNELVLVAKLQHKNLVRLVGVCLEDHEKLLVYEYMPNKSLDTILFSTVTYSASLSNREIPENLQHAFMSSFFFSLSLSATDRSREMWRAGLGEEV

SEQ ID NO: 47212 - protein, 271 aa, Zea Mays
MEVMTGALPSLIPKLANLVAGEYNLQKGVKGDIMFLQEELESMRDALEEISKVPADQLPNRDKIWARNVRELSYDIEVSIDAFMVQSKGRKLVKQYGLQKVIGMCLDWLLQPKIRHKMATEIRTIKRRIVEVHERHIRYEINLGPDKLGNAAVDPRIFGQYTELKELVGIDETRDELIDIMMEGNVVPMKQGKIISIVGFGGLGKTTLANAVYEKIRALFDCCAFVSVSQTPDLKKLFKSLLYDLGKYINEESLDERQLINVLREFLQERS

SEQ ID NO: 47213 - protein, 452 aa, Zea Mays
MEVMTGALPSLIPKLANLVAGEYNLQKGVKGDIMFLQEELESMRDALEEISKVPADQLPNRDKIWARNVRELSYDIEVSIDAFMVQSKGRKLVKQYGLQKVIGMCLDWLLQPKIRHKMATEIRTIKRRIVEVHERHIRYEINLGPDKLGNAAVDPRIFGQYTELKELVGIDETRDELIDIMMEGNVVPMKQVSQTPDLKKLFKSLLYDLGKYINEESLDERQLINVLREFLQERRYLIVIDDIWDISVWKMIRCALPDNDIGYIIVTTTRISDVAEKVGGAYKLKPLSLNNSRELMYKIIFGNENRENTKDKEICLDEELAEVSNKILKKCAGVPLAIITMASVLACKARNEMEWYEVYNSIGVGIENNLDVGNMRKILSFSYYDMASHLKTCLLYLSMFPEDYKIEKDRLIWMWIAEGFVQYVKQGKSLFEHGESYFNELINRECQTGLGA

SEQ ID NO: 47214 - protein, 454 aa, Zea Mays
MEVMTGALPSLIPKLANLVAGEYNLQKGVKGDIMFLQEELESMRDALEEISKVPADQLPNRDKIWARNVRELSYDIEPKIRHKMATEIRTIKRRIVEVHERHIRYEINLGPDKLGNAAVDPRIFGQYTELKELVGIDETRDELIDIMMEGNVVPMKQGKIISIVGFGGLGKTTLANAVYEKIRALFDCCAFVSVSQTPDLKKLFKSLLYDLGKYINEESLDERQLINVLREFLQERRYLIVIDDIWDISVWKMIRCALPDNDIGYIIVTTTRISDVAEKVGGAYKLKPLSLNNSRELMYKIIFGNENRENTKDKEICLDEELAEVSNKILKKCAGVPLAIITMASVLACKARNEMEWYEVYNSIGVGIENNLDVGNMRKILSFSYYDMASHLKTCLLYLSMFPEDYKIEKDRLIWMWIAEGFVQYVKQGKSLFEHGESYFNELINRECQTGLGA

SEQ ID NO: 47215 - protein, 715 aa, Zea Mays
MMEGNVVPMKQVSQTPDLKKLFKSLLYDLGKYINEESLDERQLINVLREFLQERRYLIVIDDIWDISVWKMIRCALPDNDIGYIIVTTTRISDVAEKVGGAYKLKPLSLNNSRELMYKIIFGNENRENTKDKEICLDEELAEVSNKILKKCAGVPLAIITMASVLACKARNEMEWYEVYNSIGVGIENNLDVGNMRKILSFSYYDMASHLKTCLLYLSMFPEDYKIEKDRLIWMWIAEGFVQYVKQGKSLFEHGESYFNELINRGMIQPIYNQAGMIYECRVHDMVLGLICSLSNGENFVTTLNGLGHGSPSNMIRRLSVQNGNESQAMTLQTRNLQQVRSVVAFPDATASVVTVLRSFRVLRVLDLQDCDLSQCCSLKYLGNLFHLRYLGLCNTSITQLPEEIVNLQLLQILDVWNNKMYCLPSTIVQLRYLMCLYIDGFTRVPNGIGSLTSLEELTFLGIYDSTVDIIEELGQLTELRVLHIVLFGEWNDKLVECLHKLKKLKYLYIKDRSGQLNIGGLDAWVAPPNLQILNTRSGCWFTTLSASAWMNPSLLQDLSLSTTVRELQQDDIIILGSLPALRYLNLMIVGEDLGVHNEIHGECIVGAGLFPSLVYCQLWGNVAPIVFQRGAMPRLRTLDFRLSVQEVRGINGRDGGIDLGLRNLPSLQKVWVHLDPEGANKAEVKELEAELTRAIKIHPNHPQLYGIQDEDADDE

SEQ ID NO: 47216 - protein, 861 aa, Zea Mays
MEVMTGALPSLIPKLANLVAGEYNLQKGVKGDIMFLQEELESMRDALEEISKVPADQLPNRDKIWARNVRELSYDIEPKIRHKMATEIRTIKRRIVEVHERHIRYEINLGPDKLGNAAVDPRIFGQYTELKELVGIDETRDELIDIMMEGNVVPMKQVSQTPDLKKLFKSLLYDLGKYINEESLDERQLINVLREFLQERRYLIVIDDIWDISVWKMIRCALPDNDIGYIIVTTTRISDVAEKVGGAYKLKPLSLNNSRELMYKIIFGNENRENTKDKEICLDEELAEVSNKILKKCAGVPLAIITMASVLACKARNEMEWYEVYNSIGVGIENNLDVGNMRKILSFSYYDMASHLKTCLLYLSMFPEDYKIEKDRLIWMWIAEGFVQYVKQGKSLFEHGESYFNELINRGMIQPIYNQAGMIYECRVHDMVLGLICSLSNGENFVTTLNGLGHGSPSNMIRRLSVQNGNESQAMTLQTRNLQQVRSVVAFPDATASVVTVLRSFRVLRVLDLQDCDLSQCCSLKYLGNLFHLRYLGLCNTSITQLPEEIVNLQLLQILDVWNNKMYCLPSTIVQLRYLMCLYIDGFTRVPNGIGSLTSLEELTFLGIYDSTVDIIEELGQLTELRVLHIVLFGEWNDKLVECLHKLKKLKYLYIKDRSGQLNIGGLDAWVAPPNLQILNTRSGCWFTTLSASAWMNPSLLQDLSLSTTVRELQQDDIIILGSLPALRYLNLMIVGEDLGVHNEIHGECIVGAGLFPSLVYCQLWGNVAPIVFQRGAMPRLRTLDFRLSVQEVRGINGRDGGIDLGLRNLPSLQKVWVHLDPEGANKAEVKELEAELTRAIKIHPNHPQLYGIQDEDADDE

SEQ ID NO: 47217 - protein, 389 aa, Zea Mays
MCTATDMAVLCGANGEVCYSKYGSFPTKGKYCHEMALRILLASIESHANRYKRYIVPVLSVFMDFYIRVFVRVFTSASEIKNTPLKLSYIYQCVGCDSFHLQCLARTVPKKNNGVKHAPAFGPVVPQECSDCGKKFNVGGPIWSAPIHDQDWVVSTLTGVKSMKDRYPAYDKITSVLTTVSEELDDIPLFFSLHNIAGTVKCTSPSLVMFRSAVLNAGYRISSTHVNPLGVKSDAPWDVIWDIMRCWVKNHPIKEQARDSPGTVILSKSPKLEADFSRAVAALGKSGAKKTKRFLPNPERHWGPKVRAGRKITSKHVSLLGPDAINAAVNGGGGGDCHREGSGAAPDSSNTAPEPEGLEDEPSNKRQKASGDGEPEGQKASDGEPASEA

SEQ ID NO: 47218 - protein, 257 aa, Zea Mays
MASRGGGRGKKRNRWASRSERGGPRSELDSRYSGRDGLASSGRSESGRGSHGRDDYGSRGRYDSGETDGRSRRSARGRSRSRSPSPKRSHHHEARRSRSRSRSRSCRNFRASRSKSHSPVASSRHEKAAVISGSTQPNLGYAEHKSPPRSHSGDDHVNHPDQKDDHMGDGKMERVDLDRSPSPQYDKSAPYSPAYNGKASDSMSPNVQPKADAKYVKPSGKPEPASPLRHSKGRDDDEGIIDDDGEIAEGEMMMKVS

SEQ ID NO: 47219 - protein, 599 aa, Zea Mays
MQNQDVVAIAKTGSGKTLGYLLPGFMHIKRLQNSTRNGPTVLVLAPTRELATQILDEAMKFGRSSRISCTCLYGGAPKGPQLRDLDRGVDVVVATPGRLNDILEMRRVSLKQVSYLVLDEADRMLDMGFEPQIRKIVKEIPHRRQTLMYTATWPKEVRRIADDLLVHPLQVTIGNVDELVANSAITQHIEVITPSEKQRRLEQILRSQVSGSKILIFCTTKRMCDQLARTLTRQFGASAIHGDKSQSEREKVLNHFRSGRSPILVATDVAARGLDIKDIRVVINYDFPTGVEDYVHRIGRTGRAGATGVAYTFFCDQDSKYAADLIKILEGANQQVPRDLEDMASRGGGRGKKRNRWASRSERGGPRSELDSRYSGRDGLASSGRSESGRGSHGRDDYGSRGRYDSGETDGRSRRSARGRSRSRSPSPKRSHHHEARRSRSRSRSRSCRNFRASRSKSHSPVASSRHEKAAVISGSTQPNLGYAEHKSPPRSHSGDDHVNHPDQKDDHMGDGKMERVDLDRSPSPQYDKSAPYSPAYNGKASDSMSPNVQPKADAKYVKPSGKPEPASPLRHSKGRDDDEGIIDDDGEIAEGEMMMKVS

SEQ ID NO: 47220 - protein, 643 aa, Zea Mays
MDSVRAFSTSPCVRKSTHCGNILFIQRAGFASPTPIQAQSWPIAMQNQDVVAIAKTGSGKTLGYLLPGFMHIKRLQNSTRNGPTVLVLAPTRELATQILDEAMKFGRSSRISCTCLYGGAPKGPQLRDLDRGVDVVVATPGRLNDILEMRRVSLKQVSYLVLDEADRMLDMGFEPQIRKIVKEIPHRRQTLMYTATWPKEVRRIADDLLVHPLQVTIGNVDELVANSAITQHIEVITPSEKQRRLEQILRSQVSGSKILIFCTTKRMCDQLARTLTRQFGASAIHGDKSQSEREKVLNHFRSGRSPILVATDVAARGLDIKDIRVVINYDFPTGVEDYVHRIGRTGRAGATGVAYTFFCDQDSKYAADLIKILEGANQQVPRDLEDMASRGGGRGKKRNRWASRSERGGPRSELDSRYSGRDGLASSGRSESGRGSHGRDDYGSRGRYDSGETDGRSRRSARGRSRSRSPSPKRSHHHEARRSRSRSRSRSCRNFRASRSKSHSPVASSRHEKAAVISGSTQPNLGYAEHKSPPRSHSGDDHVNHPDQKDDHMGDGKMERVDLDRSPSPQYDKSAPYSPAYNGKASDSMSPNVQPKADAKYVKPSGKPEPASPLRHSKGRDDDEGIIDDDGEIAEGEMMMKVS

SEQ ID NO: 47221 - protein, 177 aa, Zea Mays
MPAPAPPIRLGPPTPYISSHGSKVARLHMYDWIVLILLAVLDGVLNIIEPFHRFVGSEMMTDLRYPMKGNTVPFWAVPIIGIIGPMVIITVIYFKKRNVYDLHHAILGLLFSVLITAVLTDAIKDGVGRPRPDFFWRCFPDGKPEYNNFTTGAICHGQASVIKEGHKSFPSGHTSCK

SEQ ID NO: 47222 - protein, 450 aa, Zea Mays
MGGSGKWVKSLIGLKKQPEKEDCKMSNVSVPAQDKLQLPSVHGGGLRGKGRRWKLWRTSSGDQGSMWRGSRGGSQRSAASEASDDASSVAAVPADPFTAAVATVARAPARDFMAVRQEWAAIRVQTAFRGFLARRALRALKGLVRLQAIVRGRQVRKQAAVTLRCMQALVRVQARIRARRVRMSTEGQAVQKLLEARRTQMDILREAEEGWCDSQGTLEQVRVKLQKRQEGAIKRERAIAYAYSQQADGAAKCNPPKLTSNGLVNHSGMLLKHQNLDKGNGNWSWLERWMAARPWENRLMEEHNSSSPDFRSSKNCEDSFGVLGDFSEPNSVKVRKNNVSKRVCAKPPGPTHAHGHHQRLKAQSISSLSTELHNDESSASSSSCFASTPISFTLVASEKTEDSVRTRPNYMSMTESIKAKQKACSAQRTVALKQCDDRKAMSAELKVAQV

SEQ ID NO: 47223 - protein, 445 aa, Zea Mays
MDFAELEAVEGLRWPWHSWPPTAPAAASLVVPTAVLCSPLQHPTAPDLLPLLPYAPLRCASPGCGAALNPFSRVHHGSARWSCPFCGATGNPFPRLLAPDALPAELFPTHSSVEYSLPPDPAEAGGPGPPALVFVIDAATAAEELAVLKDEVRRVVQGLPEGIRVALVTFAASVWVHDLGFEGCARVVVLNGERELESDKIQKLLGVHRSPYKKLAMPRSTEAQRFLLPVSECEFNITSAIEDLSSMSACPRGHRPLRATGAAISTAIALLEGCCSPSTGGRIMVFTSGPATVGPGCVVETDLGKAIRSHRDIFNSNAPLTDKARDFYKKVAKRLTDHALVLDLFACSLDQVGAAELRNPIEVSGGLMVHTESFESEQFKSCFRHMFKREGANNLNMNFNATIEIVTSKEVKICGALGPCISLRRKNSSVSDKEIGEVHDKVPSW

SEQ ID NO: 47224 - protein, 430 aa, Zea Mays
MPEDTYKGHGFRTELISMILDLKPRFLRFPGGCFVEGGWLRNAFRWRESIGPWEERPGHFGDVWHYWTDDGLGYYEFLQLAEDLGTEPIWVFNNGVSHNDEVDTVAIAPFVKDVLDSIEFARGSANSTWGSVRAAMGHPEPFPVKYVAIGNEDCGKKFYRGNYLKFYNAIRQAYPDIQMISNCDGSSTPLDHPADLYDFHVYNDSKTLFNMKSTFDRTSRSGPKAFVSEYAVWRGDAGRGSLLASLAEAAFLTGLEKNSDIVSMASYAPLFVNDNDQTWNPDAIVFNSWQHYGTPSYWMQTLFRESSGAMFHPTTISSSYSGSLAASAITWQDSENSFLRVKVINFGSDAVTLTISTSGLQASINALGSTATVLTSADVMDENSFSNPTKVVPVKSDLSNAAEQMQVTLAPRSFSSFDLALAQSKLVAEM

SEQ ID NO: 47225 - protein, 639 aa, Zea Mays
MGITSNDAAPRAVLLRFLFLLCIGCKCLASEVEATQTATLAVDASPQLARKIPDTLFGIFFEINHAGAGGIWAELVSNRGFEAGGLHTPSNIDPWSIIGDDSSVFVETDRTSCFSRNIVALRMEVLCDNCPTGGVGVYNPGFWGMNIEEGKVYNLVMFVKSPETTDLTVSLTSSNGLQNLASATVTVSGESNWIKVEQKLVAKGTNRTSRLQITTNKKGVVWFDQVSLMPEDTYKGHGFRTELISMILDLKPRFLRFPGGCFVEGGWLRNAFRWRESIGPWEERPGHFGDVWHYWTDDGLGYYEFLQLAEDLGTEPIWVFNNGVSHNDEVDTVAIAPFVKDVLDSIEFARGSANSTWGSVRAAMGHPEPFPVKYVAIGNEDCGKKFYRGNYLKFYNAIRQAYPDIQMISNCDGSSTPLDHPADLYDFHVYNDSKTLFNMKSTFDRTSRSGPKAFVSEYAVWRGDAGRGSLLASLAEAAFLTGLEKNRWNPDAIVFNSWQHYGTPSYWMQTLFRESSGAMFHPTTISSSYSGSLAASAITWQDSENSFLRVKVINFGSDAVTLTISTSGLQASINALGSTATVLTSADVMDENSFSNPTKVVPVKSDLSNAAEQMQVTLAPRSFSSFDLALAQSKLVAEM

SEQ ID NO: 47226 - protein, 697 aa, Zea Mays
MGAGRPVPCRRGARVFLRMVDACMHGRHAGPTRIDKWKRMGITSNDAAPRAVLLRFLFLLCIGCKCLASEVEATQTATLAVDASPQLARKIPDTLFGIFFEINHAGAGGIWAELVSNRGFEAGGLHTPSNIDPWSIIGDDSSVFVETDRTSCFSRNIVALRMEVLCDNCPTGGVGVYNPGFWGMNIEEGKVYNLVMFVKSPETTDLTVSLTSSNGLQNLASATVTVSGESNWIKVEQKLVAKGTNRTSRLQITTNKKGVVWFDQVSLMPEDTYKGHGFRTELISMILDLKPRFLRFPGGCFVEGGWLRNAFRWRESIGPWEERPGHFGDVWHYWTDDGLGYYEFLQLAEDLGTEPIWVFNNGVSHNDEVDTVAIAPFVKDVLDSIEFARGSANSTWGSVRAAMGHPEPFPVKYVAIGNEDCGKKFYRGNYLKFYNAIRQAYPDIQMISNCDGSSTPLDHPADLYDFHVYNDSKTLFNMKSTFDRTSRSGPKAFVSEYAVWRGDAGRGSLLASLAEAAFLTGLEKNSDIVSMASYAPLFVNDNDQTWNPDAIVFNSWQHYGTPSYWMQTLFRESSGAMFHPTTISSSYSGSLAASAITWQDSENSFLRVKVINFGSDAVTLTISTSGLQASINALGSTATVLTSADVMDENSFSNPTKVVPVKSDLSNAAEQMQVTLAPRSFSSFDLALAQSKLVAEM

SEQ ID NO: 47227 - protein, 658 aa, Zea Mays
MAISTWSARLLLTPASSRATLSPPRPPTTNPLSSFFPRNRLHFVRPRPRPPCAYISAPAPGPEAAYAPPSLDATAAAADVAAAISSSDAVTWAGVWALLSRHRARIAVCIAALVACTTCTLSMPLFSGRFFETLIGRGNEPLWRLLSKIAILYTLEPIFTIIFVINITIIWEQVMARLRSQIFRRILIQKMLFFDRHKVGELTGLLTSDLGSLKSVVSDNISRDRGLRALSEIIGTLCILFTLSTELAPVLGLLMVSVSVLVAIFKRSTVPTFKSYGIVQARISDCASETFSAIRTVRSFGGEKRQISLFDNLAHAYQNNGTKLGVLKSANESLTRVVVYVSLMALYILGGRKVNAGKLSVGTMVSFIGYTFTLTFAVQGAVNTLGDLRGTLASVERINSILSAKDIDDSLAYGLAKELDGKEFDDSNGVYENGSVNKHFMSELKSSSSCSNLAWSGDIRLKEVHFSYPLRSNVEILNGLDLTIECGKVTALVGPSGAGKSTVVQLLARYYEPTQGSITVAGEDIRVFDKREWSRVVSLVNQGYDTLVGERGSLLSGGQRQRIAIARALLKNAPILILDEATSALDATSERLVQEALNHLMKGRTSLVIAHRLSTVQNAHRIAVCSEGRITELGTHRELVAKGGSYASLVGTQRLAFE

SEQ ID NO: 47228 - protein, 703 aa, Zea Mays
MAISTWSARLLLTPASSRATLSPPRPPTTNPLSSFFPRNRLHFVRPRPRPPCAYISAPAPGPEAAYAPPSLDATAAAADVAAAISSSDAVTWAGVWALLSRHRARIAVCIAALVACTTCTLSMPLFSGRFFETLIGRGNEPLWRLLSKIAILYTLEPIFTIIFVINITIIWEQVMARLRSQIFRRILIQKMLFFDRHKVGELTGLLTSDLGSLKSVVSDNISRDRGLRALSEIIGTLCILFTLSTELAPVLGLLMVSVSVLVAIFKRSTVPTFKSYGIVQARISDCASETFSAIRTVRSFGGEKRQISLFDNLAHAYQNNGTKLGVLKSANESLTRVVVYVSLMALYILGGRKVNAGKLSVGTMVSFIGYTFTLTFAVQGAVNTLGDLRGTLASVERINSILSAKDIDDSLAYGLAKELDGKEFDDSNGVYENGSVNKHFMSELKSSSSCSNLAWSGDIRLKEVHFSYPLRSNVEILNGLDLTIECGKVTALVGPSGAGKSTVVQLLARYYEPTQGSITVAGEDIRVFDKREWSRVVSLVNQDPVLFSVSVGENIAYGLPDDVVSKDEIIKAAKAANAHEFIISLPQGYDTLVGERGSLLSGGQRQRIAIARALLKNAPILILDEATSALDATSERLVQEALNHLMKGRTSLVIAHRLSTVQNAHRIAVCSEGRITELGTHRELVAKGGSYASLVGTQRLAFE

SEQ ID NO: 47229 - protein, 467 aa, Zea Mays
MDGSGAGTGSATLLRKRPLSVNTASSTAAAIELGSKQAAGVVAAIEEEPVSPTGRLFREPNFRCHIVSVFGLGAPVDLPALRAGVAATLARHPRFCSVQVVNEKDARPKWIRTAVNVDDHIIVPELNPATTSADPDKALEDYVSSLSTRPMAHSRPLWEVHVLDFPTADAAAALALRAHHSVGDGVSMLSLFMACTRSAADPGALPSLPPARRAGPVHAVRRPAGALAALAAWLLSLLVLAWRTAVDVACFVATAASLLGDAPTVLKGKEGTEFQPRRFVNRTLSLDDIKLVKNAVGCTVNDVLLGITSSALSRYYYRRTGESDSKRSITVRSAVLVNLRATPGIHALASMMESGNDNNNGAARWGNKLGYMLIPFHLAKHDDPTEYVRTAAKVTRRKKSSMESAFTFWSGDMVLRLFGIKLLRSATACSRTPPCPSPAWSGRLSRCCSAATPSSTSRPAPTATHMP

SEQ ID NO: 47230 - protein, 93 aa, Zea Mays
MREFHQHLPKLLKPGGIYSYFNGLCGDNAFFHAVYCQLVALELANLGYSTQFIPLPVKDCLAEEVWKGVKRKYWQLDTYYLPACQSESESTIK

SEQ ID NO: 47231 - protein, 632 aa, Zea Mays
MGKPSLKKKRASGGGKSGDHGGKPASLERSGSKVLDGDETLFTDMAQEHKEEGNKLFQRRDYDRALLNYDKAIKLLPRAHPDVAYLHSNIAACYMQMSPPDYYRAINECNIALEASPKYTKALLKRARCFEALGRLDLACRDVNKVLALEPNNLTALDVSDRIKKTMEEKGIVLDDKEIMPTPEEVVAAAPKQKPRKKRGGRKFAAKAAAAAVEEVDEQKIAEAIKEEVEEQPRQVKLVFGEDIRWAQVPASCSMAQLREAVRSKFPGLKAVLVKYKDKEGDLVTITNQDELKWAEELAEAGSSLRLYVTEADPEHEPYVDDTNMERNVNSNSDNGSIRSNRQDEDRSTVTCIDDWIVQFARLFKNHVGISSDEYLDLHEVSMKLYTEAIEDTITTEEAQEVFHLAEGNFQEMAALAFFHWGNVHMSRARKRLLLSGDSPSELVLEQVKEAYEWARDEYNKAGTRYEDAVKAKPDFFEGFLALAHQQFEQAKLSWYYAIGSNADLDSCSSEILELFNKAEDNIEKGIEMWEEMEEQRLKNRSKPSQENIVLEKMGLEEYIKDVSTDDAAEQASNLRSQINILWGLGFKIDEIVQAWNEMYDIKRWLRGVPSFRLEPLFRRRVPQLHTALEHI

SEQ ID NO: 47232 - protein, 76 aa, Zea Mays
MKALMEITDPRAYLTHSLPAKRGAEVYEALMEITSPRAYLIHCLPAERGLEVTDGAIEAPKSIVFPQAENRMHAQK

SEQ ID NO: 47233 - protein, 87 aa, Zea Mays
MHSFGHRANAVATFAVTILAAICFAASFSDNFNTPTPTASVKILNLNWFQKEANGNDEVSMTLNISADLSSLFTWNTKQSMRLHRML

SEQ ID NO: 47234 - protein, 289 aa, Zea Mays
MTLREPQSSRWDAFTSAERILSVTSAETPQSLASELRDFINTSTLVESHTQTTSMESSQGLLSFQDVLLLTIIGYILAGENFPTSMAGGPFSWEDERSLKDVIVDSILERPSSVKLRFLDGLDSELEAKARSKDGERNKNSSEVAPSTDDDFDDEWGTWDDSDNTDHQKEEAYGDMQLKLEVRDRVDQLFKFFHKLSSMRLRNQALGEGIAALSRFETDGYSRKCLLYKLLLALLSRYDVPGLEYHSSTVGRLFKSGLGRFGLGQPSVINLFLSFLFLEVLILLRSGKS

SEQ ID NO: 47235 - protein, 146 aa, Zea Mays
MKSTLPSMSFQSPCFKIQPATQQSLWPPRRQSTRKPGLPLKLIRAALGPDANGGLLNADRRGATLPSSPLSDVVQEFYSSLNERNSKRLDKLMAPDCIIEDTAYYKPLDAKGSSSFLARLTGVQGDNWYQRRCRVGTVLAVMQRGQ

SEQ ID NO: 47236 - protein, 239 aa, Zea Mays
MSRFGRSGPPPPIRDTYSLLVLNITFRTTADDLFPLFDKYGEIVDIYIPRDRRTGDSRGFAFVRYKYEDEAQKAVDRLDGRLVDGREIMVQFAKYGPNAERINKGRIMEPVPRPRGRSRSRSPRRRYRDDYRDDYQDRDYRRRSRSQSRDRYARDRYRDRDYRHRSLSRSLSPARRSPSHSRSRSYTPDDYKRRGKDSSASPASRSPSRSPPRKTPPSPKRSPVRHNDDRSPRSRSPST

SEQ ID NO: 47237 - protein, 462 aa, Zea Mays
MQGLRQEVIVDLVDQCRSYKQRVVQLVNSTSDEDLLSQGLTLNDDLQRVLAKHDAIAAGIAIRLQKPKSAPARADSSPTKPEPTKETEQRSAKVASSVTPFEQLALPAPPSSSASKSHGESAVSPNIDLLSGDEFFKPEPVHSQALVPLVTQASASSSPSTLDLLDMFSDSNAINNTSQNPTILSISNSNPNTSVQAYPVPQQPVPPHHPSPYANGLNSDTMTPFDQGSKLTSASSWNEQIAHGMIPPQQFAHGQGEQSNDLPLPPWEALPAETEQLEADHPGGLSALPQFGVSQPQPVQITHSGQQVLPSQLMPTGQPGGQFQPRFGAQQPYATENTQYGGMYPPVQGNQPTGIYPQQMAGDVYQQQMFGGQMIGYGYGPQPGGYYVPNAAYAYAGANDLSQRMNGLSMQGNSLYGTPASSSLQQRNRPSRPEDSLFSDLVSIAKQSLVKLLPTRLVTCKP

SEQ ID NO: 47238 - protein, 184 aa, Zea Mays
MTTPGSCPATTAATHPPMCAASAAGGSQKMVRPRLVLFGDSITEQSFRPGGWGAALADTYSRKADVVVRGYGGYNTRWALFLVHHIFPLDGLAPPLATTIFFGANDAALLGRTGERQHVPVSEYKNNLKMIVNHLKDCSNSMVIVLITPPPIDEEGRERFARMRGSYLKGQMKWLGSMLVIASN

SEQ ID NO: 47239 - protein, 227 aa, Zea Mays
MTTPGSCPATTAATHPPMCAASAAGGSQKMVRPRLVLFGDSITEQSFRPGGWGAALADTYSRKADVVVRGYGGYNTRWALFLVHHIFPLDGLAPPLATTIFFGANDAALLGRTGERQHVPVSEYKNNLKMIVNHLKDCSNSMVIVLITPPPIDEEGRERFARSLYGQNARKLPERTNEMAGVYAGYCVELAREMCIPCVNIWSKMQETEGWQKLYLRAQGGGDKEQQ

SEQ ID NO: 47240 - protein, 141 aa, Zea Mays
MAVHELYINRNRLAPLSTRAWILLAPRLPPPAESATRALRSSSSGRGRQEEEEMAGRDGAKSSASMEEEACGEKKYGGIAPKKKPLISKDHERAYFDSADWVLGKQAANSSTRATVESLKPKLKRTPHHQLPPRKPTCASG

SEQ ID NO: 47241 - protein, 76 aa, Zea Mays
MEMHADVDGCSVPLAVLLKRELCNQKVERPDILFGEANKSKKGEDFTLLVPRCHRTPGGSGGGENAGDDDTISVFA

SEQ ID NO: 47242 - protein, 237 aa, Zea Mays
MHIWFQICASIVSSCQLGRRHVYFHSCAPILASPIVSFWCTADLVCVKCIRLSQVGDFQLCSLRPRRRRRRRSVHDDRLLHGRIDATTRYGYLELAIEQMAETADASNALDHGLHYLRSTGNACAARALLWWGWDNSDAHAGMATSVELSLFLPPSVNFLGSCLLRQLHVLTADVAATHRLLCSSSGEHPLLEPPWRSATGRHDSSSPSDASRLFDEMCEKQNEHARVLGPLCDPNN

SEQ ID NO: 47243 - protein, 648 aa, Zea Mays
MSAAAGTPPEDGGDRPWQSYHTAYTNAKAGMEGVDKEKVQKVIYEMSKGSKYFENEQRKEAATKQKIEHLRAQCAVLTDNDISHFQKVADKKMLELEASRDLSKIWLHTDMDAFYAAVETLENPSLKGKPLAVGSMSMIATASYEARKFGVRAAMPGFIGCKLCPDLVFVPPNFERYTHYSELTRKVFQRYDPNFIATSLDEAYLNITNVCIERGITGEEVAIELRSAIHQETGLTCSAGVAPNRMIAKVCSDINKPNGQFILPNDWEAVLTFVSTLPIRKIGGIGKVTEQMLHQVLGISTCQEMLQKAAFLCALFSESSADFFLSVGLGLGGTETPEQRQRKSISCERTFTATNDSSLLFKKLASLAENLSDDLQKEGFKGKTLTLKLKTADFEVRTRAVTTRNYIDSKEDILVYATKLIKAEMPISLRLMGLRMSQLHDEKDDPSTSTQKTLDIFFRSSNSNSNGNGTTVQRITNSPGQDNDSISLTTKEEYLAPDAGTSVSTGQQDFFLHDEICFIPEQQRSLDNDTKEAVLSDPLGGTKSDDVSSSAKVTPTKKLDEPDPLISPKAVSSSSKPDQQSWIDGYICSICGFELPPGFEEERLEHSDFHLAETLQQEEAVDGTRHISNERKAAEGCWRPSTDTEAVE

SEQ ID NO: 47244 - protein, 391 aa, Zea Mays
MQIGGIGKVTEQMLHQVLGISTCQEMLQKAAFLCALFSESSADFFLSVGLGLGGTETPEQRQRKSISCERTFTATNDSSLLFKKLASLAENLSDDLQKEGFKGKTLTLKLKTADFEVRTRAVTTRNYIDSKEDILVYATKLIKAEMPISLRLMGLRMSQLHDEKDDPSTSTQKTLDIFFRSSNSNSNGNGTTVQRITNSPGQDNDSISLTTKEEYLAPDAGTSVSTGQQDFFLHDEICFIPEQQRSLDNDTKEAVLSDPLGGTKSDDVSSSAKVTPTKKLDEPDPLISPKAVSSSSKPDQQSWIDGYICSICGFELPPGFEEERLEHSDFHLAETLQQEEAVDGTRHISNESWVAERPRSTAPTPKKKLKSSKEGKHIPIDSFFTKCNKSP

SEQ ID NO: 47245 - protein, 631 aa, Zea Mays
MSAAAGTPPEDGGDRPWQSYHTAYTNAKAGMEGVDKEKVQKVIYEMSKGSKYFENEQRKEAATKQKIEHLRAQCAVLTDNDISHFQKVADKKMLELEASRDLSKIWLHTDMDAFYAAVETLENPSLKGKPLAVGSMSMIATASYEARKFGVRAAMPGFIGCKLCPDLVFVPPNFERYTHYSELTRKVFQRYDPNFIATSLDEAYLNITNVCIERGITGEEVAIELRSAIHQETGLTCSAGVAPNRMIAKVCSDINKPNGQFILPNDWEAVLTFVSTLPIRKIGGIGKVTEQMLHQVLGISTCQEMLQKAAFLCALFSESSADFFLSVGLGLGGTETPEQRQRKSISCERTFTATNDSSLLFKKLASLAENLSDDLQKEGFKGKTLTLKLKTADFEVRTRAVTTRNYIDSKEDILVYATKLIKAEMPISLRLMGLRMSQLHDEKDDPSTSTQKTLDIFFRSSNSNSNGQQDFFLHDEICFIPEQQRSLDNDTKEAVLSDPLGGTKSDDVSSSAKVTPTKKLDEPDPLISPKAVSSSSKPDQQSWIDGYICSICGFELPPGFEEERLEHSDFHLAETLQQEEAVDGTRHISNESWVAERPRSTAPTPKKKLKSSKEGKHIPIDSFFTKCNKSP

SEQ ID NO: 47246 - protein, 348 aa, Zea Mays
MEGRLQISESSPLLDIDYDYGIVKHPFPLSCFMRNWYLGPDFYHAVKIGIVQYMILKPICAVLAIFFELLGIYGEGKFAWKYGYPYLAVVLNFSQTWALYCLIQFYTATKEKLQPIKPLSKFLTFKSIVFLTWWQGVAVAFLFSTGLFNGHLAQRFQTRIQDYIICLEMGVAAVVHLKVFPAKPYRRGERNVPNVAVMSDYASLGAPDPEEIGGIDSLTILQTPVTKDRQLSFSQSVRDVVLGSGEIMVDDVKYTVSHVVEPMERSFTKINKTIHQISENVKQLEKQKRKAKDDSHLIPLEPWSEEFSEAHDHVAGGSASDSGLAKTRYNRILNRPRRSFESRLRRWF

SEQ ID NO: 47247 - protein, 565 aa, Zea Mays
MAVAVLLRQRALSSPHAVSCRNAVYTSGLFSNSDLHSKVNSTSLRFWRTYHNSGKFDLTDLTHPHMWYPKAREKKRNVFLHVGPTNSGKTYSALKRLEASSSGVYCGPLRLLAREVAQRLNKVNVPCNLITGQERNEIEGAKHSSVTVEMADMTTNYQCAVIDEIQMVGCKSRGYSFTRALLGLCSDELHVCGDPAAVPLIQRILEATGDVVTVQYYERLSPLVPLKSPLGSFSNIKAGDCLVSFSRRGIYKLKKRIEREGKHLCSVVYGSLPPETRTKQATMFNDDTSDLNVLVASDAIGMGLNLNISRIIFSTMMKFDGFCNRELTVAEIKQIAGRAGRYGSKFPVGEVTCLNPQDLPLLHSSLKSASSIIERAGLFPTFDLLSLYSRLHGTDFFHPILERFLEKAKLSPDYFITDCEDMLKVAAIVDDLPLGLYDKYLFCMSPVDFAENYARKGIVRLKEIFTPGTLQVPKTDNQLKELESVHKVLELYVWLSFRMDDSFPDREVAASQKSICSMLIEEYLERFGWQPQDRRKVLGGAQKLLQEYDVSQMNKYFQEVNPGPK

SEQ ID NO: 47248 - protein, 59 aa, Zea Mays
MRHVWGATWCLVRGPLVGPFSVRLTTLSARKTLTARDVIPRNWTPKATYTSRLNFQPSL

SEQ ID NO: 47249 - protein, 211 aa, Zea Mays
MASSRALALALFLLCALLPAPPVSATLLFGGGESAKKAGVDAEWRPATATWYGEAEGDGSDGGACGYGTLVDVVPMKARVGSVSPVLFKDGEGCGACYKVRCLDRGVCSRRAVTVVVTDECPGGLCAFGRTHFDLSGAAFSRMAVAGAGGRLRDRGQLSVVYRRTACKYGGKNIAFRVNEGSTNFWLSLLVEFEDGEGDIGSMQIKQAVTQ

SEQ ID NO: 47250 - protein, 525 aa, Zea Mays
MLVLRRLRLRLPLPRPLLVSSFSSTSPSSSPSTSSSSSCWSSTGESRRAMASSPSPDSAAVVAEGSAARRFWIAASTREAAFAAYTPFLLSLAAGNLRLNVFRHYIAQDAHFLHAFARAYEMAEDCADDDDDMATIAALRKAILQELNLHSSVLKEWGVDPTKEIPPSAATTKYTDFLLATAAGKVDGTKGSDKMVTPFEKTKIAAYTVGAMTPCMRLYAYLGKELMVFLKQDENHPYKKWINTYASSDFEDTTLQIEELLDKLSVSLTGEELEIIGKLYQQAMKLEVEFFSSQLIDQPVVAPLSRYCDPKYKLLIFSDFDLTCTIVDSSAILAEIAILSFQKANQSGIDNNLDRAKSGDLRSSWNMLSKQYMEEYEKCMERLLPPEESKSLDYDKLYKGLEVLAEFEKLANSRVVDSGVLRGMNLEDIRKAELIRSAFSSAGCLDGLNIHSNEFAFEDSVSTGEIDRKMQSPLDKVEKFKSIRSDVDSTVPFLSVYIGDSVGDLLYTVSSWSEIHAFVLGSDFS

SEQ ID NO: 47251 - protein, 829 aa, Zea Mays
MWAGSGQDRVNSNANNSSSPMGYNMVYPSALSSPSAECYDPTKDLKPLGGTSPSRSLKDAHALHEVQNQVNYSFTILSSTGSYAPPGSHDGRVSRDRVDEWNSSQDNGGIWRPTMNSSQKTNAQQHPDGCTGKDLMQTESKCSSHLVSVLTSQHSERDPATSLSTTSWPVFRTRCQQEGSSWTSATNAGAHDLQLSIALAKPETCSPTNPVEDRDSSSASALSCQSGAPVCVPQPDPTSTSNSRKIDATMDQHRTCQPDTSSVSFDLLHEPKSGSLFSLKTQDLEFEYPSPIPKQEGKGISVNQSGSTSVAHENLATKTCVRAPTSKIDSLQPLKERSHSTDRDSITQLEHLFEENVIKRNNKVVNPVSDAEGIAVSDVLESLTEQDCEKCSIHGVAPSQKMVPASAEEDQPQCSSPIALSPWGEPSYYQGEAVDSALWGVQDDPGNDMWSMPSPKPGFQPSSGLGADGKDASCIIEEARADPGDGAFVKTLPTQGEKKMEHGNSSASGSGVSERVKPKGSAASGPSLDGSTKVMGWQLPGSSLEGSAKVSGWKPPVLSLEGIANGSGSQASCPSTQRGTKSSGWQRSSSSPDGSRKASGWQQSSTSPEGSGKAHGWQRSGSFTQGGTKAAGRQPSRSCTDRIAKVDGWQRTSSSPEGSRKASGWHSSGRDSSKIASSASENRKLSSSHQATTPTGRHSLAKRQGSSDKGAAGWDEALGNSSEASKRQQGNSDKNAGSGVALGSNRSWHPSSGNPSRGGQGNHQHDRDSHSGDSRRGSSNYPRRSDNRHDHGSGGSSRPSSRGQSQRGLCKHYESGHCGKGSKCQYLHR

SEQ ID NO: 47252 - protein, 1047 aa, Zea Mays
MQTITSEYEVWSNCPVKSDVYEKAKIFQSLRFKDLLNTPEEKERMINEVPEVHVDSRMDPSYESAEEPEYKKAVDWTMHRNGPDLLFPGRKGTELNSVENHTQKSLDTSSLPTEDVDHRSGAGSNINLNNMAPEPASLGILSNDTEPEKVWHYKDPNGNVQGPFTLLQLSKWASFFPRDLRVWLTFESEENSLLLTEVLPKQQKDFIQLSTVTTSDKSMWAGSGQDRVNSNANNSSSPMGYNMVYPSALSSPSAECYDPTKDLKPLGGTSPSRSLKDAHALHEVQNQVNYSFTILSSTGSYAPPGSHDGRVSRDRVDEWNSSQDNGGIWRPTMNSSQKTNAQQHPDGCTGKDLMQTESKCSSHLVSVLTSQHSERDPATSLSTTSWPVFRTRCQQEGSSWTSATNAGAHDLQLSIALAKPETCSPTNPVEDRDSSSASALSCQSGAPVCVPQPDPTSTSNSRKIDATMDQHRTCQPDTSSVSFDLLHEPKSGSLFSLKTQDLEFEYPSPIPKQEGKGISVNQSGSTSVAHENLATKTCVRAPTSKIDSLQPLKERSHSTDRDSITQLEHLFEENVIKRNNKVVNPVSDAEGIAVSDVLESLTEQDCEKCSIHGVAPSQKMVPASAEEDQPQCSSPIALSPWGEPSYYQGEAVDSALWGVQDDPGNDMWSMPSPKPGFQPSSGLGADGKDASCIIEEARADPGDGAFVKTLPTQGEKKMEHGNSSASGSGVSERVKPKGSAASGPSLDGSTKVMGWQLPGSSLEGSAKVSGWKPPVLSLEGIANGSGSQASCPSTQRGTKSSGWQRSSSSPDGSRKASGWQQSSTSPEGSGKAHGWQRSGSFTQGGTKAAGRQPSRSCTDRIAKVDGWQRTSSSPEGSRKASGWHSSGRDSSKIASSASENRKLSSSHQATTPTGRHSLAKRQGSSDKGAAGWDEALGNSSEASKRQQGNSDKNAGSGVALGSNRSWHPSSGNPSRGGQGNHQHDRDSHSGDSRRGSSNYPRRSDNRHDHGSGGSSRPSSRGQSQRGLCKHYESGHCGKGSKCQYLHR

SEQ ID NO: 47253 - protein, 625 aa, Zea Mays
MRRRPGITGLQNVAATLNQLGLVGENMAKVGTDVMKKQRLGMVRSQLEKFACKHKKTSFSTVGFDLPDWFRNPKDGYPCSRLDGNGDDDFVLPAKSDFSEQQGCSATGGGSSPLSILASCPASHEDAEFEADMDEVSRILRSRFASPEAIVITMDCCPVRVSARLVSKVLSRFSNDWVAAFGFFMWAGTQEGYCHCADSYDMMVDILGKFKQFDLMCGLIGQMHEIGGLVSLATMTKVMRRLCGANRWSDAIDAFHKMDRFGVAKDTKAMNVLLDTLCKERSVKRARGAFQALKGTIPPDESSFNTLVHGWCKARMLKEARETMKEMERHGFSPSVTTYTCLIEAYCMEKDFQTVDGILDEMHTKGCTPNIITYTIVMHALGKAGRTQEALDTFDKVKQDGCALDASFYNCLIYILCRAGRLQDANFVVEEMHRTGISPNLTTFNTLISAACDHSLAENALKLLVQMEEQSCNPDIKTYTPLLKLCCRRKWVKTLLFLICHMFRKDITPDFSTYTLLVCWLCRNGRLTQSCLFLEEMVLKGFTPQQATFDLVLEKLKNMHMLSAVRKIQLLRMHTEGTRCRSGVPSYLREDGHDRHCYAVLSNTSEAESSIDGKEDIQGHHLLPT

SEQ ID NO: 47254 - protein, 310 aa, Zea Mays
MRRLKGSLRSFCMSMNQQAQLKFCLRTSFVRVYDRANSIFWTRALNIPLPHSYVFLGSCGDQQARADNDAHQEIDITAKDCSADENSKPSNTESIWVEGLVPGIDFCNHNVKALATWEVDSVGNATGIPASMYLLLADKSPAETGAEICINYGNKGNEELLYLYGFVVDNNPDDYLMVHYPLEALRQIQSADIKMKLLEMQKGELRCLLPRSLLDNGFFGIRSSEDKDSKKNTGPFSSFSWSGQRKVPSYLPKIVFPHEFMSTLRTIAMQEHELEQVASLLGETLFSRRETTLFGDAVISVSFATSELIC

SEQ ID NO: 47255 - protein, 197 aa, Zea Mays
MAAASYDRLAVAASAVVVAAVALAVAGLPAAGALGVNWGTMATHQLPPATVVRMLEDNGIRKVKLFDADAGPMDALAGTSVEVMVAIPNNMLDMMTDYGTARDWVRQNVSRYNFDGGVNIKKGRKDMARTIGLCRLGVILFSSAFVGCVCCGFLYISPEKWKLYIGDNKVVPKAVNVHFSKTDFHSAHIKHKLTSSS

SEQ ID NO: 47256 - protein, 304 aa, Zea Mays
MLRSQSRMDSTTAAATAAAAAAPAPVLLVTNDDGIDAPGLRFLVDRLVAAGRYRVLVCAPDTDKSGVSHCITWRPALRCKRVDIIGATAFGVSGTPADCASLGISGKLFDGLVPDLVLSGINIGNNCGYHVVAGRSSVNDLKVSAEVCMPLINAIVTEIKNGTYPQGSFLNVDVPTDAAHPKGYKITKQGTYMARISWEQTVYKKPAVESYQTANMDVDGEKDSELVTSENDLLFKRVIVGRSSNGVEGEETDHNSLVDGYITVTPLGALSRTEPDAIPYFKACVSRLVDNFSSPGSSFSRSRG

SEQ ID NO: 47257 - protein, 72 aa, Zea Mays
MPGGLYIALDYTSRIHVWQGAVATKFVLFLDSNLLADDACLDSMYATFVVAAAGCRHIWKLWIHSRLDFHPV

SEQ ID NO: 47258 - protein, 550 aa, Zea Mays
MGATTRREPLKQRVNRCLLKLSDRDTEAMAAAELEAIARALEPDELPTFVSAVSDARPTDKTPLRRHALRALALVAASHPRDVVAPLIPRILAAALRRVRDQDSSVRAALVDTARAAAAASASASTALRPLTDALLHEQDQCAQLAAALATAAAVEASAVTDDLASYLHKLQPRLLKLLRSNAFKAKPALITLIGASATVGGDAEVTASIPCLRDAVASDDWAARKAAAEALAALALEHTDLLTTYKSSCVTFFEARRFDKVKIVRESINRMIEAWKEIPGAEEDECSSAPPSASQSQRRYSLTGSASDGRYPAASLGSNSVPSATRRSRLPVSRSSPPDVSPSVTKTYSPSSIRNKKLSPPSYRKARQANNCNYKVEIAVAPDATPIKVVTEEKLLEGGNVRGRLEARRALFQGSQDRSAKLAGYKAGSRVVPYEGGGNLEEISEVEGRSERYAVQKDESLSEIRTQLLQIENQQSSLLDLLQEGCQAESLMQRRAAFRAQNSGEGTMVVGLPQGFLSQTQQTAQMGAELLTSGRGRGLGFRVGLSQTH

SEQ ID NO: 47259 - protein, 419 aa, Zea Mays
MRPLIRTARCWLLRARVRAMATLPMASPAAAIPSSATRPVASPSSRSHRPLTRFFSVAPAPVGAKGLRAAASAVEVGGVKIAREDVVKEDDPTNNVPDTIFAKIGLQLHRRENHPLGILKNTIYDYFDKNFTGQFDKFDDLCPLVSVKQNFDDVLVPSDHVSRSYNDTYYVDDQTVLRCHTSAHQAELLRDGRTHFLVTGDVYRSGLDGTAYAAAELKKTLEGLARHLFGAVEMRWVDTYFPFTNPSFELEIYFQDDWLEVLGCGVTEQEILKRNGRRDHVAWAFGLGLERLAMVLFDIPDIRLFWSNDKRFTSQFSEGKLGVKFKPFSKFPPCYKDMSFWINGAFTENNLCEVVRGIAGDLVEEVKLIDNFTNKKGMTSHCYRIAYRSMERSLTDEEINNLQLNVREAVKDKLKVELR

SEQ ID NO: 47260 - protein, 183 aa, Zea Mays
MLQLLSYAAYSYIRQSVKTFSSFFCLLFFSVMGSWHTSNCNVVNEYVGAMRQLACEILDLLGEGLGLKDPRSFSRLIADTDSDSLLRINHYPPPCAIHKLDHDSQCRMKNSFRIVAGNGANQSAGARIGFGEHSDPQILSLLRSNDVDGLQVLLNSDGREVWVQVPADPSAFFVNVGDLLQVK

SEQ ID NO: 47261 - protein, 739 aa, Zea Mays
MSGGTGSSGRAAPRYAPDDPTLPKPWRGLVDGTTGYLYYWNPETNVTQYERPVPPESQLLPPPPPLPPPPPRSRDRRDRSRSRSRTPPRRDHRDRDRDRDRRHDEHASSKTASSHHHPAPVAVADDPSTEAYRRRHEITVTGDNVPTPITSFEAGGFPSEILKEIQRAGFASPTPIQAQSWPIAMQNQDVVAIAKTGSGKTLGYLLPGFMHIKRLQNSTRNGPTVLVLAPTRELATQILDEAVKFGRSSRISCTCLYGGAPKGPQLRDLDRGVDVVVATPGRLNDILEMRKVTIGSVDSLVANSSITQHVEIITPSEKQRRLEQILRSQDSGSKILIFCTTKRMCDQLARTLTRQFGASAIHGDKSQSEREKVLNQFRSGRSPILVATDVAARGLDIKDIRVVINYDFPTGVEDYVHRIGRTGRAGATGVAYTFFCDQDSKYAADLIKILEGANQRVPRDLEDMASRGGGRGRKRNHWASRPDRGGSRSELDSRYSSRDGLASSGKSESGRGSRGRDDNGSRGRYDPGETDGRSRRSTRGRSRSRSKSDSRSRSPSPKKSRRHEGRRSRTKSRSRSRSRRNHGASHSKSRSPVASRRYEKTASGSARPNSGHAEHKSPPRSHSRDDHVNHSDHKDDHKDDHMEDGKMERVDLDRSPSPHDDKSAPYSPVYNGKASGSMSPNGQPEAGAKFVEPSGKPEPASPVRCSKGRDDDEEGIIDEDGEIGEDDPRANAAVQNGNN

SEQ ID NO: 47262 - protein, 791 aa, Zea Mays
MERKRNPIVFLDVSVGDEPDERMIFELFADVAPLVTENFRALCTGELGIGHKTKKPLCYKGSSFHRVIEGFMAQGGDIAKGNGSGGENIYSGKSADETCVLPHDDRGLLTTADTGSKASGSQFCITFKPNSHLDRKHTVFGKLVVGSDVLKRIEQVDVQSPDSTPVVPVTIVNCGELTDRKDIGSMRIGIDKKRAAKSKLSKGISSDEESNEGQHKGRRNKSSKRRRKKRYFYSDSSSDDRRRRRKRHSKKNKRKRSRRKHDQRRERRRRKRDRKSKQKSKSRIKGDSEAESSSDSSSEDARSKRHRHGRKSKASSQVFEENIAAVSALKDATSPQQKSGIPNSPAQDVSPLQNGENYTNGVNESKIERNAAVMPVLTGNQSKSRSQSMSVNHSMSKSMSISPRRSPMKRSITTTKRSVSRSPVHHNRSGSPVGAPQKSVSRSSARRQSISRSPARSLSKSPPRDASRSPHISRTPVKAHRRSISRSSARSMEQRSLSRSLERIHVRKSVSPRPPLAKPKSITRTPVTSPLRSVSRSPARISRSPLRPSRRSPMRSPRRNIHRSLSRSPARILRSVSRSPVRGGRPRRNISRSPSPLRRALTPPNNGRSRSRSDSPDGSPKRIRRGRGFTQRYSFARQYRSPSADRLHRYGGRNDRDRYMGYRGFRHRSPPRRYRSPSRGRVSSPRYRRRSRSASRSPVHRGRRGGYNKSPVRSRSPPARKRSPSDRARSVSRSHLSRSVSKSPPVHHPSPLDSPSLERASDGKSRSPSPSGGGKKGLVSYGDGTPDSAGK

SEQ ID NO: 47263 - protein, 171 aa, Zea Mays
MFCLLPSRVRVRSSAPPRLRRRNPRPHPTIPVRLLRRDARPRMIEGTPASRFPPPQSLPLADFDGRRTARSHLPVPRDAHPSPLLGPGKDHFHRRKPPIPQNGAAILLVPNHRLQMDSPPPLRTTDGSAHLVNTAGRRRISTQQLTMPGSPTNPPLSFSSPPASVGEEDGG

SEQ ID NO: 47264 - protein, 100 aa, Zea Mays
MSSSAHRLQANSLVKEQQRKRKVSGAVVPLCDRECQFSPFFRSCWSVVSCLRRFLLLFPFQVLWVSLGIQSLILVQACNQTIQSIQSRSNGFIWKWLKLK

SEQ ID NO: 47265 - protein, 530 aa, Zea Mays
MQKPFLSTQSQFQLMSPQQQQQYLAQAQAQGNLGNSTNYGDIDPRRLTALTRGSLNGKDSQPAGTDGCISSPMQSSSPKVRPDQEYLMKMQQTSSQQPQEQLQQQQQNQQQQQSQQQMQQNNRKRKQPTSSGPANSTGTGNTVGPANSPPSTPSTHTPGDGLGMGGNMRHVPKNLMIYGADGTGLASSSNQMDDLEQFGDVGSLDDNVESFLSNDDGDPRDIFAALKRSPAEPSPAVSKGFTFSEVNCWRTSNSKIVCCHFSSDGKILASAGHEKKAVLWNMENFQTQYTPEEHALIITDVRFRPNSSQLATSSFDRTIKLWNAADPGFSLHTFTGHNGQVTSLDFHPKKTDLLCSCDGSGEIRYWNVTQFACLRAIKGGSAQVRFQPHVGQFLAAAAENVVSIFDIETHGKKYTLQGHNTDVQSVCWDNNGEYIASVSQDLVKVWSMSTGDCIYELSSNGNKFHSCVFHPSYSNLLVIGGYQSLEVWNMVKNQSLTVQAHEGLIAALAQSPVTGMIASASHDNSVKVWK

SEQ ID NO: 47266 - protein, 151 aa, Zea Mays
MAPAVIAKGEDVMWTSGLIFGKGEGIVGLETNLGTLHIQVAFGPPYALLQGTLEVDGVPFKKIPREACPAVKRGSVAWVGSGPEFLISLADHEEWRDAYTVFGNVLPMDMAIAEEMTLLPTSTDVWSNVKVKVLKDPVYFKVKRSSNASAV

SEQ ID NO: 47267 - protein, 219 aa, Zea Mays
MEGLELWGPAVKWGSDHRLPSAAACCAACKAMCPHPKDGACRCDSWVFCGDERKCKDRLGELLPGCAPRSVDHFIELLGLRNCAGCRFYRAEGRGNVWDAKGDHEKNVAFGPPYALLQGTLEVDGVPFKKIPREACPAVKRGSVAWVGSGPEFLISLADHEEWRDAYTVFGNVLPMDMAIAEEMTLLPTSTDVWSNVKVKVLKDPVYFKVKRSSNASAV

SEQ ID NO: 47268 - protein, 951 aa, Zea Mays
MLEVVLDMTPPPPPPQARLHQGSSAKGGHAERRKQPLQSSVTQPKAEPAAAAAVLPVPEGGKRCRGGGRRRGRAKAPGEPRAALLAPAQAQTQAPPPRTVIGPPVPSKGLSFCRRPGFGTVGARCVVKANHFLAELPDKDLTQYDVKITPEVSSRTVNRAIMAELVRLYRASDLGMRLPAYDGRKNLYTAGTLPFDAREFVVRLADEDDGSGVPPREREYRVAIKFAARADLHHLRQFIAGRQADAPQEALQVLDIVLRELANQRYVSIGRSFYSPDIRKPQRLGDGLQSWRGFYQSIRPTQMGLSLNIDMSSTAFIEPLPVIEFVAQILGKDVISRPLSDANRIKIKKALRGVKVEVTHRGNVRRKYRISGLTTQPTHELIFPIDEQMNMKSVVEYFKEMYGFTIQHPHLPCLQVGNQKKANYLPMEACKIIEGQRYTKRLNEKQITSLLKTVHQNDYEQDPYAKEFGINISEKLTSVEARVLPAPWLKYHDTGKEKECLPQVGQWNMVNKKVINGCKVSHWACINFSRSVPETTARGFCQELAQMCQISGMEFNSEPVMPIYSARPDQVVKALKNVYNIALNKLKGKDLELLLAILPDNNGQLYGDIKRICETDLGLISQCCLTKHVFKISKQYLANVSLKINVKMGGRNTVLLDAISWRIPLVSDIPTIIFGADVTHPETGEDSSPSIAAVVASQDWPEVTKYAGLVCAQAHRQELIQDLYKTWHDPQRGTVTGGMIRELLISFRKATGQKPLRIIFYRDGVSEGQFYQVLLYELDAIRKACASLEPNYQPPVTFVVVQKRHHTRLFANNHKDRSSMDKSGNILPGTVVDSKICHPTEFDFYLCSHAGIQGTSRPAHYHVLWDENNFTADEMQTLTNNLCYTYARCTRSVSVVPPAYYAHLAAFRARFYMEPEMLDNQTSKTSNGTSGVSVKPLPAVKEKVKRMMFYC

SEQ ID NO: 47269 - protein, 955 aa, Zea Mays
MLEVVLDMTPPPPPPQARLHQGSSAKGGHAERRKQPLQSSVTQPKAEPAAAAAVLPVPEGGKRCRGGGRRRGRAKAPGEPRAALLAPAQAQTQAPPPRTVIGPPVPSKGLSFCRRPGFGTVGARCVVKANHFLAELPDKDLTQYDVKITPEVSSRTVNRAIMAELVRLYRASDLGMRLPAYDGRKNLYTAGTLPFDAREFVVRLADEDDGSGVPPREREYRVAIKFAARADLHHLRQFIAGRQADAPQEALQVLDIVLRELANQRYVSIGRSFYSPDIRKPQRLGDGLQSWRGFYQSIRPTQMGLSLNIDMSSTAFIEPLPVIEFVAQILGKDVISRPLSDANRIKIKKALRGVKVEVTHRGNVRRKYRISGLTTQPTHELIFPIDEQMNMKSVVEYFKEMYGFTIQHPHLPCLQVGNQKKANYLPMEACKIIEGQRYTKRLNEKQITSLLKVTCQRPREQEMDILQTVHQNDYEQDPYAKEFGINISEKLTSVEARVLPAPWLKYHDTGKEKECLPQVGQWNMVNKKVINGCKVSHWACINFSRSVPETTARGFCQELAQMCQISGMEFNSEPVMPIYSARPDQVVKALKNVYNIALNKLKGKDLELLLAILPDNNGQLYGDIKRICETDLGLISQCCLTKHVFKISKQYLANVSLKINVKMGGRNTVLLDAISWRIPLVSDIPTIIFGADVTHPETGEDSSPSIAAVVASQDWPEVTKYAGLVCAQAHRQELIQDLYKTWHDPQRGTVTGGMIRELLISFRKATGQKPLRIIFYRDGVSEGQFYQVLLYELDAIRKACASLEPNYQPPVTFVVVQKRHHTRLFANNHKDRSSMDKSGNILPGTVVDSKICHPTEFDFYLCSHAGIQGTSRPAHYHVLWDENNFTADEMQTLTNNLCYTLMYTDAVMPGAHARFLLSLLHTTHTWQHSGLGSTWNQRCWTTRRPRPPMARAESR

SEQ ID NO: 47270 - protein, 614 aa, Zea Mays
MSSFFAVAVALVLSSLIHGTTMATASSEESFFQKCPASRCSEGGPEIRFPFRLATSPLSCGAPGMELVCSKADTVLVHPNLGLCKVTAIWYGGSTITIVPLAVAAEPKCPFQKIISTNLSTDVYRPYGDRATLVSCSAEFIVPSHPASLAGPISCLTNASRRFAYLVPSFRPMDFLPLDCTVLSNSISVPYPASVNAGFNGTARGAIAFGETMLEWRVPNITDVCRDCEAEGRLCGFSSESRQAFCKSSRLKVIAVTTPVAAVLVLSAMAGAALLHLALKSKYDDEIHRKVEMFLETYRTLKPRRYTFSEVRKMTRRFSSRLGQGGFGSVYKGELPNGGVPVPVAVKMLEDSTGEEEFISEVATIGTIHHANVVRLLGFCSERSRRALVYEFMPNASLEKYIRCSSQEQSLIPTASKMLEIATGIARGIEYLHQGCDQRILHFDIKPSNILLDYNLNPKISDFGLAKLCARDQSVVALTAARGTMGYIAPELYSRNFGTVSCKSDVYSFGMVVLEMVVVSAKRRKYSPAETEDQNDDVCVPEWIYEEIVTGQEPREMARGERDMVRKLAIVALWCIQWNPPNRPSMTTVVNMLTDSLQSLKIPPKPFVSSFVGQ

SEQ ID NO: 47271 - protein, 465 aa, Zea Mays
MAGLQRSSETFRRSGSSGLVWDDNKSFSGEIKPAEEDGGAGAARAVERSRSTGHAHAGYRATGRVPPALDPPSPRVAVSARATMAKAVPSPLAAVAVLALLLLCRGAEARVLLTLDDFGGVGDGIANDTQALLDAWAAACSSTQEAVLAVPAGKVYQIWPVQLSGPCKKRLKLLISGAIVAPSSPDEWAGRDPMKWLYVYGVDGLSVSGGGTIDGMGQQWWASTCKRKKTQPCYSGPRPKAVHFEECREASFLRVVAPADSPNTDGIHLNDTSHVRITDNLISTGDDCVSMVGNCSDVRVKDISCGPGHGISIGSLGKNRTTDMVEDVKVDTCLLTNTTNGVRIKSWQGGTGFARDLRFENIVMRNVSNPIIIDQYYCDQPTPCANQTQAVEVRRVEFAGIRGTSATPQAISIACSDAVPCRDLELANVNLTLEGGGAGRATALCYRASGKSAGTVVPPSCLARS

SEQ ID NO: 47272 - protein, 624 aa, Zea Mays
MLNLAYPSYPYDDSYDRDVCGDSRTLFGEISPSLLLLRQLEHIDLSWNCLLGPNGRMPSFLGSMKNLRYLNLSGVPFKVTGAPSGPSSIGYFRSLRILDLSYNNLRGSVPTEIGTLTNLTYLDLSNNNLGGVITEEHFVGLMNLKEIDLSFNNLSVVVDADWIQPFRLESAGFASCHLGPLFPVWLRQQLLHITKLDISSTGLVGNIPDWFWSFSKAASLDMSYNQLNGIMPHKIEAPLLQTLVVSSNQIGGTIPESICELKNLLFLDLSNNLLEGEIPQCSDIERLEFCLLGNNNLSGTFPAFLRNCTSMVVLDLAWNNLSGRLPSWIRELYSLQFLRLSHNSFSGNIPSGITSLSCLQYLDLSGNYFSGVIPPHLSNLTGMTMKGYCPFEIFGEMGFKFDDIWLVMTKGQQLKYSLGLVYFVSIDLSGNGLTGEIPLGITSFDALMNLNLSSNQLGGKIPNKIGAMMSLESLDLSINKLSGEIPWSLSNLTSLSYMNLSYNNLSGRIPSGRQLDTLNADNPSLMYIGNSGLCGPPLQNNCSGNGSFTPGYYHRSNRQKIEFASFYFSLVLGFVVGLWMVFCALLFMNTWRVAYFGLLDELYNKIYVFVAVKWASMTMSAAAE

SEQ ID NO: 47273 - protein, 224 aa, Zea Mays
MPPPQPPSTTQGLQRESRARRRPCIVATHSVPPFHHRSIAVSSHSFLRWHSFPSSIPPAPAPASLIRSFLLAVPPPPYSTTSSSAPNVDASSAMPSDRPSSPNISLPHMPAAAASHPARTPPPCTRAWMPLHAYYGRGTPTIEAPIHDPIPNPASNLPQSAVNLPPNIFPLYIVVSAIKDLTEARPPNHYHSPPIHWSRETLEALRRSSLICSLLQRGHLITPI

SEQ ID NO: 47274 - protein, 222 aa, Zea Mays
MPPPQPPSTTQGLQRESRARRRPCIVATHSVPPFHHRSIAVSSHSFLRWHSFPSSIPPAPAPASLIRSFLLAVPPPPYSTTSSSAPNVDASSAMPSDRPSSPNISLPHMPAAAASHPARTPPPCTRAWMPLHAYYGRGTPTIEAPIHDPIPNPASNLPQSAVNLPPNIFPLYIVVSAIKDLTEARPPNHYHSPPIHWSRETLEALRRSSLICSLLQRGPQMI

SEQ ID NO: 47275 - protein, 622 aa, Zea Mays
MSVQERRQRFLKGMGFDDFVSSRTDSFQCHGEITAVESSTGMEVRTASCHSSVDSSVCDNESEFDGACCIRDMDSRKRDIVKGGHSSITDMLKEVGSDKVMSLLEFQSLPGLSRAVQNLVRRGCGKSPAKETKSAKKMDAKSLWKKFMIKRSFGSVCKYDVHVKNCTNSIPTRTRVQHRKKNFLEFSAVYMDQEIRAHKGSIRVMKFSPSGWYLASGGEDCVVRIWQIIQVEASPKLYRGEDPYEKVEKVQVFKTSIEKGQNQALAVIPNKVFRISETPLHEFRGHTSDILDLAWSKSDYLLTSSKDKTVRLWKPGCDGCLAVFKHKDYVTCVQFNPIDEKYFISGSVDGKVRIWDVLDKRVTDWADTRNIITDLSYQPDGKGFIVGTIAGTCRFYDQSGESIQLEKELFVQGKKKSAACRINSLKLCAIGSNRVIITSGDSKIRVANGDTIQKFEGPWKSKALSLPSLTSDERYLISAGKDSNVYIWDLANSRDDAKPVHSCELFFSKDVTTAVPWPGVRQQDGHASAKPACVAEKSASAPILRQSAPGPWPFVDGGGSSSKGSATWPEEKLLSAAKPVESSPRLDDCLSMLSAAWSTVIVTAGRDGVIRSFPNYGLPVRL

SEQ ID NO: 47276 - protein, 383 aa, Zea Mays
MPSSEPDSDDVFFDAFEDVRSAGEPSCSEDCSTSDEVSVVKFEYEIWANEPMSVQERRQRFLKGMGFDDFVSSRTDSFQCHGEITAVESSTGMEVRTASCHSSVDSSVCDNESEFDGACCIRDMDSRKRDIVKGGHSSITDMLKEVGSDKVMSLLEFQSLPGLSRAVQNLVRRGCGKSPAKETKSAKKMDAKSLWKKFMIKRSFGSVCKYDVHVKNCTNSIPTRTRVQHRKKNFLEFSAVYMDQEIRAHKGSIRVMKFSPSGWYLASGGEDCVVRIWQIIQVEASPKLYRGEDPYEKVEKVQVFKTSIEKGQNQALAVIPNKVFRISETPLHEFRGHTSDILDLAWSKSDYLLTSSKDKTVRLWKPGCDGCLAVFKHKDYAVQ

SEQ ID NO: 47277 - protein, 284 aa, Zea Mays
MSSGADGSDPCTGLDPGTIPELPAHEPPVLQAPSPAPQQEVVVASQTEAPLPAVTIVISRPGEDVQMPDAKGGSPACSPQAGDGKPMATSVSLTASAAAKEAGLARSDSDSLDDYEQCRVCQQKTEEPLVDLGCRCRGDLAKAHRTCIDFWFRTRGSNKCEICQQVAVNIAPPETQSSTSYWVWRVDSTYGRGRGGRERGWFSPLWVAFAILIGGLLLDVLISVSLGVSALPVNIIIGVLIVLGLGTALHLALECCHEWGSRRNVANIPRLENIAPTGYHPAVV

SEQ ID NO: 47278 - protein, 503 aa, Zea Mays
MLQDSSIVASVVQKLLLNFVTRPKIPLNASHPVFSDDGRPGVLQRVGSAAANFVLLPYYYLVSSTPEGATSQLADNSLLVLLIMIHYRKCISTNESIPTNNVYTMDSNTNDKDAPVFHDNPYCKALNSAKDIQYDRADVEGNAQDRPVVRLSFASLFDAFGRCLNDESSVLLLYSLVYGNCDFQEYVLVRTDLDTLLMPILEMLYNASRKTSNQIYMLLIILLILSQDSTFNASVHQLVLPAVPWYHERLMHQTSLGSLMVVILIRTIKYNLSKLKDVYLHTNCLAILANMAPHVHRLSAYASQRLVSLFDMLSRKYAKLAELKNDKSLKVIYDQMEADIADDMSIELHIYTDFLRIVLEIIIAILTYALPRNPEVVYAVLHRQEVFEPFKNHPRFSELLENIYTVLDFFNSRMDMQQLDGEWSVDKVLEVINKTCRSWRGEGMKMFTQLRFTYEQESHPEEFFIPYAWRLVLSRGFSFNPDAINLFPVEIHLEEAPAGGQKV

SEQ ID NO: 47279 - protein, 167 aa, Zea Mays
MNAENKEGCSLQVLEGDIQEPIFLRGKSFSSINFWMNKGHLRSSTHYDPHHNLLCVVSGRKKVTLWPPSASPFLYPLPVYGEASNHSSVSVEEPDYSIYTRARYMKEYSETVILNCSDVVFIPEGWYHQVDSDDLTIAVNFWWKSRIMTQMLEHMDAYYLRRIMSRA

SEQ ID NO: 47280 - protein, 216 aa, Zea Mays
MVHPHPQSPSPPPLTVVFVHHSASTAGRASQPPRAALPPRASSTAPMAATGERCPSSRPPFPCRPASPLGLHCPLLRRLQWKARRRTSGGDDDYLIASTDGVGTKLKLAFETGIHDTIDIDLVAMSVNDIVTLGAKPLFFLDYYATSKLDVDLAEKVIKGIRDGCEQSDCALLGGETAEMPGFYAEGEYDLSGFAVGVVKKDKIIDGKTLLREMCL

SEQ ID NO: 47281 - protein, 234 aa, Zea Mays
MGILCLGASSTLLCGEDRNNVLGLGCGNELVEVGSGHDGLDSVVGAVFPVDTDEAVRALLEKETDHKPQDGYAERLERGGLEYSWRRDAMDWICKVHSYYRFGPLSLYLAVNYLDRFLSSYDLPHDKPWMRQLLSVACLALAVKMEETVLPLPVDLQVCDVKFEFEARTIGRMELLVLATLKWRMQAVTPFTFISYFLDKFNGGKPPSLALASRCTDIIIGTLKDHLRLPRPQL

SEQ ID NO: 47282 - protein, 515 aa, Zea Mays
MALRSPDLRWLGSLTRPGRLAPSPLAALASPRRRRRAPSPSPSPSDSSTPSTAPTSDSGPGAEGMEGLEWKKISAKRFGIKESMIPPEAWNVLHRLRSRGYDVYLVGGCVRDLIMKKTPKDFDIITTADLRQVKDTFLGSAVIVGRRFPICHVHENNSIVEVSSFNTCARGSSGSQIYNSKSQNCSKNDFVRWKNCQRRDFTINGLMFNPYSEKIYDYLGGIEDIKKAKVRTVIPAGTSFQEDCARILRAIRIAARLGFSFPKETAYYVRTLACSVARLDKARILMEMNYMLAYGSAEASLRLLWRFGLLEHLLPFQVLFSKLDNFLAPNRPCHNSLWISLLAFHEALARKPCDPLIVATFALAFYLGGDMSLAVDIGKSINRQHDTGFRELLEPKVWTDKHLAGEVQSFAALMKQALTEMTDEYHVANAMAKIPQAPSSDLVFIPLQAYLKVLKFIECVQYGKKERGHEPKRDGMINYHNLSNGTHAEIRNLFTLVVFDTLYPTDTEDENDCSS

SEQ ID NO: 47283 - protein, 430 aa, Zea Mays
MSIAAVSADGLLALADEAERRYDFSAAAACLESALRPPYAAALLPLTEARARLRLASLLLAPRGSSRVPRAGAPAAAKTHLERALLILSPLPSAPPRLKLLAHSHLAGAYAVLGAIASQKHVLHRGLGLLDSASASGLLQREPALLWTCNFQAQLGSVFTNDGDAASALSALSVGASAAAELGSPQLELFFAASELHVHLLCWEDSAAVENAVTRASLLWDALTAEQMEHWVGLFFYTQLLQTFYLLRICDYKAASQHVERLDTAVKSEMQRGRQITALANDLSTLERTLGQSGLKEREMLALSHKQRQLKGQLRALCGYDSLNDVLDYGDKLLLAPPLMHGEWLPRTAVFVLVDLMVVMVGRPKGIFKECGKRINSGLRLIHDELVKLGIVDGVMEADLEHSTIWTAGLYLILLLQFLENKVAVELTRL

SEQ ID NO: 47284 - protein, 852 aa, Zea Mays
MMRVAVVGGGLSGLVAAHELARSGGARVTVYEKEDHLGGAKTVAVNGGSGPVLVDLDFMVFNRVTFSNMMEWFERLGVEMEKSDMSFSASLRLNEGKGFEWGTRNGISSVLVQKSNLLSPRFWLMINEIFKFKNHALKYQEDYARNPDKNETFGQFIQSHRYSQLFQDAYLIPMCACIWSCPPQNIFGFPAGFVLSFFCDNHLLELFSPLQWLNVKGGSGCYVKKVREELESMGCQIKTGCEVRSVSRFNGGYRILEADGSEEMYDRIIFCVHAPDALKILGEEATPHERRVLGAFQYIYSDLYFHCDESFMPRNSSAWSAMNFLGTTSSGVCVTYWLNILQNIESAGPFLATLNPPRVPDHVLLKWHTRHPIPSMAAARATLELNSIQGKRGIWFCVPYQQGYGNHEDSVKAGKAVTLGLLGKKCDLLVNPKPMIVPSWTEAGVRYMVAKNLGKFITIGNFSMLEDGGTSLSFGKTCERCQLKCVIRVHNPQFYWKIATEGDPGFAYSYINGYISFVDKKEGIQNIVEIIIANRGERKRLSSTRARNKSGYVKKGWWTPLFKKNGAAMAKYVLHEVLRRNTISKARKNISAHYDLAEDESLEAAQLRKLDNLINKAKVDPGHHVLDIGCGWGSLAIRLVKRTGCKCTGITLSEEQLKYGKRKVKEFGLEDHITLLLCDYRQIPNGQKFDRIISCGMLEHVGHEFYEDFFASCEYHLAEHGLLVLQSIAVPEELYDKMRTKPDFLKEYIFPGGCIPSLARIASAMSNASRLCIQHVENIGYHYYPTLIHWRENFEANEEKVLALGFDEKFIRTWEYYLNYCAAMFKSHMGLDYQIVFARAGDAKLPSYVAIA

SEQ ID NO: 47285 - protein, 875 aa, Zea Mays
MMRVAVVGGGLSGLVAAHELARSGGARVTVYEKEDHLGGAKTVAVNGGSGPVLVDLDFMVFNRVTFSNMMEWFERLGVEMEKSDMSFSASLRLNEGKGFEWGTRNGISSVLVQKSNLLSPRFWLMINEIFKFKNHALKYQEDYARNPDKNETFGQFIQSHRYSQLFQDAYLIPMCACIWSCPPQNIFGFPAGFVLSFFCDNHLLELFSPLQWLNVKGGSGCYVKKVREELESMGCQIKTGCEVRSVSRFNGETGYRILEADGSEEMYDRIIFCVHAPDALKILGEEATPHERRVLGAFQYIYSDLYFHCDESFMPRNSSAWSAMNFLGTTSSGVCVTYWLNILQNIESAGPFLATLNPPRVPDHVLLKWHTRHPIPSMAAARATLELNSIQGKRGIWFCVPYQQGYGNHEDSVKAGKAVTLGLLGKKCDLLVNPKPMIVPSWTEAGVRYMVAKNLGKFITIGNFSMLEDGGTSLSFGKTCERCQLKCVIRVHNPQFYWKIATEGDPGFAYSYINGYISFVDKKEGIQNIVEIIIANRGERKRLSSTRARNKSGYVKKGWWTPLFKKNGAAMAKYVLHEVLRRNTISKARKNISAHYDLSNDFFALFLDPTMTYSCGIFKAEDESLEAAQLRKLDNLINKAKVDPGHHVLDIGCGWGSLAIRLVKRTGCKCTGITLSEEQLKYGKRKVKEFGLEDHITLLLCDYRQIPNGQKFDRIISCGMLEHVGHEFYEDFFASCEYHLAEHGLLVLQSIAVPEELYDKMRTKPDFLKEYIFPGGCIPSLARIASAMSNASRLCIQHVENIGYHYYPTLIHWRENFEANEEKVLALGFDEKFIRTWEYYLNYCAAMFKSHMGLDYQIVFARAGDAKLPSYVAIA

SEQ ID NO: 47286 - protein, 390 aa, Zea Mays
MMGYGRAYFSATSAHTCTGDGNAMVARAGLPLQDLEFVQFHPTGIYGAGCLITEGSRGEGGILRNSEGERFMERYAPTAKDLASRDVVSRSMTMEIREGRGVGPLKDHIYLHLNHLPPEVLKERLPGISETAAIFAGVDVTKEPIPVLPTVHYNMGGIPTNYHGEVVDIKGNNPDAVIPGLMAAGEAACASVHGANRLGANSLLDIVVFGRACANRVADISKPGEKQKPLEKDAGEKTIAWLDKLRNANGSLPTSKIRLNMQRVMQNNAAVFRTQETLEEGCELISKTWESFHDVKLSDRSLIWNSDLIETLELENLLINACITMYSAEARKESRGAHAREDFTTRDDEKWMKHSLGYWENEKVRLAYRPVHMKTLDDEVESFPPKARVY

SEQ ID NO: 47287 - protein, 88 aa, Zea Mays
MSGISFPSLVPHLSPPPLLPLQPDHIHPVSSPSKTSTRTSTGLSSRSTSLAVAGPPGVHCLDRLVTREARHQAPLRRAPRPTFNEPLC

SEQ ID NO: 47288 - protein, 293 aa, Zea Mays
MEPSRGATGGARRWGEAETEVDAAEEGRRAEDGGEVSLREWLDRPGRAVEAAECVHVFRQVAEAVAVAHAQGVAVGSARPSCFVVSPPFARVAFIESASGSDASGSCSGSDASEDADPDASPPRRGDGAGRGEERAGKSFPLKSVLAMELNWYTSPEEADDSAATFASDVYRLGVLLFELFCTFETMEDKMRAMANLRHRVLPPQLLLKWPKEASFCQLLMHPVPETRPKMSEVLQSEFLNQSRNSLEEREAALRLREEIEEQELLLDFLQQLQKRKQDMADSLQDTVAFSLF

SEQ ID NO: 47289 - protein, 629 aa, Zea Mays
MALPSATVLWTASITFRLAQNMVVLFFLAALLAAPARSSSPSSNNGAGLQQPTLTLCSGHSTVAKSGEFASFLAAVCAGAYGGGVAHMSHSMSSYVAAENRTMYGVAQCRPDVSASDCTACLAAASSKLITGTACATSAVWHDACFLRYSDRDTGRFREDEHTETVFNASRALSSLPPHVGANKAVVVRRLLAAVADSTRSGHMCSDIGVGTGAAGGGRIYGLTRCAAEISCADCRRCLGGALAVVEREYNGSAGMQVLRLSCMARYESYPFYNTKFLTRRLLASATSGSPRPTHGGIVFNSSISFGPFGLVHSGGPNPPPSPPVSPPPPAFTTISVPASVGTAQPTPPPSRPAQAQPSPPPPAASMIVSGPATATPRAAQAQPTPAPPGGHNPPPASPPPASIMNISGPATATPTPRAAQPTPAPPGGPTPQPVAAATNENKGKGTLNTPKWQIVSIATGLVAAFIILALTVWCRRKQQLSQREHVIEPHVLNHQADGVPGETMHHLEKKHLGSEEDDDGGRTSCQLYSYLVLEAATCRFSSRNKLGSGGFGTVYKGTLENGKDVAVKRLRDSKRAIQELEREISIVASLRHKNIVRFLGYCFQEEGRFFIYEYVLNNSLDKFWYKGE

SEQ ID NO: 47290 - protein, 199 aa, Zea Mays
MATDALALMDHLGWKKAHVFGHSMGAMIACKLAAIAPHRLCSLALLNVTGGGFQCFPKVDGQMLSLAFRFLRAKTPEERALVDLETHYTKEYLEETVGSCTRRMVLYQEYVKGISSTGMQSNCGFEGQINACWTHNMTTKELDTIRSAGFLVSVIHGRYDIIAQLCHAKRLAESLLPVARMVELHGAHLVSHERPDEVK

SEQ ID NO: 47291 - protein, 698 aa, Zea Mays
MAKPEEKLRCTKEPFIEDVGTRRIKSIRFSVLSGSEIRKSAEVQVWNNRIYDRDMTPVPNGLLDPRMGIPTKRGKCNTCHGEFSDCPGHFGYLKLALPVFNVGFFNCILDVLKCICKSCSRVLLIEKDRREFLKKMRNPRADALQKSATMKKVRDKCKLSCCPRCDYRNGVVKKGRAGLIVVHDCSKVLDGHTEELKNALQNKKEKVSASSVLVLDPATVLSLFRRMIDEDCELLNLGDRPEKLIVTEIAVPPVPIRPSVVVGNSRTSNEDSITVILKSIVNTNSILKETLHTGGPFTKCFDCWQYLQLQVVEYVNSDAPSLPESQHRGLVQRLKGKTGRFRGNLSGKRTEYTGRTVISPDPNLKITEVAIPVLMARVLTYPERVSNYNIEKLRQCIRNGPFKYPGANFVTQPDGMKQSLKYGDRRITARDLKCGCIVERHLEDGDVVLFNRQPSLHRMSIMCHRARIMPWRTLRFNESVCNPYNADFDGDEMNLHVPQTEEARTEALMLMGVQNNLCTPKNGEILVASTQDFLTSSFLVTRKDTFYDRSSFTLLCSYLGDGMENIDLPTPALIKPVELWTGKQLFSVLVRPNAHTKVFLNLAVQEKIYSKKKGKKEGGEEVKETMCGRETMCPNDGYVYFRNSELLSGQVGKATLGNGNKDGLYSVLLRDYNSHAAASCMNRLAKFRIWYWSHPQLQ

SEQ ID NO: 47292 - protein, 1324 aa, Zea Mays
MAKPEEKLRCTKEPFIEDVGTRRIKSIRFSVLSGSEIRKSAEVQVWNNRIYDRDMTPVPNGLLDPRMGIPTKRGKCNTCHGEFSDCPGHFGYLKLALPVFNVGFFNCILDVLKCICKSCSRVLLIEKDRREFLKKMRNPRADALQKSATMKKVRDKCKLSCCPRCDYRNGVVKKGRAGLIVVHDCSKVLDGHTEELKNALQNKKEKVSASSVLVLDPATVLSLFRRMIDEDCELLNLGDRPEKLIVTEIAVPPVPIRPSVVVGNSRTSNEDSITVILKSIVNTNSILKETLHTGGPFTKCFDCWQYLQLQVVEYVNSDAPSLPESQHRGLVQRLKGKTGRFRGNLSGKRTEYTGRTVISPDPNLKITEVAIPVLMARVLTYPERVSNYNIEKLRQCIRNGPFKYPGANFVTQPDGMKQSLKYGDRRITARDLKCGCIVERHLEDGDVVLFNRQPSLHRMSIMCHRARIMPWRTLRFNESVCNPYNADFDGDEMNLHVPQTEEARTEALMLMGVQNNLCTPKNGEILVASTQDFLTSSFLVTRKDTFYDRSSFTLLCSYLGDGMENIDLPTPALIKPVELWTGKQLFSVLVRPNAHTKVFLNLAVQEKIYSKKKGKKEGGEEVKETMCGRETMCPNDGYVYFRNSELLSGQVGKATLGNGNKDGLYSVLLRDYNSHAAASCMNRLAKFSARFIGNHGFSIGVDDVQPGEHLNRQKKKEIDGGYKKCHDLISLFAKGALALHPGCNAAQTLEHNITGVLNEIRSIAGNVCMDTLHWRNSPLIMSQCGSKGSPINISQMVACVGQQSVGGRRAPDGFLNRTLPHFPINSKTPAAKGFVANSFYTGLTATEFFFHTMGGREGLVDTAVKTAETGYMSRRLMKGLEDLSVFYDQTVRNASGGIVQFLYGDDGMDPAKMEGKDGMPLNLDQLFMKVMATCPQRGSDTLSPVGIKQMLEDKFLQHDTSSDGGCSAEFKKNLTEFLDKRIELMKCTRRALHLHEDHVEKKDSCLEESIAAIISGISAKQLQVFLDTCLSRYQSKKIEAGASIGAIGAQSIGEPGTQMTLKTFHFAGVASMNVTLGVPRIKEIINAAKKISTPIITAQLLSRKDVLSARIVKGSMEKAVLGEVAATIQTVLKSSLPNLVVKLDMQLIETLHMGISADSVKLSILNHPKLKLKSEHVRVIDRAKLRIYPAGTDKLKLQLELHNLKSILPKVIVKGIPTVERVVIDEVKVNNATERYQLLVEGTNLLAVMGTPGVDARKTKSNHIMETNQTLGIEAARRSIIDEIQYTMKSHGMNIDRRHMMLLADLMTYKNIYSMPHTVVVRIR

SEQ ID NO: 47293 - protein, 436 aa, Zea Mays
MDCLNLRTSFRVLLSIQLLLSSFSPLIVANLSSEKQALLDFVSAVYHGNKLNWDKHTSVCSWHGVKCSEDQSQVFELRVPAAGLIGVISPNTLGKLYSLQVLSLRSNRLTGSLPADVASLPSLRSIYLQHNELSGGLPSSFSPNLSVIDFSYNSFTGEVPASLQNLTQLTVLNLQDNSFSGSIPDLKLHSLKLLNLSNNELKGSIPRSLQKFPKGSFSRNPGLCGLPLAECSHPSPARSPESSPSPQSPPLTHHDKKLGTGFIVAVAVGGFALLTLIVVVCFSKRKGKDEIDVESKGKGTATRSEKPKQEFSSGGQIAEKNKLVFLEGCTYSFDLEDLLRASAEVLGKGSYGTAYKAVLEDGTVVVVKRLKDVVAGKREFEQQMELIERLGKHANLLPLRAYYYSKDEKLIVYDYIDTGSVSAMLHGELRMSLTRY

SEQ ID NO: 47294 - protein, 336 aa, Zea Mays
MALDTCSYDDCWVLPPLDCWDWASELLFHTLEGAGAAAVFPETPGVQCSPSEASSGYLHDAIAPVSARRNKRQRMAAATTTPPSRRPATVCGDLQCLLAGLRDSSADAEGGADFRHDLNTTTAAETETRCSFVSGGGDGAGASSREEQQRGPSAQVLLPTPAAAAKGGDEEAKASAVVPPRRFPATVRAAAPLQLQKAAAGTAHAAARRDDRPRPVVDREHSFRAGAGAGAAATTAPASACHSLLSGEDEKRGVGVLYPFAVVKPLGLDDGRMTTLDDVNQRILKRPARPVRHPVGPFAFGPAVSAHGLSLSGKAVVSLTKIRTRGNGTITIIRTR

SEQ ID NO: 47295 - protein, 146 aa, Zea Mays
MKEEFELLESTFRKAGFQEEITTFLTIDWYINVLARIRINAFRIELVASSYEDLLSSAAASVSCDSSVGNAVYMLPSFYNHDCDPNAHIVWLQNADAKLKALRDIEEGEELCICYIDASMDADARQKILADGFGFECRCLRCLSGD

SEQ ID NO: 47296 - protein, 487 aa, Zea Mays
MPFGGTVKGEELPRNPVVLVPGLDGDDIPEHGRTPSLLTCSWRAITPEHPLMRARGRSILGGEKQSFQEYTESGAASRSDGLGGTSTSNARRIRRRSISITPEIGDDIVRAVRAMNETLKQNRLQRDHVEGSCSYVTEDQSNANDCPNKDDASRIIGATDSDSRNRTGPTQKAMSLPSSPHEYRGQDTQKGDDFISKEKMALAWNKVFQSSPFLNKPLLPFEEWNIDFSEITIGTRVGIGFFGEVFRGIWNGTDVAIKVFLEQDLTTENMEDFCNEIYILSRLRHPNVILFLGACITPPHLSMVTEYMEMGSLYYLIHMSGQKKKLSWRRRLKIIRDICRGLMCIHRMKIVHRDLKSANCLVNKHWTVKICDFGLSRVMIDSPMTDNSSAGTPEWMAPELIRNEPFTEKCDIFSLGVIMWELCTLSRPWEGISPVQVVYAVANEGSRLEIPEGPLGRLIADCWAEPENRPSCQEILTRLLDCEYTVS

SEQ ID NO: 47297 - protein, 183 aa, Zea Mays
MSYGGSSSLAPGAKRPFEYGRTHVVRPKGTHKATIVWLHGLGDNGTSWSQLLETLPLPNIKWICPTAPSRPVSLFGGFPCTAWFDVADLSEDAPDDTEGMDASAAHVANLLSTEPADIKLGVGGFSMGAATALYSATCFAHGKYGNGNPYPVNLSLGHYTVPEEMDEVCKWLTANLGLGTSSS

SEQ ID NO: 47298 - protein, 277 aa, Zea Mays
MGASLSLVPVLDYFARRECLRAGLHQNAVTLPYPDGGAGATCTVQYWAPQGEPELPPLLLVHGFGPRADWQWRCQVGPLSRHFHVIIPDLLGFGGSAYPSETAPPPTEATQAAVLAALLGALPGMERRRVAVAGTSYGGFVAYWLAREAGPARVGPVVIASSDLLKTAADDRAFLKRAGEGWGGVDEILLPAEPAALRKLLELASCRPPPRLVTPDFLLRDFIQGAACPSAEGDYGRDREVPSDANISGSADCMGRPRPAVPGGEGVCGSEGSERDR

SEQ ID NO: 47299 - protein, 204 aa, Zea Mays
MWLAPIRTGLGDKKREDFDIAMDDWSLFVQDTQTYYGVNMNALTKAYRAEHEKYYLKSSIWNNLHPNQVIGQPAAIKEIDCLTATVDEIREVRAQVTLPIRMEARLSALAGWFDVHFRGSAQNPGVEEVELTTAPDEHGGTHWGQQVFLLTPPLSVTKGDNVNVSFSMVRSKENHRLMDMEFTYELHELSGRKHPAVKTKMYLE

SEQ ID NO: 47300 - protein, 195 aa, Zea Mays
MRRRPAEGEHARAQGEGRALAHEARNQTAEFRFNWGYEMPPDVLAQWIADRAQIWTQYVSKRPSGVVAMILGIDDEKGTPQLFTCDPAGYFFGHKAASAGQRDTEAVNFLEKKMKNNPSLPFQETIQMAISALQFALKADLKASEVEVGVVRTDDPTFRVLTEAEIDEHLEAINPEPRHSEMLPGLFRDKLTLEN

SEQ ID NO: 47301 - protein, 85 aa, Zea Mays
MSLKNPHILLLLIIRVKVLLPTSFCSHLVLGTAMTVINASFNLIITAYGLEHALAKRTIVVFGGTYLKKQSCVSGLLFSTLSHCV

SEQ ID NO: 47302 - protein, 205 aa, Zea Mays
MTPTSWAQMVVDLYPPGSNSRDWTCTHCRVVQPPRTRHCHDCDKCVLQFDHHCIWLGTCIGKKNHCRFWWYISEETILCIWTAVLYIESLRLDVDKAWWKDFVGVILLAVLIFILIFLLLLWLFHSYIAVTNQTTYEVARRKRIFYLRGVPERVHPFSRGICRNLYDFCCSSQKGYILEAVPPREELEARAARYTCRDVICCRCC

SEQ ID NO: 47303 - protein, 219 aa, Zea Mays
MSAPSDAAVAAAAPASTTTAAASSGGLTFKLHPLVIVNVSDHHTRVKAQAACSGDSSSPSSSAPGAGQPPRVFGCVIGVQRGRTVEIFNSFELVLDPVSGTLDRAFLDKKQELYKKVFPDFYVLGWYSTGSDVHDTDMLIHKSLMDINESPVYLLLNPTINLSQKDLPVTIYESELHVIDGIPQLIFVRSNYTIEVSVPPCVCLAIYDFFNISMLDQRL

SEQ ID NO: 47304 - protein, 569 aa, Zea Mays
MMMWSSPCLTSSESDDSKGELSGDMAEADYEGWDKGYISKLKRAQRAVKQIAGGDDSMDEQEDETQENVWGRGKNAYYAPGEQSGDDEVDYEEAQRIQKNKEKRLSMKDFGLEDGESDEEGNATKVSNHESKMKEDFAVLSGDEKMDVLYSSAPELVSLLSELKDAHEELRAIGQLTSEVTSCLGKDKMQPFEVKKACLLAHCQAITFYLLMKSEGLSVQDHPVISRLIETKNMVEKIKQITLNPVSQKGCADDHSMHCGTIQTDKIVSLDKQEGKFSNVLALDKVKQGAEVSESRKSEPCNNDYHEVNEQKNKDERMGLHSLEMLKVRANLEERLKKKGLYNLTRSKPEKSSKTRTTSDNGLQTLDDFDDEVLKNNQMMKPSKLVAAAAKSNKSMFVSGDDDLPKRDNIGERRRKHELRVLSRVGANSAEDHELPDGDASEEEDHHELPEGGDESEDDIHRDVKRKRTEKLSTKNALYSPTPGVEHLEEETEGDGKRTISYQILKNRGLTRSRNKKKKNPRKNYRDKHKNKLVKRKGQVRDIKKQSGPYGGETSGINPNVSRSVRFKS

SEQ ID NO: 47305 - protein, 300 aa, Zea Mays
MRFYFVYLRLDWLWSLNLFALILLNFLEKPLWCQKYAPHTCDQRDLYFLGQLPYLSKTESLIYEALTLVILVLDIFYPLSYEGLNLFWKNSMNKLKVLLLFILACDILVFMLSSGPFRVAPYIRVVFLIMTISWLAYVTFEDTPQGKTIFTSYGTTLYQMFVLFTTSNNPDVWVPAYKSSRWNALFIVIYVLLGVYFLTNLILAVIYDSFKEQLAKQLAQMDSIRKSILQKAFDLIDTNGQGYLNKEQCISLLDELNKYRSLPKTWREDFELIFSELDRSGDFKGMNYFLKFISTMMKKK

SEQ ID NO: 47306 - protein, 494 aa, Zea Mays
MTEVEAPLITEVEGVEGRGFCGSASTGGGSSGLGSGVRGTRQYHRRSDALAYGDRYQKAAALVDLAEDGVGIPEDVLNDTRFERAMRFYFVYLRLDWLWSLNLFALILLNFLEKPLWCQKYAPHTCDQRDLYFLGQLPYLSKTESLIYEALTLVILVLDIFYPLSYEGLNLFWKNSMNKLKVLLLFILACDILVFMLSSGPFRVAPYIRVVFLIMTISWLAYVTFEDTPQGKTIFTSYGTTLYQMFVLFTTSNNPDVWVPAYKSSRWNALFIVIYVLLGVYFLTNLILAVIYDSFKEQLAKQLAQMDSIRKSILQKAFDLIDTNGQGYLNKEQCISLLDELNKYRSLPKTWREDFELIFSELDRSGDFKVTSEEFADLCNTIAIKFQKEPPPSYLEKYPSFYHSPQCERLKSFVRSRLFEYIVVFVLLVNLIAVVIETTLDIENSSSQKVWQEVEFVFGWIYVVEMALKIFSLGFGAYWMEGQNKFDFVITWTI

SEQ ID NO: 47307 - protein, 342 aa, Zea Mays
MALRHLVTGQNNCVPDGASSSNPLNALANAFLGQSSKAQSIKELPGSVNVPSTSDFSVSAPLSNIPGSENEFKQDQRPLARGADFIRGGPANDWIESFRPPRVPQLGVEAQFPDFEQIYNNAGTTFQFQPPLDGPPQRVLSGVLHSFLTSGPAGVPFQPLPVPAALGLSESDKQCIRDRSCIMARHIFSDQPEEYIQSQVNTLLHSLDIDNRMRGPMHGQYPELQEYWKQSQSSTRPAPMHNAADKWITEFGKQNNNPENWANSFEQQYGPNGWASEFEQHQSQMAMRQMGGANMANLAAMEQSRVLAQTLASNNDPKFQVPRTLVIFQTKSGRLSRGLCFF

SEQ ID NO: 47308 - protein, 182 aa, Zea Mays
MALLRLQEQCSLLRISSSHHPNPIDIPRNPRKNQLLVPNAAKIANASEIPVPRIPTSTSKAAILARKAALWRDALVPVAAAFASCPLPSLAAEGDGKEYVFKKYKPVSAIDAFRKLRDVPEVQLLDIRRGKSVRFMAPPKLKLIDKSTVQVEFDEEDEKGFVKEVLARFPDPANTVVCVLDK

SEQ ID NO: 47309 - protein, 738 aa, Zea Mays
MLEGSIPDSLFSSSMHLKHILFDLNRFTGQIPASIGAIPSLTVLRLNNNGFMGPVPALNNLTNLQVLMLSNNKLSGPIPNLTGMGSLENVDISNNSFDPSNVPSWFSDLKSIMTLTMQSVGLSGQLPQKLFSFPQLQHLVLSDNELNGTLDMGNNMSKHLDLVDIQNNKITSVTVYNSFKNLKLEGNPLCNDSLLSDTSPCMGLQTEAPPQPYQFDVQCAYPFIETIVFRAPSFANVFEYLPELQKNLSKQLNSCTPNWLGLVPYFDEDAYLNVNIKACPVKQKRFNYSQVLNCFNLTRQTYKPPEMYGPYYVNAHPYAFHDKTSRAVLIGIVTGSVLLVVGLTLVVFYAVNQKKRAQRLVSINNPFASWGSLGEDIGAAPQLKSAKFFSLEELKLCTNDFREINAIGAGGYGTVYRGKLPDGQLVAIKRSKEGSMQGGLEFKTEIELLSRVHHNNLVGLVGFCFEKGEKMLVYEFIPNGTLSEALYGMKGIQLDWSRRLKIALDSAKGLAYLHDHANPPIIHRDVKSTNILLNEKMTAKVSDFGLSLLVTDSEEGQLCTNVKGTLGYLDPEYYMTQQLTAKSDVYSFGVVLLELIVGKPPIHNNKYIVREVKMALDEDDGTHYGLKDVMDPVLQKIGGLFGFPRFLKLALQCVEEVATARPSMNSIVREIEAIMLDNGLTPGSMSTSSSFSIESRTMKVGPKHPYSSSSMSTSTFDMDSRAFEYSGVFPSSHGSLKP

SEQ ID NO: 47310 - protein, 914 aa, Zea Mays
MALRRRERKAALRSLMKRWKNVPASWGKSSPCDMPWDGILCDENGRVTSLNLFGMGMGGTLSDDIGSLTELTILDLSSNRDLGGPLPAAIGKLFKLESFFSGPVPSELGNLSQLTFFALNSNKLTGSIPPSLGKLSNVTWLDLADNQLTGPLPTSRDNRTGLDQLLNAQHFHFNRNMLEGSIPDSLFSSSMHLKHILFDLNRFTGQIPASIGAIPSLTVLRLNNNGFMGPVPALNNLTNLQVLMLSNNKLSGPIPNLTGMGSLENVDISNNSFDPSNVPSWFSDLKSIMTLTMQSVGLSGQLPQKLFSFPQLQHLVLSDNELNGTLDMGNNMSKHLDLVDIQNNKITSVTVYNSFKNLKLEGNPLCNDSLLSDTSPCMGLQTEAPPQPYQFDVQCAYPFIETIVFRAPSFANVFEYLPELQKNLSKQLNSCTPNWLGLVPYFDEDAYLNVNIKACPVKQKRFNYSQVLNCFNLTRQTYKPPEMYGPYYVNAHPYAFHDKTSRAVLIGIVTGSVLLVVGLTLVVFYAVNQKKRAQRLVSINNPFASWGSLGEDIGAAPQLKSAKFFSLEELKLCTNDFREINAIGAGGYGTVYRGKLPDGQLVAIKRSKEGSMQGGLEFKTEIELLSRVHHNNLVGLVGFCFEKGEKMLVYEFIPNGTLSEALYGMKGIQLDWSRRLKIALDSAKGLAYLHDHANPPIIHRDVKSTNILLNEKMTAKVSDFGLSLLVTDSEEGQLCTNVKGTLGYLDPEYYMTQQLTAKSDVYSFGVVLLELIVGKPPIHNNKYIVREVKMALDEDDGTHYGLKDVMDPVLQKIGGLFGFPRFLKLALQCVEEVATARPSMNSIVREIEAIMLDNGLTPGSMSTSSSFSIESRTMKVGPKHPYSSSSMSTSTFDMDSRAFEYSGVFPSSHGSLKP

SEQ ID NO: 47311 - protein, 385 aa, Zea Mays
MGDLKEVFRSLQELFPEVDHRILKAIAIEHRKDVDSAVVTVLDEVMPFMTGSAGVDGSVGNLSSMDGSVGNLFGNHSTHEVGSSSSVWRDICINEIDASVYSVQYTSYGDVKTGKQENINNTYVGRLASIEGVNEQLNLHSYPIPNGGQHDLLPNLDVLSSNTDPEKTLANTDNEVGYSGLFSECFSQPPTGEDGGNIIAPQPCDQDPNGMIPVGDYFPQNSSMEFFSGYEDYNFDDGLLPIGSNDQISFRILGTEKDPFAPVLDVPGRDKEESSTETSGFIESSNNVADMLPDLNLNHFTSTASTHSNHSVSIESLEDSVADARSNKVMHYACCALERAAHAVVLMLLLGFDRRRLQVQGDTVQYGCSVEGAVLGSFDVRSSGS

SEQ ID NO: 47312 - protein, 522 aa, Zea Mays
MEPPLRRGRPGGELRIPPPVPARGGGGERGFRGGRQTQEGHHRGHRKRRCSPRHGRAQECYRGTAVPGRVKVDKACWDQLGWWVGYAKDTDDSIGRIVRISPGVGRYVAKSYNPRQLVTASSGTPLFEIFLVKEDDETYTMKVVHMRPTKGTSGAPSISSTITESPAKVENENSSESSAISDSVTEEANTDTTVRGNEDAEEKAQDVGSSKDSSVEGLKSVLNFFKSRIPEFKVQVINVDVAEETELAANSSEELVQDDVKSTPESSLEEPATEELEQEEDVPEENTDEESKSTEVKLFISGVVHNKEDAGAKSYVRVPAEINNMEKDSFELYIPGEGSDRDLAETKAAKQKVADMAAKLASELMPSDVAKALWGTAKSSSKINKEVQELLRLTLSKARVKLTENTIFKRIIMDTNSTDPFNGLYVGAFSPYGPEIVQLRRKFGHWNSTDDVEFFEYVEAVKLTGDLSVPAGQITFRAKIGKGKRLENRGAYPEEFGVVISSCRSDCLKDAKILPVTKVRVE

SEQ ID NO: 47313 - protein, 387 aa, Zea Mays
MHRRRPSSSSTASSASAKGGSVASPTSPAPRRRTTACSCRIWGRSPASMTGRVSSSTTSRVGRWTTARSTARLAATTGHYPVWDEHNPVHFVGHSAGAQVVRVLHQMLADKAFPGHDTSEDWVVSLTSLSGALNGTTRTYYDGMLVVDGRSMKSICLLQLCRLGVIVYDWLDIPWLKNYYNFGFDHYEMSWRKVGFSGLINLLLGHTGPFASGDWILPDLTIQGSMKLNSTLRTFPNTFYFSYATKKTRKIFGITVPSSVLGVHPILFLRVLQMCMWRHPQNAPLPYKGYRDEDWEDNDGALNTISMTHPRIPIEHPHHFVVDDSDCHPLQPGIWYYKIIEADHILFIVNRERAGVQFDLLYDGIFQRCRKHAFRKSPPTVPNETSR

SEQ ID NO: 47314 - protein, 311 aa, Zea Mays
MEEDSIKGMISAISWVPRGAAKSVPVVADPPTQEEIAEAMKTFDLGRDSGSDADEDDDAATMELDGAAETVEEVDEAARAKAVAKALCKGSSKADDVADELRELNMDAYDDEDEEVDIFGSGLGDLYYPSNAMDPYLKKNNEDDEEDDDDDEEIEDKMIMPTDFVIVCAHSEDDIFSLQVNILEETNDGEQNIFVHHDVPLADFPLCTAWMDFNLKGGEKGNFVAVGTMDPAIEIWDLDMVDEVQPHMVLGGLSKKKKKTKGKKGKKYKKGSHRSSVLGLAWNKEVRFKQLLGAHSHLKFCLADPLIKQLP

SEQ ID NO: 47315 - protein, 142 aa, Zea Mays
MESKLANTSLNDNNGRKTTSSSAFDRGNNSASRPPQVLEEDVIDPDNMTYEELQQLGEAIGTQSKGLPESVIALLPTSTYKTGIFSRKEKHDECVICCMAYKNRDRLTKLPCGHHYHQACVAKWLQINKQQLSSSVRSVIPQ

SEQ ID NO: 47316 - protein, 164 aa, Zea Mays
MARALLLLRVAVARYPPLPASPALLQPLLRRHAPSQYRSQLRFLSSLSSSSVSTSSDAPSDGGGGRDGEEDGAKSGGRVDYLGMSDEELMEQCDMGTFKASGPGGQHRNKRESAVRLKHLPTGIIAQAVEDRSQHKNRASALSRLRTLIALKGNASFIRPAVCC

SEQ ID NO: 47317 - protein, 761 aa, Zea Mays
MWRLKIGEGGGPWMQTASDFHGRQVWEYDPVAGTDEERSKVEQLRRAFTENRFRRRESQDLLMRMQFAGQKYVHADLPAATKIEEEDGDEVPVTEERLRESLRRALGCMAALQAEDGHWPGDYSGVMYLMPFWIFALHITGTVDAVLSKEHRREICRHIYNHQNEDGGWGLNVIDESAMFSTCLNYTSLRLLGEVQQEENDGLAKGRAWILSHGTATAAPQWAKILLSVIGVYDWRGNNPVVPELWLVPRFLPIHPGRFWCFTRIMYMSIAFLYGKKFVGPITPTILALRDELYSSAYVHIDWSKARNSCAKEDMRNKPSGIFKFISTCLNMFVEPVLNYWPLKKLRERALNHILEHIHYEDETTQYIGICSITKALNMICRWVENPNSDAAKRHNLRIHDYMWIAEDGMKTKVCNGANNWELAFIIQALLSADTTNEYGPTVERAMGYIKRAQATTNPPGNPSYWFRHKSKGSWPLSTVDYGWASSDTTAEVTKAMLLLSKVYPNLVENSNGDEWMLNAVDCLLSFMNKDGSVSTFECQRTYSWLEILNPAESFRNIVADYPTVECTSSVLQALVLFGDFNSEYRSKEIKENVDKAAIFIESNQNKDGSWYGTWGICFIYGTLHAINGLVAAGRNYENNICIRKACEFLLSIQLKTGGWAESYRSCERQVYVEGLSTHGVQTAWAMLALIYAGQMERDPTPLHQAAKALISLQLESGDYPQQEHVGNTNCSVYFNYPNYRILFPVWALGEYHRKVRAKTN

SEQ ID NO: 47318 - protein, 812 aa, Zea Mays
MHADAETEEVYAQMTLQPLSPEEQKDPFLPIELGAGSKQPTNYFCKTLTASDTSTHGGFSVPRRAAEKVFPPLDFSQQPPVQELVARDLHDNEWKFRHIFRGQPKRHLLTTGWSVFVSAKRLVAGDSIIFIWNDNNQLLLGIRRASRPQTVMPSSVLSSDSMHIGLLAAAAHAAATNSRFTIFYNPRASPSEFVIPLAKYVKAVYHTRVSVGMRFRMLFETEESSVRRYMGTITGISDLDSERWPNSHWRSVKVGWDESTAGDKQPRVSLWEIEPLTTFPMYPTAFPLRLKRPWASGLPMFNGGRSDEFARYSSLMWLRDGNRGAQSLNFQGLGASPWLQPRIDNPLLSLKPDTYQQMAAAALEEIRAGDHLKQASSLLPVQQTQTLNGGLDHLYGNPVLQQMQFQSQQSTLQAVQQGYGQNANDSGYVQNQLQQLQLQKQQEPPPPQQQQQTQVLQRQAHQEMQQHLSASCHDIANVASGVSMSGSACQSQSSLLSGSSFYQQNIFDGNGGPDLHLHNSFHNFSSQESSNLLNLPRSGQLMASEGWPSKRLAVESLAGHEIQPLQHKLEKVSHQSTVSHCSGTLPPLSARDGSSAQACGTNVQSHLLPSSFAIHDGLSTIRSGGVGSGTDAITIASLRYSDANLLPENSIATSSCLGESGTFNSLDDVCGVNPSQGGTFVKVYKSGSLGRSLDITRFGSYYELRVELERLFGLEGQLEDPARSGWQLVFVDRENDVLLLGDDPWQEFVNSVGCIKILSPQDLQQMARGGGGDLLSAPGARMLQGSVCDDYSAGHDVQNLTGSIAPVVPLDY

SEQ ID NO: 47319 - protein, 96 aa, Zea Mays
MMNCGASCSTTGGERTLQRSTRRRAPSLGRTSSPCRTGATDTDCKPPLAHLLQLHCFRLPSAAGVTAVDQQFSRLLSLCFCLAWVSGSSGKGRTTT

SEQ ID NO: 47320 - protein, 87 aa, Zea Mays
MASLHPTTAMLLAQRHSPAPSLRSQHIVALMVCLRSHLQHRVGPWPRSLLTGPASGNRQSTVVCAAWTRRSRGETEQRPNRKSWKQT

SEQ ID NO: 47321 - protein, 394 aa, Zea Mays
MYRGGLDRFKKAQTLEPFSVKSESGTKKAPAAAGTAKALAPLTLPLDSNFVPGQNHQSPQGTISRVAGQDGDAPGHVGTQVGGGQSTWQPPDWAIEPRPGVYYLDVVKDGEVIDRINLDNRRHLFGRQVPACDFVLDHQSVSRQHAAVIPHRNGSIYVIDLGSVHGTFVANERLTKDNPVELEVGQSLRFAASTRTYILRKNAAALFPTPSLPSDVSLPSPPDPNDEDAVVAYNTVLNRYGISKSDILSSSKDSSGGASSANDGKHAVERLLKRDGADVETEPGPIGVKEGSLVGKYESLVQVTVIPKGKEQASRKECTSTSPSGVTDKLQEVLKKVKSATRPGIYDDLYGDSVPAKVGSSWAYKSDDQPVEEKTRGMNLNMNSADDSDDLFGD

SEQ ID NO: 47322 - protein, 302 aa, Zea Mays
MGRSLTGSIWTTGGIYSGGRFLLVTSCWTISLCRVSMLLLFHTGMEGSVHGTFVANERLTKDNPVELEVGQSLRFAASTRTYILRKNAAALFPTPSLPSDVSLPSPPDPNDEDAVVAYNTVLNRYGISKSDILSSSKDSSGGASSANDGKHAVERLLKRGKKRRVSFRDQVGGELIQVVGISDGADVETEPGPIGVKEGSLVGKYESLVQVTVIPKGKEQASRKECTSTSPSGVTDKLQEVLKKVKSATRPGIYDDLYGDSVPAKVGSSWAYKSDDQPVEEKTRGMNLNMNSADDSDDLFGD

SEQ ID NO: 47323 - protein, 352 aa, Zea Mays
MGNTCGVTLRSKYFASFRGSASQRRDAPGYSPVATSAAADEPSPHGNGKRATRPSQAAAAADGSAPPPAPGMRRGVPAPAELTANVLGHPTPSLRDHYALGRKLGQGQFGTTYLCTDLATGVDYACKSIAKRKLITKEDVEDVRREIQIMHHLAGHRNVVAIKGAYEDQLYVHIVMEFCAGGELFDRIIQRGHYSERKAAELTRIIVGVVEACHSLGVMHRDLKPENFLLSNKDDDMSLKAIDFGLSVFFKPGQIFTDVVGSPYYVAPEVLRKRYGPEADVWTAGVILYILLCGVPPFWAETQQGIFDAVLKGVIDFDLDPWPVISESAKDLIRRMLNPIPSERLTAHEVLC

SEQ ID NO: 47324 - protein, 971 aa, Zea Mays
MSTAKVVLEPAFQGAGHKPGTEIWRIEDFKPVALPKSDYGKFYCGDSYIVLQTTCKGGAFIFDIHFWIGKDSSQDEAGTAAIKTVELDSMLGGRAVQHREPQCYESDKFLSYFKPCIIPMEGGFASGFKKPEVDKFETRLYICKGKRAIRVKEVPFSRSSLNHDDVFILDTENKIYQFNGANSNIQERAKALEVIQHLKEEYHDGVCAVAIVDDGKLQAESDSGEFWVLFGGFAPIGKKAISDDDVVLETTSPKLFSISNGQLKLEDAVLTKSILENTKCFLLDCGAELFVWVGRVTQVEDRKAASAAVEKYIIKENRPKTTRITQVIQGYENHTFKSKFESWPVSNTSGSASTEEGRGKVTALLKQKGVDVKGISKTSVPVNDEVPPLLDGGGKLEVWCIDGSAKTALPKEELGKFYSGDCYVVLYTYHSAEKKEEFYLAYWIGKNSVQEDQEAAFQIANTTFNSLKGRPVQGRIYQGKEPPQFVAIFQPMVILKGGTSSGYKKFVEEKGLKDETYCSDGTALIQISGTAVHNNKTLQVDAVATSLSSTDCFVLQAKNSMFIWNGNASSFEQQQWAAKVAEFLKTGVAVKHCKEGTESSIFWSSIGGKQSYTNRNAAPDVVIREPHLYTFSLRNVTLIFHFHFLASIAITSSPFVREAGDDLLTEDMMILDTHCEVFVWMGQCVETKEKQKAFDIGQKYVQHAVAFEGISPDVPLYKVNEGNEPCFFRTYFSWDSARSVIHGNSFEKKLSVLFGMRSEGGNKGSGDGGPTQRASALAALSSALNPSSQGKQSDEKPTSSDDSEHTQRASAMAALSSALNPSTKPSSTQTQSHSGQGSQRAAAVAALSNVLTAEGSHSPRHSRSSPTADADKTELVPTSPHQLETGTAEDVRTEPDVSQEQTAKENGGQTTFSYERLISKSTDPVSGINNKRRETYLVDSEFETVFGMTKEEFYEQPRWKQELQKKKADLF

SEQ ID NO: 47325 - protein, 53 aa, Zea Mays
MMLTLTASIMYWYLKRPTSQSLDSENGSSCETTSITTSDDSASESSIDDNTTR

SEQ ID NO: 47326 - protein, 853 aa, Zea Mays
MKLLSPAAAPSSSPLFPPRIVEARQSGPCRIRIRIRGKAAAAGGGGGAGATGPRGSLRLAGWWRAQQQAPATATTTQQPDNVSSAKVFQTSRVETESEIAKWPGKPQDLEDEHQAEEAELQPLIDQVRAMLRSMNDGDTSASAYDTAWVAMVPKVGGDGGAQPQFPATVRWIVDHQLPDGSWGDSALFSAYDRMINTLACVVALTKWSLEPARCEAGLSFLHENMWRLAEEEAESMPIGFEIAFPSLIQTARDLGVVDFPYGHPALQSIYANREVKLKRIPRDMMHRVPTSILHSLEGMPDLDWPRLLNLQSCDGSFLFSPSATAYALMQTGDKKCFEYIDRIVKKFNGGVPNVYPVDLFEHIWVVDRLERLGISRYFQREIEQCMDYVNRHWTEDGICWARKSNVKDVDDTAMAFRLLRLHGYNVSPSVFKNFEKDGEFFCFVGQSTQAVTGMYNLNRASQISFQGEDVLHRARVFSYEFLRQREEQGMIRDKWIVAKDLPGEVQYTLDFPWYASLPRVEARTYLDQYGGKDDVWIGKTLYRMPLVNNDTYLELAIRDFNHCQALHQLECNGLQTWYKDNCLDAFGVEPQDVLRSYFLAAACIFEPSRAAERLAWARTSMIANAISTHLRDISEDKKRLECFVHCLYEENDVSWLKRNPNDVILERALRRLINLLAQEALPIHEGQRFIHSLLSLAWTEWMLQKANKEENKYHKCSGIEPQYMVHDRQTYLLLVQVIEICAGRIGEAVSMINNKDNDWFIQLTCATCDSLNHRMLLSQDTMKNEARINWIEKEIELNMQELAQSLLLRCDEKTSNKKTKKTLWDVLRSLYYATHSPQHMIDRHVSRVIFEPV

SEQ ID NO: 47327 - protein, 1653 aa, Zea Mays
MTPKAPRITRELKPDWRSRGIFSTALLHQSSRLQRALSGDSYITGLLSDLEKALQSGVLIIKLHYAIDFLDLVSRYYPHEVSRAASLVLSGAVSNRSFQPYESHIPYLLHFLVDYNLYGMGHIHVKNFKFRPPLPVDFHPKSSLRRKAQSDNLEINSPTVWISSTVSHSSILGSSAPSHHLGGTNLSFAIRQSSSMLEADSRVEVPPSGILNEKYKMYTSLSQTTEDTKMVQSLVAVWEELERLRLLEETKYADLGRPLREEVLKDFLHGIKYESALSVLFSQEGPHHKVSTIEESERLERCLKSLTDIIGTVTFSQDNYCGNIDVGNSADVQNDKPDASLCSGSLEQNMQIISPERNSEYPVSSSVHQRTLSQLSDKGEKHLDAEALGLLSWLASSQAAEESTDDELTNEVILSPLFANKSIEVAVESAQLDFDSASQQECQDILDSVDPIRAVEEPNIHTSYLDSVKKKRQHGDADDSCSAMSPQKDLSASKKSTIDKDYHDTIGSTDSESSSFLGVHDSVCHSVRDLMRRRRSFRREQLEFGCSGAATCTMDKESETVNSGGLEFHDFTSDIPNLALTRMAFVQKPPLKDDACSGLESPSDCEQRGSEKSGLADLLPFFNQNMEENKQNESFQDMESTGDVLGVPTHFQNDGSALYLLTHALSPPSAGAVGHWLTQQSSSSIFSGYTNYDGVAADKEEAHSSTLSRNSPTRFTKENSANKMHGDVMGSALSYKESKHLDEWHDFSQISAGNEKDRLTPLSQIGFRDPASIGGGQQLTILSVEVLTESRGELRPDPRFDAINAVSLAIEDDADNTVDVHVFIRGNNVKSHRRNLDGIAGCNINVFPEEKDVLNNLISAICSIDPDILVGWEIQLGSLGFLAERAAYLGIGLLKRISRTPHELNHPPKIPVDNSSQVLSETSSADDIIDDVSENDWSHTHASGIHVGGRIVLNLWRLMRAEVKLNNYSLEAVADEVLRRKIPLIPSRILNRWFATGPGRGRHRCIEYISNRARINLEIMNQMDLVNRTSELARVFGIDFFSVLSRGSQYRVESMLLRLAHTQNYLAISPGNQQVASQPAMECLPLVMEPESAFYPDPVVVLDFQSLYPSMIIAYNLCYSTCLGKVFPSKSDVLGVSSYSADPHTLVDLKNQLLLTPNGVLYVQPEIRKGVLPRLLEEILSTRIMVKQAMKKLSPSQQVLHRIFNARQLALKLIANVTYGYTAAGFSGRMPCAELADSIVQCGRRTLETAISFVNQHPLWKARVVYGDTDSMFVLLKGRSREEAFRIGKEIASSITAMNPDPVTLKFEKVYQPCFLLTKKRYVGYSYESPEQNEPVFDAKGIETVRRDTCPAVAKILERSIRIMFEEQDLTKVRTYLERQWTHILSGKVSILDFIFAKEVRLGTYSARASTLPPAAIVATKAMLSDPRAEPRYAERVPYVVIHGEPGARLADMVIDPYGLLEVGSPYRLNEQYYITKQIIPALQRVFGLLGADLNKWFNEMPRPIRSTLAKRQFAAAHGSFSRDGSFIRLGLNNKTSAKGGRIDTYYMSSHCSICGDMIQGSESFCNNCLKSEAVVATVVAGRTSKLEREIQHLAAICGHCGGADWIVESGVKCISLACPVFYERRKVQRELVVVSESAGEAGYYPFCCAELF

SEQ ID NO: 47328 - protein, 419 aa, Zea Mays
MFLLLSQRILPSHVWSIAMEIGLSGGDYVSLGWHEKEDLKCAVSCLRDNKQVSTIGLWGRSMGAVTCLLYGAEDPSIGGMILDSAFTNLYDLMMELVDVYKIRVPKFTVKMAVQYMRRIIQKRAKFDIMDLNVLRLAPKMFIPVLFGHGLNDMFIQPHHCDRIHQAYGGDKNIIKFDGDHNSPRPQSYYDSVSIFFYKSLHPPLLPAARSKLHMGAFKVGNITNENFFFEIINGLRPANTAGCSSSTDAPNIPHDGTSVIELLSDSMNQLSIKNENHLDFLLDENHSLPEIDSDSVGSRLQDKRSRRNEESFSFTSSNRESWGRCSSLGAASDESFSGDNNDKQNLTVKALATPVRQNQRQSQRKPIEKAKQKKIQALWKKIKREKVEMGDSLSSRLKMCLGQSPQHKRNRSSGTITTS

SEQ ID NO: 47329 - protein, 502 aa, Zea Mays
MIEQFVNFVIRPPRSEYNPDQYLWEKEFILAGRKYKRLDLELTNARGYILKCSHYVPAFIPENTALPCVVYCHGNSGCRADANEAAVILLPSNITVFTLDFSGSGLSGGDYVSLGWHEKEDLKCAVSCLRDNKQVSTIGLWGRSMGAVTCLLYGAEDPSIGGMILDSAFTNLYDLMMELVDVYKIRVPKFTVKMAVQYMRRIIQKRAKFDIMDLNVLRLAPKMFIPVLFGHGLNDMFIQPHHCDRIHQAYGGDKNIIKFDGDHNSPRPQSYYDSVSIFFYKSLHPPLLPAARSKLHMGAFKVGNITNENFFFEIINGLRPANTAGCSSSTDAPNIPHDGTSVIELLSDSMNQLSIKNENHLDFLLDENHSLPEIDSDSVGSRLQDKRSRRNEESFSFTSSNRESWGRCSSLGAASDESFSGDNNDKQNLTVKALATPVRQNQRQSQRKPIEKAKQKKIQALWKKIKREKVEMGDSLSSRLKMCLGQSPQHKRNRSSGTITTS

SEQ ID NO: 47330 - protein, 220 aa, Zea Mays
MGLGAAMALGDPPADYASIAAVGLFVALMCVGIIVGHLLEENRWMNESITTLFIVLSQDETPFLYSLVFGEGVVNDTTSVVLFNAIQNFDPGNISGAKLLNFISSFLYLFGSSTILGVASGLLSAYTIKKLYFGSPVKSIALSNTILALVLVSRAAFVFPLSFLSNLTKKTPNGKISFRQQVLWKCEAFWEVCEAFWEGHHHAQLEVVRDHNSERGGVHG

SEQ ID NO: 47331 - protein, 341 aa, Zea Mays
MFPSSKKQASTGAANPNDRPMCGQGGDSGGLVLTTDPKPRLRWTPELHDRFVDAVAQLGGPDKATPKTIMRVMGVKGLTLYHLKSHLQKFRLGKQHKELGDHTAMEMQRSVASSSGMIARSMNDRSVNVNEALRIQMEVQRRLHGELEKHLQMRVEAQGKYMQSIVEKAYQALGSSDCATWPAGYRTLGSQGVLDIGTSSTSFSSVQDLQCFYGGSSHMDQLLHQMERPMDGFLTLGESCFIGSADNKKDLNNHCSSSGKSSMMWASEEQQAKSGNDQLQMGSSTRMEGAGIDVMDPVTGLYEGAVSGDSMDSKGFEGSNSRLEMKPPAQQAPVGSQRIRI

SEQ ID NO: 47332 - protein, 123 aa, Zea Mays
MVLGGVVYTAVPFYKRVLKVEGETLANVETAVEVVEHVAEVTEKLAADAASSLPENGSLHKVAVEVECVAEAVDKDAHEVEAVIDKVEEVSEKIDATVEPVIEELEKDLIPNPRSSSGSDAQK

SEQ ID NO: 47333 - protein, 533 aa, Zea Mays
MIAEKKTLFNHPPSSAALSSALFQVQQRLGTRRHRRLPRERVSWSTKAGMKGCSERLLFLLLLLASSSLLSAVIAAQQTCPADLDSKCDGGASDDDWEGEFFPGVPKIKYEGPTSKNPLAYKWYNKEEVILGKKMKDWMRFSVAFWHTFRGTGADPFGAPTKTWPWEDGTNSLAMAKRRMRAHFEFMEKLGVDKWCFHDRDIAPDGKTLEETNSNLDEIVQLAKQLQGETNIKPLWGTAQLFMHPRYMHGAATSPEVKVYAYAAAQVKKALEVTHYLGGENYVFWGGREGYQTLLNTDMKRELDHLANFLQAAVDYKKKIGFNGTLLIEPKPQEPTKHQYDWDVATTFAFLQKYGLTGEFKINVECNHATLSGHSCHHELETARINGLLGNIDANTGDPQVGWDTDQFMTDIAEATLVMSSVVKNGGLAPGGFNFDAKLRRESTDVEDMFLAHISGMDTLARGLRNVAKLIGDGSLDDLVRKRYQSFDSEIGALIEAGKGDFETLEKKVLEWGEPTVASGKQELAEILFQSAL

SEQ ID NO: 47334 - protein, 434 aa, Zea Mays
MIAGPNKLPPEPPHRICFIAFISSHIFILEKKTLFNHPPSSAALSSALFQVQQRLGTRRHRRLPRERVSWSTKAGMKGCSERLLFLLLLLASSSLLSAVIAAQQTCPADLDSKCDGGASDDDWEGEFFPGVPKIKYEGPTSKNPLAYKWYNKEEVILGKKMKDWMRFSVAFWHTFRGTGADPFGAPTKTWPWEDGTNSLAMAKRRMRAHFEFMEKLGVDKWCFHDRDIAPDGKTLEETNSNLDEIVQLAKQLQGETNIKPLWGTAQLFMHPRYMHGAATSPEVKVYAYAAAQVKKALEVTHYLGGENYVFWGGREGYQTLLNTDMKRELDHLANFLQAAVDYKKKIGFNGTLLIEPKPQEPTKHRMTGMLRLRLLFYRSTVLQESSRLMLSATMLLYLDTAAIMNWRLHGLMGCLEISMQTLVILKLVGTQISS

SEQ ID NO: 47335 - protein, 108 aa, Zea Mays
MACSTNLCFSASIPPLPASSSSSVSSPFLTVERVSYVPSLSRWTIRYKQLGHAYQRSHVLAFASADRRSQAEAINGPLAMIGLTAGLIVEAQTGKGILGQELMTPAME

SEQ ID NO: 47336 - protein, 1206 aa, Zea Mays
MAMPPAAVARLRELVPAPGTEEELELDVAGAAALVECCSGLLRPGGGGDGDAGAALEALEALCAAGGGGAMRRHADGLAPLVVARLGDGHAAVREAARRYLVLLMEMKEMNARTENTEPNSNVPNDQHVHYTTIEMESSNTSQARKNSKEKVSARDISLLAGEGDITRKLVEPIKVFSEKDLLREIGKVVSTLQPDNEWSIRITAMQRVEGLVLGGAADYSAFPMLLKQLMTPLITQLLDRRSSVVKQACHLLNFLSKELLRDFEPYAELLIPVLLKNVVITILVIAESADNCIKEMLRNCKVARILPRIIEFAKNDRSAVLRARCCEYATLMLEYWVDTPEIQRSADLYEDLIKCCIADATSEVRSSARACYRMFSRIWPDRSHQLYSSFEPPRQKMINDEDTETPQAHLPPVKISHLQPSSFVPAVIDKVVKVDSGISFSSGDLQTSDILYLQCDDIIAKGLDAGNNDDTLTIGSSFEDKITLRELETRDRDTEKNDSGNSTGVNSSARDQPTATPITIEAPSEMSLDDATVVTIVQDKAECKLNVEPINQQVQAQEDPSDLTCLSPAVNSKGAGNLLKENPVEVSSDAGSSGKVGTHKKSAVSKKPRGSYTPNFRRPLLSKQMTNWFYASTKSDIHEKQLILGEMVNNMDVPSSITEALSLGLNPRSDWMMKVYAFSFLRQCLLERGSKGTQEVAQNFEKVMRLVCRYLDDPHHKVAHAALSSLADIMPVFKKPFEHYLDKTLPHIFSRLNDPKESIKQQCLAILKHANESYPIDSLLPALLRSLDEQKSPKSKLAVLEFANASFVKCEVNSESYCSSSFLKPWFGKLAHLFNDKNKKLKEVTVVGFSSIYSHYDPTSMLSFLVTLSMEEQKRLKRAMKQLIPSIESDMEEFLQQKRHKQKTPSFDIFTAKSPLHPAFQSAKSPLHPAHRSSKSPLHPRFAESPGHSAYKYAKSPLHPSYQPANSPLHPSYQSNYVKADDCFSSALQCLPDTSLEVQEDRTGRIEIESPNKSYGHKAEMMDKKSCTVRSKNDLPRRSDFSVISNNIVQNASSRDSRSTKILDEPNDSELHINTRKNKVTRTRNDLQDHENLHQMSSSLLEMLDDPDMATRELALSLLAEILEKHKAMENCVELLVVKLLHATKDGALKVVNQAHICLTTVVTQFDPLRCLGVSLFCIVVKCCCLTTRNLVLLFFFFVCRRHCK

SEQ ID NO: 47337 - protein, 257 aa, Zea Mays
MPGPNLQDLRRQPVHQDHHARDTEPPLVPEEPPGRPGGRQRDDDEQAVRGARAADAGHGRDHADPGRGHHSGGGVPRAQPVPERRPGPRRRHGGPGLGRRPRPGEQRGDRVRYVTAPSAQRRGNVSLRSQVAEITRETERVGVCCCCLQPACSCVLSGLCCSCLMPSFVMAPFYRPVVFGRCYLVRLQCSVLQRFSHLESLLLQPRSSERTLCFCIPSDVLVLLHCIICYIWCRKIKELHCPFSVCPHLYFIRISVL

SEQ ID NO: 47338 - protein, 232 aa, Zea Mays
MGASSFRDRKYATGSRTNRATKTGYWKATGKDREVRSPATRAVVAMRKTLVFYQGRAPNGVKSCWVMHEFRLDSPHTPPKEDWVLCRVFQKRKDSEQDNGGGSSSPPTFAGASSQGVVLDLPDDQQPSMTMAGAYVAVDHHQPGSSAVGFALPPHAQDNGLGDGGLDALLMNGATMWQYSSSALADHFPPEEVTAAPMMGLGSRGGGDGCSFFYDSGFDDMANMGFPQGWMG

SEQ ID NO: 47339 - protein, 129 aa, Zea Mays
MFTTEQILRFIRRCHMKWGDFITLCKELRRIKVACLKGEQEVRRPWWAPACLSIVGMEAVCFRSWCIMHNWSLSLSLSLSLSLSLSLSLIPCYLFFIYRFGTVVCCRQRKKHIMCRWSLVCSFLANLPE

SEQ ID NO: 47340 - protein, 121 aa, Zea Mays
MFDHSPNSLTIFFQDVGLWLEEINLGGYRQVFEENGVNGEYLESLSMFTTEQILRFIRRCHMKWGDFITLCKELRRIKVACLKGEQEVRRPWWAPACLSIVFVRAAKQNRKSRVVSLKLEP

SEQ ID NO: 47341 - protein, 188 aa, Zea Mays
MGKLLFWVDKWLEGNTIQELAPNLFKAIPKRIIKHRTMSQALLNRGWIVDIKGALTVQVLSEYLLLWDLVHNWHLQQEAADQHLKNGSYSTKSAYNAFFVGTIHFAPWKRVWRSWATPKCNLFMWLVLKNRVWTVDRLAKRGLPHLAACPLCDQEAELIQHLLVSCVFAKQVWFLILHGLGLSVLPQP

SEQ ID NO: 47342 - protein, 243 aa, Zea Mays
MARAAARLLPIFLPWRRPPPPCLLRRGFLNPSSPRTSARVDTLVLPGDERLPFPSPPRLPNQLRPDYGSGGGGGAPSTIAAIVTSLGGGPAAVGIVRISGPDAVAVADRVFRPAGTRRASTPWQPRSHFVEYGLALDADGSVIDEVLVVPMLSPRSYTREDVVELQCHGNDLCLRRVLRACLEAGARLADPGEFTLRAFLNGRLDLAQAENVSRLISAKSAAAADSALAGIQILKMRCLLWTQ

SEQ ID NO: 47343 - protein, 323 aa, Zea Mays
MARAAARLLPIFLPWRRPPPPCLLRRGFLNPSSPRTSARVDTLVLPGDERLPFPSPPRLPNQLRPDYGSGGGGGAPSTIAAIVTSLGGGPAAVGIVRISGPDAVAVADRVFRPAGTRRASTPWQPRSHFVEYGLALDADGSVIDEVLVVPMLSPRSYTREDVVELQCHGNDLCLRRVLRACLEAGARLADPGEFTLRAFLNGRLDLAQAENVSRLISAKSAAAADSALAGIQGGFSTLVKSLRSRCIELLTEIEARLDFEDEMPPLDPVMLVSKINCMRKEVQDALDTSNYDKLLQSGLQIAIIGRPNVGKSSLLNAWSKLAE

SEQ ID NO: 47344 - protein, 198 aa, Zea Mays
MRLNVGLLVPLMAQYSAPTWATLVAGFFMLLALSLSTYLIFEHLSAYNNPEEQKFVLGVILMVPCYAIESCISLINPSTSVYCGILRDGYEAFAMYCFGRYITACLGGEDKTIAFLKREGGSGSGQSLLHHTSEKGIIHHHFPVNYVLKPWRLGTRFYLIIKFGIFQYVIIKTLTATLSLLLESFGVYCDGEFNLRCG

SEQ ID NO: 47345 - protein, 226 aa, Zea Mays
MPSSMSMERRVLLRAFGAELVLTDAAKGMKGALDKATEILNKTPNSYMLQQFDNPANPQVHYETTGPEIWEDSKGKVDIFIGGIGTGGTISGAGRFLKEKNPGIKVIGIEPSESNILSGGKPGPHKIQGIGAGFVPRNLDSDILDEVIEISSDEAVETAKQLAVQEGLLVGISSGAAAAAAIKVAKRPENAGKLIVVVFPSFGERYLSSVLYQSIREECENMQPEP

SEQ ID NO: 47346 - protein, 434 aa, Zea Mays
MTAEQEWSEVQVRALDGRSTVVKLPLGASVRDLKAALRTSFLPAQVSPSFHLFLKGAKLRLDAEIGSLAIGDGDFIVLVPFTRTPQQHFSVSTASQDQGHCPPKQPEVSSAANSAWQDIMDDLSAMPASPQSDAASKDFYSSCDPCSGRFTEDMKAGQISTSGSSRKRRKTCKENGNGSPQMVSSSEANGTAEKHNISKKSGVAKSAAMLCHDMQPLKPAEMVEHLKQGLGKEGQIVHIQEISSREASFTELPCNLSEAMREALKSIGISRLYSHQSQAITSSISGRHIVVATSTSSGKSLCYNIPVLECLSQDLMACALYIFPMKALAQDQLRTLIKLKNASHIDVDVKIYDGDTPREDRLWIRDNARLLITNPDMLHVSILPYHGQFQRILSNLRYIVIDEAHSYKGAFGCHTALIIRRLKRICSNGIGQFG

SEQ ID NO: 47347 - protein, 71 aa, Zea Mays
MQHYMEARFMIRFLYTREHSSLPTARLPRLDVAPPALPPYFLYCCGYCYIIYRACFSRNLNGIRLAFCSTH

SEQ ID NO: 47348 - protein, 160 aa, Zea Mays
MGAKAAHRRGVLDLEAQFAFFRSQHRHPVNAAAHVLLTWPILFTNLLILHFLPLPLPVSPALALALAYAAAYLAVDRRAGAVAGLLFLAAWAASRALAARLGFALSWKLVLVTQLFCWTWQFLGHGLFEKKGPSVSDLPEVFLMEPFLIFLQPPLVLRVH

SEQ ID NO: 47349 - protein, 199 aa, Zea Mays
MGAKAAHRRGVLDLEAQFAFFRSQHRHPVNAAAHVLLTWPILFTNLLILHFLPLPLPVSPALALALAYAAAYLAVDRRAGAVAGLLFLAAWAASRALAARLGFALSWKLVLVTQLFCWTWQFLGHGLFEKKGPSVSDLPEVFLMEPFLIFLQVTTGTADKHILNKLFGYEPYPGFCKNVDRKIEADLRASESSSRGRTT

SEQ ID NO: 47350 - protein, 540 aa, Zea Mays
MGCAASRLEDEEAVKMCRDRRDLIKQALEQHNRFASSHIAYIESLKRVSVALQRFVAGDDHHELIFDTFISPIKQQKPEMLGLPYGSYEKRTIHVSRYLRSGPNPSVSIEEHPRPVETVRVESNYPMDNDSGMVDRFLPTHSSPVRSSSYYPPPYNRPSYPPPSPQEQESSPWDFFWNPFSSLDSFTYPRPRSSYDNVVTDDELVRLQRVREEEGIPELEEEDDECQEHVQMDRKEEKEEHDNADDDEDDDEDDGEECEHSDECMVSNVNFDANMKQETKGFESKGIQCTEAPEPCKTVELEIKAHKKELMRNRVANAEETPGFTVYLNRRPASLVEAMKDIDCQFSGICDAARKISVMLEASRAQYSTSNDLSAKMLNPVALLRSASSRSSSSRFLLAPSSSIDDLFNNETSSCYSEESCSTMSGSHHSTLDRLYTWEKKLYKEVKAGERLRIEYEKRLTHLRNQDVKGEEPISVDKTCAALRSLHTRLKVSIHTVQSVSRRIEILRDEELHPQLMELIVDTETISKHDVIRDFPSHLL

SEQ ID NO: 47351 - protein, 118 aa, Zea Mays
MNVAVPPQSPHLRLYDCAKSAIIKIFAFPYATVCDLYCDSGMDTDKWCDAQVGHYIGIDASASGVNYARELWENRRKPFTAEFIELDPSDDGFEAQVQEKGIQADMVCCMQHLQIVML

SEQ ID NO: 47352 - protein, 157 aa, Zea Mays
MDTDKWCDAQVGHYIGIDASASGVNYARELWENRRKPFTAEFIELDPSDDGFEAQVQEKGIQADMVCCMQHLQSCFENEERAKKLLNNVSSLPKPGGYFFGITPDSSTIWTKYQKNVEAAHNKGLKTVPNSIRSENYTITFEVEEEKYELKLYTKYT

SEQ ID NO: 47353 - protein, 51 aa, Zea Mays
MFHRLFHYSQKQMISSDGDECERSNEEDEDSKGLLLESEVAFMDYVREVRY

SEQ ID NO: 47354 - protein, 108 aa, Zea Mays
MFHSCWSFKIALHDRKGNEEVRVFVKVDGKEFWIGKLSVDKYPQCKTSLVFEKESRIDGIEERECVLDIPNVFLSLGINNMVIDVSNDESDEEVPQAIPLFPKADDFQ

SEQ ID NO: 47355 - protein, 192 aa, Zea Mays
MSLCCCCSTATGRGVLLPSLLLGRRHWTGHHLLNLRATTTVVSSSSAAATSSLSPPQQRQITVYVDTLLEWNQRMNLTAVTDEAEVMARHVADSLAMLPPLERVYRGRSTSAGGAIDGVRLIDVGSGAGLPGLILAVARPSWKFTLLESMRKRCTFLEHAVEAMNLSNVDVVCDRAEDRKLAKVLISEKVMI

SEQ ID NO: 47356 - protein, 291 aa, Zea Mays
MSLCCCCSTATGRGVLLPSLLLGRRHWTGHHLLNLRATTTVVSSSSAAATSSLSPPQQRQITVYVDTLLEWNQRMNLTAVTDEAEVMARHVADSLAMLPPLERVYRGRSTSAGGAIDGVRLIDVGSGAGLPGLILAVARPSWKFTLLESMRKRCTFLEHAVEAMNLSNVDVVCDRAEKNLSGQKVGQSLDFRESYDIVAARAVAELKVLAEYCIPLVRIGGLFIAAKGHDPHEEVRNAEGAIKKLGASMLELCNVESMGPHGQRTAVLYVKERATPKKYPRLPGTPSKAPL

SEQ ID NO: 47357 - protein, 459 aa, Zea Mays
MCFHEAINSSISGRTLQDPHASPLVLIYRASSTSGGRNASTISYYGNIAKWRKQEGDKIEVGDVICEIETDKATLEFESLEEGYLAKILAPEGSKDVQVGQPIAVTVEDVEDIKSIPADTSFGGEQKEEQSTESAPQNKVVNVSEQSSTVSRISPAAKLLIKEHGLDTSSLRASGPRGTLLKGDVLAALKSGINSSSTKEKKSPAQPSSQPTRDSQSQASSISQKDDTYEDIPNSQIRKVIAKRLLESKQTTPHLYLSKDVVLDPLLAFRNELKELHGIKVSVNDIIIKAVAIALRNVPEANAYWNNDKEETQKCDSVDISIAVATEKGLMTPIIRNADQKTISAISAEVKQLAEKARAGKLAPNEFQGGTFSISNLGMYPVDHFCAIINPPQSGILAVGRGNKVVEPVVDSDGTEKAAAVTKMSLTLSADHRVFDGQVGGKFFTELALNFSDIRRLLL

SEQ ID NO: 47358 - protein, 149 aa, Zea Mays
MERLLEARISSAVGLRHSLGLPSADTNAYRLINSEGDRLSGLIVDIFADVAVIASSAAWVEKYRQEIQFLVSKVNGVSHIKWRPSTDILKEEGLDISEHKEPASTCSTVKEPMCLLRLCCQYGCCLLRRRASFGQWLEREDLLLVGPCS

SEQ ID NO: 47359 - protein, 288 aa, Zea Mays
MYLSTSLVVLHHATLPYPGAFARHGAPPLMPIICCVSYNSNLDPAIEELEWPPSPCIVQVLSSRTKLWEERLFVREGEAAGNVADIRLDFQAVQENAVYWRGVLYVNYQSKFIMRLSKNLYLGKSEKGVYCALRYPSTVSFSIYILDESDGKTEWIMKPHYYLGSQGIDGPGPWTLQDINYNWDTQYEDSMEEKFEWDSDSDNVVENRSNGGYPCLPRIELLGFHPYKDVVFLSDTLRRGLAYHLDSSKIQDLGNLHPTYYGTEQGIQPFLLTAFPYTPWRGWFPEDT

SEQ ID NO: 47360 - protein, 315 aa, Zea Mays
MYLSTSLVVLHHATLPYPGAFARHGAPPLMPIICCVSYNSNLDPAIEELEWPPSPCIVQVLSSRTKLWEERLFVREGEAAGNVADIRLDFQAVQENAVYWRGVLYVNYQSKFIMRISLSNDKYQVIKPPVDFEWFEFENESRLSKNLYLGKSEKGVYCALRYPSTVSFSIYILDESDGKTEWIMKPHYYLGSQGIDGPGPWTLQDINYNWDTQYEDSMEEKFEWDSDSDNVVENRSNGGYPCLPRIELLGFHPYKDVVFLSDTLRRGLAYHLDSSKIQDLGNLHPTYYGTEQGIQPFLLTAFPYTPWRGWFPEDT

SEQ ID NO: 47361 - protein, 987 aa, Zea Mays
MAARSSAAAVAVLLLAAAGAAAAAGGAEGDGDGQALMAVKAGFRNAANALADWDGGRDHCAWRGVACDAASFAVVGLNLSNLNLGGEISPAIGQLKSLQFVDLKLNKLTGQIPDEIGDCVSLKYLDLSGNLLYGDIPFSISKLKQLEDLILKNNQLTGPIPSTLSQIPNLKTLDLAQNKLTGDIPRLIYWNEVLQYLGLRGNSLTGTLSPDMCQLTGLWYFDIRGNNLTGTIPEGIGNCTSFEILDISYNQISGEIPYNIGYLQVATLSLQGNRLIGKIPEVIGLMQALAVLDLSENELVGPIPPILGNLSYTGKLYLHGNKLTGHIPPELGNMSKLSYLQLNDNELVGTIPAELGKLTELFELNLANNNLEGHIPANISSCSALNKFNVYGNRLNGSIPAGFQKLESLTYLNLSSNSFKGQIPSELGHIVNLDTLDLSYNEFSGPVPPTIGDLEHLLELNLSKNHLTGSVPAEFGNLRSVQVIDMSSNNLSGYLPEELGQLQNLDSLILNNNSLAGEIPAQLANCFSLVSLNLSYNNFSGHVPSSKNFSKFPMESFMGNLMLHVYCQDSSCGHSHGTKGFVILLCIVLLAIYKTNQPQLPEKASDKPVQVSQEDSSITFLDHIAGPPKLVVLQMDMAVHTYEDIMRLTENLSEKYIIGYGASSTVYRCDLKSGKAIAVKRLYSQYNHSLREFETELETIGSIRHRNLVSLHGFSLSPHGNLLFYDYMENGSLWDLLHGPSKKVKLDWDTRLRIAVGAAQGLAYLHHDCNPRIVHRDVKSSNILLDGSFEAHLSDFGIAKCVPAAKSHASTYVLGTIGYIDPEYARTSRLNEKSDVYSFGVVLLELLTGRKAVDNESNLHQLILSKADDDTVMEAVDPEVSVTCTDMNLVRKAFQLALLCTKRHPADRPTMHEVARVLLSLLPPAAKPPASKAAAASAAAGDYTRFLATAADLRRGGVADDDTGDNSSSDEQWFVRFGEVISKHTLS

SEQ ID NO: 47362 - protein, 994 aa, Zea Mays
MAARSSAAAVAVLLLAAAGAAAAAGGAEGDGDGQALMAVKAGFRNAANALADWDGGRDHCAWRGVACDAASFAVVGLNLSNLNLGGEISPAIGQLKSLQFVDLKLNKLTGQIPDEIGDCVSLKYLDLSGNLLYGDIPFSISKLKQLEDLILKNNQLTGPIPSTLSQIPNLKTLDLAQNKLTGDIPRLIYWNEVLQYLGLRGNSLTGTLSPDMCQLTGLWYFDIRGNNLTGTIPEGIGNCTSFEILDISYNQISGEIPYNIGYLQVATLSLQGNRLIGKIPEVIGLMQALAVLDLSENELVGPIPPILGNLSYTGKLYLHGNKLTGHIPPELGNMSKLSYLQLNDNELVGTIPAELGKLTELFELNLANNNLEGHIPANISSCSALNKFNVYGNRLNGSIPAGFQKLESLTYLNLSSNSFKGQIPSELGHIVNLDTLNLSKNHLTGSVPAEFGNLRSVQVIDMSSNNLSGYLPEELGQLQNLDSLILNNNSLAGEIPAQLANCFSLVSLNLSYNNFSGHVPSSKNFSKFPMESFMGNLMLHVYCQDSSCGHSHGTKGFVILLCIVLLAIYKTNQPQLPEKASDKPVQVSQEDSSITFLDHIAGPPKLVVLQMDMAVHTYEDIMRLTENLSEKYIIGYGASSTVYRCDLKSGKAIAVKRLYSQYNHSLREFETELETIGSIRHRNLVSLHGFSLSPHGNLLFYDYMENGSLWDLLHGEAGFLSSLSFFFLNSCRFVLPITHGPRPFPGPSKKVKLDWDTRLRIAVGAAQGLAYLHHDCNPRIVHRDVKSSNILLDGSFEAHLSDFGIAKCVPAAKSHASTYVLGTIGYIDPEYARTSRLNEKSDVYSFGVVLLELLTGRKAVDNESNLHQLILSKADDDTVMEAVDPEVSVTCTDMNLVRKAFQLALLCTKRHPADRPTMHEVARVLLSLLPPAAKPPASKAAAASAAAGDYTRFLATAADLRRGGVADDDTGDNSSSDEQWFVRFGEVISKHTLS

SEQ ID NO: 47363 - protein, 316 aa, Zea Mays
MIWQYWRSAGLCSEGILQVDNVATPVVSNVFDGTGELIAGVASVQAVENFITSSWIYHFRHHIANAPLVMLDANLSPESLKAACIMAYEFGVPVLFEPVSVVKCRRIAPVAEYITCTSPNEIELVAMANSLSPSVKYNFHTIEQFKEKADTVEYIFQMLSPAMFFLLEKGIKLLIVTLGSNGVFICCKEHTNFMKDQHKCKQTPFSRQLLEKMDGCFPSNNLVNLCRESSSRTCVFHLPAISASVISLTGAGDCLVGGALSALCAGFDIIQSVAVGVAIAKASVESEANIPDDISAASIADDAQSVLHSAKVLWCK

SEQ ID NO: 47364 - protein, 246 aa, Zea Mays
MSKEGLQKVIQQEQADNKMQGNSLSTEDLRDLFIFHEHVRSEIHKNLKCSRCDKDGDPALDGTGFAATGHKASIPGVQDYADIGGFGEISGCLQKMNSTHQQIGRPTEEDLGSWGHHCDPSTVPDTILQCSAGEEVSFVFTNQVDGKLVPVESMVRSAAHQQNGIAATGEKGVQIPNSPSKPGKQSLNGKNLKMGFHLKNSSLKCSTKSRPSPNCLQGLMKTSPFLDQPQIKKLHVASDISDDDFV

SEQ ID NO: 47365 - protein, 647 aa, Zea Mays
MLKNGKSKDHASEELHVFLGDDTAVFISWLWGHLSSNMHLYVQPQERTREVKDDEAPKEVSGREKSSDVLPRSKHQTHSGHTIESSEATSRRRSNREWKGIGRKGNEKFPLRNVLTDILHGEDKRSQKSNEVRPPPSKQQNDRKRERDDETHQTKKDSSSRSMLGDGASRRLLQFAVRDAVKAVQPTSTSAEPASKRLCSVVATTSTEHMRDRRSERSQDYLNDRRSERSQDNLSDRRSERTRPMLQVHGAALALRAAAEAAADSAKVRSTGSVFKRLGQGNVVKQPSRSREEKRDYEDFEPVTIADEHDSDQYVNNEESEEESGELTMADRVAGSGMYVDSSSEDDMDRDEGITRYQTSLSHDDTFSPFAEKKTVSAPCSVELETNAIRPSSVNDEEQPVPSTPTASKAVAISVDVNMVEPPSYATPKDVHVVEKPYVAPMNSNAASIATNAKELGHAEVQKDSQRSAPSVPVSYSTAHPMEDADSRTLYVNNVHFAATKDSLSRHFNKFGAVLKVVIVTNAATGQPTGSAYVEFLHKESAERALSLNGTSFMTRILKVVRRSSHEAAHFYGWPGSGRSSIYGRHGRMAYPRAVIPGGSFRGRAPMKAGARSLQWKREPSGTDSSAGAKTDMSVAFSSEQVLPRAT

SEQ ID NO: 47366 - protein, 1265 aa, Zea Mays
MCRPISRSTLTTLACLLDGGEIRGAGNAWICPEGEGDDSAMDINLSGTILLDKVLHRYIPGGIQLIPLKIGELNGETRLSGSLIRPKFDIKWAAPNAEDSFSDARGNIVIAHDYIMVNSSSVSFDLNSRVQTSYINDYLLNKETYQMKKIMPLIVEGVDLDLRMRGFEFAHIASSIPFDSPRPLHLKASGRVKFQGKIMKSSNIADGNINGVLQSNIDQNKLETNASKLVGDISLSGIKLNQLMLAPQSTGFLSISRDSMMLNATGRPDENFSIEVNGPLLFTSNEVIQDVRLLSIFLQKGQLRSNICYHPENLTSLEVRNLTLDELEFASLRGFVQKAELQLNFQKRRGHGLLSIIRPKFSGVLGEALDIAARWSGDVITMEKSILEQANSKYEVQGEYVFPGTRDRFPVESQSNGFIEKAMGGHLGSIMSSMGRWRMRLEVPGAEVAEMLPLARLLSRSTDPVIRSRSKELFMQCLHSVGFNAESLNDQLKALEIYHDWLDDDTMEDIAFPGLAELRGYWRGSLDASGGGNGDTMADFDFNGEDWEWGTYKTQRVLASGSFSNNDGLRLDKLFIQKDNATLHADGSILGPLTNLHFAVLNFPVGLIPALVQAIESSTTDSIHFLRQWLTPIKGILHMEGDLRGTLAKPECDVQIRLLDGTIGGIDLGRAEVLASVTPTSRFVFDANFEPTIQSGHVNIQGSIPVTYVDNSSIEESPEEADGKQGIIRIPVWARDRGSSNEISEARMVRDKTEEGWEFQLAEKLKGLSYNMLEPGEVRIDADIKDGGMMLITALSPYANWLQGYADVFLQVKGTVDQPVVDGSATFNRAIVNSPFLRTPLTNFAGTIQVISNRLCISSMESRVGRKGRLSMKGSLPLKNSEPSANDKIDLKCEVLDIRAKNILSGQVDSQLQVTGSILRPDLSGMIRLSHGEAYLPHDKGNGAAVTRLTSNKSSYLLSGFDQSTTSQDVSRILGSLSTSAERDQSDTEKTLEHGSFNPNIDARLNDLKLTLGPELRIVYPLILNFAVSGDLELNGMVHPKYLRPKGILTFENGEVNLVATQVRLKNDHLNAAKFEPDLGLDPVLDLVLVGSEWQFKIQSRASMWQDNLVVTSTRSVDQDVLSPSEAAKVFESQLAESLLEGDGQLAFKKLATATLETLMPRIEGKGEFGQARWRLVYAPQIPSLLSVDPTVDPLKSLANNISFATEVEVQLGKRLQASVVRQMKDSEMAMQWTLIYQLTSRLRVLFQSTPSNRLLFEYSATSQE

SEQ ID NO: 47367 - protein, 1435 aa, Zea Mays
MSKGDSFPSIHGQLDVKGLAFQILDAPSSFSDIVAKLSFRGQRVFLHNASGWFGDAPVEASGDLGLNPEDGEFHLMCQVPSVEVNALMRTMKMKPLMFPLAGSVTAVFNCQGPLDAPVFVGSGIVSRKSFSVSGMPPSAASEAVMQNKEAGAVAAFDHIPFSHVSANFTFNLDNSVADLYGIRACLLDGGEIRGAGNAWICPEGEGDDSAMDINLSGTILLDKVLHRYIPGGIQLIPLKIGELNGETRLSGSLIRPKFDIKWAAPNAEDSFSDARGNIVIAHDYIMVNSSSVSFDLNSRVQTSYINDYLLNKETYQMKKIMPLIVEGVDLDLRMRGFEFAHIASSIPFDSPRPLHLKASGRVKFQGKIMKSSNIADGNINGVLQSNIDQNKLETNASKLVGDISLSGIKLNQLMLAPQSTGFLSISRDSMMLNATGRPDENFSIEVNGPLLFTSNEVIQDVRLLSIFLQKGQLRSNICYHPENLTSLEVRNLTLDELEFASLRGFVQKAELQLNFQKRRGHGLLSIIRPKFSGVLGEALDIAARWSGDVITMEKSILEQANSKYEVQGEYVFPGTRDRFPVESQSNGFIEKAMGGHLGSIMSSMGRWRMRLEVPGAEVAEMLPLARLLSRSTDPVIRSRSKELFMQCLHSVGFNAESLNDQLKALEIYHDWLDDDTMEDIAFPGLAELRGYWRGSLDASGGGNGDTMADFDFNGEDWEWGTYKTQRVLASGSFSNNDGLRLDKLFIQKDNATLHADGSILGPLTNLHFAVLNFPVGLIPALVQAIESSTTDSIHFLRQWLTPIKGILHMEGDLRGTLAKPECDVQIRLLDGTIGGIDLGRAEVLASVTPTSRFVFDANFEPTIQSGHVNIQGSIPVTYVDNSSIEESPEEADGKQGIIRIPVWARDRGSSNEISEARMVRDKTEEGWEFQLAEKLKGLSYNMLEPGEVRIDADIKDGGMMLITALSPYANWLQGYADVFLQVKGTVDQPVVDGSATFNRAIVNSPFLRTPLTNFAGTIQVISNRLCISSMESRVGRKGRLSMKGSLPLKNSEPSANDKIDLKCEVLDIRAKNILSGQVDSQLQVTGSILRPDLSGMIRLSHGEAYLPHDKGNGAAVTRLTSNKSSYLLSGFDQSTTSQDVSRILGSLSTSAERDQSDTEKTLEHGSFNPNIDARLNDLKLTLGPELRIVYPLILNFAVSGDLELNGMVHPKYLRPKGILTFENGEVNLVATQVRLKNDHLNAAKFEPDLGLDPVLDLVLVGSEWQFKIQSRASMWQDNLVVTSTRSVDQDVLSPSEAAKVFESQLAESLLEGDGQLAFKKLATATLETLMPRIEGKGEFGQARWRLVYAPQIPSLLSVDPTVDPLKSLANNISFATEVEVQLGKRLQASVVRQMKDSEMAMQWTLIYQLTSRLRVLFQSTPSNRLLFEYSATSQE

SEQ ID NO: 47368 - protein, 74 aa, Zea Mays
MLFYMCQCGFYIYSIGALVAWETRRKDFAVMMSHHVITSTLIGVSYLTGLVVLDLLLLPLQWQLSFHHILEEAG

SEQ ID NO: 47369 - protein, 177 aa, Zea Mays
MNNEARQAKIVKFSESIWKLTYYASVQAWVLMIIKQEPWSLDMMQYFDGWPNQPIVSSLMLFYMCQCGFYIYSIGALVAWETRRKDFAVMMSHHVITSTLIGVSYLTGFFRIGTIILALHDASDVFLETAKLCKYTEKELGASLFFGLFAISWLLLRLIYFPFWIIKASRFVFYFSL

SEQ ID NO: 47370 - protein, 457 aa, Zea Mays
MDQIATPDETAHASAPSVHKLFDAKLGHHSVMDGTLASTSQSSNIKTQLIRSSSLSRSISVNLEKRSPESDPESPQSHVSHPKFAEPMFSNSSTFCTSLFSSSSTTEPCRQMGTLPFLPHPPKCEQQVSAGHSSSSSLLLSGDTGLDVAEQSDDLNDLLNLSGDASDGSFHGENNALAFDEQMEFQFLSEQLEIAITDNEKNPHLDDIYGTPPQLSSLPVSSCSNQNLGSPVKVQLSSSQSSSSSATANKSRLRWTLELHERFVEAVKKLEGPEKATPKGVLKLMKVEGLTIYHVKSHLQKYRLAKYIPEPKDDKKASSEDKKAQLGKGSIDSSKNKNLQVAEALRMQIEVQKQLHEQLEVQRQLQLRIEEHARYLQKILEEQQKAGNVPLKAPTKAQATKSSPESTSDERTESEVDTISPRPPKNRNPGVDAECKSPGRIKRTKVQADLENEGLCS

SEQ ID NO: 47371 - protein, 208 aa, Zea Mays
MILGIFSYDTVFRICLQTTQPNADDKYVAIDKYMVLITCIICQVFLENSQRSELFFDLTNHPALPRCRATAPAYSATATAPEPKDNASSRFLGVEAKTLLYTRLTDVLSKEALFYIVIFLFIAFFGAFAYVLYPMCDAIHPITLDDHLLASLGPNFLGFVAILRVWSFYLFYVMAELRGASSYSSSSGGLPIRLLQLKRPKSSTHSLG

SEQ ID NO: 47372 - protein, 425 aa, Zea Mays
MEMASARRRAKPPQAVGGGGDQLALWAACVLLSSLSLLVAAAFSTGFGGAARLTLEAGPDRDREAAGALVTRATGAGSGRYCDEDDDLIDSMSVDGEWVLLRGAAERLYGPGQCPFVDEGFRCRENGRPDGDYAEWAWRPRRCALPRFDARRLLEMLRNRRLVFVGDSIGRNQWESMLCMLASAVADDRDKQASPGGASIYEENGSPITKRKGFLSFRFRDYNCTVEHYRSPYLVRRGRPPRHSPKRVATALRLGSMDAMAPRWKDADVLVFNTGHWWNHERLQQLGCYFQDGKTLRLNMSVEDAYERALNTLQKWVQKEVNTTKTLVVLRTYSPAHVRASNGGGGGCVRETAPELNTSRIALHRWPGLLNPSPALIEAAKKRQLATMHVLNVTLMTAQRRDGHPSVYNVRLPSPAAAQEQQHQS

SEQ ID NO: 47373 - protein, 146 aa, Zea Mays
MKFGKSLSGQIVETLPEWRDKFLSYKDLKKRLKLIGAGNGAERQPKRARRDDSGEADAAAAAAAMTPEEAEFMQLLEAELDKFNSFFVEKEEEYIIRQKELQDRVARAAGRESKEELMRVRKEIVDFHGEMVLLENYSALNYTGFG

SEQ ID NO: 47374 - protein, 550 aa, Zea Mays
MCYFSSMDVSRKECAFYLVSLPVSYRYEYLMAETIFSQLLLLPNPPFKPIYYTLVIIDLCKALPGAFPSVVVGAVHALFDRISNMDMECRTRLILWFSHHLSNFQFIWPWQEWSYVKDLPKWAPQRVFVQEVLEREVRLSYFEKIKQSIEDAAELEELLPPKAGPNFKFHSDESNESTDGLKLSKELIGLIRGKKSTYDIILWVEEQIIPKNGTEFALDVVSQTLLDMGSKSFTHLVTILERYNKIISKLCPNEEMQLLLMNGVSAYWKNSTQMTAIAIDRMMGYRLISNLAIVKWVFSPANVEQFHVSDRPWEILRNAVSKTYNRISDLRKEIQSLKKGLQVAKEASAKNRKELEEAKSVLEIVEGQPAPAERPGRIRRLESHVKNAEDEERTLEESLEAKGVLLARAHEESKDLLKLLFKSFVDVLTERLPPVSVDGEIPNLRSGDQNVNFAAQNSEAATMEIDNENGADNNSEPNERNTKNAYNVGELEQWCLCTLGYLKSFSRQYASEIWSNIAMLDEVFVGDVHPLIRKAAFSGLRRFTNEGSHP

SEQ ID NO: 47375 - protein, 862 aa, Zea Mays
MSAGWRTLLLRIGDRCAEYGGSADHKEHIETCYGVLSREYEHSRDAIFEFLLQCTEQLPHKIPFFGVLIGLINLENEDFSKAIVDTTQANLEDALHNENRDRIRILLRFLSGLMCSKVVVPSSIIETFETLLSSAVTILDDETGNPSWQPRADFYVYCILASLPWAGPELFEQVPDEFERVLFGIQSYISIRRHFDDIAFSVFETDEGHSPNKKDFMEDLWERIQALSRNGWKVKSVPKPHLPFEAQLVAGKSHRLSPISCPPPTPSQSSSEMLKGQEKHEADMKYPQRLRRLHIFPMNKAENMQPVDRFVVEECILDVLLFFNGCRKECAFYLVSLPVSYRYEYLMAETIFSQLLLLPNPPFKPIYYTLVIIDLCKALPGAFPSVVVGAVHALFDRISNMDMECRTRLILWFSHHLSNFQFIWPWQEWSYVKDLPKWAPQRVFVQEVLEREVRLSYFEKIKQSIEDAAELEELLPPKAGPNFKFHSDESNESTDGLKLSKELIGLIRGKKSTYDIILWVEEQIIPKNGTEFALDVVSQTLLDMGSKSFTHLVTILERYNKIISKLCPNEEMQLLLMNGVSAYWKNSTQMTAIAIDRMMGYRLISNLAIVKWVFSPANVEQFHVSDRPWEILRNAVSKTYNRISDLRKEIQSLKKGLQVAKEASAKNRKELEEAKSVLEIVEGQPAPAERPGRIRRLESHVKNAEDEERTLEESLEAKGVLLARAHEESKLLFKSFVDVLTERLPPVSVDGEIPNLRSGDQNVNFAAQNSEAATMEIDNENGADNNSEPNERNTKNAYNVGELEQWCLCTLGYLKSFSRQYASEIWSNIAMLDEVFVGDVHPLIRKAAFSGLRRFTNEGSHP

SEQ ID NO: 47376 - protein, 170 aa, Zea Mays
MDSMEDAVSGTAAQGDLAEVVARAGAMAAAASHHHHRRPPSPAAADHGHIVSAARATARSQIMLVPAAACYDDETRPAAACGDAVMFDAPSSSMAAAVGPYHHLSSSSAALAPAHGGYWLPPQQISQEHARDGGLDEPPVVTRISPVTTPPPPSHHHQIMNRLVDLLDWK

SEQ ID NO: 47377 - protein, 115 aa, Zea Mays
MHSWKSGGGRMPPKIIGSCRTDAVEMHNSFLILETSERMILGRCSHGGWDTGQSVSLLLCCPSRTIVSSVHNLYYFLRIECRRPQWFFMFLISLSAFSVTTTLHMLADLFIYYSS

SEQ ID NO: 47378 - protein, 246 aa, Zea Mays
MAPEKPRKEQEEEEDELMLEDGGIEESPRRSFEDCGDSDEEDDDNDEERDGDGVGSPRSFQSHKWPQSYRETTDTYTIAASPSFGYLGPSTSKYSLLDLGRSGLGSDLKLPLLSDKADGKQDSVKTLPKTLGSIRDERVSFQLQHTGELYITQGCNVTQTVFNGINVLAGVGLLSTPFTIHEAGWTGLAVLVCFAIVCCYTGILLKHCFESKDGISSYPDIGEAAFGRIGRLLISIILYTELYRVV

SEQ ID NO: 47379 - protein, 496 aa, Zea Mays
MAAGLLLKMVGFCFWALFWLAGSATVSTTTPALAGGGEAVVVDARSAIAVTDDDFVCATLDWWPPEKCDYGTCSWGLASLLNLNLSNKILVNAVKAFSPLKLRLGGSLQDMLIYGTGDTRQQAPCAPFVKNASAMFGFSQGCLPLRRWDELNAFFQKTGPRIVFGLNALNGRVPMPDGSLGGPWNYTNAASFIRYTVSKGYDVHGWELGNELSGSGVGARIDADQYAADVIALKHIVDSAYQGVDDHLVQKILDPSYLDGEASTFSNLQGILKSAGTSAVAWVGEAGGAYNSGHHLVTDAFVFSFWYLDQLGMSSKYDTKSYCRQTLVGGNYGLLNTSTFEPNPDYYSALLWHRLMGTKVLSTAFNGTNKIRGYAHCAKNSEGITLLLINLDGSSTNRIYVTSQGAHAQSGRKKGSEGLGEAAAAALTRQEYHLTPKDGNLQSQQVLLNGNALATDADGEIPELEPVQVEGTQPITVGPYSIVFAHVPSFYAPACL

SEQ ID NO: 47380 - protein, 334 aa, Zea Mays
MASTKAPGPGEKHHSIDAQLRQLVPGKVSEDDKLIEYDALLVDRFLNILQDLHGPSLREFECYEVSADYEGKGDTTKLGELGAKLTGLAPADAILVASSILHMLNLANLAEEVQIAHRRRNSKLKKGGFADEGSATTESDIEETLKRLVSEVGKSPEEVFEALKNQTVDLVFTAHPTQSARRSLLQKNARIRNCLTQLNAKDITDDDKQELDEALQREIQAAFRTDEIRRAQPTPQDEMRYGMSYIHETVWKGVPKFLRRVDTALKNIGINERLPYNVSLIRFSSWMGGDRDGNPRVTPEVTRDVCLLARMMAANLYIDQIEELMFELYVALQR

SEQ ID NO: 47381 - protein, 633 aa, Zea Mays
MPASLLPPTFLPHHLRRLAPAGCTTSSVTSSSVSIPASRYDFEPLLAYLSSPSVSASLTSPSPPASVPAPEHRLAASYSAVPSHEWHALLRDLAASDASLPLAFALLPFLHRHRLCFPLDLLLSSLLHSLSVSGRLLPHSLLLSFPPSLSDPPSPLLLNSLLAASAAASRPAVALRLLSLLREHDFLPDLASYSHLLASLLNTRDPPDAALLERLLGDLRESRLEPDAPLFSDLISAFARAALPDAALELLASAQAIGLTPRSNAVTALISALGTAGRVAEAEALFLEFFLAGEIKPRTRAYNALLKGYVRIASLKNAEQVLDEMSQCGVAPDEATYSLLVDAYTRAGRWESARILLKEMEADGVKPSSYVFSRILAGFRDRGDWQKAFAVLREMQASGVRPDRHFYNVMIDTFGKYNCLGHAMDAFNKMREEGIEPDVVTWNTLIDAHCKGGRHDRAAELFEEMRESNCPPGTTTYNIMINLLGEQEHWEGVEAMLSEMKEQGLVPNIITYTTLVDVYGRSGRYKEAIDCIEAMKADGLEVSILVLNSLINAFGEDRRVVEAFSVLQFMRENGLRPDVITYTTLMKALIRVEQFDKVPVIYEEMITSGCAPDRKARAMLRSGLKYIKHMRVA

SEQ ID NO: 47382 - protein, 253 aa, Zea Mays
MMKKKNATIDIDDANVVEVDRSARRLHWTHDEEVGLVLFGRASLQKLQLWFSSFTIKQLQQIVKHIMSRYNDRYDHNNRYDRHGRHGSNTKLYVGQISPYTRTQDLEDIFRKYGRLRNVDMKREFGFVEFTDPRDADDARHDLDGRIFDGSHLIVEFARGAQRGPGGVPLDGKGPSFPGRCYNCGMDGHWAWEELLEVCISSPWEGPREKLLKVSISLPWKGPREKLLEVSISLSSQGQKLELQSVALAKEQL

SEQ ID NO: 47383 - protein, 469 aa, Zea Mays
MEYERIHQKAQPGALSPTKLRMKILGAHNRVRVITSNSSSRTSPAKTIEASQAQNRLLVCDVLEEDSADSTKHPSATNKTEAVEKVQKDPAVDISQVQNASTSSAAKPATGSSSMIQIHPLRPAEEDSTTECDSGLDNASTSSFEFHGVEKAAATQNPAAGYLSRQTSISSKWNDAEKWIVSRQNVSQKNNVAKGALQNQTVNQMSSAAARGAVVPKISARPVQKMKRVNPALSAPRSILERLSFASYQPKLVRHADVCPVSNAGANSEHHKATDTGSSIEVKPCNDTNDIPTVQSSVSVRDVGTEMTPIPSQEPSRTGTPLGSRTPTRSPNCSVPSTPVGGRSIASPPGEDCTDDGPFFHRKCGVHANELSDTETRLKTRQEIAALGIQLGKMNIATWASKEELELVSAAPSIADLERIRKEYAARAASYEEAENTKHTARFKKEEVKIEAWEGRQRAKIEYEMRRIE

SEQ ID NO: 47384 - protein, 221 aa, Zea Mays
MSRRGRRARTQSRTAGQRPRASSALTSRGASRNSVTPATRRPTPTPWCRRSTSPWSTTASSARASRTPAASASCSPSICAPSCTCARSRTRRRTRGSCSRTGSSFTSSASKGARVVRQCRMPWWCRNHSSTSLKRSSERRSKLFLTQETSRCSSTAREARQACCVPHRTGCVVGCLRKLQKWCLSSVFDEYLHFAAAKARSTDQRFMELFDASSLTHLAAS

SEQ ID NO: 47385 - protein, 204 aa, Zea Mays
MYCNLKSYQSIQLRTLNPYRASLVFSEYLLSGQVPSVKEVNDEEPLFFNLSLGASRQSKILSAEAKDAADRICRRLQMGSKLSEIIESKEDACALFDLYKNEQYLLMDYKGKFCIVLKEGSSPEDMLKSLFHVNYLYWLERYMGFKPSNVASECRPGGRLEVSLDYAQREFSHVKHDGSDGGWVMDGLIARPLPVRIRIGDGTS

SEQ ID NO: 47386 - protein, 339 aa, Zea Mays
MSMPQSFLLLPSFLPPPPLVRLASRPPSSPSLTALRFHRVDAKLSPPLLAASHSPPGGFRGYCDSGGSDGGSGGDGGRGMDSPGPGDGWWWERWLQALHPEFFLLFLLLQSGAASALAEALSTSGDDAGDVWEVRGGKRTRLMPDPTWTSYLIAGDDGTKREDGDEKVGSISKDLAALRRQLGRSWRRYAEVAVHLLLPDGYPHSVSSDYLNYSLWRGVQGVASQISGVLSTQALLYAVGLGKGAIPTAAAVNWVLKDGLGYLSKIMLSKFGRHFDVNPKGWRLFADFLENMAYGLEILTPVFPHLFVPIGAAAGAGRSAASLIQKLLLRWICSTKKLC

SEQ ID NO: 47387 - protein, 1053 aa, Zea Mays
MLPNLITQVVNCKVSLKRLEDLLLAEERLLLPNPPIDPDLPAISIKNGYFSWESEAQRPTLSNVNLDVPVGSLVAIVGSTGEGKTSLISAMLGEIPPVSGSGTSVVIRGSVAYVPQVSWIFNATVRDNILFGSPFQPPRYEKAIDATSLRHDLDLLPGGDLTEIGERGVNISGGQKQRVSMARAVYSDSDVYIFDDPLSALDAHVGRQVFDKCIKGELQHKTRVLVTNQLHFLPYVDKILLIHDGVIKEEGTFDELSNSGELFKKLMENAGKMEEQVEEDESKPKDVAKQTVNGDVTIADEGSQKSQDSSSKTKPGKSVLIKQEERETGVVSARVLSRYKNALGGIWVVSILFFCYALTEVLRISSSTWLSIWTDEGSLKIHGSGYYNLIYGILSFGQVLVTLSNSYWLIISSLRAAKRLHDAMLRSILRAPMVFFHTNPLGRIINRFSKDMGDIDRNVAVFVNMFMAQISQLLSTFVLIGFVSTMSLWAIMPLLILFYAAYLYYQATSREVKRLDSITRSPVYAQFSEALNGLSTIRAYKAYDRMANINGRSMDNNIRFTLVNMGANRWLAIRLETLGGIMIWFTATFAVMQNQRAENQKAFASTMGLLLTYTLNITNLLTAVLRLASLAENSLNAVERVGTYIELPSEAPPVIEDHRPPPGWPSSGVIKFEDVVLRYRPELPPVLHGISFVINGSEKVGIVGRTGAGKSSMLNALFRIVELERGRILIDDCDTSKFGIWDLRKVLGIIPQAPVLFSGSVRFNLDPFNEHNDADLWEALERAHLKDVIRRNSLGLDAEVSEAGENFSVGQRQLLSLARALLRRAKILVLDEATAAVDVRTDALIQKTIREEFKSCTMLIIAHRLNTVIDCDRLLILSSGQVLEFDSPENLLSNEGSAFSKMVQSTGPSNAEYLKSLVFASGEERSRREEIKLQDIQRRWVASNRWAEAAQFALARSLTSSHSDLLALEAAEGNNILRRTKDAVITLQSVLEGKHNTEIDESLTQYQVPADRWWSSLYKVIEGLATMSRLGRNRLQQPSYNFENNNSIDWDQM

SEQ ID NO: 47388 - protein, 1496 aa, Zea Mays
MGSLALLHLRWYIRFVVIYMMVGEAAMFNLVLSVRQYYSSSSIFYLYCSEIVCQFLFGILMVVYLPSLDPYPGYTPIRNEVLVDNTDYEPLPGGEQICPERHANIFARIFFSWMTPLMQQGFRRPITDKDIWKLDSWDETETLYSQFQKRWNDELQKPNPWLLRALHSSLWGRFWLGGFFKIGNDASQFVGPLVLNLLLESMQKGDPSWSGYIYAFSIFAGVSLGVLAEAQYFQNVMRVGFRLRSTLIAAVFRKSLRLTNDSRRKFASGRITNLISTDAESLQQVCQQLHSLWSAPFRIVISMVLLYAQLGPAALVGALMLVLLFPIQTVIISKMQKLTKEGLQRTDKRISLMNEVLAAMDTVKCYAWEQSFQSKVQDIRDDELSWFRRAQLLAALNSFILNSIPVVVTVVSFGVYSLLGGDLTPAKAFTSLSLFAVLRFPLFMLPNLITQVVNCKVSLKRLEDLLLAEERLLLPNPPIDPDLPAISIKNGYFSWESEAQRPTLSNVNLDVPVGSLVAIVGSTGEGKTSLISAMLGEIPPVSGSGTSVVIRGSVAYVPQVSWIFNATVRDNILFGSPFQPPRYEKAIDATSLRHDLDLLPGGDLTEIGERGVNISGGQKQRVSMARAVYSDSDVYIFDDPLSALDAHVGRQVFDKCIKGELQHKTRVLVTNQLHFLPYVDKILLIHDGVIKEEGTFDELSNSGELFKKLMENAGKMEEQVEEDESKPKDVAKQTVNGDVTIADEGSQKSQDSSSKTKPGKSVLIKQEERETGVVSARVLSRYKNALGGIWVVSILFFCYALTEVLRISSSTWLSIWTDEGSLKIHGSGYYNLIYGILSFGQVLVTLSNSYWLIISSLRAAKRLHDAMLRSILRAPMVFFHTNPLGRIINRFSKDMGDIDRNVAVFVNMFMAQISQLLSTFVLIGFVSTMSLWAIMPLLILFYAAYLYYQATSREVKRLDSITRSPVYAQFSEALNGLSTIRAYKAYDRMANINGRSMDNNIRFTLVNMGANRWLAIRLETLGGIMIWFTATFAVMQNQRAENQKAFASTMGLLLTYTLNITNLLTAVLRLASLAENSLNAVERVGTYIELPSEAPPVIEDHRPPPGWPSSGVIKFEDVVLRYRPELPPVLHGISFVINGSEKVGIVGRTGAGKSSMLNALFRIVELERGRILIDDCDTSKFGIWDLRKVLGIIPQAPVLFSGSVRFNLDPFNEHNDADLWEALERAHLKDVIRRNSLGLDAEVSEAGENFSVGQRQLLSLARALLRRAKILVLDEATAAVDVRTDALIQKTIREEFKSCTMLIIAHRLNTVIDCDRLLILSSGQVLEFDSPENLLSNEGSAFSKMVQSTGPSNAEYLKSLVFASGEERSRREEIKLQDIQRRWVASNRWAEAAQFALARSLTSSHSDLLALEAAEGNNILRRTKDAVITLQSVLEGKHNTEIDESLTQYQVPADRWWSSLYKVIEGLATMSRLGRNRLQQPSYNFENNNSIDWDQM

SEQ ID NO: 47389 - protein, 980 aa, Zea Mays
MGFDPLEWYCQPVKDGVWSHVVENAFGAYTPCGTDTLVVCISYLALFGVCFYRIWRTTRDYTVQRYKLRSPYYNYLLGLLVVYCIAEPLYRIITGTSIMNLDGQPGLAPFEIVSLIIESVAWCCMLVMILLETRIYINEFRWYIRFVVIYMMVGEAAMFNLVLSVRQYYSSSSIFYLYCSEIVCQFLFGILMVVYLPSLDPYPGYTPIRNEVLVDNTDYEPLPGGEQICPERHANIFARIFFSWMTPLMQQGFRRPITDKDIWKLDSWDETETLYSQFQKRWNDELQKPNPWLLRALHSSLWGRFWLGGFFKIGNDASQFVGPLVLNLLLESMQKGDPSWSGYIYAFSIFAGVSLGVLAEAQYFQNVMRVGFRLRSTLIAAVFRKSLRLTNDSRRKFASGRITNLISTDAESLQQVCQQLHSLWSAPFRIVISMVLLYAQLGPAALVGALMLVLLFPIQTVIISKMQKLTKEGLQRTDKRISLMNEVLAAMDTVKCYAWEQSFQSKVQDIRDDELSWFRRAQLLAALNSFILNSIPVVVTVVSFGVYSLLGGDLTPAKAFTSLSLFAVLRFPLFMLPNLITQVVNCKVSLKRLEDLLLAEERLLLPNPPIDPDLPAISIKNGYFSWESEAQRPTLSNVNLDVPVGSLVAIVGSTGEGKTSLISAMLGEIPPVSGSGTSVVIRGSVAYVPQVSWIFNATVRDNILFGSPFQPPRYEKAIDATSLRHDLDLLPGGDLTEIGERGVNISGGQKQRVSMARAVYSDSDVYIFDDPLSALDAHVGRQVFDKCIKGELQHKTRVLVTNQLHFLPYVDKILLIHDGVIKEEGTFDELSNSGELFKKLMENAGKMEEQVEEDESKPKDVAKQTVNGDVTIADEGSQKSQDSSSKTKPGKSVLIKQEERETGVVSARVLSRYKNALGGIWVVSILFFCYALTEVLRISSSTWLSIWTDEGSLKIHGSGYYNLIYGILSFGQSHSQIHTG

SEQ ID NO: 47390 - protein, 294 aa, Zea Mays
MAPLRRLRQSGWSGSRALRQALGRQWAPSRCSGSSLAPRPRPSASSLTAREPFSIPSTRASSWCGSCPLLSYQPGFIFIMLGFGADGAPSLVQMRTPPPSVLGIPNIPCSTSGYSYTILKLGPLQFTRKGLSLASTSASLSFAIFQSASLCLTTTTPEQLASALWWFMSPLKHIGVPVPEIILTLLLSLRFINLVFDEVRNSALAIVARRINWKKLTAMETIDIFFSYVQRIFKNIFDHAEQISKAMVARGFRGNPINHKIYFLTESSFGIADFFSLLCLLVVVSLASFSDQLV

SEQ ID NO: 47391 - protein, 79 aa, Zea Mays
MLCTPSSARAALCTGSVVERISSLVCSGCRWRFLSSLCLAWLDVESYQIKISLMCFVIGWNHVSQQCWEIKIKMYLSLQ

SEQ ID NO: 47392 - protein, 544 aa, Zea Mays
MLLMNVDTEVLVKDSVGVTGKEMMNNDILLTEKNTSMDPSALVQLDDGGTSSNVPSSSQNITLALDHELQHLSLESKLKNSKTNVKKTASVSHYKPEPWMLQSENQEIRNQLSLAIVGHVDSGKSTLCGRLRHALGLISKKQMHKYEKEAKEKGKGSFAYAWAMDESSDERERGITMTVAVAYFNSEKYRVVLLDSPGHKDFVPNMISGATQADAAILVVDASIGSFEAGMGVNGIGQTKEHSQLVRSFGVENLIVAVNKMDGVEYSKERFQSVKSQLGVFLRSCGYKDSSVTWVPLSAMANENLVTACSDTRLLSWYNGGCLLQAIDSLPPPRRDVSSPLRLPICDVIASHTLGQVAVCGKVESGGIRTGCKVLVMPSGDIATVKTMERDSSTCSLARAGDNVAVGLHGVDPGHIAAGGVLCHPDFPVRVACHLELKILVLEITVPILVGLEFELHIRHAKSSARLVRILSSLDQKTGRALKKAPRLLTARQAALVEVRLDREACVEEFSTLKALARVFLRSQGSTVAVGVVTRVLDRALDMG

SEQ ID NO: 47393 - protein, 557 aa, Zea Mays
MDALHKTFMTRKKRHINIVDTEVLVKDSVGVTGKEMMNNDILLTEKNTSMDPSALVQLDDGGTSSNVPSSSQNITLALDHELQHLSLESKLKNSKTNVKKTASVSHYKPEPWMLQSENQEIRNQLSLAIVGHVDSGKSTLCGRLRHALGLISKKQMHKYEKEAKEKGKGSFAYAWAMDESSDERERGITMTVAVAYFNSEKYRVVLLDSPGHKDFVPNMISGATQADAAILVVDASIGSFEAGMGVNGIGQTKEHSQLVRSFGVENLIVAVNKMDGVEYSKERFQSVKSQLGVFLRSCGYKDSSVTWVPLSAMANENLVTACSDTRLLSWYNGGCLLQAIDSLPPPRRDVSSPLRLPICDVIASHTLGQVAVCGKVESGGIRTGCKVLVMPSGDIATVKTMERDSSTCSLARAGDNVAVGLHGVDPGHIAAGGVLCHPDFPVRVACHLELKILVLEITVPILVGLEFELHIRHAKSSARLVRILSSLDQKTGRALKKAPRLLTARQAALVEVRLDREACVEEFSTLKALARVFLRSQGSTVAVGVVTRVLDRALDMG

SEQ ID NO: 47394 - protein, 146 aa, Zea Mays
MQLMTSHYQDSGDPSLPCVNSRLTRSGKRSAAKLKQSLRYTRCEQFLSKGQGLISFAALDKLEADLSKFDDGPFFLGQFSLADVAYITILERVQIYYSHLRNYDIAEGRPNLQEFIEEMNKIEAYAQTKNDPLFLLDLAKNHLKIA

SEQ ID NO: 47395 - protein, 135 aa, Zea Mays
MICFMLFLLYMVTTSLVSSWCFLSTSLPKKNPGANFSMLFLLPLCKFTGCVGNVFLFRRVVFLPFVLAQHKTNASCSSGRPVFLSRQFGPWILVCICSIYLSILFNNQYFSDAQEINLLKVANCIIVVYFIKRGT

SEQ ID NO: 47396 - protein, 115 aa, Zea Mays
MNSGVDTQARALADEVRGSLETKNWMLDLGHPLLNRVAESFAKAAGIGAVQAVARESYFMATEGEGGSVSGATGARKRSFPELNGTNSSSIKSAEAMVKSVSKESLQWGNTFHTA

SEQ ID NO: 47397 - protein, 647 aa, Zea Mays
MGVATVTELKQSISGKRTFRPSLISRHANEWPPTDVSSDLTVEVGTSSFALHKLFAQFPLVSRSGKIRRLVAEAKDAKLARLSLHGTPGGAPAFELAAKFCYGVHVDVTVANVAMLRCAAHYLQITDDFSDKSLELRAEAFLRDAVLPSIASSVAVLRSCEALLPAAEDVGLVPRLIAAVATNVCKEQLTSGLSKLDQCAQLKPAAAFADLDPPADWWGKSVAALGLDFFQRLLSAVKAKGLKQETVTRILINYAQNALHGLMARDVHRCGGADADAVKKQRAVVEAIVGLLPAQSRKSPVPMAFLSGLLKTSMAVSASSICRADLEKRIGMQMDQAILEDILIAAGAAVGAPAGQQHALYDTDVVARIFSVFLNLDDDHNEEDDGFDYDSPRSPKQSLLVKAAKLLDSYLAEVALDSNILPSKFISLAELLPDHARVVTDGLYRAVDIFLKVHPNIKEAERYRLCKAIDCQRLTPDACSHAAQNERLPVQMAVQVLYFEQLRLRSAIQAGGGSSMGGHDGAVFFGCAAAAASVQGSVNMRSGSGVGSGAMSPRDNYASVRRENRELKLEVARMRMRLTDLEKDHVSMKRELVRVGPANRLLRGLARSLGRLFRMRPAAEPGLQQLGAKATADAKVLFQRRRRHSIS

SEQ ID NO: 47398 - protein, 186 aa, Zea Mays
MACINMYNPDGAAGFGGGPQQPAALGPRISFSSDFAVEPTPVQNRATSLRCQEEDLNFEFSVGSHPMMAADQLFSKGRILPLKDNGGGSVCFAAARPPTTLRDELRGGGDDDDERAAFSAAGTKGSNSNRWKEMLGLRKALCVGVGGGGNGSPAKKASSSDKQGVVAAAAPGPDDHMAASNQEQLS

SEQ ID NO: 47399 - protein, 249 aa, Zea Mays
MGSSSHSLAVSRRGRSARQSPFFRDLATPIPSHRGVSRFASGASPSSTPPPPPPIFTLDDRYASADFSPDPTASDLLPVASSPSPRTAASRSPPWDLSRGKVALSAPGSPMAGVVEPTRKEMLALPAPASPGTPPPAATAEAQSPVSPAQAPRTEPVANAGEVEREEWVTVFGFSIGDTNLILREFEKCGVILRHHSGPRDGNWIHILYQPIDAVHWQQLDESFAPSNPGGFMVSFAFEVTWLEEHRRI

SEQ ID NO: 47400 - protein, 803 aa, Zea Mays
MAAHQHGTAGRGGGGGSMEIFPYSYSSGRDLELVDLPAEPVDVKRQDSLYRDATMPAHHGHNGQESWVRTLRLAFQCVGILYADLGTSPLYVYANTFKYGVHHEDDVLGVLSIIIYSFVLFTMIKIVFIALYANDDGDGGTFALYSLISRYAKVCLIPNQQAEDELVSRYKHRSKPSATLRRAQWMKDLLETSKTAKVSLFFLTILATALAISDCMLTPPISVLAAVNGLKLRAPHLTTDETVWITVGILVVFFAVQRLGTDKIGYTFAPVVFVWLLLISGIGLYNTVKYDVSTLKAFNAKYIVDYFRRNKKKGWVSLGEILLCFTGTEALFADLGYFSIRSIQLSFTFGLLPSVMLTYIGQAAYMRKHIDTLDISNVFFQSIPRSLFWPTFVLALITSVIGSQAMVSCAFATMSHLQALNCFPRVKILHTSRRYSGQLYSPEVNVFLCIAACVVTVSFRTTGFIAKAHVMLLVWKVNIWWIAVFFAVFMSTECVYTAAVLYKFTHGPYVPLAMSAVLMFVMAVWHYVHVKRYRHELERTVSRDAARDLLERGDLKRVPGLGLFYTELVQGIPPIFPHLVGKIPTIHSVVVFITVKSLPVPHVHVTDRFLFRQVEPKEFMVFRCVARYGYRDALETAADFVSVLVEYLQYYVRDLNLYGVVGDEPFKIVFHSARVDSFSWEKHSSGHAVYAEEMLTPAQSFSELTMHPVSMSSRLAHFQTGKMNLEEMLKIEEDQKIIQREVDNGVVYIIGESEVVAKPHSNLFKKIIVNYVYSFLRKNSRNGEKMLSIPRGQLLKVGITYEI

SEQ ID NO: 47401 - protein, 462 aa, Zea Mays
MAAHQHGTAGRGGGGGSMEIFPYSYSSGRDLELVDLPAEPVDVKRQDSLYRDATMPAHHGHNGQESWVRTLRLAFQCVGILYADLGTSPLYVYANTFKYGVHHEDDVLGVLSIIIYSFVLFTMIKIVFIALYANDDGDGGTFALYSLISRYAKVCLIPNQQAEDELVSRYKHRSKPSATLRRAQWMKDLLETSKTAKVSLFFLTILATALAISDCMLTPPISVLAAVNGLKLRAPHLTTDETVWITVGILVVFFAVQRLGTDKIGYTFAPVVFVWLLLISGIGLYNTVKYDVSTLKAFNAKYIVDYFRRNKKKGWVSLGEILLCFTGTEALFADLGYFSIRSIQLSFTFGLLPSVMLTYIGQAAYMRKHIDTLDISNVFFQSIPRSLFWPTFVLALITSVIGSQAMVSCAFATMSHLQALNCFPRVKILHTSRRYSGQLYSPEVNVFLCIAACVVTRSAWSS

SEQ ID NO: 47402 - protein, 820 aa, Zea Mays
MAAHQHGTAGRGGGGGSMEIFPYSYSSGRDLELVDLPAEPVDVKRQDSLYRDATMPAHHGHNGQESWVRTLRLAFQCVGILYADLGTSPLYVYANTFKYGVHHEDDVLGVLSIIIYSFVLFTMIKIVFIALYANDDGDGGTFALYSLISRYAKVCLIPNQQAEDELVSRYKHRSKPSATLRRAQWMKDLLETSKTAKVSLFFLTILATALAISDCMLTPPISVLAAVNGLKLRAPHLTTDETVWITVGILVVFFAVQRLGTDKIGYTFAPVVFVWLLLISGIGLYNTVKYDVSTLKAFNAKYIVDYFRRNKKKGWVSLGEILLCFTGTEALFADLGYFSIRSIQLSFTFGLLPSVMLTYIGQAAYMRKHIDTLDISNVFFQSIPRSLFWPTFVLALITSVIGSQAMVSCAFATMSHLQALNCFPRVKILHTSRRYSGQLYSPEVNVFLCIAACVVTVSFRTTGFIAKAHEICVVLVMVITTLLMTIVMLLVWKVNIWWIAVFFAVFMSTECVYTAAVLYKFTHGPYVPLAMSAVLMFVMAVWHYVHVKRYRHELERTVSRDAARDLLERGDLKRVPGLGLFYTELVQGIPPIFPHLVGKIPTIHSVVVFITVKSLPVPHVHVTDRFLFRQVEPKEFMVFRCVARYGYRDALETAADFVSVLVEYLQYYVRDLNLYGVVGDEPFKIVFHSARVDSFSWEKHSSGHAVYAEEMLTPAQSFSELTMHPVSMSSRLAHFQTGKMNLEEMLKIEEDQKIIQREVDNGVVYIIGESEVVAKPHSNLFKKIIVNYVYSFLRKNSRNGEKMLSIPRGQLLKVGITYEI

SEQ ID NO: 47403 - protein, 1421 aa, Zea Mays
MLGRRGEMGYEEGELELEEGEAASGGGRELVIPDALTCIDERIQNVLGHLRKKFEGEITHMNLGSMYGCHGSFLPTYPRSPLGFPQYRNTADPKNHGSASRSLHVLTENAQKNHFVKTELDSSRKNEYCRISNESDGNQQMLNRAVIGSEQKARKIRIKLNSNKSLPRNTAAIYSGLGLDISPSSSAEDNLDETAGALVPEVLPDESPRAILEIMTSHYIPGGHLLSPLKENVLELKQKPKVMVKQEAPEFQVKVELHGDWGCTTSATLDNKDKCTKEIKSDEKKDKIPIFRSSKIRVNKPSAVNKGTKPLQDVLDDTGSNLLPTIVNTEHTVEEPAKFTGAISDKMKGSKDGASKGHISGKNKNIKEEPSLDHGFSRKNRCDSDEYNGKPHASSCQLQNIPNKTSPLERDKGKVLHMEDEPSQYKSKENGDLFSADSMAVMVGNVDRNSLGMMKGKKKVSSLQATLSGKFKFKAKKQLNDNIDRKKYGEDEHYALDHRIGLDNSYQIDKSVRLEKKTISSGEIDNKSDVGNDGGVNISAMFDEKSDVLPLASASLPAPEPILINEQWVCCDKCENWRLLPYGMNPDILPKKWRCSMQSWLPGMNSCKITEDETTKALRALYMVPAPENNIKDGGHDNAMSGKGTAIAPTFQGNTQSISSLGKLKGSLDGANVANTLESAGMSKPSKNLHAPSSRNFSKLKEKRKLVESSDKGEIVGKDQSRRMRSSVGVDHDNLRASKKMKKESNGPVMKHQPSEFEISKSSPASETLKNIQKRSCISPGMGKYGLSSSGKHSHGEDKDFSAVVIKTSDTENSGPRDSSIKKRKLKQRQSSQHFRDPHCSNNDTNGITKQNITEINAVKKKSRSELNLLKTDRIATDSRGTVGGVDDRISTDKECLSEQLQENTHFQHPSLVEGTTKREIRHAQTPIAATSSSSKMSNSNKYIAHFQETRASPVESVSSSPLRSSDKNPLGRHRSSSWTITENVHSQESGKINSSCSNRNYDLGSDCDKAKARISGCFNGDVSHHVQKDRDFLKDKQDVMNACLINKGSGFGARNFQLSPEHKVNPDVLSSHDNDGHKQPTVRQNGKTQPHFGSNQGDHANLTYGHIKPGKGNIPNKDQKTNPSAVKASKQQPSLNNASNGDASYKARQIEKAVIENLDTRKHITLNGDASNLTSASVLLKEARDLKHLSKRLKEKGDDFESTSMCFEAGLKFLHVASLWETPNIDSSNQGVSIQAMKLYSETGILFGFCAHEFERLKKMANAALAYKCVEVAYMKAAFFRSPGVIKDRHALHAASLMVAPAESPSSSASDIDNLNNQSTVAKAVSARGVYSPQIASNSISRNNHHLMGLLSYAEDTNNSFEGTRKSQTSFSAYLSGIGKNQVDEVALVRKVLDFSFHNVKGLLQLIRHSLESINHESGK

SEQ ID NO: 47404 - protein, 1196 aa, Zea Mays
MYGICAQRSDGKVLNCANATKAVKPDTLFSSRIQSLCPTITGDVCCTVDQFDTLHQQVQQINSTMTVDGIDYYVTTNYGEELYNSCKDVKFGTLNTRAMDFIGAGAKTYKDWLAFIGRQANLNEPGSPYLITFGSDFSDSSGVKPLNSTIYSCGDPSLGCSCGDCPSSSVCAGSLLPQLNTETACSVKMGSLKAKCLDFSLVVIYLALLCAFLLWGLLYRTRGRTASPLQAKPLRNSDNKSNMNKNGKSPHDSVQVPEAASSTAKPSNPSIVQTYMSIFFRKHGIFVARHPLRVLCVSLLVPVLLCIGLFRLKVETRPEKLWVSPGSEAANEKNYFDSHLAPFYRIEQLVLATSASGGSEAPSIVNDNNMKLLFEIQKKVDDLRANYSGSKVALADICLKPLSTDCATQSVLQYFQLDPKKFDDSGIDHAKFCFQHYTSEETCLSTFQSPVDPSTILGGFPGSNFTEASAFVITYPVNNKVQTTGKENGKAMAWERAFINLVKEEIRPMVLAQNLTLSFSSESSIQDELNRESTADAITIMISYIVMFAYISFTLGDRPSRWLLLFVSSKVLLGLSGVVLVMLSVLGSMGFFSAIGVKSTLIIMEVIPFLVLAVGVDNMCILVHAVKRQPDQSNLEERISDALVEVGPSITLASFAEVLAFAVSAINPMPATRVFSMFAALAVFMDFLLQVTAFVALIVFDIRRAQDGRIDCVPCARITPSTGAGDGGDGQRLHLLARYMRDVHGRILRNRAVKFVVITVFVGLTFASIALSTRLQPGLEQQIVLPRNSYLQYMKVGPPLYFVVKDFNYSSASVDTNQICSISQCNSNSLLNEISRQSLSPETSYIAKPAASWLDDFLIWMSPEAFGCCRKFVNGSYCPPDDQPPCCQLDQVSGSCMTSKTCSNCTTCFLHSDLDNGRPSTTQFRDKLPWFLDALPSSDCSKGGKGAYSTSLDLSGYESGIIQASAFRTYHTPLNKQSDYVNSMRAARDFSSKMSRDLQMKIFPYSVFYIFFEQYLSVWKTAIMNICVCLGTIFVVCFIVTSSLWASAIILTVLAMIVLDMMGVMAILGIQLNAISVVNLVMSIGIAVEFCVHITHAFMIGTGDKETRARQALSTMGASVFSGITLTKLVGVIVLRFAKSEVFVVYYFQMYLALVIIGFLHGLIFLPVLLSLCGPPTKWAKPKEQSQPPSASSERT

SEQ ID NO: 47405 - protein, 733 aa, Zea Mays
MSCSPNQSLFINVTSVKQINSTMTVDGIDYYVTTNYGEELYNSCKDVKFGTLNTRAMDFIGAGAKTYKDWLAFIGRQANLNEPGSPYLITFGSDFSDSSGVKPLNSTIYSCGDPSLGCSCGDCPSSSVCAGSLLPQLNTETACSVKMGSLKAKCLDFSLVVIYLALLCAFLLWGLLYRTRGRTASPLQAKPLRNSDNKSNMNKNGKSPHDSVQVPEAASSTAKPSNPSIVQTYMSIFFRKHGIFVARHPLRVLCVSLLVPVLLCIGLFRLKVETRPEKLWVSPGSEAANEKNYFDSHLAPFYRIEQLVLATSASGGSEAPSIVNDNNMKLLFEIQKKVDDLRANYSGSKVALADICLKPLSTDCATQSVLQYFQLDPKKFDDSGIDHAKFCFQHYTSEETCLSTFQSPVDPSTILGGFPGSNFTEASAFVITYPVNNKVQTTGKENGKAMAWERAFINLVKEEIRPMVLAQNLTLSFSSESSIQDELNRESTADAITIMISYIVMFAYISFTLGDRPSRWLLLFVSSKVLLGLSGVVLVMLSVLGSMGFFSAIGVKSTLIIMEVIPFLVLAVGVDNMCILVHAVKRQPDQSNLEERISDALVEVGPSITLASFAEVLAFAVSAINPMPATRVFSMFAALAVFMDFLLQVTAFVALIVFDIRRAQDGRIDCVPCARITPSTGAGDGGDGQRLHLLARYMRDVHGRILRNRAVKFVVITVFVGLTFASICFLCSN

SEQ ID NO: 47406 - protein, 220 aa, Zea Mays
MEADRKAMSNQVNVPADLSFQSRTTYRIRNKVIYCLDGARIGIQYETFFAGEPCEIFHCVLESKSFLEKMIMIEHTLPFFLPKFIDHLEEILQAYIDRREQVRLIKELYGNQIGELFHSLPYNMIEFVLEDFECKVTISIRYSDLLQTLPSQARVLAWPLRSAKKISTRSSSASAAQPVPFHLSYAEEALKTLCLPEAYADIVLELPHALKRILSSRDSD

SEQ ID NO: 47407 - protein, 320 aa, Zea Mays
MAAAGDPPPPIYAEGAARTRGEISPHFQTYARDDDAKLETTRARLSNILKRHEDLKERLSRDSDKLIFERLQKEFEAARAAQTEEISINDDEWNDGLLATIREKVHMEADRKAMSNQVIYCLDGARIGIQYETFFAGEPCEIFHCVLESKSFLEKMIMIEHTLPFFLPVRELESDLLSSNSIKFIDHLEEILQAYIDRREQVRLIKELYGNQIGELFHSLPYNMIEFVLEDFECKVTISIRYSDLLQTLPSQARVLAWPLRSAKKISTRSSSASAAQPVPFHLSYAEEALKTLCLPEAYADIVLELPHALKRILSSRDSD

SEQ ID NO: 47408 - protein, 630 aa, Zea Mays
MSICLTDSGLKNVFEVIGAVYQYIKLLKQSEPQEWIFKELQDIGYMEFRFAEEQPPDDYVVDLAENMLFYSEKHIVCGEYIFEDWDSELVKHALSFFNPDNMRVDVLSKSFDKQSQAIQCEPWFGSHYIEEDIPSSLIESWKNPVQVDDNLHLPRKNEFIPGDFTLRNANSPGSSSDDNPRCIVDEPFIKLWYKMDMTFNVPRANTYFLIYVKDGYSSLENSVLIDLFANLLKDELNEVLYQAYVAKLETSTSVVASKLEIKLYGYNDKLPILLSNILSTVRSFSPKTDRFEVIKEDLERAYKNTNMKPMSHSTYLRLQVLREIFWDVDKKLELLMKLTFTDLVAFVPKILSQLHIEGLCHGNLSEDETINISKIFLNTLSAQTLPEEARHEERVICIPNGANLVRSVRVKNDLEENSVVEVYFPIEQDVGKEATRLRAITDLFSNIIEEPCFDQLRTKEQLGYTVDSSPRMTYRMLAYCFRVMSSKYSPIYLQSRIDNFIDGLSALLDELNEETFEHHRSGLIADKLEKEPSLSYQTSDYWSQIADKRYMFDMSKLEAEELKTVQKADVIAWYNTYIRSSSPKRRRLAIHVYGCNSDIAEAAKLQEQSWTIIDDVESLKASSQFYSSLC

SEQ ID NO: 47409 - protein, 258 aa, Zea Mays
MMDGDYRNAVKLVIEFKETGLKPEVYSYLIGLTALVKEQKEFSKALRRLNASVKDGSISKLDAESMHSINKYQSDLLSDGVLLSNWVVQEGSSEVLGLVRERLLSLYTCAGCGLEAEHQLWEMKLLGREPDTQLYDVVLAICASQGEAAAVRRLLAGVESTSAGRRKKSMSWLLRGYVKGGFILDASETLIQMLDMGLLPDYLDRAAVLTALRRNIQESGSLESYLKLCKRLSETDLIGPCIVYLYVRKFKLWMAHML

SEQ ID NO: 47410 - protein, 1210 aa, Zea Mays
MPSYAHHHPYQRVQPMSVPTHCPNQNPQALMGHNLYHLSPYSFGTYFASSGLPRNLGVVITIWAPIVMVYFMDTQIWYAIFSTVFGGVSGALSHVGEYVREKDMLMAPSYSSNLSIIQWPPFLLASKVPAAVHMAMNSKEGDEHELIEKIKLDGDRYDAVIECYKSLMIILNSLLLDTNDQNIVNDIDKKVTYSMIKKTFLEDFEMAEIGKVSSTLARLLQLLKSEPINDVGERKIVNALQDFMEITTRDFMKDGQSFKDEDERNQRFMNLNMNMIKEDYWREKFVRLHLLLTMKDSAMDVPINLDARRRITFFANSLFMKMPRAPRVHDMISFSVLTPYYNEEVLYSSHDLNRKNEDGISILFYLQKIYPDEWNNFLERIGVESNNEVSIKGRMDDIRLWASYRGQTLARTVRGMMYYRRALELQCYEDMINDQGYGLADLDTAKAARSKAIADIKFTYVVSCQLYGVHKTSKDSRERGLYENILNLMLTYPALRIAYIDEKEVQLRNGKIEKQYYSVLVKGDDEEIYRIRLPGKPTEVGEGKPNNQNHAIIFTRGEALQAIDMNQDNYLEEAFKMRNLLEEFLLTHGKSEPTILGVREHIFTGSVSSLAWFMSSQETSFVTIGQRVLANPLKVRFHYGHPDVFDRLFHLTRGGISKASKIINLSEDIFAGFNSTLRRGNVTHHEYIQLGKGRDVGMNQISNFEAKVANGNGEQTLCRDIYRLGHRFDFYRMLSLYFTTVGFYFNSMVAVLTVYVFLYGRLYLVLSGLEKSILQDPNIQNIKPFENALATQSVFQLGMLLVLPMMMEIGLEKGFGRALAEFVIMQLQLASVFFTFHLGTKTHYYGRTILHGGAKYRATGRGFVVRHAKFAENYRMYSRSHFVKALELLILLVVYLAYGSSYRSSSLYLYVTVSIWFLVFCWLFAPFVFNPSCFEWHKTVDDWNDWWKWMGNRGGIGLAPEQSWEAWWVSEHDHLRNATIRSLLLEFILSLRFLIYQYGIVYHLHIVHGNKSFLVYALSWLVIAVALVSLKVVSMGREKFVTRIQLVFRILKGIVFLVLIGLLVLLFVGFDLAVSDVGASILAFIPTGWFILLVAQLCGPLFRRLIIEPLHLLCCPYGTGGACRGPCCARFRQRTGAALRKMGPWDSIQEMARMYEYTMGLLIFLPIAVLSWFPFVSEFQTRLLFNQAFSRGLQISRILAGQNGSGTKSD

SEQ ID NO: 47411 - protein, 737 aa, Zea Mays
MPSYAHHHPYQRVQPMSVPTHCPNQNPQALMGHNLYHLSPYSFGTYFASSGLPRNLGVVITIWAPIVMVYFMDTQIWYAIFSTVFGGVSGALSHVGEYVREKDMLMAPSYSSNLSIIQWPPFLLASKVPAAVHMAMNSKEGDEHELIEKIKLDGDRYDAVIECYKSLMIILNSLLLDTNDQNIVNDIDKKVTYSMIKKTFLEDFEMAEIGKKSEPINDVGERKIVNALQDFMEITTRDFMKDGQSFKDEDERNQRFMNLNMNMIKEDYWREKFVRLHLLLTMKDSAMDVPINLDARRRITFFANSLFMKMPRAPRVHDMISFSVLTPYYNEEVLYSSHDLNRKNEDGISILFYLQKIYPDEWNNFLERIGVESNNEVSIKGRMDDIRLWASYRGQTLARTVRGMMYYRRALELQCYEDMINDQGYGLADLDTAKAARSKAIADIKFTYVVSCQLYGVHKTSKDSRERGLYENILNLMLTYPALRIAYIDEKEVQLRNGKIEKQYYSVLVKGDDEEIYRIRLPGKPTEVGEGKPNNQNHAIIFTRGEALQAIDMNQDNYLEEAFKMRNLLEEFLLTHGKSEPTILGVREHIFTGSVSSLAWFMSSQETSFVTIGQRVLANPLKVRFHYGHPDVFDRLFHLTRGGISKASKIINLSEDIFAGFNSTLRRGNVTHHEYIQLGKGRDVGMNQISNFEAKVANGNGEQTLCRDIYRLGHRFDFYRMLSLYFTTVGFYFNSMV

SEQ ID NO: 47412 - protein, 567 aa, Zea Mays
MTSAWLVRAYVPMLLRSRISSASMEKTRRHRVLAVLLLLVVVLVSALPDLGSCHKDDAGQGGTTNPEEDMVSVSEASRTTHHGDRTRKFLHEQQQQNRYWSGDFGDKVSSLTDSSQYPPDSGGSSSQSPASTFKPDQWQPWLPWAPKAPPPMSVPPAQAPAPFPAGVVSNPGHSIALPPQPAVVVPADAGSRPAVGAGVPAGGAGARPRSGGVGRPVYAMAAAGASLAAAAAVALLVLCYRSSSVVTVRPWATGLSGQLQKAFVTGVPSLKRSELEAACEDFSNVIGSLSDYMVYKGTLSTGVEIAVVSTTKNSAKEWSKHCESQFRKKITSLSRVNHKNFVNLLGYCQEEQPFTRMMVFEYAPNGTLFEHLHVREDGYLDWPTRLRVAVGVAYCLEHMHQLSPPEILRALDTSTICLTDDFAAKISDVFFCDEPRRQEGSLSLSALSDRESVVYSYGMVLLETMTGRFTASDGGLLEAWAAAYLRGERQLRDVMDPALRRSFHAATVDRLDGVIRGCTDREPRRRLTIAEVAKRLREITAMSPDAATPKVSPLWWAELEIICAEVN

SEQ ID NO: 47413 - protein, 416 aa, Zea Mays
MSVPPAQAPAPFPAGVVSNPGHSIALPPQPAVVVPADAGSRPAVGAGVPAGGAGARPRSGGVGRPVYAMAAAGASLAAAAAVALLVLCYRSSSVVTVRPWATGLSGQLQKAFVTGVPSLKRSELEAACEDFSNVIGSLSDYMVYKGTLSTGVEIAVVSTTKNSAKEWSKHCESQFRKKITSLSRVNHKNFVNLLGYCQEEQPFTRMMVFEYAPNGTLFEHLHVREDGYLDWPTRLRVAVGVAYCLEHMHQLSPPEILRALDTSTICLTDDFAAKISDVFFCDEPRRQEGSLSLSALSDRESVVYSYGMVLLETMTGRFTASDGGLLEAWAAAYLRGERQLRDVMDPALRRSFHAATVDRLDGVIRGCTDREPRRRLTIAEVAKRLREITAMSPDAATPKVSPLWWAELEIICAEVN

SEQ ID NO: 47414 - protein, 595 aa, Zea Mays
MAGDALIVIVTSFLLALPSATAIGKVCGNAGNYTANGSACVNGSLQYARRACPYAKAASVYDDNCLIGYSSANILVPAYNATRDTSTLFDYWNSMTIAGNGTLVAAHVDDLLTQTAQQAASSPRRFVTAYMDGSSNAVIPTLYSLAQCTPDLSAGDCLACLQRILGLLNATTSMTQIRPSSGAPAPPPPSPTTNKGSGVKPWVIAVSVAPPVAVVAFCFILYNRRQRRRFRRGRSKLRQKHPRNNLKGDELDWEMETELSEFSVFDFHQILEATDNFSEENKLGEGGFGPVYKGQFPDGTEIAVKRLASHSGQGFVEFKNEVQLIAKLQHTNLVRLLGCCSQGEEKILVYEYLPNKSLDFFIFDENRKSLLDWKKRLAIIEGIAEGLLYLHKHSRLRVIHRDLKPSNILLDSEMNPKISDFGLAKIFSSNNIEGSTTRRVVGTYGYMAPEYASEGIFSIKSDVFSFGVLILEILSGKRNSGNHDYGDFINILGYAWQLYEEARWMDLVDASLVPMDHSSEIMRCMNIALLCVQENAADRPAMLDVVAMLSNKAKTLAQPNHPAYFNVRVGNEEESTAATASGSINEMTVSVTTGR

SEQ ID NO: 47415 - protein, 245 aa, Zea Mays
MPNQAQLHFRRRRWPATALPRARRIWLRLPSPPSPPCATPPRRAVKTPVFFSSRRRSSSLPPSPRSCFLPMAWIWMVLAAGAVLLWAISLGRIFSSAAPSCVPLSPQFMPPLRGDRRTRNVMLVVAHPDDESMFFAPTILFLKSKGHNIHILCMSRGNADGLGDTRKEELYHACETLKIPHEQVEVLDHPKLQDGFHEKWDHELVSELVMEHVQLWVIDMIVTFDSYGVSGHPNHRDVHYGIWQA

SEQ ID NO: 47416 - protein, 77 aa, Zea Mays
MLKNDVDFLFFLADAAAITFQYGNLDALCPPLIQAKKNRKNLVVHVPSIIVHEICKILLEDRRSQQRNNYPCINILM

SEQ ID NO: 47417 - protein, 662 aa, Zea Mays
MEGGGGSGMGGFPEATGNLLDAAAQEFHPTVCAPYPLQPLPQQLYCPHPYPAMPVPPPPQIAMLQPVPPMAMAMAPQPGYTLPTTTPVVNGPSSRVVVLGLVPPHAQEADVAQAMAPFGAIRSVDACAVASEGVATVHFFDIRAAELALTCVREQHMRQQSRLGQLYAAAAVAPAWAPAPTPQAWDWPHPNDDGRGLVLGHAVWAHFATGADDGDNRGSLVVLSPLPGVSVADLRQVFQAFGDLKDVRESAQRPSHKFVDFFDTRDAARALAELNGQELFGRRLVVEFTRPSGPGPRRRGYAPHQHRPTAPTPPRLQATWRPSQPTSSQPPASSSSSGSVRAREGVVLLRRSSCKSSAGSDQSSKGGNAGTSHERKTKGGKIVVAAAAASSSTPTASGKQTQKGVGSSGGGSWKGRKSGWEARFLFKEPEAGGGADTQATPASEMDTRTTVMIRNIPNNQKLLLNMLDNHCIQSNEWIVASGEEQPFSAYDFVYLPIDFNNKCNVGYGFVNLTSPEAAVRLYKAFHKQPWEVYNSRKICQVTYARVQGLEALKEHFKNSKFPCDSDEYLPVAFSPARDGKELTDPVPIVGRSPAASSASSPPKSRAASVDRLGQELMPAPSSSADGASSTTTSTHAPSEHDEEEEEGDIRLAGELRRLGYDD

SEQ ID NO: 47418 - protein, 629 aa, Zea Mays
MSVNGNHLNGDLPDTFDSLNRLVNLDISSNNLSGVLPSSMKNLASLTSLHMQDNQLSGTLNVLQDLPLKDLNIENNLFSGPVPASLLNIPNFKKDGNPFNTSIVPSASPPSTGPAPTPAASKPAPTPAPTTSNSTPPAPAPSFPSRSPPPPKTTSNSSEGSTTRDSTSPSKKHSTSTLKIVGFVLAGVVLFIIIVLLVLFCLSKYQERRSRYDHNRSQQARVHHRVEPQIKPPPVQQSNDLKKGSGEVLDRRGHELSSSTAALAKKSPENQKEHVINFDRTDSDLFPVSLPPPPPPPPLPPIERVIANPIVPPEKRYSPPPKTSSSTSATSFSIASLQQYTNSFREENVIRESRLGKVYLAELPDGKLLEVLKIDNANGRISVDDFLEEVECILDIKHPNILELVGYCAEYGQRLLVYNHFSRTTLDDTLHDGEDTESALSWNARLQVALGSGKALEYLHASFQPPIVHQNFEPANVLLDKKFSVCVAECGLAELMPPSSVTQLSGRMRALLNYEAPELQDSGVVSERGDVYSFGVVMLELLTGRKPYDSSRPRHEQHLVRWASSQLHDIESLSKMVDPSIRGQCSEKALSRFADIISRCIQQPEFRPPMSEIVQDLARLVNATGEESE

SEQ ID NO: 47419 - protein, 779 aa, Zea Mays
MQRAPERRRGAGPLLLLALLVALAAAPRLVRAVTDATDVSAINGLYMSLGSPLLPGWTGNGGDPCGESWQGVVCTGSSITGITMNAANLGGQLGSLGNFTAITSLELNNNNIGGTIPEDLPVTLQSLFLSANQLTGSIPSSLSKLENLTAMSVNGNHLNGDLPDTFDSLNRLVNLDISSNNLSGVLPSSMKNLASLTSLHMQDNQLSGTLNVLQDLPLKDLNIENNLFSGPVPASLLNIPNFKKDGNPFNTSIVPSASPPSTGPAPTPAASKPAPTPAPTTSNSTPPAPAPSFPSRSPPPPKTTSNSSEGSTTRDSTSPSKKHSTSTLKIVGFVLAGVVLFIIIVLLVLFCLSKYQERRSRYDHNRSQQARVHHRVEPQIKPPPVQQSNDLKKGSGEVLDRRGHELSSSTAALAKKSPENQKEHVINFDRTDSDLFPVSLPPPPPPPPLPPIERVIANPIVPPEKRYSPPPKTSSSTSATSFSIASLQQYTNSFREENVIRESRLGKVYLAELPDGKLLEVLKIDNANGRISVDDFLEEVECILDIKHPNILELVGYCAEYGQRLLVYNHFSRTTLDDTLHDGEDTESALSWNARLQVALGSGKALEYLHASFQPPIVHQNFEPANVLLDKKFSVCVAECGLAELMPPSSVTQLSGRMRALLNYEAPELQDSGVVSERGDVYSFGVVMLELLTGRKPYDSSRPRHEQHLVRWASSQLHDIESLSKMVDPSIRGQCSEKALSRFADIISRCIQQPEFRPPMSEIVQDLARLVNATGEESE

SEQ ID NO: 47420 - protein, 205 aa, Zea Mays
MAAANAPIAMREALTLTSLGIAPQFVTFTHVTMESEKYICVRETSPQNSVVIIDMAMPMQPLRRPITADSALMNPNTRILALKAQIPGTTQDHLQIFNIEAKTKIKSHQMPEQVVFWKWITPKLLGLVTQTSVYHWSIEGDSEPTKMFDRTANLANNQIINYRCDPAEKWLVLIGIAPGAPEGNLVFLRNKPTSSSPQISRMIFL

SEQ ID NO: 47421 - protein, 126 aa, Zea Mays
MRRDGDLGSELQRRPPPPPPPPPPPHRSPPWPWLGWPPGDLSSLPQTTPPSPRISFSFSPFQTFRSRRCQPPFARRVSRRSSRRILTCLHRAKESRWLCALAPLLGGHHRPSTTQWDADRLRILCL

SEQ ID NO: 47422 - protein, 505 aa, Zea Mays
MGTATMATAVGAAMLLYFVLSRRLAGEDVSARGGGGGGVGSGKRRRGRALRRPVQPPATWIEAVGTLAETLRFTYSETLGKWPIGDLAFGIKYLMRRQGNLHVASVYAGSDCIELKGPQIMEELIVLRRLIDLCFLFSKKPFPVFRELAGFSQEDVLIEEPKAGILKPAHTIIRDECTKSFLVLIRGTHSMKDTLTAATGAVVPFHLSLLDEGDVSKLVLGYAHCGMVAAARWIARGVTPCLREAVRQCPEYQIKVVMKQAQNVAQAVARSRSAFSSWSCMGARRRGVGVVTACSKDDMRVETHVTSTVESKSVLVEHCGAKTIEELQYTAASVSVHDAAEEEEALLSEHETSRENAEEETTEGELWYEFEKDLDRQAEMEARTREEEAAAAKEIMEEESAVLKGVDDRQSFTPDSLERQQFYPPGRIMHMVAMPPTDADPDDPVAADECCVGIYETPRDLYSKIRLSNTMINDHYMPMYKKMMETLIEKFARDEDCYCTGSTAE

SEQ ID NO: 47423 - protein, 359 aa, Zea Mays
MGTATMATAVGAAMLLYFVLSRRLAGEDVSARGGGGGGVGSGKRRRGRALRRPVQPPATWIEAVGTLAETLRFTYSETLGKWPIGDLAFGIKYLMRRQGNLHVASVYAGSDCIELKGPQIMEELIVLRRLIDLCFLFSKKPFPVFRELAGFSQEDVLIEEPKAGILKPAHTIIRDECTKSFLVLIRGTHSMKDTLTAATGAVVPFHLSLLDEGDVSKLVLGYAHCGMVAAARWIARGVTPCLREAVRQCPEYQIKIVGHSLGGGTAALLTYILREHKEFSSTTCVAFAPASCMTWELAESGKHFVTTVVNGADLVPTVSTASIDDLRSEELACSLFLVRERGLQVLEHFYVLFQTKPRL

SEQ ID NO: 47424 - protein, 235 aa, Zea Mays
MPSSPIPAPCCTALVRAYRTDKTRRLDAMNRVIYEVFPEPNRQLLQRILKMMQIVGSHKAENRMSPSALAACMAPLLLRPLLLGECEIDSEFNMAGDGSFQLLQAAAAANHAQAIVIIMLEEYDQIFDDIEDGSYSSDAYTESDIDKEYSTDNDIPEDDGSYGCGEDVEEDLNDDTEHSSGIRIDNADDKVNNNKSSTTCDDNDKVVQPPAARAMRIEHVHSQIIYKNQMLIHHI

SEQ ID NO: 47425 - protein, 439 aa, Zea Mays
MSGGCRGWEWEAEPWLLVRQNQAGVNMLHHSNSRNQRNRGSRIKTLLQATLLSGVVFWLLYQVKHSYDKKNEYLDDAEDQLTHNDRSIFQARKQKAGSYSDSNVQMVVDNSDVTTKPEEGDVDHHSDTFDHNEKTVETVFDKDSTNLHEDDKRNTESSEAEGQVNSGDSNTEANNNKNEDETTSLVEGRKHDTESNSAAESKSEVNSTGDELSQNNHAQEENTREASGMSHDEVAHGDESTSASGTWNGSDGEGEKKEAVDTQTGSETLPDDAKTEATDDRGTNSLSDETGNIPSVHTDNSQNDASENQGDATSTTSDSSEHGISEAVHIETGLEHGSATTSSVTGSGDDRDNSSDSSSAGKNTETLSGDDKTNSSSTPHAAPDPYFAESSTLFISPAGSVSGSVKRTACTQTPHFHAFSLLSAALSRARVPAGGPQVS

SEQ ID NO: 47426 - protein, 778 aa, Zea Mays
MPEIKCGAAEKVKPAASPEAEKPADIAGNISYHAQYSPHFSPFAFGPEQAFYATAESVRDHLIQEKDAALGNGGLGRLASCFLDSMATLNLPAWGYGLRYRYGLFKQHIAKEGQEEVAEDWLDKFSPWEIPRHDVVFPVRFFGHVEILPDGSRKLVGGEVLKALAYDVPIPGYKTKNAISLRLWEAKATAEDFNLFQFNDGQYESAAQLHARAQQICAVLYPGDATEEGKLLRLKQQFFLCSASLQDMIARFKERKSDRVSGKWSEFPTKVAVQLNDTHPTLAIPELMRLLMDEEGLGWDEAWDITYRTISYTNHTVLPEALEKWSQIVMRKLLPRHMEIIEEIDKRFKELVISKHKEMEGKIDSMKVLDNSNPQKPVVRMANLCVVSSHTVNGVAELHSNILKQELFADYVSIWPTKFQNKTNGITPRRWLRFCNPELSEIVTKWLKSDQWTSNLDLLTGLRKFADDEKLHAEWAAAKLSCKKRLAKHVLDVTGVTIDPTSLFDIQIKRIHEYKRQLLNILGAVYRYKKLKGMSAEEKQKVTPRTVMIGGKAFATYTNAKRIVKLVNDVGAVVNNDPEVNKYLKVVFIPNYNVSVAEVLIPGSELSQHISTAGMEASGTSNMKFSLNGCVIIGTLDGANVEIREEVGEDNFFLFGAKADEVAGLRKDRENGLFKPDPRFEEAKQFIRSGAFGSYDYEPLLDSLEGNSGFGRGDYFLVGYDFPSYIDAQDRVDAAYKDKKKWTKMSILNTAGSGKFSSDRTIAQYAKEIWDIKASPVV

SEQ ID NO: 47427 - protein, 580 aa, Zea Mays
MPEIKCGAAEKVKPAASPEAEKPADIAGNISYHAQYSPHFSPFAFGPEQAFYATAESVRDHLIQRWNETYLHFHKTDPKQTYYLSMEYLQGRALTNAVGNLGITGAYAEAVKKFGYELEALAGQEKDAALGNGGLGRLASCFLDSMATLNLPAWGYGLRYRYGLFKQHIAKEGQEEVAEDWLDKFSPWEIPRHDVVFPVRFFGHVEILPDGSRKLVGGEVLKALAYDVPIPGYKTKNAISLRLWEAKATAEDFNLFQFNDGQYESAAQLHARAQQICAVLYPGDATEEGKLLRLKQQFFLCSASLQDMIARFKERKSDRVSGKWSEFPTKVAVQLNDTHPTLAIPELMRLLMDEEGLGWDEAWDITYRTISYTNHTVLPEALEKWSQIVMRKLLPRHMEIIEEIDKRFKELVISKHKEMEGKIDSMKVLDNSNPQKPVVRMANLCVVSSHTVNGVAELHSNILKQELFADYVSIWPTKFQNKTNGITPRRWLRFCNPELSEIVTKWLKSDQWTSNLDLLTGLRKFADDEKLHAEWAAAKLSCKKRLAKHVLDVTGNECRREAEGHTAHCHDRRESVCNIH

SEQ ID NO: 47428 - protein, 204 aa, Zea Mays
MELDPRLYENVSVSDNDVRNIVLSYLMHNCFKETAEAFLSSTGLNLPVDYSVDVDKPIFNFVLEGNALKAIELTEEMAPNLLENDMDLHFDLLSLHFIELVRSKKFTEALDFGQKKLTSFQKVTKYIEKLEDFMALLAYEEPEKSPMFHLLSPEHRQNVAEGLNRAVLAHANLPAYSSLERVVQQATVVRQYLQQEVGKAFLSK

SEQ ID NO: 47429 - protein, 198 aa, Zea Mays
MELDPRLYENVSVSDNDVRNIVLSYLMHNCFKETAEAFLSSTGLNLPVDYSVDVDKRKGNALKAIELTEEMAPNLLENDMDLHFDLLSLHFIELVRSKKFTEALDFGQKKLTSFQKVTKYIEKLEDFMALLAYEEPEKSPMFHLLSPEHRQNVAEGLNRAVLAHANLPAYSSLERVVQQATVVRQYLQQEVGKAFLSK

SEQ ID NO: 47430 - protein, 308 aa, Zea Mays
MEVEDLEDLYNIDASYDQDDPDDARGSSADEEEDEEDDEEEEEEEPEGARLVAGDCGPSPRARVSEFAAAAGAAVERAHTANCPVCMDPWTSQGPHRISCIPCGHVYGRSCLEKWLTQRGNRSATCPQCGKRFKHKDIINLYAQEVAVPNSELEKEISYLRREICSLKKMVVHHDKMFEEMIKRQNDGVRSKRQKVAEHSYEAANLVASTPATISFSLQNELPVAGARVISIDTSNKIILVSGRANAIGAEYVVTKISMLSNREVRKIHLPPETKAVRDMCILPGGSAIFTSLGRRLSLFRLLVGRVQ

SEQ ID NO: 47431 - protein, 397 aa, Zea Mays
MVVHHDKMFEEMIKRQNDGVRSKRQKVAEHSYEAANLVASTPATISFSLQNELPVAGARVISIDTSNKIILVSGRANAIGAEYVVTKISMLSNREVRKIHLPPETKAVRDMCILPGGSAIFTSLGRRLSLFSMATDSIVLNWDLPAPGWSCAVGASGSHHIYAGLQNGMVVVFDIRQTVRPLRCMVGLSANPVHTLHSVIDNNGSRKVLSASAIGPCMWDADSNQSRPHLLTGTGDERVCISLACAAPWSDLLVASFRPRVDPSGDAVAASQVYLSQTPTRSGQGKPGQHTLIRRRTGNTCFAEGTTCYANVSELRMSKSAIIPYGYGGHQQKHLFSYGDESLRGVRTWQLPSFGMHADLCTHREPILDLRYAAETEGPGGYLGCLSEEKLQVFRVN

SEQ ID NO: 47432 - protein, 596 aa, Zea Mays
MPRRLATTYAGRIAAATPSPSGPSITVTVSPTPAPTPLDTRGYSLPRRHLICAVARILRSPVSHTPLLDLDDYLRSLRLTLTTAEASEVMKALAPDTSLALSFFRFAATSLPGFRHDAFSYNRILVLLFSNRADPAEAMRLIAEMERDGVPGNISTVNLLVGMGVEVGRCLDLASKWGLRLNGYTYKCLVQAHLRSREVWKGFEVYEKMRRKGYKLDIFAYNMLLNALAKAGMVDQAYQVFEDMKQNYCDPDAYTYTILIRMSGKAGKTTKFVSLLEEMVSEGCVLNLIAYNTVIEALGGQLHRLNEILDICSGCLNRPVYSYLIKALCKSGHASEAHSVFCRMWNSHEKGDRYAFVSMLEALCNAEKTTEAIDLLHMMPEKGITTDVGMYNMIFSALGKLKQVSFMSSLYDTMRANGVVPDVFTYNIMISSFGRVGLVDKASELFEEMEDGSCKPDVVTYNSMINCLGKNGDLDEAHMLFKDMQEKGYDPDVFTYSILIECFGKSNKVDMACSLFDEMVAQGCIPNIVTYNILLDCLERRGKTTEAHKFYETLKQQGLTPDSITYSILERLESRSQRTVRIRKPSRNTGWVISPV

SEQ ID NO: 47433 - protein, 332 aa, Zea Mays
MKWAFETLQRYRNRFCMFNDDVQGTAGVALAGLLGAVRAQGRPLQDFTNQKIVVVGAGSAGIGVLSMAKQAMLRMPGIHRTGEGHNQFWVLDKDGLITKARKDLDSAVARFARGFGPDEVPDLYEGASLVEVVKKVKPHVLLGLSGVGGIFNEEVLKAMKESDSPRPAVFAMSNPTTKAECTPDDVFKHVGDKAIFASGSPFSNVSLGNGKSGYANQANNMYLFPGIGLGALLSGARHVSDGMLQAAAECLASYITDDEIRKGILFPSVSSIRHITARVGAAVVRAAVAEDLAEGCCDVGPRELGSMSESEAVDYVARKMWYPIYSPLVSDK

SEQ ID NO: 47434 - protein, 56 aa, Zea Mays
MLVGCRVLPWAKANLNYTAQALIISAACIAGFFITADKTILRNARQNTIGKLDKST

SEQ ID NO: 47435 - protein, 272 aa, Zea Mays
MFHRLLRRAMPLPPPQSPLPAPRMPGVTGGRLFASLPSPPPLQSRREVHVWYLLPDELKDASQLKMYTELLSPSERKTALSMNGEKLQKGAVLSRALLRTTLSRYTDCKVDPRSFEFKKNKFGKPEVLWRSDDSRMEWPLHFNISHTSSLIVCGITMDTPIGIDVEEKTRKTAKNILSLARRYFTPSEIDYLAKIPDPDAQQKEFVKLWTLKEAYVKALGRGFSGAPFNKFSIILAANGRIQISVVYYFPLCAHACQYNSYTTCMNLWNRSV

SEQ ID NO: 47436 - protein, 215 aa, Zea Mays
MFHRLLRRAMPLPPPQSPLPAPRMPGVTGGRLFASLPSPPPLQSRREVHVWYLLPDELKDASQLKMYTELLSPSERKTALSMNGEKLQKGAVLSRALLRTTLSRYCKVDPRSFEFKKNKFGKPEVLWRSDDSRMEWPLHFNISHTSSLIVCGITMDTPIGIDVEEKTRKTAKNILSLARRYFTPSEIDYLAKIPDPDAQQKEFVKLWTLKVSELS

SEQ ID NO: 47437 - protein, 162 aa, Zea Mays
MVPGVGLVHAPFSVRFPTSFFKQACELAPIFTELVDCVSLDGESLQAALSRTKQVHEFTARLLDIHDKMMLINNKEDIRLILHRSDYMLDSEINSLLQIENSRSYILPPTLQLSVVPSGLPMLESVWILSAVRLLMLMCQFSETGVIHSIQIYTKSKWLAMQ

SEQ ID NO: 47438 - protein, 95 aa, Zea Mays
MSMKLATVNPQVDLNSLPNVLPKDVHQSCGPPHFSLETSDASLSYLSQPHHGSPLGCMDNQSCMHPLDTTFCLAINPQYHFLNGVSDASSQLQLI

SEQ ID NO: 47439 - protein, 428 aa, Zea Mays
MGGKDVVCVKQLKGSSLTQSDVQARLKELADDRFSEDSTASSNSSTAGGGRLSQGLNVGPGSAAWQSFRSPVVSHKDDMVCIHVRRGGVDSGQGHGKWLSTITGFPDVISMSFVPITSLLTGVRGSGFLNHAVNLYLRYKPAIEELQQFLEFQVPRLWAPEFGQLPLSLQRRKNILPSLQFTLMGPKLHVNTAKVDSCLRPVTGIRLFLEGKKSDQLGVHLQHLSATPGAITVLGEAASSADDAAAVNERAYIEPVRSPLLSHICTAPVQYNGALIDDCAAIVTSAWLEVRDACCLKKVLFLRLGFSGVADMKIRRSEWGGALVAPRRSGSLSARLSAALSGGLAPAPPAVEEKVEVNSAIFPKGPPVPLPVQKMARHIDTTEVSRGPDDLPGYWVVTGAKLCMEGGKVALKVKYSLLIAVQEDPEGH

SEQ ID NO: 47440 - protein, 395 aa, Zea Mays
MQLYLVARGGELLSEPSRVSSPLPSPPPCCSAPRSAGSTLHGPRPGLLLRALRPQSRRPSRPLKTAYYTETYTTKLASLSPHKLRRATRRSRIIPGAARQLAPSSQPAMAKPQEVRSVDSFSQLPFIRPAPAPRDATIRLFGREFPSDHNQQQQDAASDSPDAANNGSTVTCESNGAAKSGAAAERKFECHYCCRNFPTSQALGGHQNAHKRERQHAKRAHLQASLAMHRYVPGHMYGLFNYYPHPHPIGGGARFDHPAPPPPPLQHYPMWTTSASPAGPYGGGPGSMSQPINGSPVPAGLWRVPPPPAATAMENFGVSARHGASGGTAFPVGPPGGEAAACKDDKAAVMMSLLSPSPSLSSCSSTSPETKLAGLRSLPSLWISSRKRVSILIVF

SEQ ID NO: 47441 - protein, 281 aa, Zea Mays
MERDGQQTRRDKLIIDTDPGIDDSMAILMAFRAHTLEIIGLTTIFGNVDTEGATCNALLLCERAGHPEVPVAEGSHEPLKGGKPRIADFVHGSDGIGNLFLPAPSAKKVEESAADFMVNKVSEFPGEVSVLALGPLTNVALAIKRDPSFASKVNKIVVLGGAFFVAGNVNPAAEANILGDPEAADITTQVCLTDEGLLELRNSKGKHAPFLSETCKFYRDWHVKSDGFHGIFLHDPVSFTAVLHPEYFTFKKGVVRVETQGICTGHTLMDQGLKKYAFFSE

SEQ ID NO: 47442 - protein, 260 aa, Zea Mays
MDSFSSAEEVREMRDRMADLVAGFDGANSAVFSTKDHRQLKDDYFFKSAENISFFFEEKAYGDDGCLKQPKELSINKVGHALHELDPVFKKFSFSESVASLFSSLGYKRPAVIQSMYIFKQPGIGGEVVPHQDNTFLYTEPRTCTGLWLALEDATINNGCLWAIPGSHKKGLVRRMVRDENGTHFDRPSPVYDQKEFVPLEVKSGALVVIHGDLIHQSFENLSPASRHAFSLHVVDTEGCKWSEDNWIQRKTAPEPLYVS

SEQ ID NO: 47443 - protein, 146 aa, Zea Mays
MYVCENFLLDTEIFLFLLESLIFFPLTLSLTEKAYGDDGCLKQPKELSINKVGHALHELDPVFKKFSFSESVASLFSSLGYKRPAVIQSMYIFKQPGIGGEVVPHQDNTFLYTEPRTCTGLWLALEDATINNGCLWAIPGSHKSIF

SEQ ID NO: 47444 - protein, 257 aa, Zea Mays
MWGLMAVLQTCFGVMANISCACSDLAMVSCFPLQRQLKDDYFFKSAENISFFFEEKAYGDDGCLKQPKELSINKVGHALHELDPVFKKFSFSESVASLFSSLGYKRPAVIQSMYIFKQPGIGGEVVPHQDNTFLYTEPRTCTGLWLALEDATINNGCLWAIPGSHKKGLVRRMVRDENGTHFDRPSPVYDQKEFVPLEVKSGALVVIHGDLIHQSFENLSPASRHAFSLHVVDTEGCKWSEDNWIQRKTAPEPLYVS

SEQ ID NO: 47445 - protein, 255 aa, Zea Mays
MVSGAAPNPDGGGAQNTQRPPPLTQAGARTALATPPAVSGGAAHSASTSGGSAGSPPSSRSEQHAPDGAAKGPALGAAPAAAASTPASDSTFLRLNNLDINGDDAPSSQAPTSKKKRRGTRAVGPDKGNRGLRQFSMKVCEKVESKGRTTYNEVADELVAEFTDPNNNIEAPDPDNPNAQQYDEKNIRRRVYDALNVLMAMDIISKDKKEIQWKGLPRTSISDIEEMKTELVGLKGRIEKKSAYLQELQDQVCKT

SEQ ID NO: 47446 - protein, 979 aa, Zea Mays
MYGYAARYAPSTVIEARINALVGSNMLGRLLHVQHPTAKQAVITAIDLLGRAVISAAEMGISFPLKRRDQLLEYVLTLMGRDQSNDLTDFNTELLHTQSLALSACTTLVSLEPRLPMETRNRVMKATLGFFALPTEPSSIVESLVTNLIILLGAILLTSGEDGRSRAEQLLHILRQLDPYVSSSLEHQRRRGCVAVQEVLIKFRNLCSGGFGALGSYPTFTMNKQIDRGTRSLSSLPSAFVLPSRDSLSLGERTMAYLPRCADTDTEVRKVAIQIIALFFDISLSLPKQKAYPNDIDLESSYSALSSLEELVSIVRREASVDQTELFQRVVSSVCILLSKDELVVLLHSCTLATCDKIKQSADASIQAIIMFIIRRGKELREADVSRTTQSLLSSAISLTDTHSRQEVLNAISCLAENTNHVVVFDEVLSVAGKDICTKDIPRIRGGWAIQDVFYAFSQHKELALLFLEYTLSILHKEPVIINSSEKGESTSESLADDCILQATMFALNAFMRGGGKIGKQAVEKSYPSVLSGLILKLGSLNGVAELGRNELLRSLLIAFQSFCECVGDVEMGKLLARDGEQTEKDKWIELVQEIACSSSVKRPKDVLPTCVILCNALNRNQRAEREAAAAALSEFIHHIEKEPTLLEQMVEEMCQHVSDDSPTVRSLCLRGLVQAPESHMLKYIQQVLGVILALLEDPNESVQLTAVQCLLNVLNLSEQDAVGPILINLLVRLRNLQVSMNTKMRSNAFAAYGALSAYGVGLQRTAFIEQIHATLPRLILHLHDDDLSVRLACRNTFQLLATLMEVEGLSVLLSKQYFASDRRSDYEDFIRDLTRQLCRLSPARVDSYLESAIQAFDAPWPVIRANAVCLVSCMLSFLDDQRFIAPYFSQVFATLVGRMSQSPDAIVRASASSALGILIKRSNMLRSLVSRYDRADSSRNSQSGDSNTKTPSEFQEQAEGNPNDGASGAAIKGTEADH

SEQ ID NO: 47447 - protein, 1140 aa, Zea Mays
MKAYISDPEDLKQDSTYQEKWDDMIINFLAECLDVVNDTEWVISLGDAFARQYDLYSISDGHAALLHRCLGMLLQKVDDRIYVSEKIDWMCRHSSMSIPINRLGLAQGIGLVAASHLDTVLEKLKNILDSAEQSAFQRFLSFFSFGPKVEDVDDTYAALALMYGYAARYAPSTVIEARINALVGSNMLGRLLHVQHPTAKQAVITAIDLLGRAVISAAEMGISFPLKRRDQLLEYVLTLMGRDQSNDLTDFNTELLHTQSLALSACTTLVSLEPRLPMETRNRVMKATLGFFALPTEPSSIVESLVTNLIILLGAILLTSGEDGRSRAEQLLHILRQLDPYVSSSLEHQRRRGCVAVQEVLIKFRNLCSGGFGALGSYPTFTMNKQIDRGTRSLSSLPSAFVLPSRDSLSLGERTMAYLPRCADTDTEVRKVAIQIIALFFDISLSLPKQKAYPNDIDLESSYSALSSLEELVSIVRREASVDQTELFQRVVSSVCILLSKDELVVLLHSCTLATCDKIKQSADASIQAIIMFIIRRGKELREADVSRTTQSLLSSAISLTDTHSRQEVLNAISCLAENTNHVVVFDEVLSVAGKDICTKDIPRIRGGWAIQDVFYAFSQHKELALLFLEYTLSILHKEPVIINSSEKGESTSESLADDCILQATMFALNAFMRGGGKIGKQAVEKSYPSVLSGLILKLGSLNGVAELGRNELLRSLLIAFQSFCECVGDVEMGKLLARDGEQTEKDKWIELVQEIACSSSVKRPKDVLPTCVILCNALNRNQRAEREAAAAALSEFIHHIEKEPTLLEQMVEEMCQHVSDDSPTVRSLCLRGLVQAPESHMLKYIQQVLGVILALLEDPNESVQLTAVQCLLNVLNLSEQDAVGPILINLLVRLRNLQVSMNTKMRSNAFAAYGALSAYGVGLQRTAFIEQIHATLPRLILHLHDDDLSVRLACRNTFQLLATLMEVEGLSVLLSKQYFASDRRSDYEDFIRDLTRQLCRLSPARVDSYLESAIQAFDAPWPVIRANAVCLVSCMLSFLDDQRFIAPYFSQVFATLVGRMSQSPDAIVRASASSALGILIKRSNMLRSLVSRYDRADSSRNSQSGDSNTKTPSEFQEQAEGNPNDGASGAAIKGTEADH

SEQ ID NO: 47448 - protein, 1193 aa, Zea Mays
MTNMVDLFARLVVLLHNPLARGQLATQILTVLCYLGPLFPRNLSLFWQDEVPKMKAYISDPEDLKQDSTYQEKWDDMIINFLAECLDVVNDTEWVISLGDAFARQYDLYSISDGHAALLHRCLGMLLQKVDDRIYVSEKIDWMCRHSSMSIPINRLGLAQGIGLVAASHLDTVLEKLKNILDSAEQSAFQRFLSFFSFGPKVEDVDDTYAALALMYGYAARYAPSTVIEARINALVGSNMLGRLLHVQHPTAKQAVITAIDLLGRAVISAAEMGISFPLKRRDQLLEYVLTLMGRDQSNDLTDFNTELLHTQSLALSACTTLVSLEPRLPMETRNRVMKATLGFFALPTEPSSIVESLVTNLIILLGAILLTSGEDGRSRAEQLLHILRQLDPYVSSSLEHQRRRGCVAVQEVLIKFRNLCSGGFGALGSYPTFTMNKQIDRGTRSLSSLPSAFVLPSRDSLSLGERTMAYLPRCADTDTEVRKVAIQIIALFFDISLSLPKQKAYPNDIDLESSYSALSSLEELVSIVRREASVDQTELFQRVVSSVCILLSKDELVVLLHSCTLATCDKIKQSADASIQAIIMFIIRRGKELREADVSRTTQSLLSSAISLTDTHSRQEVLNAISCLAENTNHVVVFDEVLSVAGKDICTKDIPRIRGGWAIQDVFYAFSQHKELALLFLEYTLSILHKEPVIINSSEKGESTSESLADDCILQATMFALNAFMRGGGKIGKQAVEKSYPSVLSGLILKLGSLNGVAELGRNELLRSLLIAFQSFCECVGDVEMGKLLARDGEQTEKDKWIELVQEIACSSSVKRPKDVLPTCVILCNALNRNQRAEREAAAAALSEFIHHIEKEPTLLEQMVEEMCQHVSDDSPTVRSLCLRGLVQAPESHMLKYIQQVLGVILALLEDPNESVQLTAVQCLLNVLNLSEQDAVGPILINLLVRLRNLQVSMNTKMRSNAFAAYGALSAYGVGLQRTAFIEQIHATLPRLILHLHDDDLSVRLACRNTFQLLATLMEVEGLSVLLSKQYFASDRRSDYEDFIRDLTRQLCRLSPARVDSYLESAIQAFDAPWPVIRANAVCLVSCMLSFLDDQRFIAPYFSQVFATLVGRMSQSPDAIVRASASSALGILIKRSNMLRSLVSRYDRADSSRNSQSGDSNTKTPSEFQEQAEGNPNDGASGAAIKGTEADH

SEQ ID NO: 47449 - protein, 281 aa, Zea Mays
MAASPDHLFGLRNSFYVGAYHAVITSSQSLPAHALSPDDLVERDALMYRSYIAIGSYQLVIGEIGPSAATPLQAVKLLAVYLSGDGGNRESVVSRLRELLSDAAVGSNPILRVMAGTVFMHERDYAEALKHTNSGGSMELTDHAEKQLRVMQQLDEDHTLTQLANAWVDLVLGGSKIQEARLIFQDLSEKYPTTCTILNGKALCSMHMGNFEDAEGLLLESLNKDAKDTETLANLTVCSLNLGKPATRYLNQLKLAHPDHALVKRMSSAAESFDRACQAMA

SEQ ID NO: 47450 - protein, 738 aa, Zea Mays
MSPVQDGLLIRKPPDMRFPSRRNVPMSADPVGHLHNGSSFDAVSVSGSDGSSGRYTPKISASTHNSFLQDSSNALSPFANNRTVRNPLTSSGDWSGSSAPDASTDGSTSNSGEAGLRGEEDDVDKLRSEIATLTRKVDVSDMELQTLRKQIVKESRRGQDLFKEMSSLREERDALRRECERLRGAKNMIHDSNGSEKRLSDGDDPWSQIEELKQDLSHEKNLNSDLRLQLQKMKESNSELLLAVKDLDESLDKKNREISILQEDTQEDQQEAEYEHALSNVHNSGQKLALSETSSYQEKEDELMLDALAKKRDDISTSELEKKVLELSNEIELYKKDREDIEMQMEQLALDYEILKQENHDVSSRLEQAQLREQLRMQYECSAHLAIISDLEANVESLDNELQTQAKKFEADIAEITSAKVEQEQRAIKAEDSLRKIRWNNAATAERLQEEFKVLSSQVSSAFSANERHLVQARKEVAELQLQKSQLEELLQKAQGDLGSVQDQHRAKVQQLITLVDFKSKEIDRLLTELKSKSDEFHDQKRCDEARLNALSEEMDLLNAKIDELSSERNDLSEKNAQKDKELAGISEKDMQLQDKTAEITSLNKELVSLKDQVKTHLDELHDLKCLKDRKEETIGKLQIDIGSLKLQCDNLKTSLSKKESEKDNLASQVLELRRSLETREEGAKANGQNSDAKNNPHTNNKRMKHNTGSTGSIAALPGTNGQGEDDGDCNGHDMRNT

SEQ ID NO: 47451 - protein, 767 aa, Zea Mays
MSPVQDGLLIRKPPDMRFPSRRNVPMSADPVGHLHNGSSFDAVSVSGSDGSSGRYTPKISASTHNSFLQDSSNALSPFANNRTVRNPLTSSGDWSGSSAPDASTDGSTSNSGEAGLRGEEDDVDKLRSEIATLTRKVDVSDMELQTLRKQIVKESRRGQDLFKEMSSLREERDALRRECERLRGAKNMIHDSNGSEKRLSDGDDPWSQIEELKQDLSHEKNLNSDLRLQLQKMKESNSELLLAVKDLDESLDKKNREISILQEDTQEDQQEAEYEHALSNVHNSGQKLALSETSSYQEKEDELMLDALAKKRDDISTSELEKKVLELSNEIELYKKDREDIEMQMEQLALDYEILKQENHDVSSRLEQAQLREQLRMQYECSAHLAIISDLEANVESLDNELQTQAKKFEADIAEITSAKVEQEQRAIKAEDSLRKIRWNNAATAERLQEEFKVLSSQVSSAFSANERHLVQARKEVAELQLQKSQLEELLQKAQGDLGSVQDQHRAKVQQLITLVDFKSKEIDRLLTELKSKSDEFHDQKRCDEARLNALSEEMDLLNAKIDELSSERNDLSEKNAQKDKELAGISEKDMQLQDKTAEITSLNKELVSLKDQVKTHLDELHDLKCLKDRKEETIGKLQIDIGSLKLQCDNLKTSLSKKESEKDNLASQVLELRRSLETREEGAKANGQNSDAKNNPHTNNKRMKHNTGSTGSIAALPGTNGQGEDDGDCNGHDMSGRGSEGAGLAEGEQQGGGGGAEGAARAVLGD

SEQ ID NO: 47452 - protein, 732 aa, Zea Mays
MSFTPVPRFRGAAYSQLCPQSSSCAEHLVNVDGASAKDLSVDPSTFCIPQDANQGFCSRALQYTSSVSKQGFAAQGLPVNAAEFGLNNDSSLVGGYQQFDYLLGPPQTEVCEGMWMKNINTSIIHRRRPSNASCLDHTEELTSYENDEGAISFGSSCSTGIASYPYSTPLQRNSHISDTRDGTWDALVQMQEALEASNSDNGLNEECSDLTFNHAELSGGNAVKHKVVWDNGSLNSPSFTSNLLSFPGDTETTLTSASTVYCTFQNFADLQHKMNNNEQNKLSSEVELPRQKVPMTNHVNGSGGEMHSAEWGTNPGLIESSGFMPSNEDRQNDISHQPSSSFVYSADGTVDHCSKKSPLMYECEEQMEIDSLLNSFGVSTDSFSQTYGMFERSNNLVEFDMKTELDESGSAACFNNNAPYMQTGPPESAISDGSSYPEQYQSTSQTCGLVYASASQWQNMSSSGLPLLDCRKSIGEPTSIISLGGNGKGHLLPTSEDTLLQKPQSVAPDARLEMTDNVADCYLESAASLDGHSCPLGASACHDEAMAAKDLQTAQHGVVTDCTFGIHTSNHAGHSDMLLPITQTTSVQEPGLSLSKDLNSSCIRGTEVKKVDLTATYNSERHGILRLKSFEQKTPESMGMKTYIYHCGDHSQIVDPQQSIILAASKPSHSSVLPVDKSDGKVVSQQKKRKRAAENLLAWHDHIMPGHGSMHRRRTPELDWARATKRLVEKVI

SEQ ID NO: 47453 - protein, 701 aa, Zea Mays
MSFTPVPRFRGAAYSQLCPQSSSCAEHLVNVDGASAKDLSVDPSTFCIPQDANQGFCSRALQYTSSVSKQGFAAQGLPVNAAEFGLNNDSSLVGGYQQFDYLLGPPQTEVCEGMWMKNINTSIIHRRRPSNASCLDHTEELTSYENDEGAISFGSSCSTGIASYPYSTPLQRNSHISDTRDGTWDALVQMQEALEASNSDNGLNEECSDLTFNHAELSGGNAVKHKVVWDNGSLNSPSFTSNLLSFPGDTETTLTSASTVYCTFQNFADLQHKMNNNEQNKLSSEVELPRQKVPMTNHVNGSGGEMHSAEWGTNPGLIESSGFMPSNEDRQNDISHQPSSSFVYSADGTVDHCSKKSPLMYECEEQMEIDSLLNSFGVSTDSFSQTYGMFERSNNLVEFDMKTELDESGSAACFNNNAPYMQTGPPESAISDGSSYPEQYQSTSQTCGLVYASASQWQNMSSSGLPLLDCRKSIGEPTSIISLGGNGKGHLLPTSEDTLLQKPQSVAPDARLEMTDNVADCYLESAASLDGHSCPLGASACHDEAMAAKDLQTAQHGVVTDCTFGIHTSNHAGHSDMLLPITQTTSVQEPGLSLSKDLNSSCIRGTEVKKVDLTATYNSERHGILRLKSFEQKTPESMVDKSDGKVVSQQKKRKRAAENLLAWHDHIMPGHGSMHRRRTPELDWARATKRLVEKTSCRKCY

SEQ ID NO: 47454 - protein, 602 aa, Zea Mays
MAVGDGILTPAISVLSATGGIQVEEKKMKNDAVVIVSVVILIGLFSMQHFGTDKVSWLFAPIVFVWFILIGVLGAVNISKYDQSVLKAFNPIYVYRYFKRGKTSWASLGGIMLSITGTEALFADLSYFPVQAIQIAFTVVVFPCLLLQYTGQAAYIAQNKDHVSHAFYFSLPDSVLWPSFIVATAAAIVASQATISMTYSIIKQALALGCFPRVRIIHTSKKYLGQIYSPDINWILLVFCIAVTAGFKNQSQIANAYGTAVIMVMLVTTFLMIPIMLLVWRSHWTLVILFTVLSLFVEIPYFTAVVRKIDQGGWVPLVFAVAFLIIMYVWHYGTLKRYEFEMHSKVSMAWILGLGPSLGLVRVPGVGLVYTELASGVPHIFSHFITNLPAIHSTLVFVCVKYLPVYTVPLDERFLVKRIGPKNFHMFRCVARYGYKDIHKKDDDFEQMLFDSLMLFVRLESMMEEYTDSDEYSTRETNLSGSANPRINGISAGSNMDLSYTSHDSIIQVQSPNYTGNSQAVSPGQLYHTVGDEIAFLNACRDAGVVHILGNTVIRARRDSGFIKKIAINYLYAFLRKICRENSAIFNVPHESLLNVGQVFYV

SEQ ID NO: 47455 - protein, 161 aa, Zea Mays
MKQEAATSIVVTQEDVLHHYKEPPPRREDDPPALAASLSLPSSLSEDDGDAMPQPSSYAVLPRREGELVSAEELLLVPPLNFAMVDHGVYRSGFPDASNLPFLETLRLRSVLCLCPEPYPEANLEFLRAHGIKLFQFGIDGSKFWTFDTEITGTICEHTRR

SEQ ID NO: 47456 - protein, 368 aa, Zea Mays
MVNFGKKLMADQVDEWKGYYINYKLMKKMLKQYVQQTQHDEKDREQVLKDFSRFLDDQIERIVLFLLQQQGHLASRIEKLAEKRTALLEEYDISQVYQLHDAYREVGLDLIKLLRFVDVNATGIRKILKKFDKRFGYKFTDYYVTTRANHPYSQLQQVFKQVGIVAVVGALSRNLEYLQHHEGSFVSIYDRPAVTLKDPIIDQVNHAVQKLTHATNFMQFLGQHALIVQEDAESESEDLVGDQSYHFMSLVLNLVNTFLYMVNTYIIVPTADDYAVSLGAAATVCGIIIGSMAVAQVFSSVYFSAWSNKSYFKPLVFSSIMLFLGNLLYALAYDLNSLIVLLTGRLLCGYAIFSIHSISLDLRSTFVC

SEQ ID NO: 47457 - protein, 248 aa, Zea Mays
MAAFPSAKPPLGVFFAAIAPRLQPRYYSISSSPNRMAPSRIHVTCALVYGPSPTGRIHQGVCSTWMKNTIPLEYSEECSWAPIFVRQSNFKLPADPSTPIIMIGPGTGLAPFRGFLQERLALKQSGAELGTSILFFGCRNRNMDYIYEDELQTFLEEGALSELIVAFSREGPTKEYVQHKMVEKATDIWNIISNGGYLYVCGDAKGMARDVHKMLHTIVQEQGSLDNSKTESYVKSLQMEGRYLRDVW

SEQ ID NO: 47458 - protein, 532 aa, Zea Mays
MAALEAAREWAGSVIPPELAAAAGGDPLAALAATAAALVAGLLIIAVWFRSGGGTPSKPVATPVRPPPVKVDADADVDDGRKRVTIFFGTQTGTAEGFAKSMAEEARARYEKAVFKVVDLDDYAQEDEEYEEKLKKETVVLFFLATYGDGEPTDNAARFYKWFTEGKEKEVWLKDLKYGIFGLGNRQYEHFNKVAKVVDELVEEQGGKRLVPVGLGDDDQCIEDDFTAWKELVWPELDQLLRDEDDTTGASTPYTAAIPEYRVVFIDKSDLSFQDRSWTLANGTGVIDIQHPCRSNVAVRKELHKPASDRSCIHLEFDISGTGLVYETGDHVGVYAENSVQTVEEVERLLDLSPDTFFSIHADAEDGSPRKGGGSLAPPFPSPCTLRTALLRYADLLNPPKKAALLALASHASDPAEAERLRFLASPSGKDEYSQWITASQRSLLEVMAAFPSAKPPLGVFFAAIAPRLQPRYYSISSSPKMAPSRIHVTCALVYGPSPTGRIHQGVCSTWMKRRMQLGSHLCEAVKFQVTC

SEQ ID NO: 47459 - protein, 196 aa, Zea Mays
MSSNLPVASMSSSAAAAAGGRSSKALESPPSGSLDGGGGMPVVEASTAPPLFIPVKYDQQQQEYLSMLALQQHHQQQQAGNLLQGPLVGFGGLYSSGVNLDFANSHGTAAPSSMAHHCYANGTASASHEHQHQMQQGGENETQPQPQQSSSSCSSLPFATPVAFNGSYESSITAAGPFGYSYPNVAAFQTPIYGME

SEQ ID NO: 47460 - protein, 283 aa, Zea Mays
MNYLRSRSLKRLLSLGRRSNADECAEECVDVDPPPNKPTWRCFSYEELNQATNGFHQDNMVGKGGYGEVYRGVLDDGRAVAVKRLAPTAAADEKKEKDFLTELGTVGHVRHPNVSALLGCCVDRGLHLVFHFSTRGSVSANLHDLKLPAMSWKQRHGIAVGTARGLRYLHKGCARRIIHRDIKASNILLTADYEPQISDFGLARWLPSEWTHHAIAPIEGTFGCLAPEYFTHGIVDEKTDVFAFGVFLLELISGRKPVDGSHMSLIAWGSWTRGSATATTAGS

SEQ ID NO: 47461 - protein, 583 aa, Zea Mays
MLPAVAAASPGLSHLPRYHHLGRRFHLRRHRLLPAIPARLSCGATHARRLLLAGAFAKGEGSSGQDVDHSAGATNSGSAYLGLFVRLLGLDNDTRDREHAVCTLYQYSLGGRKSIDEIMQFPGCIVLIISLLKSESILACEAATGLLRNITSVHIYRKMAGESGAMEEIINLLCKSTITPKILEQCLCTIWNFSIDEKWRYKVLKSDVLMKIVGYLDEEDIQVKEAAGGIISNLALSSSSHGALVEVGVIPKLVHLLQTKEDDYKIIRKEAKSSLIQLATDDCYYSLIIEEGLVRVPLVGSAAYKAFKPLPHSWPSFPDGSKIQRSSHPSKYGATELLLGLSVNENDTKPDEAKINAMIGRSNQQFLARVGAIELDDQGQEESGSEKNDMYTILPWVDGVARLVLILGLEDVSAIKKAARAMGDASINEHMRTSFKEAGAVKPLLQLLKHKDVHVREAGAYALEKLCVSATVCHNIKTEGGLELLVNIVKDRHTPVELLEKIIYILSRMFDMGICMVAVPDTEGYKDSENSAKTSVNQEMSSMIVGKHINYAVVLHTKVSARTLFGTHRSLRHNLCSPWRVDL

SEQ ID NO: 47462 - protein, 722 aa, Zea Mays
MSLPAISMYTSPPGAVYSSEFDPASRGSSPCTTAAPPPPAASYRLPSGGGGLSCLFSSPAAAAAPPRAPAHDDLGALWHNRSDDLSVPADGGGYSYSHSHSSSQLKRRDLHHHHHSPVSVFQGPSTSSPSRSPPASWLAARDRDRLFAGFVRNALGSCVDYAPPTSPRPEVGASELAFELDENLAEASPACEPYAQELLASAQDRHRIFHEELVVKAFLEAEKAHRGQTRASGDPYLQHCVETAVLLAKVGANATVVSAGLLHDTIDDSFIDYDHIFHMFGAGVADLVEGVSKLSHLSKLARDNNTASRTVEADRLHTMLLAMADARAVLIKLADRLHNMETLKALPCAKQERFAKETMEIFVPLANRLGVASWKDQLENLCFKYLNPEEHEELSSKLRESFDEELITSAVDKLDKGLRDAGVSYHSLSGRHKSLYSIHCKMLKKNLTMEEIHDIHGLRLLVESEEDCYEALCVVHRLWPRVTGRFKDYISRPKLNGYRSLHTVVMSEGVHPFEVQIRTREMHLQAEYGFAAHWRYKEGTCRHSFVLRMVEWARWVLTWQCEAMDRERTASLGSDDGTVSVRPPPACPFPQHAEDCPYSYTRQCNHDGPLFVILLEHGKMSVQEFPANLTVMDLMDRVGANSSRWSPYSIPMKEDLRPRVNGEPICDPDRRLNMGDVVELTPALPRKSLSGYREEIQRMYDRGGFALSARGGGGGGGGARRC

SEQ ID NO: 47463 - protein, 269 aa, Zea Mays
MYPYRMSNVMIGYLNLATLLASLPIIGAGLWLARGSSSSSSTTCSSILQTPLLAVGFAALLVSLAGFVGACFHVAWALRLYLAAVALLVAFLLGLTAFGFAVTAGGGGAQVYGRPYREYRVTDYSAWLQKRMQDDRYWRPALACVVGSKACPKIQNWTPMDYLQHDLTPIQSGCCKPPTACQYSGGMPVGAQDEDCYRWNNAPDILCYRCDSCRAGVMEQVRQDWHKIFVLDVAVLAALVCICSCGCCAFRNARRSRSQYPYGVAMMGW

SEQ ID NO: 47464 - protein, 104 aa, Zea Mays
MGSVLLPTLRLKSEVDAAIRDTLDKVLVLRFGRATDATCLHLDDILDKSSWDISKFAMVALVDMDSEEIQVYIDYFDITLVPATIFFFNAHHMKMDSGQYSEVR

SEQ ID NO: 47465 - protein, 587 aa, Zea Mays
MASPRGGFDEQDRRTEKGTEVFVGGLPRSATESTLREGYGFVRFAKRDYANTAKRQKNGIEVQGKRLVVELSMDQDTVFFGNLCKEWTLEEFEELIHKAFKDVVSVDLAMASNLGSSNKKNINRGFGFVRFSSHAAAARVIRIGSRTDFMLGDILHPAINWADKESHLDPDEMAKMKSAFIGNLPEDVNEEYLRKLFGQFGEVVRVAISRKGQCPVAFVHFAKRSELENAIEEMDGKTVRGPGRGPSFKIQVSVARPTADNDKKRSREEVRTRRSNASGDRRDYSHGRYGHDSLDRQVKAPRLSNYVADAADPYESAVNSLPSAVKEVLLRILRLRIGTRYDIDIHCVKSLDELPESSALAVLNQFLISGGDKHNKGDYFASLVAKHQAETFGLTHALHGTTYLSRNPEMHSKRYPHEDYDFVTPRSSRYDSSAHHPSTYYEDDPPVSESRVRRYAEERSTIVRSPEPRPRYDETDIRINPEPRLPYESRHNAEKHLDRRYIQEHSSNIERPAEEALLSRERRFLPAAGYMPNPGGSDFRSRSPAEYSAQRQQMRFDPFTGEPYKFDPFTGEPIRPDPNQRRSGSLY

SEQ ID NO: 47466 - protein, 222 aa, Zea Mays
MEEEEQQILKGDEVIVELDASLEDLYMGGSLKVWREKNVIKPAPGKRRCNCRNEVYHRQIGPGMYQQMTEQVCDQCPNVKFVREGEFLTVDIEKGMKDGQEVLFFEEGEPKIDGEPGDLKFRIRTALHSHFKREGNDLHATVTISLLQALVGFEKTIKHLDNHLVEIGTKGITKPKEIRKFKGEGMPLYQSNKKGDLYVTFEVLFPKTLTADQKAKLKDVLV

SEQ ID NO: 47467 - protein, 161 aa, Zea Mays
MRSATRRARRTIPRPRRAQSCSPRHASPRPRTAAPPLPPSTHRRHRSAPPVRSASDQAPPPLPRPRPRLQLGPSAAAAQPLRAPLHPRGPRLWGCAWPRSRRRCRSWGGSLRALMLPAECRCPRGASKYSSCLRTCQLCRRRTWRGRRTSCSGTQTPRLWS

SEQ ID NO: 47468 - protein, 386 aa, Zea Mays
MDSDAGGSSSAPPPPSAAIGAGAGAETKGDERGRKQVMVVLVGPPGSGKSTFADAVVGGSTAGRHWVRVCQDTIGNGKAGTKIQCLKAASDALKEGKSVLVDRCNLEREQRADFVKLGGTLRADVHAVSLDLPAKVCISRAVSRKGHEGNLQGGKAALVVNRMLQKKETPLLTEGFSRIMCCNDDGDIKKAVDLYNGLGPSDSLPSGVFGQKSKRPVQVGIMKFLKKTDASVVETSSGPKQALTEIKPAQQNPLPKQENVEAGFACSMEVEKGLNDKMENEEHAKGSDYCDVGSRTLAFPSISTADFQFDLDRASDIIVDTAANFLQKFDNIRLVLVDLSEKSRILSLVKQKAAKKSIDSNRFFTYVGDITQLHTKGGLQCSVIGG

SEQ ID NO: 47469 - protein, 138 aa, Zea Mays
MYMANALNEFGILYCHMVEPRMVKLGEKFETPYSLRPIRDAFRGTFIVAGGYGREDGNRAISTGYADLVAFGRVFLANPDLPRRFEVDAPLNKYNRDTFYIPDPVIGYLTTHFFRQMYKCSLFSNLLFRLCSNWLVYQ

SEQ ID NO: 47470 - protein, 469 aa, Zea Mays
MASEAKDVGILAMDIYFPPSCVLQEELETHDGVSKGKYTIGLGQENMAFCTEVEDVISMSLTVVKSLLKNYNIDPKCIGRLEVGSETVIDKSKSIKTWLMQIFEESGNTDIEGVDSSNACYGGTAALFNCVNWVESNSWDGRYGLVVCTDSAVYAEGPARPTGGAAAIAMLIGPNAPISFESKYRGSHMAHVYDFYKPDLASEYPVVDGKLSQTCYLMALDSCYNVFCKKYEKHEGKQFSIFDADYVVFHSPYNKLVQKSFARLYYNDFLRNCSTVDEESREKLAPYAGLSSEESYQSRDLEKASQQVAKNLYESKVQPTTLIPKQVGNMYTASLYAALASVIHNRHETLAGQRIVMFSYGSGLTSTMFSFKINEGHHPFSLLNIANIMDVSKKLKARHVVPPKKFIEVLKLMEHRYGAKDFVTSQDTSLLSVGTYYLTHVDSKYRRQVFLSILILLRLSIRKGRWSLD

SEQ ID NO: 47471 - protein, 315 aa, Zea Mays
MGHLRGLTAARLLAAAFLLSVAVPAARAQEETEHEEEFSYVVGDENGPEHWGSIKAEWGNCSAGRMQSPIDLSHERVSLVRSLGYLTHSYRPAEAAIANRGHDIMVRFKGDAGFLVINGTAYYLKQMHWHSPTEHTVDGRRYDMELHLVHESSANKAAVIGMLYEIGAEDPFLQALEPSIHRIADRQDREEAIGVVDPRRARGRASVYYRYVGSLTTPPCTEGVIWTVVKRVSGRGPAAQFSSPNSNQTASFDRSSAPCPGTSWSCSGKPCTTAWRRTRGRFRTSTTGTSASSAQSHTSTTSTSYGIGCTVQQRA

SEQ ID NO: 47472 - protein, 113 aa, Zea Mays
MILLISLTVCSEQEPKHVFLGICILKKKEEEERKTGIQPVKKIGKAESPNLQSFVKQQFSGTPPDQQKVNTLGPEDRPKDTTHTEDATTDNERYTEPTGTGATFKPGTWQPPT

SEQ ID NO: 47473 - protein, 59 aa, Zea Mays
MAKGRKLQHQRNWLSWRQDVNVSSKTFSFSKRKKKRKEKLVSNQSRKLGKLNLQISKVS

SEQ ID NO: 47474 - protein, 76 aa, Zea Mays
MARFRRNADAAKESIRAFLGGWRGQQAVADEESYVALEKAIRSLAEFYSKAGPSASLPQDVKNKILDDLSAADAYL

SEQ ID NO: 47475 - protein, 54 aa, Zea Mays
MVLVKMNKQRLSVQDQKGRRSSPSRACTCFRSDLIFKHKHKNMAYTWTDSMARF

SEQ ID NO: 47476 - protein, 76 aa, Zea Mays
MSSYCTFSKLTTPSLQRKNKKAYVRWGKFRWTRSHIVIKLPDMSCLFTKTMQRILGTHFGISDIISVSHRAIARRR

SEQ ID NO: 47477 - protein, 110 aa, Zea Mays
MASTVLEATRVAHEDLERLERLAARELQWEPDNPRDRFFQSHRVRHMLDLVVSTSCKLSHCKTSIRFFLKLKSEFEERWANGEIPGWGNKGAENESKIDLDYYSTVETGP

SEQ ID NO: 47478 - protein, 92 aa, Zea Mays
MASTVLEATRVAHEDLERLERLAARELQWEPDNPRDRFFQSHRVRHMLDLVVSTSCKLVHPLLQKSYSITQQFRGVIRKFPLKCHLIARFPN

SEQ ID NO: 47479 - protein, 1328 aa, Zea Mays
MPDNTGLEIGLKGSKGAPMPGTEGRVAKDLKKAPASLEESNASRDEDPGGGPALTGKKRKDRRGSADDNRNVTRRVLRSDAMKLRAEAEAPCGAGVEVSKTDSLERKHCDTTVEAEACKSSVLMEVACNGGEANGLVNLDASDVSEESTRCSDNNMGMPGVPATDFSQDGGLAQGSIAESDDKTVKSDEVSAVTHSEQNDSQAGINSYNADEAQDNKVRHGPCQDEVIDSAITNGANTSTDLTKTSPTSGSESVKQDDSKQENNLVHTEGVILHSGDPKVENHSQIEDTCTETEISLTGNGRCAADNHTDRTGYTKQEERGSPVNETNDISAHDIVFTRRGRKSCEAKQGTCEEESRFEKRVTRSATVRQREVSGSLCKTTTNETALGSRGRKGDIIAHYTRKVSSAVSPKGHHAELGECNTSMENQTVKQKVVDRRDSGATKNDNDANDTKNKESEKTEINLKTQPPVGSVSIVNKTTVGAVSVVGQSISGSAITERNDTDHTDSDGVKYENMTLVQKLLLSVGAKIVASKKRVLEAGPDKTTGRSPIALPSMKKTRNTSSDPEIDQPDKSSGEKLIGNNCDLGNKRVLRERQHQNQTYLSSRSSNQSNQNAIKQTQDQSDDDDISSDTSYRRTRSGRRRGAARLAVPKQEDSSDSEEVVVVKKNRRKRKKSVHKHRAGSKLKHTSGSPPKTGRLGRPPLVKSECGCLPLQPGKGKMNVPEGTGALREEKQKISDQIKAMLLDAGWTIDLRPRNGRNYMDSVYIHPSGKGSYWSVTKAYYVFRADMESEQKESSKDHILSKKSVGSPGKRQVSSSSGCTLTDDILSKLKRVVVNKRTTKVEIQRLRQKKEKKNTTNSTRLHLGNERKKRGGCALLVRGSNKESGSTTDGFVPYEWKRTIFSWLIDLNVLSVNTKLNCLDESHSKVLLEGFVTRDGINCSCCSEVISVPEFVTHAGSEVNKPYRNILVDGLDIDLLHCLINAWNMQSDAERQDFFPVSIEGDDPNDDTCGICGDGGNLICCDGCPSTFHMSCLGLEALPTDYWCCSNCSCKFCHEHSSDDAEDTADVDSSLHTCSQIHNIWYHESGILSMTSAADDVRTWREELARARADLEQARSAILQLVIYSRQRWSLTADQRRQRDCRRLCMGSWRDVQCGSGLPSSGYDTWLPGAASSTASSGLPSSGCGTWLPDVASSTTSGNTVAGYGLQQGWPILSHVDSKNKSGWVVLSPLELAVAQALFEELQNLLAVKKDLEPEYSCRVVQRIHEEVPEEVLALDKRVECNSKIAVALSLMDECFLPIVDQRTGINLIRNVVYNYQILPDWISVDSI

SEQ ID NO: 47480 - protein, 1413 aa, Zea Mays
MPDNTGLEIGLKGSKGAPMPGTEGRVAKDLKKAPASLEESNASRDEDPGGGPALTGKKRKDRRGSADDNRNVTRRVLRSDAMKLRAEAEAPCGAGVEVSKTDSLERKHCDTTVEAEACKSSVLMEVACNGGEANGLVNLDASDVSEESTRCSDNNMGMPGVPATDFSQDGGLAQGSIAESDDKTVKSDEVSAVTHSEQNDSQAGINSYNADEAQDNKVRHGPCQDEVIDSAITNGANTSTDLTKTSPTSGSESVKQDDSKQENNLVHTEGVILHSGDPKVENHSQIEDTCTETEISLTGNGRCAADNHTDRTGYTKQEERGSPVNETNDISAHDIVFTRRGRKSCEAKQGTCEEESRFEKRVTRSATVRQREVSGSLCKTTTNETALGSRGRKGDIIAHYTRKVSSAVSPKGHHAELGECNTSMENQTVKQKVVDRRDSGATKNDNDANDTKNKESEKTEINLKTQPPVGSVSIVNKTTVGAVSVVGQSISGSAITERNDTDHTDSDGVKYENMTLVQKLLLSVGAKIVASKKRVLEAGPDKTTGRSPIALPSMKKTRNTSSDPEIDQPDKSSGEKLIGNNCDLGNKRVLRERQHQNQTYLSSRSSNQSNQNAIKQTQDQSDDDDISSDTSYRRTRSGRRRGAARLAVPKQEDSSDSEEVVVVKKNRRKRKKSVHKHRAGSKLKHTSGSPPKTGRLGRPPLVKSECGCLPLQPGKGKMNVPEGTGALREEKQKISDQIKAMLLDAGWTIDLRPRNGRNYMDSVYIHPSGKGSYWSVTKAYYVFRADMESEQKESSKDHILSKKSVGSPGKRQVSSSSGCTLTDDILSKLKRVVVNKRTTKVEIQRLRQKKEKKNTTNSTRLHLGNERKKRGGCALLVRGSNKESGSTTDGFVPYEWKRTIFSWLIDLNVLSVNTKLNCLDESHSKVLLEGFVTRDGINCSCCSEVISVPEFVTHAGSEVNKPYRNILVDGLDIDLLHCLINAWNMQSDAERQDFFPVSIEGDDPNDDTCGICGDGGNLICCDGCPSTFHMSCLGLEALPTDYWCCSNCSCKFCHEHSSDDAEDTADVDSSLHTCSQCEEQYHGACSPDIDSIATNLSSQTGNLFCQQSCRLLFEELQNLLAVKKDLEPEYSCRVVQRIHEEVPEEVLALDKRVECNSKIAVALSLMDECFLPIVDQRTGINLIRNVVYNCGSNFARLDFRGFYIIILERGDEIIAAASVRIHGTKLAEMPFIGTRNMYRRQGMCRRLVDGIEMRAPYMVEPTVEHIFKGVCSYETSIAVLSLHLTLMMTIILSSLNIEKLIIPAITELVDTWTSKFGFSPLDDSEKQEVKSVSMLVFPGTGLLQKPLLKTSPSEDQCSQGDKTEKSSDVVNEDSLCSGASADPLGSVVKEHGDTSKDADGTCNGDVSQRSPLS

SEQ ID NO: 47481 - protein, 193 aa, Zea Mays
MDPANEQKRSLQQAAAHRPTPRTTREASRGESRRSGKHHPAEMTVLLSPSSSLFLAKPSAVAKGRAAAVTCFSGPSLSVGREDQEGVAVVVGRRALASAAAVASVLGFAGRGLAANQGLLAGRVPGLSEPDENGWRTYRRPDDKSGGHGVGWSPIIPYSFKVPDGWDEVPVSIADLGGTEIDLRFANPKEGRL

SEQ ID NO: 47482 - protein, 108 aa, Zea Mays
MPAPRRQRHPRWLPLRRLHRRGLPRNGESVPVPQGGLLYRSQLQCRTCRDSHLRDWRHLPTEHTDTSHGFGIGTSSNWICLAFLLAISRMAQPEKRQLDAFHPSFIWR

SEQ ID NO: 47483 - protein, 382 aa, Zea Mays
MVTDFSEEMHCQFLEILRILMDSFTTSGAHRDVVIEIFYERHLDYLVDVIASSCPPRSLSRSSSNSDDHLIRHVVKFNLLKPIIDVFVDNGERYNMLHSGVLELLEYIRKENIKTLIIYAIESFWDELAIFEHFGSIQAFKLKYQQYLESAEPRLNASVPDMRKKAEQRGLEKEEEDYFNEDSDEEDSGSGRRAKHAQNQNNKPKSKVPNGSEADDTDGASRPKSAGLVDYDDDDDEDFNPPPKEPSRPAEDDVPLNISPLKRKPVNAVDGKHSDGEGRRRQKIETRISCAKIAAVTSTAIKHTDLQNKYASHLLTSATPSTEANGIFSEHGTNYEEQQHPMENTETSRQTGGDCIKDVGSMSPEKAVNTTNTSDSEPYSVR

SEQ ID NO: 47484 - protein, 174 aa, Zea Mays
MGVPKQRWTPEEEAALKAGVAKHGPGKWRTILRDSDFSALLRLRSNVDLKDKWRNLSVTAGGYGSREKARMALKKGRRVVPKLTAEPMDVDEKDMDNAHDTVIDVEPLAMAFEPLPFLESPDKSVARLDDLIVEAIRKLNEPSGSNKAVISGYIEVCGYKFIVCSLVFCLFCLT

SEQ ID NO: 47485 - protein, 201 aa, Zea Mays
MAALGSSVTSRGLALHTSVCVVFLHRRHGNPVIPAAPSRPQRSLASGLTTSSSGMNNAFPIIKGTTRIPAVGPGPANPPGGNLPIPSSMPPWAKWVAGAVILAIPIYRRFRTLEEKTAEVAIEVVDTVAEAAEKVAGEVAGAFPGNDGLREAASKIKTVADEIEEDAEKAEALIEKVDEIKKEVDSIVDPIIDKVVKDKEI

SEQ ID NO: 47486 - protein, 110 aa, Zea Mays
MYSSFLSGKTSHKDVKHTGNWLLKLYYGYRPFMAFCCVSCEVLYIILFLFADEKSTSLLSACKGLLNQSPIIILVFISTLVGWAVKQVTNVIQMKTAADACVVYDLKRSK

SEQ ID NO: 47487 - protein, 82 aa, Zea Mays
MMVWCRLKHEASLMRDDKVQYQLHVAEMEAVSVAMPPVYVNHGNDGGPAVKDIHMENFSITIDLIQEATLTILFGRHYDYKC

SEQ ID NO: 47488 - protein, 845 aa, Zea Mays
MAAAEDAEGDRVIEVVSAGALYHRGGDWERKYWSCSRGKDRYPYPVGYHAVRHFTGISYAMEIQQGPRGPIFLVTSTEGDTAIGQTPDIAWKNFQKKTGAKLFGFKNASIQRLLRELIVDSTGAVELNEPCEVTSEAGAHLVCKDASDVSEAEDPSVCLGMESGTPKRSIEPSQVENTLAVHYPDMLTAVDKCNVSTHKNTNEGDTVGRALLQDVSDSRCTLPLLEEVPKNAQSTSLDDNLGESSLVSSQQVGLSSGSYLNSEKSDIELAEKEVAKSMMSILLPQAIPLLMKSYKRKKFKHKNRENSTVSVKTVSAYNPSDSCCRGVTVPTIVGEGTNGNSSEMCDHGGSHHDKVKNGFANEDCRNDDLVVKLDEMNDYVADSFEDDAQILGDNTTKSMGNHHHYSEYVLSRGPNEKSKLLNGKSEVFEYQASVHNGKRAPDVVYNHENGQYMLSDSLVACLEDEFGGEDSSHPANYNQFNGDVKQFEQQFKELTAVIKNGSSVPVDVSYHKNTDNGSINVCAQAFARNGPGVSRNEECLANILPAPVHSNAHNDAVTSGKHDVSSTLNLPPACEAKSTLLVMRDGQHHTEVPAIDQKENRFHSVSYKCTKSDDNTSFHSENVEFVDKHVAFESPDNGMYSSDGSQRAITTEGWPAGDGVKADEENLLGKVEECQIRYKNGNKNTILSVYGEGNVCEHIPTKGENDVFHHQPSHALSTTNCTHGLVSEDRTQARPDHHLELVGCYLHPMPVLSVMLNTKNHNSLYIYVLCGLLESCQRFLYVYSINPKDQKDVSPCFVGYTPLVLPTLDHSSTGNFLFGRSGLHFTPDGQFLVLLSSIKIPSCRL

SEQ ID NO: 47489 - protein, 375 aa, Zea Mays
MGSSGADTPSKEQQPPATSGAAIPPVYPDWSSFQAYPPIPPHGFFPSPVASSPQGHPFMWGAQAMIPPYGTPPPYVMYPPGVYAHPSMPPGAHPFTPYAITSPNGNADATGTTVAAGNTDGKPSEGKDKSPTKRSKGSLGSLNMLTGKNPSEHGKSSGASGNGVTSQSGESGSDSSSEGSEGNSHNDSHHKESGQEHDGDVRSSRNGVSRLQSEGKLNQAMAILPIPSSGPATDPTTNLNIGMDYWANTASSAPAIHGKATSTTVPGAVVPAEQWTQDEHELKKQRRKQSNRESARRSRLRKQAECEELAQRADVLKQENASLRDEVNRIRKEYEELLSRNNSLKEKLEGKQHKTDEAGLNNKLQHSGKWFWTMS

SEQ ID NO: 47490 - protein, 188 aa, Zea Mays
MGSSGADTPSKQPPATSGAAIPPVYPDWSSFQAYPPIPPHGFFPSPVASSPQGHPFMWGAQAMIPPYGTPPPYVMYPPGVYAHPSMPPGAHPFTPYAITSPNGNADATGTTVAAGNTDGKPSEGKDKSPTKRSKGSLGSLNMLTGKNPSEHGKSSGASGNGVTSQRYFCCNLKHLIFLCASVFKYISE

SEQ ID NO: 47491 - protein, 112 aa, Zea Mays
MPSSPDLLLPADATKMRRYSALPNGGRQETLADRVHRYQGVMLVILASLALVSLVLLLMPRSPAGTMGGARGRQVRTPPPGDPLPDLESRCLDSPAGWIRRVGGRIVTTPSS

SEQ ID NO: 47492 - protein, 198 aa, Zea Mays
MLPLLAKGNSKRMEYYWMLDKLGGAFAPKPSSGPHKSRECLPLILIIRNRLKYAPTYREVISILMQHHVLVDGKMSFPSLRQTRTTGCFRLHPIRDEDAKFKLYKVRSVQFGQKDIPYLNTYDDRTIRYPDPLIKANDTIKIDLETNKIMDFIMFDVGNVVMVIGRRNTGRVGVIKIREKHKGNFETIHVLLGAFCYV

SEQ ID NO: 47493 - protein, 211 aa, Zea Mays
MGNNRSILCHGSCALLLWPLTLTFSFWSNLHSFRPLCWVEHMSLDNETGLDKPGIRVRSVTGLVAANYFVPRYFVWAVLIANLARIGYEEKTMYMVAYDWRLSFQNTEVRDQTLSRIKSNIELIVATNGGNRVVVIPHSMGVLYFLHFTKWVEAPPPVGGSGGPNWCENHIKAVMNIGGSFLGVPKAVAGLFSSEAKDVAVARYKVIDSFI

SEQ ID NO: 47494 - protein, 395 aa, Zea Mays
MGNCCRSPAAAAREDVKSSHFPASAGGKKKPHQARNGGGGGAGEKKRLSVLGEEGCDVGAGIEEKYALDRELGRGEFGVTYLCMDRGTRELLACKSISKRKLRTPVDVEDVRREVAIMRHLPKSPTIVSLREACEDDGAVHLVMELCEGGELFDRIVARGHYTERAAAAVTRTILEVVQLCHRHGVIHRDLKPENFLFANKKENSPLKAIDFGLSIFFKPGEKFSEIVGSPYYMAPEVLKRNYGPEIDIWSAGVILYILLCGVPPFWAETEQGVAQAILRGNVDFKREPWPNVSDNAKDLVRQMLQPDPKLRLTAKQVLEHPWLQNAKKAPNVPLGDIVKSRLKQFSRMNRFKRRALRVIADHLSAEEVQDIKEMFKNQKCKCLSKLWIQMVEEH

SEQ ID NO: 47495 - protein, 313 aa, Zea Mays
MSAISRQQGKLGGGSLRHGVQAYSRHQQQPMANAADDPMVDEAGVEDAFTHEITDYLYVPRYHVLSWMETVEGMVAGVAALPPVYLILNRDLLETGWGWKRLVPYRPGYVEWHVFKKYLGDYFDHNREAFLCAEQKPDPFGWIIAEKSALIAAAKLCLKMEKALLRYCASFLTPDDKRLILGIKDQAKQMIQSEVLQAMVQMGVLVPTGDMTVVRRTAQFFLNSFQECLTAQRKEREMATAELGFKKQLTKEEKFEKRKQRLATIGEDLLAIAADQPFRFPATFTFVVRAFSVLDGTGKGLHPRFHITEIAKP

SEQ ID NO: 47496 - protein, 288 aa, Zea Mays
MSAISRQQGKLGGGSLRHGVQAYSRHQQQPMANAADDPMVDEAGVEDAFTHEITDYLYVPRYHVLSWMETVEGMVAGVAALPPVYLILNRDLLETGWGWKRLVPYRPGYVEWHVFKKYLGDYFDHNREAFLCAEQKPDPFGWIIAEKSALIAAAKLCLKMEKALLRYCASFLTPDDKRLILGIKDQAKQMIQSEVLQAMVQMGVLVPTGDMTVVRRTAQFFLNSFQECLTAQRKEREMATAELGFKKQLTKEEKFEKRKQRLATIGEDLLAIAADQPFRFPATFTFVF

SEQ ID NO: 47497 - protein, 315 aa, Zea Mays
MSAISRQQGKLGGGSLRHGVQAYSRHQQQPMANAADDPMVDEAGVEDAFTHEITDYLYVPRYHVLSWMETVEGMVAGVAALPPVYLILNRDLLETGWGWKRLVPYRPGYVEWHVFKKYLGDYFDHNREAFLCAEQKPDPFGWIIAEKSALIAAAKLCLKMEKALLRYCASFLTPDDKRLILGIKDQAKQMIQSEVLQAMVQMGVLVPTGDMTVVRRTAQFFLNSFQECLTAQRKEREMATAELGFKKQLTKEEKFEKRKQRLATIGEDLLAIAADQPFRFPATFTFVVRAFSGVWRDMCIPPMTNSSGSMKVSLS

SEQ ID NO: 47498 - protein, 133 aa, Zea Mays
MAVSSRFPSQPAARGLLRRTPQRILPVERTPRRLALVVTAVSGGPVPGGSPVPRRPPPPEDAATVAPTSVPSSAASAIDFLTLCHRLKTTKRKGWINHSIKGPESIADHMYRMALMALIAGDLPAVDRESYCW

SEQ ID NO: 47499 - protein, 655 aa, Zea Mays
MSAPGFDDPQLPPLRLRASCGGSGGVIASPRSCSSSDTFVSMRSTPSASGMPNLCGGLRSPPRTPSEASSSEMEFGTAREYDTTDPFFSDYWLYDNHLFHSKLESDGSEGEDKFVVGPDVSLQRSEVRELGDGCGRGHVRTDRNADSDGCTDANACSSPPCGCCYNEELVVRDSCSAVYGRCQIMEDHAEGLDECVAEAFRFRLNAFVDAGDQSVASKKGQDDWLDLTVLEKELQMLTPHLADADALENTGLEDDLRGNINLDVCMVTNEKNADGKEFLKDTYCIHSLPESAIPFDVYGVEDFKEYEVFDLKIFHRKSRTGFEENKEFAIVMDSVVAGRYRITEYLGSAAFSKVVRAHDLHTGVDVCLKIIKNDKDFFDQSLDEIKLLKFVNKYDPDDDHHILRLYDYFYYQEHLFIVTELLRANLYEFQKYNQQSGDEVYFSLPRIQAIAQQCLEALVYLHHLNIVHCDLKPENILLKSYSRCEIKVIDLGSSCFLSDNLNLYVQSRSYRSPEVILGLPYDQKIDIWSLGCILAELYTGEVLFPNESVPIILARMIGTIGPIDMEMLASGQETQKYFTDDYDLFHKDEETGQLEYLIPEKSSLRRHLQCPDKKFVEFLSYLLQINPRNRPTASEALQHRWLSFKYSPTANQTRY

SEQ ID NO: 47500 - protein, 666 aa, Zea Mays
MSAPGFDDPQLPPLRLRASCGGSGGVIASPRSCSSSDTFVSMRSTPSASGMPNLCGGLRSPPRTPSEASSSEMEFGTAREYDTTDPFFSDYWLYDNHLFHSKLESDGSEGEDKFVVGPDVSLQRSEVRELGDGCGRGHVRTDRNADSDGCTDANACSSPPCGCCYNEELVVRDSCSAVYGRCQIMEDHAEGLDECVAEAFRFRLNAFVDAGDQSVASKKGQDDWLDLTVLEKELQMLTPHLADADALENTGLEDDLRGNINLDVCMVTNEKNADGKEFLKDTYCIHSLPESAIPFDVYGVEDFKVEDTYVQNPTTHKFQEDPKTDPAVSKFQQEYEVFDLKIFHRKSRTGFEENKEFAIVMDSVVAGRYRITEYLGSAAFSKVVRAHDLHTGVDVCLKIIKNDKDFFDQSLDEIKLLKFVNKYDPDDDHHILRLYDYFYYQKYNQQSGDEVYFSLPRIQAIAQQCLEALVYLHHLNIVHCDLKPENILLKSYSRCEIKVIDLGSSCFLSDNLNLYVQSRSYRSPEVILGLPYDQKIDIWSLGCILAELYTGEVLFPNESVPIILARMIGTIGPIDMEMLASGQETQKYFTDDYDLFHKDEETGQLEYLIPEKSSLRRHLQCPDKKFVEFLSYLLQINPRNRPTASEALQHRWLSFKYSPTANQTRY

SEQ ID NO: 47501 - protein, 235 aa, Zea Mays
MCGSEIFNSSVYISPSFPYEVVIFQHHLTLTTGFLWANKLFSFGQKAQINSGITCALEYQSIVAAPKKHVPLHCIPAANLVVRGGGRGGLLLPGGDGLQPLLQAPPRQVLHALRPPGLQLGAGPRLGQEARAVPALHVGRPARRVPVLPGRAWTLDPVPRRRFRRAAELWSADQAQVFVSADRLHPHERWPLCRFGARVSQGVSAGTGGQGSEMTVCGHLVAIEALRIRASCREI

SEQ ID NO: 47502 - protein, 421 aa, Zea Mays
MTGGSGVVVIDNGGGLLKAGFGGDNDPIAVVPNCMAKPPGGNASSKKWLVADQLQAEDVDVTGMTLKRPIDRGYLINTEVQRDVWERVLRNLLQVDPTNSSLLLVEPMFNPPAIQHATDELVFEEFGFNSLYVADGPSLVHLYEASRQPMMFRAQCSLVVDCGFSFTHASPVLQNFTLNYGVRRMDLGGKALTNYLKELVSYRSLNVMDETLLIDDAKEKLCFVSLDVPGDLHLARCSYILPDGITYKKGFVKDMDEALRYRTLPQVSDSKDHGMDTNKSEDRKKAELSQNEFVLTNERFLVPEMLFHPIDLGINQAGLAECIVRAVQACHPYLQPVLFESIILTGGSTLFPRFTERLERELRPLVPDDYKVKITRQENPIFGVWRGGSILASSPDFESMCITKSEYEEMGSARCRRRFFH

SEQ ID NO: 47503 - protein, 119 aa, Zea Mays
MTIIHFQQELQIIYFWVLSKELEAAMASLPFPSLTMGAQWHYHLGRECLVLWEKGQNGVTGTGCATTATITTMHLVRFATGAKLRKNLQFTLVCYSLLLDYFVPGYVAACSSSFLKAAV

SEQ ID NO: 47504 - protein, 131 aa, Zea Mays
MASLSSKHHVLIQVLLARGPLSERDFHAFIDGAFGKNTALGTKRLASEDLANDWDNKRLNPGNDNYPLSTGAANNLFLGIEQGAGSSNGQSAFPKFDNGSSVALPSGQGMSGLMGKGCKTQKESAVHPGVL

SEQ ID NO: 47505 - protein, 207 aa, Zea Mays
MMSGPPASGYDRSPLFYGGGGGAPPPIPLGTGSYGAPYPHLGMRYGYGPPVGPPGSYGLFSSYGPPGPMSGMGYGPGPELGRYSYGFRGSPMPVSSPWSGGALAENNDNIASRKRRGGPDGLSEGDWTCPKCDNINFSFRSTCNMKKCGAPRPTPGGNTSSSRKDNSNKEAPEGSWTCPECNNLNYPFRTVCNRKGCSYSKPAPANN

SEQ ID NO: 47506 - protein, 318 aa, Zea Mays
MASLWLARASSQLARRAAARRPPPRPARHGSGQPTSSWFLGSVPQAALGSPALDTSRRGFCSVRRFAGESSAAAAAAAVVDEEPESGFAAGDQQAVDFPGGKVSFVAEMNFLPESTRERINCYRVLDDDGRTISGSRFQEVSRELALKMYSEMVTLQIMDTIFYEAQRQGRISFYLTSNGEEAINIASAAALSMDDIVLPQYREPGVLLWRGFTLQEFANQCFGNKLDYGKGRQMPIHYGSNRLNYFTVSSPIATQLPHAVGAAYSLKMDKKDACAITYFGDGGTRRLPCSAQLRGCYGGTGDLLLPQQWLGHQHSDY

SEQ ID NO: 47507 - protein, 962 aa, Zea Mays
MDDSVPFNDLGPSKPPSASFYDDMFESYFNRAAEAPEPAPKASSSPSTPPPVFDKPVFDDDPYTADPFDAIPLFGGGGGGEEEDLHGGVRSAAKPERTELEVVGFDEDLFPGLAGSTNFPMEKPAREVERDRQPVGFDDELIPGFDGSMKPAPQMEPETVAFDDDVIPDCSGGTSYPSSAREEPITRQESESISSSKISMSMPEDPFVTLGGTHKSGYSSLGLFSNLLNNIGMPRKEADTTPDNTSGIFQGSDIFTEFPKAMPPFSFTSENQSDRTERRYTENIISTSHSDRLPQEKTVQQASTEAPANTLTEMNFPEASVVHEVPVTTSFQTLNPFVEEDDLLEVNQSSQTTNDVWLTVLDIALVTLPTSAPPPSRPPPPLAAKKPPTESVTSEAYAHHCNQRYHHSICSSNTSKTSQIDELEDFFLTKPANSAIGHPQVLKHEGNGHYPSAATASFMDWTEMGHCKRGNQGAFDSMFTSSQYRQPEIDEKAEVCAHETESTDEEKRLENEQIQREHKEEQIRAEREMEEELERERENVRQREQEEQRRREKERVARQAVDKAIREARERSAAEARMQAEKEARQRAERAAVWKAATEARERAAVEAKERAAKAAAEAKEREAAEARERAATESRERDAKVAADARERAARAAAEAREKETAEFQEKATAEARAKAERAAVEKAAAEARWRAERAAFERVATEVKQRAFNDARERAAAAAAAEALARENQQRRATTEPDLESFFGMPSRSSSLPRSYNNTTTNPFDVQPGNAGSGGVRRTPSGSGFPFTQPSSSNLMDGLSSIFGAPLPSAVFQEVDGESEERRKARLERHQRTMERAAKALAEKNERDLQAQQEQEERHRIGESLDFEIKRWAAGKEGNLRALLTTLQYILWPECGWRPVSLTDLITAASVKKEYRKATLCIHPDKVQQKGANLQQKYIAEKVFDLLKEAWKKFNSEELF

SEQ ID NO: 47508 - protein, 380 aa, Zea Mays
MLCSRVGGEDRTIEFLKREGGSGSAVPLLGQASEQRYVNHPFPMNYMLKPWPLGEWFYLVIKFGLVQYMIIKSICAILAVILESFGVYCEGEFKLNCGYSYTAVVLNFSQSWALYCLVQFYAVIKDELAHIKPLAKFLTFKSIVFLTWWQGIAIALLFNWGSLRGPIAQELQFKSSIQDFIICIEMGVAAVAHLYVFPAKPYELIGDCFVGDVSVLGDYASVDCPLDPDEVKDSERPTKFRLPQPDDHVRCSTAIKESVRDVVLGGGEYIVNDLKFTVNHAVEPINEKLHMISENIKKREKGKRKTNDDSCISSPTSLTRVISGIDDPLLNGSLSDNSGPKKARRQRRKSGYASAESGGESSDHGLGGFEIRGNRWITRE

SEQ ID NO: 47509 - protein, 575 aa, Zea Mays
MHGQCDILELTAERNTALHVAAEQGHHELIRELYFRFSDQGLLNRLNSALDTPLHSAARAGHVRAVAVLFELARDRGVNILGCKNEAGDTALHLAARHGHGAAVEVLISAAAEPAAELNNAGVSPLYLAVISGSVQAVRAITTCKDASSLGPGAQNALHAAVFQSSEMVHLLLEWRPALADQVDSGGSSPLHFASSDGDRTIVKAILRASPPSTVYKKDSDGLSALHVAARMGHRRVVKDMLRSYPDAAELRDGNGGTFVHAAARERRSSVVSLAISNSMLRGVLDAQDRDGNTPLHLAVAVGSTGDVEALLREGKVRADVLNNDGHTALDLAARSNAGFFATINLVVALVAFGARLRPQRQDRLEQWGGRDMVRKGIQNTSDSLAVVAGLIVAAAFAAGFNLPGGYGDDGKANLKHEIVFKTFLFLNTGAVATSMLAVALLVYGKASSHSDGSWKTFAAALHLLWVSLVCMMLAFQAALFSVATTRALTYGFLVVYMCIFILQVRIAKWLGPDTRLRTIWRFHWKGRHVDIKRQYPFANAFVVNVYLFTALSLLVPIGFEVMFLLGGRSIDTSS

SEQ ID NO: 47510 - protein, 294 aa, Zea Mays
MHTCMPLCCLISLCMTQLFLYLYMQLPPTYVALITCLGVWDKGKRREWKMQLAKNACHCTHRWAQIAKHLPGRTDNEVKNFWNSTIKKKLISQAVGSLHPDLYYNILDGGAAGAQDLAAAGCAPLNGADSASAAAAQAVGVTTTQPSPSMAHVDPAAAWAADFGSQTLFLPGGAAALQYAAAVEGEFVKQCRTAADACYPPEPEDGGGGARQCNNQAAADVVTAAVQPEGAGLPVFLEPKCAGSFMPEPALAPVMDFMEAILGSTAAASAASASSLDDTCFSANAGMQSHCWIP

SEQ ID NO: 47511 - protein, 120 aa, Zea Mays
MAASSALRLILGSSSASRRQILSEMGYKFTLISADIDEKAIRKENPEELVVALAHAKADAILEKMQNNGMMKEILDSQDTTLMITADQSSSSMVINWVKEESHIWCRVGASDLSSILMLQ

SEQ ID NO: 47512 - protein, 278 aa, Zea Mays
MEREVQLMEGRQAWPLHMMGMAAAGTTATCFDNYSSSGSGGGGGDCFVLGWEQLAPAPFGCFGLLTADVHDLFPLYDDNDDGDDPLSSIFSAGLAPAAEGAVCPAAAEAEPLPSSSSSNCRGGDPRAGGVDLQPQGQMQQGTARARGRAGTPPLPRTSAPSLKRATREESSSEHAAAAAAEECSQSGGGSKRRKGAGVVRPFALLKPDGLDGGATLADINARILMRPARPVRHPVGEFACAPRVSADQPGFSGKAVASLTRLHTPGGRGTITIIRTRG

SEQ ID NO: 47513 - protein, 64 aa, Zea Mays
MEVSQHSKYFCEFCGKFAVKRKAVGIWGCKDCGKVKAGGAYTMNTASAVTVRSTIRRLREQTEA

SEQ ID NO: 47514 - protein, 295 aa, Zea Mays
MSSCKRYLPCLILLLLHGGRGAVAGKVSAIVVFGDSSVDTGNNNFIPTIARSNFWPYGRDYDDGLPTGRFSNGRLATDFISEAFGLPPSIPAYLDNNCTIDQLATGVSFASAATGLDNATAGVLSVITLDEQLAYFKEYTDRLKIAKGEAAAEEIISEALYIWSIGTNDFIENYYNLPERRMQYTVGEYEAYLLGLAEAAIRRVHTLGGRKMDFTGLTPMGCLPAERIGNRDNPGECNEQYNAVARTFNAKLQELVLKLNKELLGLQLVFADTYQLLANVVNRPADYDCKHCCLR

SEQ ID NO: 47515 - protein, 347 aa, Zea Mays
MSSCKRYLPCLILLLLHGGRGAVAGKVSAIVVFGDSSVDTGNNNFIPTIARSNFWPYGRDYDDGLPTGRFSNGRLATDFISEAFGLPPSIPAYLDNNCTIDQLATGVSFASAATGLDNATAGVLSVITLDEQLAYFKEYTDRLKIAKGEAAAEEIISEALYIWSIGTNDFIENYYNLPERRMQYTVGEYEAYLLGLAEAAIRRVHTLGGRKMDFTGLTPMGCLPAERIGNRDNPGECNEQYNAVARTFNAKLQELVLKLNKELLGLQLVFADTYQLLANVVNRPADYGFDNAVQGCCGTGLFEAGYFCSFSTSMLCENANKSIRPCLCTIYNAHRHTYRSSTYNFDC

SEQ ID NO: 47516 - protein, 357 aa, Zea Mays
MPISLALVLSRSSARSWSRRERRLRRMVLAVKLRRGAEGAIGVNYGMVANNLPAPEQVVSMYKAKNISYVRLFHPDTDALNALRGSGVGVVLGTLNEDLPRLASDPSFAASWVATNVQPFAGAVQFRYINAGNEVIPGDAAARVLPAMQNLESALRSAGVTGVPVTTAVATSVLGASYPPSQGAFSEAAASVMAPIVSYLSSKGAPLLVNVYPYFAYSSSGGQVALGYALLSADAGAASSVTDAGVVYTNMFDAIVDATHAAVEKAGVQGLELVVSETGWPSAGGEGATVENAAAYNNNVVRHVGGGTPRRPGKAVETYLFAMFNENGKAEGVEQHFGLFQPDMSEVYHVDFTAGSP

SEQ ID NO: 47517 - protein, 422 aa, Zea Mays
MEFALEASHSYGVFQEDVPHYPCNMRQYPKSGLNHSFNPVKKLIQEDISFRTNEVQKRPGGVIARLMGMESPPLNAATESISRSEITPRPTMPRRDPPERETSAKHVSFVQHGNRDSTKQASKQEIRAYGEERDVFGQQNKRGNEWSKPQPREHPQEEELQKFKKEFEAWQASRAWEHSRSFELESSTLGDDDDDGRCTDIVPYRYQHHHHHHHKGKDASHGGKHIRSSNEDVHCWRRSSKESGTSISGSRTFSLTTSADAAACSTRLPLSRFYHEEERSLSPTRIVILKPCPELSADDVEESSLGSPELVKKENNMEAFLEEVKKRLKIELEGGVASDDKADRRWFAAAAAADVIPADPKQIARSIANQIRENVTRDMHPALLRSESTRSYRSDVPFDGQGQMDYIGRDARRQLSDSSRTC

SEQ ID NO: 47518 - protein, 74 aa, Zea Mays
MELFSSAFFPAVMRVIESNIPVLATIPIPRQGRDIPGVARLRNHPGAAVFTLDTGNRDTMRDTICSQLRSLLQR

SEQ ID NO: 47519 - protein, 174 aa, Zea Mays
MLSTPAAGWRFRRGGLPWRLHTCSCLASPLSSSGGEPEKARPLLAERYISDGSSKLQLRLEKHESPVNGVEDENADSLIPQAILDFVLPAGFPGSVSADYLDYMLLQFPTNVTGWICHVLVTSSLLKIGTGCRCWVLYRNFCSCICCCYQMGIKGWHWGLWTSSHWWTLWSTFR

SEQ ID NO: 47520 - protein, 289 aa, Zea Mays
MGNTSFCPPAAMLPMYPPSPQGQFSNPANQDALGLLPCFPDASPAMLRHFSPYPVSYVPRSPLPVTVHNVHERRHDHTETVELPDAVVFSQCTTLDSFRTSECGGPPLKVQEPTKNRKEGCIGSPEKELDTLAVSSSTAQASSQKLEANEGKQTVQAGLKQTHEQQLMSSSSCVSSSVVAQSSHYASSIQHDESIHRRNPPHTSSPALPDVWSSRSQALPRFGSPSWVFQQRPWLAAPVTVRTAVPVCSARPNVVNSTTGIRPAAQSHDGERDLNSAAAASSGFNKLQI

SEQ ID NO: 47521 - protein, 251 aa, Zea Mays
MATARLPSRSFLSPAQQSYPRLPASVRLCLSHHEQPPTGPKRHRRAATSHPAFSAAARGRAKKIPIADTDEPAAGVRVTDRGISYRLDGAPFEFQYSYTEAPRARPVALREAPFMPFGPEATPRPWTGRKPLPKSRKELPEFDSFVLPAPGKKGVKPVQSPGPFLAGMEPRYQSVSREDILGEPLTKEEVSELVKGSLKSKRQLNMGRDGLTHNMLENIHSHWKRKRVCKIKCKGVCTIDMDNICHQLEEK

SEQ ID NO: 47522 - protein, 450 aa, Zea Mays
MDSCDRNSTSRITGKDIKQAIMFSASLNKLTLNQDEATEYTNLILEELQTGQGVLQMNVMSKGLSRDLQPTCGPIPVPMKCSRQRHILTATVVFFQAHWRRIFVVFLWLMACAALFTWKFMQYRQRLAFEVMGYCLSTAKGAAETLKLNMAIVLLPVCRNTVTWLRRSRVINSVIPFNDNINFHKLVAAGIVIGVILHGGIHLACDFPRITRTDKAFFGRTIAADFGYHQPSYLEIVVSTEGTTGIAMVVLMFVAFLLASSPSRRNPGMLPPLVRQLAGFNAFWYSHHVFIAVYVLLIVHSMFLFLAKDVAEKTTWMYVAIPVVIYIGERMFRMVRSMVFDVKILNATVYPGMVLALKVTKPPGFRYQSGMYVFVQCPEVSKFEWHPFSLTSAPDDDHLSIHIRSLGDWSYQMYDVFQQMLLSSNSSMPKIFFDGPYGAASQDHSKGMAT

SEQ ID NO: 47523 - protein, 1279 aa, Zea Mays
MRGSYRRSPYRGGYGSDFSRNHPEQPPPPPPRRSPLRSVAVPICYDSPGNRVDRGDRDNLPRVTPWRRRESRSEPADAVGLLSVGQTTRLSASGKEASAQPLSVSGPHGTEDEAPRKKARLGWGQGLAKYEKQKVQGPVDPAEAVADGSPADGELKTTSPVPVPVHPVPVPVPYVAPAPPAAPVLAPAPAPSAAPALLSAPMQCSSPVTGPPYCSSAPEDKSCEMMPNAVTNSTKDVLEADDTTFNNEFLIKLDQLGDDPVISLGNMLVELIQHEDSCSGDSNGPTSTYKLLLLKESISKEIEKTELEIDSLEGELKSVNTEAATTLEGSPTGVTHTENLSPSSGTSKVPGSVEICDTSDMIKEPGELIGSPKVPVVQYDDVKSADMMEIETAPVHNAKTVPSEAGAISPVVAEGKACAAADLSSLKASEEAGSQNDIDNGRLETSSRQANADSMKIEISDDLPVKKWTYHDHKSDLLSSVTSANSAIAKEINEVLFKSLPADTPRLDLFASSHLLSQRKSDLIVKERLGVCKTRLRLKEQMLTMKFKAYCHLWKDVQLFSANKQRSKSNKRTDQSNRTSQIGSQRQRSSNRSRLTMPAGNLSTFSTPEMSDVAMRLFSEFKIKRCRNYLKMPALIIDEKEKEWLKLMNKNGLVEDPVLVEKERVMINPWTQEEKKIFMELLAKFGKDFSKIASFITHKSTADCVEFYYKHHKSDSFREVKKLLDLRQQQPTSNFLGAKSGHKWNPESNAASLDMLGVASVVAAHGLEYAKQVEKISAKSLIRTAYGPNVTSVANKSSDKECIDHVPLHERESVAADVLAGICGTLSPDGMGSCITSSADPGQKISMKRVEHVLSQENDKTVEEEDTLSDQECEVDPVDWNDDEKSIFIEAMNNYGKDFARISSCVKSKSYEQCKVFFSKARKSLGLDLIHQGAADVSMPASDTNGGKSDTDEACAVEMDSAICSTQSCSKIAMDVCPTEGAIGGPNSVIISKQAEAYISNGCNADVKIEEDEKVADKNCSIVDAKRSSDATHEAGPIDINCPGSTDKLQGTDDVVDLVNMHSNSGISSSAKHAVAIHSEMRSTLHSVEVLQTDKGEGTGTDLSWVEECSHHALDNTPMKNGNSGAPAFLASDSGIKDNVRISNITAASTVSPAFTSSYQHSVPGDMPLPKPKPLVTPLTPKDLMPVQFSSVLPDPTAIRFEGIASITTPNFEDTGNRVSGALGAKEMSKYPAFRDPSEWQVQQLVPSKQFRWHSMAQRPRRRTGRLFEALLSQYKLRG

SEQ ID NO: 47524 - protein, 374 aa, Zea Mays
MILQPPSFGRWYRAPELCGSFFSKYTPAIDIWSIGCIFAELLTGKPLFPGKNVVHQLDIITDLLGTPSPEAISRIRNEKARRYLSSMRRKKPIPFTQKFPNADPLALCLLERMLAFEPKDRPSAEEALADPYFKNIASVDREPSAQAVTKLEFEFERRRVTKEDIRELIYREILEYHPKMLREFLEGTESSGFMYPSAVDHFKKQFAYLEEHYAKGSTGTPPERQHNSLPRPSVVYSDNRSQTTANITEDLSKCMLRENTQKTHPYSASVASKFPPHVPQGDVARPGKAVGSVMQYSPCPAPAAERYEQRRIARHPAVAPNNIPSGSSYPRRSQTCKSETGDAESHMDANQARQPKPYAANKLPATVDSRGGHW

SEQ ID NO: 47525 - protein, 288 aa, Zea Mays
MRRKKPIPFTQKFPNADPLALCLLERMLAFEPKDRPSAEEALADPYFKNIASVDREPSAQAVTKLEFEFERRRVTKEDIRELIYREILEYHPKMLREFLEGTESSGFMYPSAVDHFKKQFAYLEEHYAKGSTGTPPERQHNSLPRPSVVYSDNRSQTTANITEDLSKCMLRENTQKTHPYSASVASKFPPHVPQGDVARPGKAVGSVMQYSPCPAPAAERYEQRRIARHPAVAPNNIPSGSSYPRRSQTCKSETGDAESHMDANQARQPKPYAANKLPATVDSRGGHW

SEQ ID NO: 47526 - protein, 501 aa, Zea Mays
MGIQGNKAATHEHDFLSLYAAAAAKDAPLLLHDSKAPPPSQGNFLLKTHDFLQPLDQKPGAPPEPSPLPASAAESRHQPQQQVVVANQHALPLPGGVGTFSISPAPVSVALPAAVVKSEPPFVLWGQPAATLHPGARGHQQQWALPFAGAGQVRLPPQQAPPDRKGRGGAGGGVMESGSRSSGGAGFDDDDGLTTRREVSSSLQDLTVRVDRKGGSCSDGGTDQRPNTPRSKHSATEQRRRSKINDRFQILRELLPHSDQKRDKATFLLEVIEYIRFLQEKVQKYEATFPEWNQENAKMLPWSKGQISGDSPPDPSHFMRNGSSPGSNFTGKLDDNHNIVTSAAASGAQDQVETDHMASGCYRSAETTANFTNNAMSQSQPQWTGPSPVDDSAVNSETLNNQQLVIDEGTIRVSSNYSQELLNSLTHALQSSGVDLSQANISVQINMGKRAAKRPAAGVSSNSKEPADPASSNELGHQLTLSGAGADCLSHATKRHKRSNS

SEQ ID NO: 47527 - protein, 71 aa, Zea Mays
MAKNRNKKNRAKSGGLATMDTSEGGPATSTAADVPQPMDTSEGKQPSSPPRRSVRSTSKLKGRCWKQGSEC

SEQ ID NO: 47528 - protein, 472 aa, Zea Mays
MGTLGRAAAEMHMKKLTYIGMELQFQSDQVAAFVRQTDGSLFSWRERYSCFRYLIYGIVNKTNSEVVLKFDDKEFHWKQSESLLTRLEAEGVVKLVFPLHDEIKRKQLLRNWALNWLDFTWQPIDEIYSYFGTKIATYFAFLGMYARWLFFPAVFGLATQLIDFGSLQWLVLPGFFIFVISWAVLFLQFWKRKNSALLARWGIHCSLSEYKNLDNVSFLSDSLTVEEKEFGVVSVVVEKRKFQRNEWFGVLLRIRNNAIIVLAIICLQLPFELAYAHLYEIAETEVMRYLLTAVYLVAIQYYTRIGGKVSVNLIKYENNQGEESSSASLVYKAFGLYFMQSYIGLFYHASLHRDILALRRVLIQRLIVYQVLENLIENSIPYLKYSYKKYIAVHKKKRGKESTVGRSVRLSTRVEKEYLKPSYTASIGAELEDGLFDDFLELTLQFGMIMMFACAFPLIFCFAALVCALSKN

SEQ ID NO: 47529 - protein, 534 aa, Zea Mays
MRTQGEGHVEEATGFEVGIVVPRLSRAAAAGATDNCVARLVRELEGAGLLVERVRGVSAEFIKLAAPMGTLGRAAAEMHMKKLTYIGMELQFQSDQVAAFVRQTDGSLFSWRERYSCFRYLIYGIVNKTNSEVVLKFDDKEFHWKQSESLLTRLEAEGVVKLVFPLHDEIKRKQLLRNWALNWLDFTWQPIDEIYSYFGTKIATYFAFLGMYARWLFFPAVFGLATQLIDFGSLQWLVLPGFFIFVISWAVLFLQFWKRKNSALLARWGIHCSLSEYKNLDNVSFLSDSLTVEEKEFGVVSVVVEKRKFQRNEWFGVLLRIRNNAIIVLAIICLQLPFELAYAHLYEIAETEVMRYLLTAVYLVAIQYYTRIGGKVSVNLIKYENNQGEESSSASLVYKAFGLYFMQSYIGLFYHASLHRDILALRRVLIQRLIVYQVLENLIENSIPYLKYSYKNKKKRGKESTVGRSVRLSTRVEKEYLKPSYTASIGAELEDGLFDDFLELTLQFGMIMMFACAFPLIFCFAALVCALSKN

SEQ ID NO: 47530 - protein, 446 aa, Zea Mays
MLLLISVSGMELQFQSDQVAAFVRQTDGSLFSWRERYSCFRYLIYGIEFHWKQSESLLTRLEAEGVVKLVFPLHDEIKRKQLLRNWALNWLDFTWQPIDEIYSYFGTKIATYFAFLGMYARWLFFPAVFGLATQLIDFGSLQWLVLPGFFIFVISWAVLFLQFWKRKNSALLARWGIHCSLSEYKNLDNVSFLSDSLTVEEKEFGVVSVVVEKRKFQRNEWFGVLLRIRNNAIIVLAIICLQLPFELAYAHLYEIAETEVMRYLLTAVYLVAIQYYTRIGGKVSVNLIKYENNQGEESSSASLVYKAFGLYFMQSYIGLFYHASLHRDILALRRVLIQRLIVYQVLENLIENSIPYLKYSYKKYIAVHKKKRGKESTVGRSVRLSTRVEKEYLKPSYTASIGAELEDGLFDDFLELTLQFGMIMMFACAFPLIFCFAALVCALSKN

SEQ ID NO: 47531 - protein, 59 aa, Zea Mays
MCHTLVWGLELKQVIFTNIGLRTGVEAGESSPRQICHVGAVTGAKGLQSQVLLARMEQS

SEQ ID NO: 47532 - protein, 229 aa, Zea Mays
MLPTSPPPIAHQPSPTSPHYLTPWMVATVPAPVPHTHQAGLADPAAANAAPSPDVSAARPPTHFRPPPAPPFARPPATSAPSATSARFSRHRPDLRAIRNRRASYPFSTAHSVWNNLRVGSLLPSPSPFPTTRFGDGELRAGATAGRFCCWCGGGGAARVVRRRLHGGGARAEFDWLALYCNLTRGDGPDGNNGKLVLEELLSCAATQFCFPQILSCEEKKKTRTRRVR

SEQ ID NO: 47533 - protein, 57 aa, Zea Mays
MLQKFAYRPCYLNRQSLRHLICHQNQKVKGRQLQTLGHVLHKLIVASKEIILFLPTN

SEQ ID NO: 47534 - protein, 216 aa, Zea Mays
MRSSRRCAACRGFLQGGEHGGGARSSRGTDQEHWRGEEIEEALCFLGVPRQQLGAGEPMACSSCPSLPSPPCSPDSARIWYYLAHRAVLDNTTTTTRHRCGAVGAICDAPLPLALTTEAHRSIRRGPARLKPTTRPCWGIAYCVKGGPEKELKAMQYLERRECEYDQKISIDFYKEGDPLKPAVMGVLVFVSTPDPIGNKYYLGPAPLQNMARPRR

SEQ ID NO: 47535 - protein, 516 aa, Zea Mays
MGSCVSSTRHRRRPRKLSVAARKIRRKVCTAIADAPIICGAASCLARHGVVHVEAPDSSVTLHLTKLQWQRSQTDAGNVICEEAWYDSVSILESPDSDDDLDNDFASVSGDPLPDVTGGSNAQQCKDAACFLDTMQLLRSIANAEACDRREQPDKSDDSNGEECCSSSTLKELQAAMSPRPFPASIPSNKVQPMPIAGASPHQQQQKKKTAVVRLSFRTRSYEGDEMTETSGSANYLYRPRAGFTVPCCSTGEKLSEGCWSVLEPSTFRVRGESFFKDKRKYPAPDCSPYTPIGADMFAYTRKIHHIAQHLSLPSLKTHEAFPTLLIVNIQLPTYPATVFGDNDGDGISLVLYFKLSDSFDKEISPQLQDSIKRLMNDEMEKVKGFAVDSIVPYTERLKILAGLANPEDLQLSTAERKLVQTYNQKPVLSRPQHKFYKGPNYFEIDLDVHRFSFISRKGLETLRERLRHGVLDLGLTIQAQKAEELPEHVLCCMRLNKIDFADNGHIPTLITAADE

SEQ ID NO: 47536 - protein, 353 aa, Zea Mays
MAEALVGLRVAALAVPQPRSHRRRLLPAARLAAFRRDRLSTARAAVAGPPEVDEDDSMSIDNLHRFFDLNVGKWDGSFYQFDAHGRVLQEISTRLSVSTYGEDNLISLLQSLYIKQASSAISIVDEEDSEPEWVEYKIKETNIFTVDKYQQIGFFPEEKAFALRYQTAGMLETVLRVGTLGEDDTGEESPKNLKIPSRKPSIVCENCLYSLEGNGRMRAFHIMDPKGVLDTLLIFHEKRQGSELAQSFKHYSVCTKSASSDRISTVLGRWEGHSVTKRSGVYGATLAEADTAVVLKMGSNGQLIQANCWKGPPNLNRDFKNRSGAKGRRISYMQPVWSSRCLFYFFFLCTGGS

SEQ ID NO: 47537 - protein, 320 aa, Zea Mays
MAEALVGLRVAALAVPQPRSHRRRLLPAARLAAFRRDRLSTARAAVAGPPEVDEDDSMSIDNLHRFFDLNVGKWDGSFYQFDAHGRVLQEISTRLSVSTYGEDNLISLLQSLYIKQASSAISIVDEEDSEPEWVEYKIKETNIFTVDKYQQIGFFPEEKAFALRYQTAGMLETVLRVGTLGEDDTGEESPKNLKIPSRKPSIVCENCLYSLEGNGRMRAFHIMDPKGVLDTLLIFHEKRQGSELAQSFKHYSVCTKSASSDRISTVLGRWEGHSVTKRSGVYGATLAEADTAVVLKMGSNGQLIQAVLAIRAEVRRRKAW

SEQ ID NO: 47538 - protein, 152 aa, Zea Mays
MMNLSAPFICEVFRDAQEKALPYVDYIFGNETEARTFAKVRGWETENVEEIALKISQLPKASGTHKKITVITQGCDPVVVADDGKVKTFPVILLPKEKLVDTNGAGDAFVGGFLSQLVQEKNIDECVRAACYAANVVIQRSGCTYPEKPDFN

SEQ ID NO: 47539 - protein, 300 aa, Zea Mays
MLFFWYDELASKSNVEYIAGGATQNSIRVAQWMLQIPGASSYIGCIGKDKFGEEMKKNAQAAGINAHYHEDENAPTGTCAVCVVGGERSLIANLSAANCYKSEHLKKPENWALVEKAKYIYIAGFFLTVSPDSIQLVAEHAAATNKVFMMNLSAPFICEVFRDAQEKALPYVDYIFGNETEARTFAKVRGWETENVEEIALKISQLPKASGTHKKITVITQGCDPVVVADDGKVKTFPVILLPKEKLVDTNGAGDAFVGGFLSQLVQEKNIDECVRAACYAANVVIQRSGCTYPEKPDFN

SEQ ID NO: 47540 - protein, 298 aa, Zea Mays
MARYDELASKSNVEYIAGGATQNSIRVAQWMLQIPGASSYIGCIGKDKFGEEMKKNAQAAGINAHYHEDENAPTGTCAVCVVGGERSLIANLSAANCYKSEHLKKPENWALVEKAKYIYIAGFFLTVSPDSIQLVAEHAAATNKVFMMNLSAPFICEVFRDAQEKALPYVDYIFGNETEARTFAKVRGWETENVEEIALKISQLPKASGTHKKITVITQGCDPVVVADDGKVKTFPVILLPKEKLVDTNGAGDAFVGGFLSQLVQEKNIDECVRAACYAANVVIQRSGCTYPEKPDFN

SEQ ID NO: 47541 - protein, 344 aa, Zea Mays
MASSGYEGILLGMGNPLLDISAVVDEGFLAKYDVKPGNAILAEDKHLPMYDELASKSNVEYIAGGATQNSIRVAQWMLQIPGASSYIGCIGKDKFGEEMKKNAQAAGINAHYHEDENAPTGTCAVCVVGGERSLIANLSAANCYKSEHLKKPENWALVEKAKYIYIAGFFLTVSPDSIQLVAEHAAATNKVFMMNLSAPFICEVFRDAQEKALPYVDYIFGNETEARTFAKVRGWETENVEEIALKISQLPKASGTHKKITVITQGCDPVVVADDGKVKTFPVILLPKEKLVDTNGAGDAFVGGFLSQLVQEKNIDECVRAACYAANVVIQRSGCTYPEKPDFN

SEQ ID NO: 47542 - protein, 296 aa, Zea Mays
MYDELASKSNVEYIAGGATQNSIRVAQWMLQIPGASSYIGCIGKDKFGEEMKKNAQAAGINAHYHEDENAPTGTCAVCVVGGERSLIANLSAANCYKSEHLKKPENWALVEKAKYIYIAGFFLTVSPDSIQLVAEHAAATNKVFMMNLSAPFICEVFRDAQEKALPYVDYIFGNETEARTFAKVRGWETENVEEIALKISQLPKASGTHKKITVITQGCDPVVVADDGKVKTFPVILLPKEKLVDTNGAGDAFVGGFLSQLVQEKNIDECVRAACYAANVVIQRSGCTYPEKPDFN

SEQ ID NO: 47543 - protein, 82 aa, Zea Mays
MTFVECAVEATVAAEVTQGEFFGAMTAHTTRSKRRIVLFDSQVGGDKCHGIEVTPRWNGGHEFVLTLGDATICVKLSTSVKS

SEQ ID NO: 47544 - protein, 138 aa, Zea Mays
MPAVDVSSLAPILLNLGAAPAPVLDGKETSPGHKSHCSRAISAIPATSSGMPHAAIPLAHRVSRAQISYFYAPTQHRPSHHGARNPSVATNHCCPTWHPDCGCIHLGASPTTLHHHRRSSSPPRCRPEYHRHRHRACR

SEQ ID NO: 47545 - protein, 436 aa, Zea Mays
MMAPLSPRLVVPVDVKKLPREQKVPLHNRWHPDIPPVADVTEGELFRVEMVDWSGGRVRDDNSADDLKFMDFTIAHYLSGPLRIVDSEGVPASPGDLLAVEICNLGPLPGDEWGYTAILERENGGGFLTDHFPSARKAIWYFEGIYACSPQIPGVRFPGLTHPGVVGTAPSLELLNIWNEREKSLSETSLETIKLCEVLHQRPLAHLPTPENCLLGKVQEGTAEWHIIANEAARTIAGRENGGNCDIKNLSRGSRIYLPVFVEGANLSTGDMHFSQGDGEISLCGAIEMSGFLELKCEIIRGGMKEYLTPVGPTPLHVSPIFEIGPVEPRFSEWLVFEGISVDESGKQHFLDASVAYKRAVLNAIEYLSKFGYSKEQVYLLLSCCPCEGRISGIVDSPNAVTTLAIPTAIFDQCLIYAAGTSCVMSEETKVTACIS

SEQ ID NO: 47546 - protein, 59 aa, Zea Mays
MDAFLPPKTEVVQARPSIWKQMQYQSTCNCAKAIIKNAFVFFFLFSSSNKNYDKAFAVL

SEQ ID NO: 47547 - protein, 499 aa, Zea Mays
MLCRRPCPGVFLRLFATSCRRSSLHPSQPHLRTATALPTLPVAKKVPFNVSAHGRSWSDPYHWMRDTSDPDLAVLLAAENAYADAFVGSAGGGGLRAHLAAEMRARLPASTATPPQLWGPWLYYQYVPEGKEYPVLSRKLRPSSGLVGTLLDYLSGSEKEQVLLDWNEVAEKNGYVHIGSCRISPDHRFLAYTVDTSGGELFSLEVKDLLSEHVIFSSPDKGVVSLAWSGNNESLFYTVCDETLRPNQVFCKKLQSDEAGFLVFTEKDVNCCVDITSTKDFKYMTVNSNTRTSSEVFVIESDNLREGLWPIRKRVDKVQYFLEHHNGFFYILTNAPVNDTETTTEGYYLARCRAEKSLVDRWQIVTVPDSDCTIQDMDIFHDNLVLFLRKNGTPLFCSISMPIDVDVQEPKELDDLNPWFFPIPSELCSIVAGSNNDFMSSTYQLVISSPVAAWAFNPMFQASNKTCSLLKPHKIGVIFPSYSHVKGLKLYHMMVFQYL

SEQ ID NO: 47548 - protein, 95 aa, Zea Mays
MAQSVKILCKDGFNLYVTIRGNKAVLAPEDPDDEMQEWFKDYSRVSSVTDDNGQRVFALVNKETQQAMVNRRDEQEVIINTGSSYMHGRCQDYFL

SEQ ID NO: 47549 - protein, 377 aa, Zea Mays
MAAPEAPACYVGIARQSAAFRLMKQMGWEEGEGLGKDKQGIKGHVRVKNKQDTLGVGVDSPHNKWVYDTTQFDNILKKLKVQSANPVQEEVAAVESDSPDITPKKDKSAKHEVTKVTRPQGRYKKRERGKSVNSYSATDLQGILVRKNEDNSKVDQKLEPTCLDEPDPIICLDAVSQADDVNWWGHKFGFLSGGFLGAKSRKNKSSQKDLANVRQTFAEEDQENLYNLVQDKATSGKQGLGIKGLPMKVAGQRWKGNKTSFVDSDDDNSAQSDEYSEIEENGDEEEHISASESIDTDKNADKELLVDARPKTKVKKLCKRILRQSMKLKDLKVAVEEHSNVVFSSFSGRREALLFLKKKLQGSRKFNVDGKKVQLVS

SEQ ID NO: 47550 - protein, 190 aa, Zea Mays
MRMLDACELAARVLHHAGAMVKPSVTTDEIDRAVHQMIVDAGAYPSPLGYGGFPKSVCTSVNECTCHGIPDSRELQDGDIINIDVTVYLNGYHGDTSRTYLCGEVDDATKQLVKVTEECMMRGISACRHGASFKEIGQRISEHAEKYGYGIDPFVGHGVGRMFHCEPIIWHTSSWTAAITSPSRPAAAPG

SEQ ID NO: 47551 - protein, 561 aa, Zea Mays
MPLPQPLLGGASPAPARAASSFLHPLLHTRHRVSTAPAAASSFVPASHSSHANDAMLLRRAADVADRSAGLTSPHPNFGCVIARPQLNTDSADSWVVGEGFLYAQGTPCAELLASQEAGEHARGGTAYLNLEPGDCFGDNTAVGSLVQAGITRVVVGLRHPLKHLRGKAIQALRNEGIQVDVVGEDLQSKLFKEALKSCLTVNAPLLYRAAFHVPFSVLKYAMTADGKIAASSGHASWISGKASRGRVFELRGRSDAVIVGGNTVRFDDPRLTARHVKGHVPVRIVMSQSLNLPEEANLWNLNDAYTIVATQRGARRDFQRKLAMKGVEVVEFDMLNPRAVMSYCYDRGYLAVLWECGGTLAASAISASVIHKVYAFWAPKIIGGLNAPTPVGELGMSQMTQAINLIDVSYEQIDRDMLMSGFIEPIPDLSPVIPSVEEIPSIDPEVSPYETNIISFYKTWDIFGAFSNFSPHSIQMPDENGDYFTWPTVEHYYQAHKFVGVDNPQARDIVQEIKLAKSPEEAARIGRTRQKGFPELVCPIIVFRPVQWWFRTGLDIWPAS

SEQ ID NO: 47552 - protein, 539 aa, Zea Mays
MPLPQPLLGGASPAPARAASSFLHPLLHTRHRVSTAPAAASSFVPASHSSHANDAMLLRRAADVADRSAGLTSPHPNFGCVIARPQLNTDSADSWVVGEGFLYAQGTPCAELLASQEAGEHARGGTAYLNLEPGDCFGDNTAVGSLVQAGITRVVVGLRHPLKHLRGKAIQALRNEGIQVDVVGEDLQSKLFKEALKSCLTVNAPLLYRAAFHVPFSVLKYAMTADGKIAASSGHASWISGKASRGRVFELRGRSDAVIVGGNTVRFDDPRLTARHVKGHVPVRIVMSQSLNLPEEANLWNLNDAYTIVATQRGARRDFQRKLAMKGVEVVEFDMLNPRAVMSYCYDRGYLAVLWECGGTLAASAISASVIHKVYAFWAPKIIGGLNAPTPVGELGMSQMTQAINLIDVSYEQIDRDMLMSGFIEPIPDLSPVIPSVEEIPSIDPEVSPYETNIISFYKTWDIFGAFSNFSPHSIQMPDENGDYFTWPTVEHYYQAHKFVGVDNPQARDIVQEIKLAKSPEEAARIGRTRQKGFPELMV

SEQ ID NO: 47553 - protein, 272 aa, Zea Mays
MRHFDVQIIGGAVLHDGCIAEMKTGEGKTLVSTLAAYLNALTGKGVHVVTVNDYLAQRDAEWMGRVHRFLGLTVGLIQAGMKSDERRASYRCDITYTNNSELGFDYLRDNLSRNKEQLVMRWPRPFHFAIVDEVDSVLIDEGRNPLLISGEDNRDAVRYPIAAKVAELLMEGVHYTVELKGNNIDLTEDGVAHAEIILGTDDLWDENDPWARFVMNALKAKVFYRRDVQYIVRDGKAIIINELTGRVEPKRRWSDGIHQAVEAKEGLKIQTR

SEQ ID NO: 47554 - protein, 316 aa, Zea Mays
MKTGEGKTLVSTLAAYLNALTGKGVHVVTVNDYLAQRDAEWMGRVHRFLGLTVGLIQAGMKSDERRASYRCDITYTNNSELGFDYLRDNLSRNKEQLVMRWPRPFHFAIVDEVDSVLIDEGRNPLLISGEDNRDAVRYPIAAKVAELLMEGVHYTVELKGNNIDLTEDGVAHAEIILGTDDLWDENDPWARFVMNALKAKVFYRRDVQYIVRDGKAIIINELTGRVEPKRRWSDGIHQAVEAKEGLKIQADSVIVAQITYQSLFKLYPKLSGMTGTAKTEEKEFSKMFKMPVIEVPTNLPNIRVDLPIQAFACREF

SEQ ID NO: 47555 - protein, 634 aa, Zea Mays
MRHFDVQIIGGAVLHDGCIAEMKTGEGKTLVSTLAAYLNALTGKGVHVVTVNDYLAQRDAEWMGRVHRFLGLTVGLIQAGMKSDERRASYRCDITYTNNSELGFDYLRDNLSRNKEQLVMRWPRPFHFAIVDEVDSVLIDEGRNPLLISGEDNRDAVRYPIAAKVAELLMEGVHYTVELKGNNIDLTEDGVAHAEIILGTDDLWDENDPWARFVMNALKAKVFYRRDVQYIVRDGKAIIINELTGRVEPKRRWSDGIHQAVEAKEGLKIQADSVIVAQITYQSLFKLYPKLSGMTGTAKTEEKEFSKMFKMPVIEVPTNLPNIRVDLPIQAFATARGKWQYVRAEVESMFQLGRPVLVGTTSVESSEYLSELLKVHKIPHNVLNARPKYAAREAEIIAQAGRKHAITISTNMAGRGTDIILGGNPKMLAKEIVEDNILPFLTHEPPNIDMEGESTSHKGLSNVELSPSSVGLLAKAAIMSKYIHKSERNEWSLSKAKSTIAESIEMGQMIGMEKLQERMTEESEMYPLCDAIGLAYLSVLRDCEVHCSFEGAAVKRLGGLHVVGTSLHESRRIDNQLRGRAGRQGDPGSTRFMVSLQDEIFQKFNLDTEWAVRLISRITNDEDIAIESNVVVKQ

SEQ ID NO: 47556 - protein, 473 aa, Zea Mays
MDFTTHLKLQRALMCRYLMYGDISAKAAHMLGQPAVLDFFAKLIQRVSPKSYQQALAEVQVSQKFLENFCGDQVRFLARSFAVPGNHLGQRSNGYRWPYGPVAIITPFNFPLEIPLLQLMGALYMGNKPVLKVDSKVSIVMEQMIRLLHDCGLPAEDMDFINSDGAVMNKLLLEANPKMTLFTGSSRVAEKLAADLKGRVKLEDAGFDWKILGPDVQEVDYVAWVCDQDAYACSGQKCSAQSVLFMHKNWSSSGLLEKMKKLSERRKLEDLTIGPVLTVSQGRSQPFFGGQLTPVTTEAMIEHMNNLLKIRGSKVLFGGEPLANHSIPKIYGAMKPTAVFVPLEEILKSGNFELVTKEIFGPFQVVTEYSEDQLELVLEACERMNAHLTAAVVSNDPLFLQDVLGRSVNGTTYAGIRARTTGAPQNHWFGPAGDPRGAGIGTPEAIKLVWSCHREVIYDVGPVPESWALPSAT

SEQ ID NO: 47557 - protein, 247 aa, Zea Mays
MKRYTFSNLSDDSQRFTARFFHLLSSLAEAFVFIYMGFDIAIERQSWSHIGFIFFSIIFILVARAANVFSCAYILNLARPPHCQIPRQYQQALWYSGLRGAMAFALALQSVHDLPDGHGETIFTATTSIVVLTVLLIGGSTGTMLEALQVVGDSNRYCQLYELQESSNGNDTGYTGQNYDEGASTSSKFRSKLRDLRRSTSSFALLDRNYLTPIFTSQNGDCNDNTTESPNEELTIFRGPGDLEVHD

SEQ ID NO: 47558 - protein, 174 aa, Zea Mays
MRCGCPSIDRKVVNSGKRLRAYVGLDEGEVCSQCNLRGSCDRAYVKARKEDVGRTVDVMRILLTYGLDVITGNVDNRACLNKSVKESIKILLSEVVEVDSRGPGSSTVKAAQRKGQSAVPMKQGDWNCPKCDFLNFAKNIKCLRCDGEFQERYQLLHEDREHLPLKKGDWICKR

SEQ ID NO: 47559 - protein, 244 aa, Zea Mays
MRNQQTVYSTQENGSVSRECLFLLHYYISPYLLNMFMKDKPGTVVTSLFTESVIPSSDPTCVEAASTRCNYVNFKRNGFCLKCGWKRPKSLNNQDSVKLCHDLEHSKNPRISFVQDGVQMKGWQSLQKKGSPSDTDLDFWSADDEEGGSRDNDTLLRQKDYRFLESFPIVGGRTANSQDLLAREKWKDEMSRRNKGLQTTESQESNRPSSHCRLPRSMELVDSDDDIASWFSGGDNNNRNLDKV

SEQ ID NO: 47560 - protein, 171 aa, Zea Mays
MHRRLATAATAPALRRFSHHSARPQPDPRHVSRWDIQVAMRCGCPSIDRKVVNSGKRLRAYVGLDEGEVCSQCNLRGSCDRAYVKARKEDVGRTVDVMRILLTYGLDVITGNVDNRACLNKSVKESIKILLSEVVEVDSRGPGSSTVKAAQRKGQSAVPMKQGDWNCPKYV

SEQ ID NO: 47561 - protein, 194 aa, Zea Mays
MKTAAAICLHWSCEKAMVQIVQQINHDGEVNRARYMPQNSFVIATKTVSAEVYVFDYSKHPSKPPLDGACNPDLRLKGHNSEGYGLSWSIFKEGHLLSGSDDAQICLWDIKANSRNKSLDALQIFKHHDGVVEDVAWHLRHEYLFGSVGDDYHLLIWDLRSPAPTKPVQSVVAHQGELPGFSPVQRMGCCNWFY

SEQ ID NO: 47562 - protein, 327 aa, Zea Mays
MKTAAAICLHWSCEKAMVQIVQQINHDGEVNRARYMPQNSFVIATKTVSAEVYVFDYSKHPSKPPLDGACNPDLRLKGHNSEGYGLSWSIFKEGHLLSGSDDAQICLWDIKANSRNKSLDALQIFKHHDGVVEDVAWHLRHEYLFGSVGDDYHLLIWDLRSPAPTKPVQSVVAHQGEVNCLAFHPFNEWVVATGSTDKTVKLFDLRKIDTSLHTFDCHKEEVFQVGWSPKNETILASCCLGRRLMVWDLSRIGQEQTPEDAEDGPPELMFIHGGHTSKISDFSWNPCEDWVVASVAEDNILQIWQMAENIYHDEDDLPISDEPAKTS

SEQ ID NO: 47563 - protein, 327 aa, Zea Mays
MGGGGRNGTVVRRYIRSKEPRIKWSADLHRSFVQAIDCLGGQHKATPKLILQFMATRGLTISHVKSHLQMYRAARLGAGRRGMQAQLLQRRHSCTGDEQEEFLRPPPPLKRARMGYESMQGLGSHGVSDARTAAAAGGLYCIDDYMQAMAAMGWRIKEEGLTRWQWQRRDAAAPSDLQAMGCLVQEPDPFKMRRPEARRLGSALRNQQDDSSEEDGNGCPLLSSSSFSNAANDDEPSDEQCSLSLSLGLDTKGARAMATSSPSGESSCILTAASPARRSSSDCCCSGHSGCFVGPGVSLELSLSISGSYLDHSDSVHRPGPAGCSRW

SEQ ID NO: 47564 - protein, 324 aa, Zea Mays
MPMLTKLRPFVREFLKEASNMFEMYIYTMGDKAYAIEIAKLLDPSNIYFPSKVISNSDCTQRHQKGLDVILGAESVAVILDDTEYVWQKHKENLILMERYHFFASSCRQFGFGVRSLSESLQDERESDGALATVLDVLKRIHATFFDMAAETDLSSRDIRQVIKTLRKEILQGCKIVFSRVFPNNTRPQEQMVWKMAEYLGAVCVKDVDPSVTHVVTVDLGTEKARWGLNNKKFLVHPRWIEAANFRWHRQPEEDFPVTAPKEKSKEKDSDNDVAGKKETSEDKENTAAGMKETRNDEGNVTGKDKADAKENVVTTSATCPADS

SEQ ID NO: 47565 - protein, 350 aa, Zea Mays
MVTVGRRRGFVTFAAAAIALMQISYLLFPISAQQSNGSRVVPAEGYCSMYGICAQRSDGKVLNCANATKAVKPDTLFSSRIQSLCPTITGDVCCTVDQFDTLHQQVQQAVPFLVGCPACLRNFLNLFCEMSCSPNQSLFINVTSVKQINSTMTVDGIDYYVTTNYGEELYNSCKDVKFGTLNTRAMDFIGAGAKTYKDWLAFIGRQANLNEPGSPYLITFGSDFSDSSGVKPLNSTIYSCGDPSLGCSCGDCPSSSVCAGSLLPQLNTETACSVKMGSLKAKCLDFSLVVIYLALLCAFLLWGLLYRTRGRTASPLQAKPLRNSDNKSNMNKNGKSPHDSVQHASMVDYN

SEQ ID NO: 47566 - protein, 53 aa, Zea Mays
MTAYLPTAISQPNDKAVCFGVSHVRFCQNRNLEIHRDNIVYTPGGIMLGKNIG

SEQ ID NO: 47567 - protein, 748 aa, Zea Mays
MAASPDQFRGHARLPHFAAPLRYDLRLRPDLAACTFTGAAAIAVVVSAPTRFLVLNAAELDVDRASIRFQDLAPTDVAQFDEDEIMVISFDRELPFGEGVLTMDFTGTLNDQMRGFYRSKYVYNGESRNMAVTQFEAADARRCFPCWDDPAFKAKFKLTLEVPSDLVALSNMPVAKETVSGLTKTIYYEESPLMSTYLVAIVVGIFDYIESSTSEGTKVRVYTQVGKTNQGKFALDVAVKSLDLYKDYFATPYPLPKLDMIAIPDFSAGAMENYGLVTYRDTALLYDELLSSASNKQQVAITVAHELAHQWFGNLVTMEWWTHLWLNEGFASWVSYLAVESLFPEWNNWTQFLDETTSGLRLDALAESHPIEVEVNHASEIDAIFDSISYDKGASVIRMLQSYLGAECFQESGEPVKDLMTTWTKQQGYPVIYAKINGHDLELEQAQFLSDGSSGPGMWIVPVTACCGSYDAQKKFLLKDKMDKINIKEFSDSQSADGEKNQIIWIKLNIDQTGFYRVKYDDELAAGLVNAIKAKKLSLMDKIGIVEDSYALSVACKQTLTSLLRLLNAYNDESDYTVLSHVTSVCLSISKITVDATPDLNKDIKQLLINLLLPAVIKLGWDPKDGESHLDVMLRSLLLTALVRLGHNETINEGVRRFHIFFEDGKTSLLPPDTRKAAYLAVMRTVSTSSRSGFDALLKIYREASEPQEKSRVLGSLSSSPDQDIVLEALNFMFTDEAWQILCSGLVR

SEQ ID NO: 47568 - protein, 203 aa, Zea Mays
MDANQVRQDKNGCTPLHWAAIRGNLEVCTVLVHTGTKEELTLKDSGGLTPVQLAAEKGHRHLSNVLSNATKVSFEDKFFPGKSRKIGYAPFLFAYLVICLILFLNSIVFAPNFSRITATAGLWSWAAVSLFFASQVMFYRVSRKNPGYIKANSKRIDPKEPLMEIDLTNSSTWTGNWSQLCPTCKEVGNRLFSLLSIYLSLLL

SEQ ID NO: 47569 - protein, 610 aa, Zea Mays
MRRSVYANYAAFIKTSKEISDLEGELLSVRNLLSTQSALIHGLSEGVQIDSLATGPEGSAEQDISSVEDQEPSEIWKWSTDFPDMLDVLLAERRVDEALDALDEAERIAADAKQKGTLSTTDILALKRVISENRQKLADQLAEAACQSSICGVELRAAASALKRLGDGPRAHSLLLSAHNQRLQLNIQTIQPSSTSYGGEYTASLAQQFFPVIAQALSDSVEVFSEKSAYTSELVTWATKQAMSFSLLVKRHTLASCAAGGGLRTAAECVKIAIGYSDLLEARGLSLSSVLMKQLRPSVEQALDSNLRRIEESTAALAAADDWILTYPPTGIRPLARSSGNLALQPKLSSSAHRFNSMVQDFFEDVGPLVSLQLGGSAMDGLLKIFNSYVNLLISALPGSVDDEVNLEGLGNKIVRMAETEDQQLALLANASLLAEELLPRAAMKLYSMNPVSKDSLRRRGPENQNRAAEQRAWKRKLNRMVEKLRDSFCRQHALDLIFTEEGDTRLSAEMYIDMDNTVEDPEWVPSAIFQELYAKLNKMASVAADMFVGRERFATLLMMRLTEAVMLWLSDDQSFWEEVEEGPRALGPVGLQQDPSKRRLVHRRCPGEY

SEQ ID NO: 47570 - protein, 324 aa, Zea Mays
MASNSSAAAVAAMFGIRDADHQDQMKPLLAQQHQHQHQHQMPPAPLLNAASSSAGPGQAAGATPPAVKKKRNLPDPDAEVIALSPKTLLATNRFVCEVCNKGFQREQNLQLHRRGHNLPWKLKQKDPSQAQRRRVYLCPEPTCAHHDPSRALGDLTGIKKHFCRKHGEKKWKCDKCSKRYAVQSDWKAHSKVCGTREYRCDCGTLFSRRDSFITHRGFLRRPRAGERPGCRPQASPPATSTAPPTRPTWGSASRRSLAQATAAGPTGSCRASRSTVSCICRISKATAPGVPRRRRLRVSSTLATSQTVQTAQVLPAMAMQARDT

SEQ ID NO: 47571 - protein, 192 aa, Zea Mays
MEVGRAPRRRVSPAAAAAAVPSLLLFAVLFAFRALGFGFGLSSVSAALINGALGSKCRPQNATSSKLDIYIEDIQKGKHGSDSGSYDAEGRFVPDKFEEIFAKHAKTVPDALTSDEIDQLLQANREPGDYSGWAGAEAEWKTLYSLGKDKDGLLRKDVARSVYDGTLFHMLAPNWKSPDEEEEQELSVIRES

SEQ ID NO: 47572 - protein, 66 aa, Zea Mays
MSTTTAKGKGEPQNANDAPLDVQPLTIAYPGEPVVCTPRPIVSHPAYNGGWKVLRHIRPNGRSDFV

SEQ ID NO: 47573 - protein, 117 aa, Zea Mays
MEAASNQEPGRCGGDDDEAKRREAELASSRLLDPGFKPSKLSQDRLDKFKELHKKRLQITEKPKYKRKPKGTTERSIKVTSNYKFTDKDASADSSPRDVHHMSSVTGIQGVSDGLGR

SEQ ID NO: 47574 - protein, 363 aa, Zea Mays
MAQQNGSSAAESTNSGSTQDALNKRLEQLVNSHPVFLFMKGTPEQPRCGFSRKVVNILKQEGVEFGSFDILTDNDVREGMKKFSNWPTFPQLYCKGELLGGCDIVIAMHDSGELKDVFEEHNIPLKPQGSKNEEAGQPESATEKGAAVAEPMGLTDAQKSRLESLINSSPVMVFIKGTPEEPKCGFSGKLVHILKQENIPFSSFDILSDDEVRQGLKVLSNWPSYPQLYIKGELVGGSDIVMEMHKSGELKKVLSEKGVIPKESLEDRLKSLVSSAPVMLFMKGTPDAPRCGFSSKVVNALKKEGVSFGSFDILSDEEVRQGLKTYSNWPTFPQLYYKSELIGGCDIVLEMEKSGELKSTLSE

SEQ ID NO: 47575 - protein, 114 aa, Zea Mays
MSRERPDSWKGSTPSIPRVVSMMMRMTSEVLSYLAIRTCAMAFVVPFTPVTGIFLFEIRAGYMGFTMCCRLTLLFLSLDFVSLWAETQILESPQFPGMNGRVAHMGQDPRHVFY

SEQ ID NO: 47576 - protein, 322 aa, Zea Mays
MAAATPRLLLAVAGLTLAVLAAAVSPSLAAGPPVLQDPAELLRLAKEPAFADWMVGVRRRIHENPELGYEEFQTSELVRRELHAMGIPYRHPFAVTGVVATVGTGGPPFVALRADMDALPLQESVEWEHKSKVPGKMHGCGHDAHVAMLLGSAKILQEHRDELKGTVVLVFQPAEEGGGGAKKMIEDRAVENIDAIFGLHIADSVPIGVLASRPGPIMAGSGFFEAVISGKGGHAALPHHTIDPILAASNVIVSLQQLVSREADPLDSQVVTVGKFQGGGAFNVIPDSVTIGGTFRAFLKESFNQLKQRIEECGLSCRGDCE

SEQ ID NO: 47577 - protein, 451 aa, Zea Mays
MERYNPSEVYELFVRHMNNPRVVVDNGACATATLVQVHSARKHGVLLDAVAALSDHGVCVRKGYISSDDGRWFMDVFHVVDAAGGKVADAGALLARLESSLSADALPPRPPPAAAGAGTPTLLELVGADRPGLLSEVFAVLHDLRCGTVDARAWTHAGRVAALVFVRDEETGSPIDDAARVRRVESRLRHVLRGGALGARMVRADASAVNMDRRLHQLLNEDGEAGSRADRAESEAEAPTPTAVAVQDWVERGYSVVTVSCRDRPKLLFDVVCTLTDLDYVVYHGTFHTDDDHARQGVRLELRITDRRGLLAYVTRVFRENSLSVTHAEITTRGRHGHERVPRHRRGRPTRGPQDHRRGDPEDRHGEPPGGRGAVAAPVLDGGRRWPRRRRCGDLLAREPCQEEPGQSWPHKILLVRTRSMGGMCSMGSLCKYGMVHGLVCKWSRGLNRRF

SEQ ID NO: 47578 - protein, 413 aa, Zea Mays
MDVFHVVDAAGGKVADAGALLARLESSLSADALPPRPPPAAAGAGTPTLLELVGADRPGLLSEVFAVLHDLRCGTVDARAWTHAGRVAALVFVRDEETGSPIDDAARVRRVESRLRHVLRGGALGARMVRADASAVNMDRRLHQLLNEDGEAGSRADRAESEAEAPTPTAVAVQDWVERGYSVVTVSCRDRPKLLFDVVCTLTDLDYVVYHGTFHTDDDHARQEFYIRRLDERPISSATERRRVIQCLEAAIERRASEGVRLELRITDRRGLLAYVTRVFRENSLSVTHAEITTRGRHGHERVPRHRRGRPTRGPQDHRRGDPEDRHGEPPGGRGAVAAPVLDGGRRWPRRRRCGDLLAREPCQEEPGQSWPHKILLVRTRSMGGMCSMGSLCKYGMVHGLVCKWSRGLNRRF

SEQ ID NO: 47579 - protein, 289 aa, Zea Mays
MRPPGARPGGTPGCPNVVEIIDRYDEACVPVNMTENKLAYIQNETISKECIRNLTVTKYMKQPIFVYYELDNFYQNHRRYVKSRNDAQLRDASKANQTSACEPEKTTANGQPIVPCGLIAWSLFNDTYNFTRGNENLTVDKKDISWKSDREHKFGKDVYPSNFQNGALKGGATLNPKIPLSEQEDLIVWMRTAALPTFRKLYGRLYFDLKENDTITVRLNNNYNTYSFGGKKKLVLSTATWLGGKNDFLGFAYLIVGGLCIFLAFAFTLLYFVKPRKLGDHNYLSWNRR

SEQ ID NO: 47580 - protein, 376 aa, Zea Mays
MALTATATIPVREDITKSLKMSKDTAIVLTSFFRPNLRFSVKHSKTSASSYGKDFQELIGAYKASREGQQILHGIDTDSESSSYESLNDSASDDEDANVISANHGDKNVGKTKTSMTLVEENIENELDLYQGVDNFDVSCGEFLECSQPESSKSPAQSNQTSSSDCGVQGSTIVYVPTRKQTVELANFLCKSGLRAAAYNAKMPKSHLRQVHQQFHCNDLEVVVATIAFGMGIDKSNVRRIIHYGLPQSLEAYYQEAGRAGRDGKLSDCTLYYNFLRTPTLLPNKRSEEQAKAAYRMLRDCFHYSLNTSTCRAKILVKYFGEDFGPDGCRMCDICTNGPPQMHDFKEEAIVFMNVLQGRSQSTPLQLWQERVWRGT

SEQ ID NO: 47581 - protein, 535 aa, Zea Mays
MALTATATIPVREDITKSLKMSKDTAIVLTSFFRPNLRFSVKHSKTSASSYGKDFQELIGAYKASREGQQILHGIDTDSESSSYESLNDSASDDEDANVISANHGDKNVGKTKTSMTLVEENIENELDLYQGVDNFDVSCGEFLECSQPESSKSPAQSNQTSSSDCGVQGSTIVYVPTRKQTVELANFLCKSGLRAAAYNAKMPKSHLRQVHQQFHCNDLEVVVATIAFGMGIDKSNVRRIIHYGLPQSLEAYYQEAGRAGRDGKLSDCTLYYNFLRTPTLLPNKRSEEQAKAAYRMLRDCFHYSLNTSTCRAKILVKYFGEDFGPDGCRMCDICTNGPPQMHDFKEEAIVFMNVLQGRSGGETDEMIYSRVPHYSSGRRGFGEAPNFRMVVSHIREKLPRFAATDKIWWQGLSRILEGLRYVEEAAETPRVSMQYPELTEDGLKFLSSSQSEAPLYAYPDAAMLLAMKEPRPFSGFSDWGRGWADPETRRQRLAGKKAGRRKRKWRSRGRQQQPGGFTTARERLTAILAKKKKR

SEQ ID NO: 47582 - protein, 495 aa, Zea Mays
MPLLLRGASLLRLCQCTSGLSSVKFSSRVTVLVNLNAMRDGMRATYSRRAASKNSEVKKDEQPVTEKEDAAETDLEVERGRSSSPSQLQSMTVKELRELTRRRGISVKGTKKDLVSALMNSMAVEANGEGGKSSVELVSPLEVPLKRKGGASVVVEQKLESSEIISETPNKKSRTKQKSSKNTTREEISVTNVKLSKTVVQKETVAGLSPDDDSEPWTILVHKKPQASWIPYNPRTMRPPPLSKDTRALKIMSWNVNGLKALLKSRGFSVQQLAQREDFDVLCLQETKMQEKDIEVIKDTLLDGYTNSFWTCSVSKLGYSGTAIISRVKPLSIKYGLGISDHDTEGRVVTVEFDDFYLLTAYVPNSGDGLKRLTYRVTEWDPSLGNYMKELEKSKPVILTGDLNCAHQEIDIHDPAGNRRSAGFTNEERESFGTNFLSKGFVDTFRKQHPNVVAYSYWGYRHNARKTNKEKVHDSYILPDISASDHSPLGLVLKL

SEQ ID NO: 47583 - protein, 175 aa, Zea Mays
MHGLMKSGGPIPSSVSLQFVVNCFLTCSVAADIQTMLEETQLKFEEERQNSLKVLSNTSKEQCESSLNEEYSKFQETYDTFCKEKDAHMQTFRDLLSKVEVEKKKLLEKYEHHMEEETNTLSELDETISEKVTHAEHSVRRVNQDGKSFIVFRKSTGLFLDCGSDDDFDLDEWRC

SEQ ID NO: 47584 - protein, 155 aa, Zea Mays
MNRRAPLDDIDNLVSVRPVEGIGNCDAINWQSIASIRWRRGGSIYASIYKDVPMMVSLSGRFHLERGIEERLGKEFMDRINKEGYIDVTSKSDFIPRFFTIHGSADLIIRVEDAYEFAWLIPNYMLHVIEGANHCYTAHCREHSDDVVEAITSSE

SEQ ID NO: 47585 - protein, 120 aa, Zea Mays
MRYRVTRLPKYLILHMRRFTKNNFFVEKNPTLVNFPVKNLELKDYIPLPKPKENHKLRSKYDLIANIVHDGKPGEGCYRVFVQRKSEEAWYEMQDLHVTETLPQMVALSETYMQIYEQHE

SEQ ID NO: 47586 - protein, 476 aa, Zea Mays
MAAAVASLYRRVLPSPPAVDFASPEGKRLFAEALAAGTMEGFFPLVSVFQTQSEPAFCGLASLAVVLNALAIDPGRRWKGPWRWFDESMLDCCEPLDKVKAEGITFGKVACLAHCSGADVQSFRTNRVTIHDLRRHLIRCVSSQDCHLIASYHRRPFGQTGTGHFSPIGGYHAGQDMVLILDVARFKYPPHWVPLQLLWEAMNTTDDSTGLLRGFMLISRKVAAPSLLYTVSCRDENWKRMSKYCVEDLPSLLKAGNLDDVPALLSRLIESLPADAESLIKWVVEVRRKEEGGPSLNKEEKERLFLKENVLKQVRDTRLFTIVHDLQYANKPCYNCSSSSEDDSLTRIAAVVCCQGAAMLSGSVVCEGSEQGVDMLLPMSSPGASSCNSNLKSNAVKYPSSVDVLTVLLLALHPNTWLGIKDEKLKAEFQTLISTDSLPDDLKREILHLRRQLYYLKACKEEECEDAEQPSPKQQC

SEQ ID NO: 47587 - protein, 94 aa, Zea Mays
MLLEMFGVVVRAVLLSHQVMGSKQLLHIYVGRLASAYPFTDATHVGASSSKSAQCSLRCAIRRVFFHINTKLQKKLCMIFIDYFLSKEISYCQD

SEQ ID NO: 47588 - protein, 212 aa, Zea Mays
MAKTKQGKRDVDAYTIKGTNKVVRVGDCVLMRPADTDNPPYVARVERMESDGRGSVRVRVRWYYRPEEAKGGRRPFHGAKELFLSDHFDTQSAHTIEGKCIVHSFKSYTKLDNVGPEDFYCRFDYKAATGAFTPDRVAVYCKCEMPYNPDDLMVQCEGCKDWFHPSCMGMTIEQAKKIDHYMCSDCAKENGAKRPSNSYSVSPNSDSKSVLF

SEQ ID NO: 47589 - protein, 108 aa, Zea Mays
MVLEDLLKKGHAEPAKKIGAGVEAFEIRNHPVWQSRCFFIRRIDGSSDDFSFRKCVDNILPLPEDMKVGNGKKSGGHHKGGGGGGGGRGGGRGRGGWRGGRGRGRRGG

SEQ ID NO: 47590 - protein, 119 aa, Zea Mays
MGDAGADASSSPPPPSGSFSYFAVFRNYPLVAALLGFAVAQSIKFFVTRYKENRWDPKRLIGSGGMPSSHSATVTALAVAIGFQDGFSCSLFATATIFASVVGYQFSIPTHVPSEEHKR

SEQ ID NO: 47591 - protein, 181 aa, Zea Mays
MGDAGADASSSPPPPSGSFSYFAVFRNYPLVAALLGFAVAQSIKFFVTRYKENRWDPKRLIGSGGMPSSHSATVTALAVAIGFQDGFSCSLFATATIFASVVMYDASGIRLHAGKQAEVLNQIVCELPSEHPLSETRPLRELLGHTPTQVCSHVLFIVFSSECISLLLAKRKRWVIGIDTK

SEQ ID NO: 47592 - protein, 1214 aa, Zea Mays
MKPSTAGDASAAAAASSSGPSTSASTSASTSTADATHYIAKRVLRGSAVLHVAEGCFRSPDSADVVLAKETSLELVAVGDDGVLQSICEQDIFGIIKDIGVLQWHSRHNGLIPQIECKDLLVVLSDSGKLSLLYFCSEMHRFFAIANIELSKPGNLRHHLGRILAIDRESNFVAVSSYEDKFALIHVSVSQSGSGSGIISEKKYFYPPENEDDARIITSSRTSIRGTIWTMRFISVPQDEEYYPVLAMIINRKGSDVNDLSLFGYDSSSCVINHLSSYSEIGPLVLDVSEIPETFGFALLLRVGDALLLDLRNPTNVCCIQRVSLTTNLIGEPITVEDPCPGLDVDDDVAACALLELRDSGNNIMKDDGYMDIDGVDSRSNVKPRIVCSWSWEPPDPVRRGCARLLFCLDDGEFHILEFTLDVEGAKLYTFEYIDRTLPCRPLFWMKNRMIIGFVEMGDGMIFKLGHRRLLHKSTIQNVAPILDLAIADYHGEKQDQMFACCGMSPEGSLRVLRNGVNVDRLLKTEAIYQGVTGLWTLRMKATDAYHSFLVLSFVEETRILSVGLSFNDISDAVGFQPDVCTLACGLVADNLLVQIYSKGVKVCLPTVYAHPEGAPLTSPICTDWYPAITISVGAVGHNIVVVATSNPCCLYVLGVRSSSSYQYELYATHHVQLQYEVSCISIPQEDCIHDNVSFSCGEGDDICKNPPPKVNVCKFAVIGTHRPSVEIISLEPGEALRVLTIGTVSVNNALGAPMSGCIPENVRFVAAERFYILAGLRNGMLLRFESETRDYLPGFLYKDSSIPSVNTFLQLISIRRIGITPVLLVPIHDSANADIIVLSDRPWLLHAARHSLAYSSISFLSASHVTPVSSVDCPNGLLFVAESCLHLVELVHGKRLNAQKFSIGGTPRKVLYHNESRTLLVLRTGLNGASSSSDVVQVDPQNGVLLSRYKCEPGETAKCMQIAKIGNDQVLIVGTTKSAGRPMMSNGEAESIKGRLIVLSLEAVESPRESSSFIPTFSFNPSSHSGSPFHEIVGYTTEEFSSNSMCSSPDEFSCNQIQAEQMTGQLRSLTQYILNGAVLALCPYLDRYVLAAAGNMARFSPDGYVSINPPGSCLYLCTIPTATNQSSIDDVAYICIPCPSQSINLLYFTSLKWPVILLLPSHAFAAAHPFPTCLRGSALSRTKSTFMLENKDVVCPCPHDLWTLSNEMPRFMA

SEQ ID NO: 47593 - protein, 503 aa, Zea Mays
MANTSGTRPHTGAQQWLSLRETMTRANATYIDCVQGLPLWRESASVVNDELFKGYRQNGGGSGGGKTNEFVAGYDFLNTNTNGLEMNIWYNSTYNNNTAYVPISLLRVPRLVNAASNEYIKFLKGSGVEMFLQYVKEMPKVGTKLKFDLSSLLGALFFTWIVELLFPVILTYLVYEKQQKLKIMMKMHGLKDGPYWLISYAYFFALSATYMILFVIFGSLIGLDFFRKNAYSIQFVFYFIYINLQISLAFLVSSFFSSVKIATVVGYIYVFGSGLLGEFLLRFFVEDTGFPKGWVVVMEIIPGFSLYRGLYEFGQYASAGNSMGTTVLPLAFYVDQVSPLGGGFRKNPFFFLGCFKKSPLSLRRYSFGRQGSKVVVEMDNPDAVQEREVVEQLLLEPIANQAILSDNLKKVYHGKDGNPDKLAVRGLSLAIPKGQCFGMLGPNGAGKTSFISMMIGLIPPTSGTAYVHGMDIKTNMDAIYTTMGVCPQHEKRACNVLWETEES

SEQ ID NO: 47594 - protein, 753 aa, Zea Mays
MEHKFYYRYLPLNRLVFSAEPGQQAAAAAARSPMDAPAPTRGPASFLTQANALLRKNLCFQKRNLKTNIGITLFPVLLCVILVVLQGVIDRELDKPKYRCGCVCVDPGPAAVGDACRRTECGVQHSTLDQVGSCPIPNPTPWPALVQVPRPESRAVRTAGQPFDGLPDPTCRDTGSCPAAVLVTGSNRSLAQSLSVGLFPASTSSLNLTDYLDALSKIVAGSDTWPWTTELIESAFIPGNNLYLVQPRCLSNLTQTVSSNAGAIPLQLNIDCVQGLPLWRESASVVNDELFKGYRQNGGGSGGGKTNEFVAGYDFLNTNTNGLEMNIWYNSTYNNNTAYVPISLLRVPRLVNAASNEYIKFLKGSGVEMFLQYVKEMPKVGTKLKFDLSSLLGALFFTWIVELLFPVILTYLVYEKQQKLKIMMKMHGLKDGPYWLISYAYFFALSATYMILFVIFGSLIGLDFFRKNAYSIQFVFYFIYINLQISLAFLVSSFFSSVKIATVVGYIYVFGSGLLGEFLLRFFVEDTGFPKGWVVVMEIIPGFSLYRGLYEFGQYASAGNSMGTTGMKWSNLDDSLNGMRVVLIIMVVEWAIVLPLAFYVDQVSPLGGGFRKNPFFFLGCFKKSPLSLRRYSFGRQGSKVVVEMDNPDAVQEREVVEQLLLEPIANQAILSDNLKKVYHGKDGNPDKLAVRGLSLAIPKGQCFGMLGPNGAGKTSFINDWAYSTNIWHCLCTWNGYKDQYGCNLYYHGCMPTA

SEQ ID NO: 47595 - protein, 968 aa, Zea Mays
MLWYYEVLPCMAEKHDCLYLHDVGSQEDSFTKDEIISAYTRTRVPQMASSVSQRRTGNMLPPPGDDFSYSAVVSAKHTFKNATLNTTNQPRPSPPNSSSGRSTLPPAASWGQRDVNARTTATGVTSSQSHTKPKSESQSNPFSSSSVISSTKTPSSWNDDTSTAAKMSEGQQVSEKESKTLQLYKPGISMATQATSSLELSLNIDFSTIPSAWNDDEIVVSDGMSKGSDENQVANENGELTHPASKPLVLSKKDITMKSTSTSKSPPNIVSSLAISKSDVNTSDGDHSLTNISLTSNAVVCQSNHVAGAKILEDIRSRDTDMEKLSVHISSVKLGGNDEIQIMAGNQRPDVMPCTSVDAPMNQNFDRDQSHLNLNEPLLPSENKDTVLSCQYSSDKRLDWSSEMQNGSVTPSNNIVDSTMLTGKLHSILLDVSEQPSYARFPSSLDTSLCNDTESNTAATIDTTISHMQTEFSSINNMYALLNGGQDGLGTVNTHGNVSEQHPGMGNHQCRAMGSVRTEAMGSVRTDSIGSFEKTISINKDESRIISDMLSSEFNPWDDSYSTANNFVRMLRESENNDVHFAVPSWKSGTGNKESRFSFARQDNQGNLLDSSLRNCGTGTEQNFSLLPQNSRGNIYQNGLAFQSLENDFSNSNSLGVLDMLTTGTSRSKISAPPGFSAPARVPPPGFSTALPSQEFPSGISSHDGSIALPRFPWAFSSQISAQELSKPPSRLPSPFSSGFSSLDGPNSSSRFPSAFPSGFSSQNGPNPSSGFPFSSGFSSQDGSNQSYGSTNPENLLRNTVLGGSSNHYQSQFGRHSSDMEFDDPAILAVGKGLMPGIGDSGLEMKNTPAFQAQLQPASSDPRFHLHIQPNVQSHQNMGFADHMQDGLNHMNDNRFLGQNHGPLSPYVQIPQQPRNSQVTNGHWDGWSDSRQGNSTPMSDMSRILYPSEVNKLHMLGSNDIYNRAFGM

SEQ ID NO: 47596 - protein, 108 aa, Zea Mays
MAPVVMMSMCVVVSLVAVQLQATSSDGATAATPSVVLPPVTVPRVRGRLEAGRKLQAVDAVGMGMDSVVRRTVVLTTMQTSNSPSLGYGSLRPNNAVCGSSCAGRPPV

SEQ ID NO: 47597 - protein, 231 aa, Zea Mays
MGSKAPFCLTLLLLLAAACGPAAHAHDAVELPHHGLALKEQISSTKIPARLKSGSGLCSACENFTSEAVTYLGKEQTQDRIMEFLHDACSQSFSFEQKCVELMDSYATLLFAKITEIRPEAFCKRYGLCRDTALLSGVGSDSTCVFCHHLLDEIMSKLKDPDAEFEIIQILVKECNKIEGHVQQVEQIVVERSEGWHCGYFCYHAWIPRQCEDEPEGRVLGGDPLSENSTR

SEQ ID NO: 47598 - protein, 458 aa, Zea Mays
MLSCCNCCCPAVVKRLLLLRSQKTAATAVLRSQKDCCMLSCCNCCCPAAVKTATAADHMTYSITRLRSFILFDTEVPCSWIDDVLSRFRLLRVLCLRFANIAEVPGVVTELYNLRYIDFSYTKVKTIPASFRKLVNLQVLDLRFTYVEELPLEITTLTNLRHLHVFAVHDFQQRSLNCLGATKIPVNICHLKNLQAIQIVLANKDLVSQLGNLKLMRSLAIAEVRQSYIAELWKSLTKMPNLNRLAISTCNMEEILDFKMLKPLSNLVFFKLAGKLESGVLPLMLYYFEKLTWLQLDWSGLKKDPMSSLSHMSNLVHLFMCGSYCGEQLTFCSGWFPKLNYLQLSKMENLNWIEIEDGTMMCLNNLYLVDLGNLKAVPYGIKYIRTLHQMHLTDMSKEFLGSLQGSASPVVQHICNIHIFESSDSEAVNKFFFEPYLATKFGPGATKHAPTYLGSSGI

SEQ ID NO: 47599 - protein, 120 aa, Zea Mays
MVQWPDKSLSVGVVQALSWRRSGLMLQPATQISICPTIGGRHPGVCVELIHSADDNVGVVCGYSHTASSPASAYASISIGRSKLNGGAARSGLAFRVDAPLLHGFGRPWFSVQMNSGIEF

SEQ ID NO: 47600 - protein, 207 aa, Zea Mays
MGGYSVWGCLQYIPHRLAGAALVVPIINYWWPSFPAELSKQAFNRLIVPEQRTLWIAHNIPSLLYLWMTQRWFPSSAAAMHHPEIFSKHDMEVLQKMMAMPRTIENKSRQQGIYESIHRDLLVAFGTWEFDPMNVTNPFPQNEGSVHIWQGREDRLVLVELQRYIAKKLPWIKYHEVPEGGHMFVMVDGWTDRILKALLLGEEPLDV

SEQ ID NO: 47601 - protein, 330 aa, Zea Mays
MSSEAVKVTMLESMFRRRKREEQWAVKKKKAMPEKKKSIERRKLIFSRAKRCIPGSIGLQCCWRKGTGQITPSSRPVVTRRVAVAAPAPTGIVMESWVRAVVEAIHSSRSQTVIYLAGGASQALGWLLSVPGASGTVLEVVVPYSRASMAQLLGKMPLQFTSKQAAEDMALAAYNRALKLSGPGLQVMGVGFTGSLASSRPKHGDHRFYVSTWTHNCLRTSHVTLSKGLRSREEEDKVSSYFLLKAIADTCRVSATIQSDIHKSEIPEEIMEQFDEDQELQQVINGQVCMKVYNFAAPAESNLNRKIILPGSFNPLHDGHLRLLEAAVRN

SEQ ID NO: 47602 - protein, 348 aa, Zea Mays
MEGEAVHMLQSGHHQWNKGQPTLQAFPATQRLNSRLHQISEETKKMAPKLVFVLPVVLLALALQAILRPPPPKLCGSPGGPPLTSPRIKLRDGRYLLAYDRAGYGESDPNPNRHVKSEALDIEELADQLGLGHKFYVLGASMGGYSVWGCLQYIPHRLAGAALVVPIINYWWPSFPAELSKQAFNRLIVPEQRTLWIAHNIPSLLYLWMTQRWFPSSAAAMHHPEIFSKHDMEVLQKMMAMPRTIENKSRQQGIYESIHRDLLVAFGTWEFDPMNVTNPFPQNEGSVHIWQGREDRLVLVELQRYIAKKLPWIKYHEVPEGGHMFVMVDGWTDRILKALLLGEEPLDV

SEQ ID NO: 47603 - protein, 229 aa, Zea Mays
MFSSGKVLIRAANGEMMNTPRCLFGSASFGEKAIVAGGIGQNGTLDSAELYDSEMQTWTTLPSMNRARQMCSGFFMDGKFYVIGGKSERHNEILSCAEEFDLESSTWRLIPDMAQGLNGGSGAPPLVAVVNNELYAADYATKEVRKYDKENNAWITLGLLPGRYTSVHGWGIAFRSCGDMLIVIGAMSAGGSGVIEICSWVPNNGLPDWKIIGTRRSGSFVYNCAVMSC

SEQ ID NO: 47604 - protein, 662 aa, Zea Mays
MKALGAHAADLLRGPHLLRAAVFAFAVALAFLVGYHWPNASPRLVFFSSDASSSSPRSSSRSPSVVLSPNSNVSFDPSLIPTPSTPPASSTPNAWSPPALPPPTSAPPPPLPPPPPPARLGIVGEDGAMQDDFDIGNVGANDTDLATDETAPQEPSDVGASGGPPRVRIERFPVCPESMREYIPCLDNEDDIKRLPSTERGERFERHCPAKDKGLSCLVPAPNGYKAPIPWPRSRDEVWFSNVPHTRLIDDKGGQNWITKVKDKFRFPGGGTQFIHGANQYLDQISQMVPNVAFGSHTRVVLDVGCGVASFGAYLLSRDVLTLSIAPKDVHENQIQFALERGVPAMAAAFATRRLLYTSQAFDIIHCSRCRINWTRDDGILLLEVNRLLRAGGYFAWAAQPVYKHEEAQQEAWKEMENLTARLCWEFVKKEGYIAMWRKPLNNSCYINRGPEGKPPLCDADDNPDDVWYVGLKACISRLPENGEAPTPVQWPARLMEPPKRLQGVEMDAYSSKNELFKAETKFWDDIIDGYIRIFKWRKFKVRNVMDMRAGFGGFAAALIRQKLDWWVMNVVPISEPNTLPVIFDRGLLGVAHDWCNISSILLEMDRILRPGGKAYIRDRKEVIQEIKEITNAMGWRGTIRDTAEGAYASRKVLMCDKPMAR

SEQ ID NO: 47605 - protein, 362 aa, Zea Mays
MDIDFRWGGNPSIILAVDAVVASLPIQLKDLQVYTVIRVIFQLSEDIPCISAVVVALLADPEPKIQYTLKAIGGSLTAVPGLSDMIDDTVDSIVSDMLLWPHRHVVKLGVNVDTSDLELKPQGRLSVTVVKATSLRNKEMIGKSDPYVKLYVRPMFKVKTKVIDDDLNPEWNETFDLIVEDKETQSVIFEVYDEDKLQQDKRLGVAKLAVNTLESEITQDATLKLLHSLDPIKNKDTKDRGTLHLKVKYHPFTKEEQLEALEMEKQAIEERKRLKEAGIIGSTMDAVGSGVGFVGTGIGAGLGFVGSGIGAGAGLVTSGIGAVSSGLGKAGKFMGRTVTGPFSMSRKNGSSSTAPQHDQPSA

SEQ ID NO: 47606 - protein, 94 aa, Zea Mays
MAAATGYSDAPTDEQLLAYAELPKHGRDMAEVFAVRIPATVGGNLPPRGSIVFYGGHCCSDFIYSWSPLEEEEDTSKQICDSQVCLIKSYETLC

SEQ ID NO: 47607 - protein, 385 aa, Zea Mays
MAAATGYSDAPTDEQLLAYAELPKHGRDMAEVFAVRIPATVGGNLPPRGSIVFYGGHCCSDFIYSWSPLEEEEDTSKQICDSQGNLVLTGPSLATSAYSPIAFFLYLHDGSPQAGEATEDDEDIGRILCDCIGDDFSNYNRAIVETVQTGYGPAEVIYAVLSNGVQGRVAVKLARPPVSKAGEEDATTILGRIVARSKLFDVGCVLFYKEGDNGVNVRPGGLIQLAREALAVPLHMPLTIELDLHRCSGDEIVGGVLEFNPATNGQHTERLVGENGAELEVAISWSQYPWMDSKRRLQGPFSLRITNESGETLVAYQVIPANWAPNSYYRSNIQYEAFGSAAGQATGSAVGLVISSAARLHTLITRIIGLICLVLLYHLQGIEVP

SEQ ID NO: 47608 - protein, 407 aa, Zea Mays
MTTRACLLVALAMALALLLQEHAAGAEAHEQKQQVQRLLRRLNKPPVKTIESPDGDIIDCVHITKQPAFDNPLLKNHTIQMWPSSHPRGGQLNEDYSNTASSITQTWHQNGSRSCPENTIPIRRTMEEDVRRADSPRSYGKKERRPKFTPVDGAGQPTTVTSGHQGGSTYYGTEATFDLWQPVVETASDFSLTQFWVVSGSYQANDLNTIEAGWQVSPNMYGDNSPRLFIYWTRDAYQTTGCYDLKCSGFVQTNNAITFGVTQLSPVSTYGGPQNDITILVWKDPKTGNWWLQVGKDLLGYWPSSLFTNLASSASNIQWGGEVYSPDAGQTSTQMGSGHLPEEGLGKASYIRNIQVVDASNTLLSPSGGLGLFASRPNCYNVLNGAAGNSFGTYIYYGGPGRNPNCQ

SEQ ID NO: 47609 - protein, 346 aa, Zea Mays
MVKPPSAPLVGWQLLLHRLASKEMHRQFAQHWDIPRHWVVLYLELYASCVEYITLLGDSMSSVFPSAHLAFAGIDMNAHTLFAITTALAILPTVCLRNLSLLSYLSAGGVMATIAVIVCLFWVGIGEGIGFHFSGALVNVTHLPVALGLYGFCYSGHSVFPNIYSSMKERSQFPFVLLFCFTVVTVAYAGIAVSGFLMFGESTMSQFTLNLPQQYIPSKIAIWMTIVNPYTKYALTMTPVALSIEEALPKKMQNYLVGMSVRTCLVLSTVVVALLFPYFGLVMALLGSVFTMLVALILPCACYLSIKKGAVPLWEIILCIVIIMIGAVCASVGSYTSVSQMISSTR

SEQ ID NO: 47610 - protein, 1031 aa, Zea Mays
MEGAEALFPGDGCGGDPMDFSWTADGEKHPDPAACASPGRDDEATSASTPVPSPQEMAESMILVPGPRVVMSGLRLADCRSDDCVLFINAGGGAIESCDPCVKVSGDSFFEGGDVIETNESIAEGGDCPFIYHSARYGSFSYKFDGLAPGAYFLDLHFAEILYTCGPKGISMFDVLVQDEKILSQLDVYAVVGGNRALQVRDIRVTVEMNGAVMINFKGVRGSPMVCGICIRKAPLLSVQTLGRESDQLRNVSRKYKNDKKLWVAAISNLERKIKAMKQEQQLLSLEAHDCANAIPDLSKMIGAVKGLVAQCEDLKLKYYEEMDKRKKLHNIVQETKGNIRVFCRCRPLSKDEVSSGQKCVVDFDGSSDGDIVITNGGTKKTFKFDRVFTPKDDQDIVYADASPLVTSVLDGYNVCIFAYGQTGTGKTFTMEGTESNRGVNYRTLEELFNIAEERKESVTYDLSVSVLEVYNEQIRDLLATSPSKKLEIKPNSEGQNHVPGLVEAKIENINEVWKVLQTGSNARAVGSNNVNEHSSRSHCMLCITVRAKNQLNGECTSSKLWLVDLAGSERLAKTDVQGERLKEAQNINRSLSALGDVISALATKNSHIPYRNSKLTHLLQDSLGGDSKALMFVQISPSDNDVSETLSSLNFASRVRRIELGPAKKHVDTAELQKTKQTLERAKQELRLKDDSLRKLEENLQNLESKAKGKEQLCKNLQEKVKELEGQLDSKAQCQITSEKQQRQLSGKLKEKEEMCNVLQQKIADLECKLRQPQQSESEVALLKQTIQELEVKLKEQQHDRSAMELSIKEMELRFKEEEHQRSVAELKIKELELKLKEQEHQRSVAELKAREIGHELLETQRTESMLQIKLRELESKAKEQDTNMTAVVESRVVVATPVNAKVMSEKENHVLRISNSLNKQLAHVENTPEAPEAACNERKRKGEARNASIGGGEQENTNNGGRKRSLPAEREARLKRKSTEPPPQVKNLVRSTASSRAAAKAAAAAAPSSRAGGAKQQPGGGNKTRGWVR

SEQ ID NO: 47611 - protein, 1105 aa, Zea Mays
MEGAEALFPGDGCGGDPMDFSWTADGEKHPDPAACASPGRDDEATSASTPVPSPQEMAESMILVPGPRVVMSGLRLADCRSDDCVLFINAGGGAIESCDPCVKVSGDSFFEGGDVIETNESIAEGGDCPFIYHSARYGSFSYKFDGLAPGAYFLDLHFAEILYTCGPKGISMFDVLVQDEKILSQLDVYAVVGGNRALQVRDIRVTVEMNGAVMINFKGSDNLGLTLVAANSVTNGNVLCKRCSSDIDVSTTQTRTSKLISKYEKQIEELTSQCTMKSNECYMAWSSVDTTNVELGRLKIELHQKGAEMENLVQTLGRESDQLRNVSRKYKNDKKLWVAAISNLERKIKAMKQEQQLLSLEAHDCANAIPDLSKMIGAVKGLVAQCEDLKLKYYEEMDKRKKLHNIVQETKGNIRVFCRCRPLSKDEVSSGQKCVVDFDGSSDGDIVITNGGTKKTFKFDRVFTPKDDQDIVYADASPLVTSVLDGYNVCIFAYGQTGTGKTFTMEGTESNRGVNYRTLEELFNIAEERKESVTYDLSVSVLEVYNEQIRDLLATSPSKKLEIKPNSEGQNHVPGLVEAKIENINEVWKVLQTGSNARAVGSNNVNEHSSRSHCMLCITVRAKNQLNGECTSSKLWLVDLAGSERLAKTDVQGERLKEAQNINRSLSALGDVISALATKNSHIPYRNSKLTHLLQDSLGGDSKALMFVQISPSDNDVSETLSSLNFASRVRRIELGPAKKHVDTAELQKTKQTLERAKQELRLKDDSLRKLEENLQNLESKAKGKEQLCKNLQEKVKELEGQLDSKAQCQITSEKQQRQLSGKLKEKEEMCNVLQQKIADLECKLRQPQQSESEVALLKQTIQELEVKLKEQQHDRSAMELSIKEMELRFKEEEHQRSVAELKIKELELKLKEQEHQRSVAELKAREIGHELLETQRTESMLQIKLRELESKAKEQDTNMTAVVESRVVVATPVNAKVMSEKENHVLRISNSLNKQLAHVENTPEAPEAACNERKRKGEARNASIGGGEQENTNNGGRKRSLPAEREARLKRKSTEPPPQVKNLVRSTASSRAAAKAAAAAAPSSRAGGAKQQPGGGNKTRGWVR

SEQ ID NO: 47612 - protein, 1100 aa, Zea Mays
MEGAEALFPGDGCGGDPMDFSWTADGEKHPDPAACASPGRDDEATSASTPVPSPQEMAESMILVPGPRVVMSGLRLADCRSDDCVLFINAGGGAIESCDPCVKVSGDSFFEGGDVIETNESIAEGGDCPFIYHSARYGSFSYKFDGLAPGAYFLDLHFAEILYTCGPKGISMFDVLILSQLDVYAVVGGNRALQVRDIRVTVEMNGAVMINFKGSDNLGLTLVAANSVTNGNVLCKRCSSDIDVSTTQTRTSKLISKYEKQIEELTSQCTMKSNECYMAWSSVDTTNVELGRLKIELHQKGAEMENLVQTLGRESDQLRNVSRKYKNDKKLWVAAISNLERKIKAMKQEQQLLSLEAHDCANAIPDLSKMIGAVKGLVAQCEDLKLKYYEEMDKRKKLHNIVQETKGNIRVFCRCRPLSKDEVSSGQKCVVDFDGSSDGDIVITNGGTKKTFKFDRVFTPKDDQDIVYADASPLVTSVLDGYNVCIFAYGQTGTGKTFTMEGTESNRGVNYRTLEELFNIAEERKESVTYDLSVSVLEVYNEQIRDLLATSPSKKLEIKPNSEGQNHVPGLVEAKIENINEVWKVLQTGSNARAVGSNNVNEHSSRSHCMLCITVRAKNQLNGECTSSKLWLVDLAGSERLAKTDVQGERLKEAQNINRSLSALGDVISALATKNSHIPYRNSKLTHLLQDSLGGDSKALMFVQISPSDNDVSETLSSLNFASRVRRIELGPAKKHVDTAELQKTKQTLERAKQELRLKDDSLRKLEENLQNLESKAKGKEQLCKNLQEKVKELEGQLDSKAQCQITSEKQQRQLSGKLKEKEEMCNVLQQKIADLECKLRQPQQSESEVALLKQTIQELEVKLKEQQHDRSAMELSIKEMELRFKEEEHQRSVAELKIKELELKLKEQEHQRSVAELKAREIGHELLETQRTESMLQIKLRELESKAKEQDTNMTAVVESRVVVATPVNAKVMSEKENHVLRISNSLNKQLAHVENTPEAPEAACNERKRKGEARNASIGGGEQENTNNGGRKRSLPAEREARLKRKSTEPPPQVKNLVRSTASSRAAAKAAAAAAPSSRAGGAKQQPGGGNKTRGWVR

SEQ ID NO: 47613 - protein, 248 aa, Zea Mays
MDVLPVGSERESQTDSHPLLMEHAIGIPRHDVASTSTPHRDNNDGMDQLPRDSESSSGTTDASYSPNAPLARRDDNRLRRQQSLNSGFWISIELAVNLSQIIAAICVLSVSKNEHPHAPLFEWVIGYTIGCIATLPHLYWRYLQRNQLATVQGSNQNYVPDNSFESSSFTGISPPPVSEAGVVTVSNGVLRNNVVITNPRAQAFADHFKMALDCFFAVWFVVGNVWVFGGHSSAHDAPNLYRCAPNLP

SEQ ID NO: 47614 - protein, 259 aa, Zea Mays
MAAQGSLVMWRAVFAALGLLMVATLVYTLATDGSPFRLELFTPWMVATLADFYVNVIAISAWVIYKEANWVSSAVWVVLLFCFGSAVTCAYIVKKLLEVTSAGSSQDPLDLLFIRQGNLSQRKCSYVVIGRVIFSILGIFMAAVVTYTVITDGLPFRKELLTPWMAATLIDFYINVFAISVWVAHKESSWISTTIWIVLLICFGSITTCGYIVIQLFKVSYQDPIYHVLLNSHSKSSDGLILNDGLEVSSSVSAFSWAD

SEQ ID NO: 47615 - protein, 431 aa, Zea Mays
MEIQTSGKPIDVLMEKVLSMNILSSDYFKELYRLKTYHEVIDEIYNTVKHVEPWMTGNCRGPSTAFCLLYKFFTMKLTVKQMHGLLKHPDSPHIRAIGFLYLRYVADPKVLWMWYEPYLRDDEEFSPGSNGRKTTMGVYVRDLILGQYYFDSLLPRIPLPVTRQITANLEKMKLPTKLSGATGDSSRQGSEDTARRPPSVKASLSVSFGQRAPHRASTRDSSPVRRTVTRDGHRSSYSPSRRSGSREGPDHDRSDRELDHSSRDRERARDRSNRDRYHSSRDLDRDKDARDYHRHERDSRDREYYRSRHSEERRDDRRDHESSRHRRSSSRHRSRSRSRSRSRSRSRRSRSRSTSRRSLNEQRSSPFRDANKEKAATVSSNLAKLKDLYGDITAKKEDSDAEKLHRDSCAEEVIRLGGPRWRVIHHFLSTH

SEQ ID NO: 47616 - protein, 243 aa, Zea Mays
MLVHWARTEGWLVFYVPQGKDWTHGGFFYRNTYSDFFDTPVQAANILQLPCQIFERIPLGEGAGVGMMKGVDTMEMPEGSTLYDLIQTGITQTHASVGVMVRLRKELSLVKDVPVLFAIDQYNSWFTFSDFQEPVTVRSCRSIHAKELTMVNAYRSMLHNDMMVGAFSHSTAVGKLRQELPDVPSDARLIFPRYTLDEAETACHYYMRQKIIRRENFSEEKWKKIYYLSNGNGAEMRWLAAFV

SEQ ID NO: 47617 - protein, 239 aa, Zea Mays
MARGGGDRSREDDPFSDGGTTGTDSDESSPRGVGARGPGSTSNPILTRLAVSRNPSPLAAATAAPGVCLLRFAWESAAGSLVGAAVGYGADLGRWGWTPCGLGKGLVTMKGIKGSFADAASSAKIFAVLAGVQSLVACSLRKLRGKDDGINAGVAGCCTGLALSFPGAPQTLIQSCLTFGTFSYIIEKLNKQQPALALPPATGVMDPKAGQSVLPPFTLPPLDAMDEFCSVLVVLMILP

SEQ ID NO: 47618 - protein, 55 aa, Zea Mays
MQRVCTLIAETDFFPLNDLGLDLGQRHAFAGSWMPEQGCLSSSEQYIALYLEDND

SEQ ID NO: 47619 - protein, 137 aa, Zea Mays
MLINISFLYLIKTISAVTDGTNFFSYLISEKLIVLLRDGRKLLGTLCSFDQFANVVLQGACERVIVGEQYCDVPLGLYVIRGENVVLIGELDREKDELPAHMTCVSEAEIRKAEKAEREARDLKGTMRKRMEFLDFD

SEQ ID NO: 47620 - protein, 444 aa, Zea Mays
MGIKESSFAQGVVTVLNAFVMIFVIVAGSYIGFQIGWVGYKDSDGYFPYGVNGMLAGSATVFFAYIGFDTVASTAEEVRNPQRDLPLGIGVALAICCALYMAVSVVIVGLVPYFAMDPDTPISSAFAKHGMQWAMYVVTTGAVLALCSNLMGSLLPQPRILMAMARDGLLPSFFSDVNKQTQVPVKSTIVTGICAAALAFTMDVSQLAGMVSVGTLLAFTVVAVSILILRYVPPDEVPLPPSLQESFRLNQECDEERDRALLGVGNCTLSQTKDVIVVVESVKDPLIDIPLHKGKMDETKRRKIASLSIGSVCIGVLILTSSASATWLPFLPICIGCIIGVVLLLAGLSLLSWIDQDAGRHSFGHSGGFTCPFVPVLPVLCILINTYLLINLGGDTWMRVGIWLLMGVLLYIFYGRTHSSLTDVVYVPVAQADEMYRSSSGYVS

SEQ ID NO: 47621 - protein, 391 aa, Zea Mays
MLAGSATVFFAYIGFDTVASTAEEVRNPQRDLPLGIGVALAICCALYMAVSVVIVGLVPYFAMDPDTPISSAFAKHGMQWAMYVVTTGAVLALCSNLMGSLLPQPRILMAMARDGLLPSFFSDVNKQTQVPVKSTIVTGICAAALAFTMDVSQLAGMVSVGTLLAFTVVAVSILILRYVPPDEVPLPPSLQESFRLNQECDEERDRALLGVGNCTLSQTKDVIVVVESVKDPLIDIPLHKGKMDETKRRKIASLSIGSVCIGVLILTSSASATWLPFLPICIGCIIGVVLLLAGLSLLSWIDQDAGRHSFGHSGGFTCPFVPVLPVLCILINTYLLINLGGDTWMRVGIWLLMGVLLYIFYGRTHSSLTDVVYVPVAQADEMYRSSSGYVS

SEQ ID NO: 47622 - protein, 951 aa, Zea Mays
MAVVNPTNLAIDDDDDDTPISFKRTSNSTKTARPTPSKHEGSSGGNGAPVRIPKPVSPNPQKNGATGASRPLHMKPPSSSPNHRPSGSGQPNSLAQHSSKANSIDMSKLKRPLVKDERSDDSDDEVPIGLRRKVEEKKLKGVDTRVQKTDDSDDDDKPLGLKINSSRMSSNRVNKPVLQRTVPKVEQPDEDSDDDKPLASRLPSNAGPKSGGDVSEDSEDEKPLAARFSKVAGSGNPKIASSSKGLTSDTNGQQSLGKRPLDNSNQTSSALKKAKPSNVSASAIVRREIKTDDNTPLAQRLKMGESSKGKSSAKSVFKKSPASVKKDIKKMKGKGKLKKNMKNSQFSKIMKVPPGSGGGKKWTTLEHNGVIFPPPYKPHGVKMLYNGKPIDLTPEQEEVATMFAVMKDTDYAAKPTFIDNFFTDWRKVLGKNHIIKNFELCDFTPIYEWHLREKERKKQMTTEEKKTLREDKLKQEEKYMWAVVDGVKEKVGNFRVEPPGLFRGRGEHPKMGKLKRRILPSDITINIGKGAPVPECPIPGESWKEVKHDNTVTWLAFWNDPINPKDFKYVFLAASSSLKGQSDKEKYEKSRKLKGHIQRIRENYTKDFKNKDVTRRQIAVATYLIDKLALRAGNEKDDDEADTVGCCTLKVDNVTCMPPNQIQFDFLGKDSIRYFNTVEVEELVYKAIEGFRAGKKPGQDLFDKIDTSRLNAHLKDLMPGLTAKVFRTYNASITLDGILHEETEDGTVLEKIAVYQRANKEVAIICNHQRSVSKSHESQMTRMNEKIDELKSQMEELKADLNKAKKGKPLGYDSEGKPKRNLAPEAIQKKVATLEGKIEKMEMDKRIKEDLKTVALGTSKINYLDPRITVAWCKRHEVPIEKILGDHWLPCASQFGPVSSPSPWTLIAARKGKSSVFVFSKSPPPLLVERRKAPVILFVGPSFFFLLVQLR

SEQ ID NO: 47623 - protein, 143 aa, Zea Mays
MVSYHPSLLRPSVLIAQASGIGRCPTLNAFLSTPVVSAVPLRLRPLRAAAGGAASPVSGDGGKRAVPPPAALLVFARSNFLPLALVSGVIFGLLDPTLGCLAHKYSLSKFSTFGIFIMSGLTLRTKELGTALEAWPAGLYGLV

SEQ ID NO: 47624 - protein, 385 aa, Zea Mays
MVSYHPSLLRPSVLIAQASGIGRCPTLNAFLSTPVVSAVPLRLRPLRAAAGGAASPVSGDGGKRAVPPPAALLVFARSNFLPLALVSGVIFGLLDPTLGCLAHKYSLSKFSTFGIFIMSGLTLRTKELGTALEAWPAGLYGLGSVLLFTPFLSQFIMQVQFSPREFITGLAIFCCMPTTLSSGVILTQLVGGNSALALAMTVASNLLGIIIVPLSLARYIGTGAGVSLPTEKLFRSLVTRLLIPLIIGKVAREASKGIADFVDGNQQGFSVGNAVLLSLVPWIQVSKSRSLILSVQVEAFAAAITVGVLLHIALLAFNIATLHILSHLEKKGDSVFAKKEYTRAVILVTSQKTLPVMITVVEQLGGALGESGLLVIPCVFAHINQ

SEQ ID NO: 47625 - protein, 139 aa, Zea Mays
MRAVAAAASPPLRALLLLSRHPRRAGFTNWPSLPRGQNAGPTAPPAATAPKPAAPSRRQGRGLTASLPRQVARISTPHLRPPATPPRCPDRRHQSHGVRALAGCPRKTAVRRDNKQRFSLLEEDGELLIRANQGHTVTV

SEQ ID NO: 47626 - protein, 148 aa, Zea Mays
MLFVICGGVWAVYPVVFSVSKFCGVFHCTVAAVLAVCTVTSYCLASLKCAGAPTDIRWGSYPVVGKGDLENYTFCTYCSKPKPPRAHHCRSCKMCVVDMDHHCPFVNWQLRGSIKPSSVCGFSHFCGYQLLLCRWDDHIRELPDMALH

SEQ ID NO: 47627 - protein, 284 aa, Zea Mays
MDPDTVIRKLHKAGKPAQLWGATAKPAVATQLEKLQLKDAGGKGQGQPPKNAGGKGQPPKNAAGKGQGQGQKQQQPKGGAGGAGAGAKVVALPHSQPTPQQLMQMQQQMQMNGMKFAHPELMAMGAGRMPMPMPFPAAAQAQAQAAAAKDPKTVKFDLPGGEEFGDDGSDLDDEFDELDDVDFEDDGLDDDDDGDLYDGPGMVMKPMGMPPAAAAGGGNGNGGGKKGGGGNEVPVQINGNAAGVLLPDAAAPPARQHVQRREPQRVLGDVRRGAAAACGGLRRK

SEQ ID NO: 47628 - protein, 321 aa, Zea Mays
MSREDTLKVQTLELKVNIHCDGCLKKVKKVLHKIDGVYQSTVNAAEGKVTVSGLMDPDTVIRKLHKAGKPAQLWGATAKPAVATQLEKLQLKDAGGKGQGQPPKNAGGKGQPPKNAAGKGQGQGQKQQQPKGGAGGAGAGAKVVALPHSQPTPQQLMQMQQQMQMNGMKFAHPELMAMGAGRMPMPMPFPAAAQAQAQAAAAKDPKTVKFDLPGGEEFGDDGSDLDDEFDELDDVDFEDDGLDDDDDGDLYDGPGMVMKPMGMPPAAAAGGGNGNGGGKKGGGGNEVPVQINGNASNGGGAKQNGGGKSGAKNGKGRRMRA

SEQ ID NO: 47629 - protein, 1162 aa, Zea Mays
MPRAPSAAPPHPPACSPAPSTRSSSTPPGAGTPLSSPPPKSALDLLSSSPAPDDEPETSSPSPVPGLPAPAAEAALTALLLALDPASPKVAEPALECVAGLLSLRLLLGDVDAADPSLISKLFAAVLSCVSLGGSGDEALELSVLRVLVAFARCPGVSVSGECLGQVVKACYNVYLGSPSGGNQLCAKLALAQVLVIVFARVEADAMDVRVRTVSAADMMDLSDRSLNDSSVVQAAQVFINEAMEGSDVPEEAPHVDEASVEAEGAGEDGGISKIREDGLALFKNLCKLSMKFGTPDSPDDPMLLRGKVLSLELVRMVIDNAGLFWKTNEKYLEAVKQYLCLSLLKNSALSAMSVFQLLCSIFMSLISRFRSGLKEEIGMFFPMLILRVLENVLQPSFLQKMTVLNFLEKMSKEPQVIIDIFVNFDCDVDAPNIFERIVNGLLKTALGVPTGSTTTLTVAQDQTFRLESVKCLAIVVKSMSAWMDQQLRIGEFSPGNSETLSSADNHNIHNGEEWSGIDYELQFDTSSSDITDSSSLEQRRAYKMELQKGITLFNKKPSKGIDFLIRSKKIGNSPEGVASFLRSTAGLNATMIGDYLGERDDFPLKVMHAYVDALNFEGMDFGQAIRFFLQGFRLPGEAQKIDRIMEKFAQGYCKCNPNAFISADTAYVLAYSVILLNTDAHNPMVKNKMSKADFMRNNRGIDDGKDLPEDYLSALYDQIVNNEIKMSADSSVAQTKQSNSVGRLLGLDNIINFVNWRPAEDKAVGANDLLIKHIQEKIKAKRGKSESTFYVVADATILRFMMESCWAPMMAAFSVLLDQCDDKAATSQCLKGLRFSVHITSVMCMQTQRDAFLTSIAKFTSLHSAAEMKQKSIDSMKAIISIAIEDGNYLQEAWEHVLTCLSRFEHLHLLGEGVPTDASFLTVPLIESEEKTKKSTSVLSSKKTSALQNPAVMAAVRGGTYDSTVAKGSVSALVTPEQINNFLSSINLLDQIGIVELNHIFAHSQRLNSDAIVAFVKALCKVSMTELQSPTDPRIFCLTKIVEIAHYNMNRIRLVWSRIWKVLSDFFVSVGLLENLSVAIFVMDSLRQLAMKFLEREELANYNFQNEFLRPFVIVMQRSNAPEVRELIVRFLLLLQLMIQEVLSYWHLRRWKKLFEIIFIT

SEQ ID NO: 47630 - protein, 168 aa, Zea Mays
MVQESPWKPCSLPPVQLCSGGGEFRRFRVREFSRPATPMRIRVWRRVAVAATTPTPTRGSTPGLFCSNEGIQLQLSGRQLAVLFEIQNPARSVLALLAGAALSTQAIDLQFHVCSNFVLVFFKTNSVPVPEHESQLGLGVWWRLLGRSVITPPLHTTAPAGTAGNARR

SEQ ID NO: 47631 - protein, 757 aa, Zea Mays
MTITPNDTFLEFEKHFIGLQERTLHDSFSESDIKIFYTPEGQLSTEQGVYIAEAVANKNTKLAKGRFRAYDDQMQETARSIVPAKNEKKESSGIGKRETGKSTKRTAPIDKAKTAKEEARELLLKEEASVRMKVGQVQKDLSLMLDALGKLAIANPIFTHGQLPSLVNYVEPLLSSPIVSDAAFCTMLRLARCTAPPLCNWALDIAAAIRVISVGDFEMVLDLTPVIMEDDSKKPSSGIFEQIVNGLTIACKAGPLPADSFTFVFPIMERILLSSKKTCLHDDVLHILSMHMDPILPLPRPRMLSVLYHVLSTVPAYQPSVGPMLNELCLGLRGHELAQALVGVYAKELHVRLACLTAIKCVPVHSVQRDLQVSTSLWIAAHDPEKVVAELAEELWDRFGFDAITDYSGIFNALSHKNYNVRAASAEALAAALDENQDKMQDALSTLFSLYIRDIGTSVEFGDAHWLGRQGIALALHSIADVLASKDLPVVMTFLISRALADPNVDVRGRMINAGILIIDRHGKENVPLLFPIFESYLNKRASTTFLLIIVLASDEKTYDLVREGVVIFTGALAKHLSKDDPKVHSVIEKLLDVLNTPSEAVQRAVSDCLSPLMVSKQEEGQALVSRLLDRMMKCEKYGERRGAAFGLAGVVKGFGISSLKKYGIAVTLQKNLEDRMSAKSREGALLGFECLCEKLGKLFEPYVIQMLPFLLVCFSDQVLAVREAAECAARAMMSQLTGPGVKLVLPSLLKVSIYLI

SEQ ID NO: 47632 - protein, 494 aa, Zea Mays
MGAQEEAVDEMLRAAAAEVSTSSVKRRLRIFHHTLPPLIAKAIESPSDTVLLVDLIFQTLPIYDDRASRKAVDDLVIQALGEPTFMKPFAAVLVQSMEKNLKVTNPLTSLKLLRWSHYLLKWSQFATLTKGAFTRLANAQAVLCQVLMDGSFRRRRTCKQLFIHLFSEHSGIYKMYIEELRDLRISMRDSPAFLNLILDFTITSPSLSTQYQSVFLDLYVKIILSSKDRPPKAATEAFKPLFLNIGHEDFKNTIIPSCIKMLKRNPEIVLQSIGYLLKTVHLDLSKYSMEFMPVVLHQARHSDEERRINALSIIGTLSEKSSDPDALPSMVNAIKAVLGGSEGKLSLLYQRIGMINALEQLSRSPPKQIGRLAPSVSTFLLTCYKDDGIEEVKLAILSAIGSWALVSAEAVQPDVVSFIAAGLKEKDTLRKGHLKFLRVICKNSESLTKVASLLDHLIQLSKTGFSKATQRLDGIYALFAVSRLAAVDTKMVPF

SEQ ID NO: 47633 - protein, 202 aa, Zea Mays
MQNTIVASENENPPLMPAIMTPGGALDLATVLLGNRIIFIGQYINSQVAQRVISQLVTLAAIDEEADILIYLNCPGGSLYSILAIYDCMSWIKPKVGTVCFGVVASQAAIILAGGEKGMRYAMPNARVMIHQPQGGSEGNVEEVRRQVGETIYARDKVDKMFAAFTGQPLDMVQQWTERDRFMSSSEAMDFGLLDALLETRY

SEQ ID NO: 47634 - protein, 304 aa, Zea Mays
METKPERHHRHEEARDGEDDAVAMEHGALSLQRGGATLFGWRQDEEAGRRRRVEIREVDFFSRDSRARSHDDAGDGRDDVNIGLHLLTTTSPDEEMTAAAAKNQKIEASSAVEAELRRVVEDNRRLRGMMNELTRNYGAMYQQLLQVTQHHPHRQHPVDLMINRSSLAHTRLTTAASYNDDTSAQQLLRVEDEAASDGAGEASPSLSNGGNHNDGGDGKQRRTSSNVTAPPARENGGGERAELPAHKTRVSVRARSEAPMISDGCQWRKYGQKMAKGNPCPRAYYRCTMAVACPVRKQKGIPCH

SEQ ID NO: 47635 - protein, 116 aa, Zea Mays
MDKSVPVVSKIFCSGAPTMLMIRRRPAVVNGGGFVVTDLSHSIVFIVDGCGTLGSKGELMVKDGEGEPILSISKKGGIVQALSTRNRWNGYSMDYQGKNKLVFSLTDPKSCTAQDG

SEQ ID NO: 47636 - protein, 173 aa, Zea Mays
MDKSVPVVSKIFCSGAPTMLMIRRRPAVVNGGGFVVTDLSHSIVFIVDGCGTLGSKGELMVKDGEGEPILSISKKGGIVQALSTRNRWNGYSMDYQGKNKLVFSLTDPKSCTAQDRDCTIVDCTRKIVAQMGKKGLMGGKDFYHVEVQSGYDQAFIIGVMAILDSIHGESTRC

SEQ ID NO: 47637 - protein, 112 aa, Zea Mays
MRAVGGAAGTRRCARWRARPRRTTSSGCHTGSYTPSSPSWRCSPSRSSTGYPCGTRPRCCSRRGWRCRSSRAPPSSTRSSSGNSSGTTAPDTRARAPPPPPSAATTTTIRCT

SEQ ID NO: 47638 - protein, 661 aa, Zea Mays
MATSAAAGSRRKAPSPPKHRHDGTSPLPLGMDWSPPPKRWFYRIHVGIQSSEGFSSIHGILRRFSDFLKLSSDLKSAFPRKDVPSAPPKHAFLRINSSRLLLEERRHALEEWMQKLLSDIDLSRSAPVAAFLELEAAARSYFQERNGRPSEVGPSAKSSTKSSSHSDGPASGSLAESNEINQGLTRGSSLTGATGNGVLGEAILDQSDEHVSSALNHRKGNLVLEHDGRNGSVASYRGVLSEEDRDSYPGHARKDSAESIGSDLSSLRGSELSVPGASNSLWDGAVVDGHVSQTEHLTGLDMHLLYDMDAQVILPNDKKQKLTRLLITMQRRIGTAKTDMEDLIARLNQEGAVKEYLTTKVKDLEVELEATKQKGRETLQQAILAERERITQMQWDMDELRRKYSEMESNLKTEHNEKTRAESERTTASGENETLLEELEIKQKEVESLKQQLVEAEAKSKADKKVLVKEVKSLRNSQTEMKKVLNQYLEEKTDLERVINRDKQRSARTKLSRVKILHECRLLRERLQDCSAKFLAEEQDNFTIDPSSLPDALDLLATSDNRIRLLVAEAQLLARDDEQGSSDGGDDSDSRSSLTMSSEDAKVTDEDTTKMLSDLLIDNAQLRLRLNAVIRNAVNTSVKPEKEGSGEVLPKKTVLNWLLDR

SEQ ID NO: 47639 - protein, 462 aa, Zea Mays
MQVPSNTSYPDVVKFMRSGFALGFPSYGDNIRECLAKDMRTFHKEPRNSTGIRQQILDILTVVDIFWACVIYQLQSTNYNGVTTVVIGIIETIQYVSGVLDYTAGVCRFVLMPLAVFVFLVYKYWKTRITVDAVEKFLRTQQMLVPMRYAYTNIIAITGHFRDKLGQGGYGSVYKGVLQPGEVHVAIKMLGNSNCNGDEFISEVATIGKIHHVNIVRLIGFCSEENSRALIYEFMPHGSLDKYIFSSEKSFSWVKLNEIALGIASGLNYLHHGCDMQIVHFDIKPHNILLDSNFVPKVADFGLAKLFPRGDSFVPLSAMRGTIGYIAPEMVSRSFGVISSKSDVYSFGMLLLEMTGGRRNADPHAGSSSQAYYPSLVYNQLSQGDANGISEGVNMHDLEKKLCTIGLWCIQMKPQDRPTMSEVIEMLESGVDGMQMPPRPYFCDEEGDSSYSIISELDTIEE

SEQ ID NO: 47640 - protein, 238 aa, Zea Mays
MQDWRVREFEGKFTDEFAHSSSNEHKGGVEASGVISSKKLKHAVANEKIQGVIPGTNSSGSLKRNSENIQHANGVLSQNISCAGDYKNGSIAFPLREENTITETRCPDDNWNSCQFALNNGSSILNNHSAPQDSLTYGDNDLNYIEWPGIDNFEDVDTLFSSWRMQMGYLGFRLQMLFTLPMLLCNKGLIRLIQIMVFWMISPHSNVQKINHYPWLILHQLYVIINSMIPTCSVNKRM

SEQ ID NO: 47641 - protein, 386 aa, Zea Mays
MQDWRVREFEGKFTDEFAHSSSNEHKGGVEASGVISSKKLKHAVANEKIQGVIPGTNSSGSLKRNSENIQHANGVLSQNISCAGDYKNGSIAFPLREENTITETRCPDDNWNSCQFALNNGSSILNNHSAPQDSLTYGDNDLNYIEWPGIDNFEDVDTLFRSSDSTYGQQQLENADGLSWIPSSDAVYSTDVALQQGLDSSYSDYGILDDLSAFQCAEDKSLPLVDPSSALCDNQFNDTYLFSEQKNVNAYGEQIYQEDLMELLPTDQICSGHENIDMLQVGNQYPSENAIQDSSSPSNITSESYPGKFGPSSCSSAQRNSKAGVTLKCANAVQKKTVNIQPRQPANDNVMNTSRASYPCENYETERRGLGKELWGILKLQWVVQW

SEQ ID NO: 47642 - protein, 206 aa, Zea Mays
MDYDHKQAEAKMGAKGSQSDFGIDKSIFIKPETFHLTVLMLKLWNKERIDKASDVLQSVSTQVNEALENRPISIQLRGLTCMKGFPAKARVVYVPVLEVGSEGRLAHACKVITDAFIKAGLVFERDVRELKLHATVMNVRHRKSRNKRNTWTDSFDARGIFGRFGKAEWGAYPIHEIHLSQRFKFDRSGYYYCCSSIPLPAEMHTE

SEQ ID NO: 47643 - protein, 453 aa, Zea Mays
MPPTMLAPVPTRPRSNPFRRRRGAAPLLLDQTSAKRPAESSTSASSCFYSEVISNSSTSLAPYQRLEKRHRRQDTDAGEARPAGSECSEVIGGARVRPAEVEVSESSCPVSVLESDLACPKQLADDAEAIEKSSACDELTPSSEPDEEEVLSDPSHSGYSPSPLISSPLTEDDSDDAPSATFSLFLDFAKQFVPCLHPKPCTVTSSTLDLLTGRRFEDLDDEESYERFRRRERREAVARDFTEVCSSTSIPDSYRPLVVEQRVIMVNWIIQHSRLMKLQPVTMFMGIGLMDRFLTQGYMKGLRNLQLLGIACITLATRIEENQSYNCVLRKTFQVGINIYSQSEVVAMEWLVQEVLNFKCFVTTTHHFLWFYLKAANADDRVADLANYLAFISLRNHEQLSFWPSTVAAAVVVLACLATNKESSCHLVTEVNTQTHIRTQDDDLPECLMPTNY

SEQ ID NO: 47644 - protein, 513 aa, Zea Mays
MELLPSLIDLACPCAPWRAGRSLGRCWPWQPSTWKPVGSCRCHCQCDTDHAMPPTMLAPVPTRPRSNPFRRRRGAAPLLLDQTSAKRPAESSTSASSCFYSEVISNSSTSLAPYQRLEKRHRRQDTDAGEARPAGSECSEVIGGARVRPAEVEVSESSCPVSVLESDLACPKQLADDAEAIEKSSACDELTPSSEPDEEEVLSDPSHSGYSPSPLISSPLTEDDSDDAPSATFSLFLDFAKQFVPCLHPKPCTVTSSTLDLLTGRRFEDLDDEESYERFRRRERREAVARDFTEVCSSTSIPDSYRPLVVEQRVIMVNWIIQHSRLMKLQPVTMFMGIGLMDRFLTQGYMKGLRNLQLLGIACITLATRIEENQSYNCVLRKTFQVGINIYSQSEVVAMEWLVQEVLNFKCFVTTTHHFLWFYLKAANADDRVADLANYLAFISLRNHEQLSFWPSTVAAAVVVLACLATNKESSCHLVTETHIRTQDDDLPECLMVHILLFFSSFLGIHWWA

SEQ ID NO: 47645 - protein, 60 aa, Zea Mays
MFSGPAEQPNWMEINQSGNRMTSREPTEDEFESFIEGVDDEMIQGAAQGFHEDGDDPACG

SEQ ID NO: 47646 - protein, 615 aa, Zea Mays
MEMSMHLVSMCGILAVLGCADEAKGSSKRSRVLELSRRLKHRGPDWSGLRQVGDCYLSHQRLAIIDPASGDQPLYNEDQSVVVAVNGEIYNHLDLRSRLAGAGHSFRTGSDCEVIAHLYEEHGEEFVDMLDGVFSFVLLDTRHGDRAGSSFFMAARDAIGVTPLYIGWGVDGSVWISSEMKALHDECEHFEIFPPGHLYSSNTGGFSRWYNPPWYDDDDDEEAVVTPSVPYDPLALRKAFEKAVVKRLMTDVPFGVLLSGGLDSSLVATVAVRHLARTEAARRWGTKLHSFCVGLEGSPDLKAAREVAEYLGTLHHEFHFTVQDGIDAIEDVIYHTETYDVTTIRASTPMFLMSRKIKSLGVKMVISGEGSDELFGGYLYFHKAPNKEELHRETCRKVKALHQYDCLRANKATSAWGLEARVPFLDKEFINAAMSIDPEWKMVQPDLGRIEKWVLRKAFDDEEQPFLPKHILYRQKEQFSDGVGYSWIDGLKAHATSNVTDKMLSNAKFIFPHNTPTTKEAYYYRMVFERFFPQKSAILTVPGGPSVACSTAKAIEWDAQWSGNLDPSGRAALGVHLAAYEHQHDPEHVPAAIAAGSGKKPRTIRVAPPGVAIEG

SEQ ID NO: 47647 - protein, 835 aa, Zea Mays
MAMAAAPHSHHTPVGAAAATSAAVSMPCCSSASCYDDKDGDPSSSWSLSSPRRRQPYRRLLRDEAQRLRRARRSQGPGADTPRWVRRTTDQMARYIEDDRAGHVYGRHVVAAVRAVRATASRPSADMRQAMASFVTRLTFREMCVVLREQRGWRQARDFFAWMKLQLCYEPSVVAYTVLLRLYGRVGKVKLAEETFLEMLQVGCEPDAVACGTLLCAYARWGRHEDMMLFYSAVRGRGLVPPISVYNYMISSLQKQKLHGKVIHVWKQMLEAGAPPNQFTYTVVIGSLVKEDLLEEAVDLFGEMRRRRFVPEEATYSLLISASSRHGKGEQALRLFEEMKGQGIAPSNYTCASLLALHCKNEDYPKALALFSDMESSKVIPDEVIYGILIRIYGKLGLYEEARQTFGEIEKAGLLNDEQTYVAMAQVHLNAGDCDRALEVLESMKTRGVKPSRFSYSALLRCHVAKEDVVAAEDTFRALSQSQHGLPDAFCCNDMLRLYMRLGRLDKARALVSVLLREDGFQLDENLSTTVMEFYCKSGMVEDAEKLLEDIQRNRKPVKVPTLLLLVEMYARNRPSVVLEERSSSRALGSSAASVALNSLLDMPGGLSSVSLLISRLAREGSTDEARFIYDQLTELGTKPDDSAVATLIVQYGQAKQLERAQELFDSASASFPDGALVCNAMVDAFCKCGRAEDAYHLFMEMADQGSYRNAVTASILVTHLTKHGKFQEVENIMHGCFRDEVQLDTALYNTFIKSMLESGKLHSAVSIYDRMVSSGVSQSMQTFNTMISVYGKGGKLDKAVEMFAAAQELGLPIDEKMYTNMLSLYGKAGIKRRL

SEQ ID NO: 47648 - protein, 67 aa, Zea Mays
MDLGGFLHVRKAGRVFSTQFYDNSGVMVKQSLACMYQQLNCKHDITIVDYMNNYLLYLIVKSETVVM

SEQ ID NO: 47649 - protein, 590 aa, Zea Mays
MAKPLNLTPAFLSLMATSCRFSSGGHAHRFASSLPCGRTTPTPRTTSSSTRPAAQVSPDRSKQRDDEAASETTIRQQLQQVDVLENTGISRHFAGEIKCILDRTYRCWLERHEEIMQDTTTCAMAFRILRMNGYDVSCDLLYHVVETSGIHDPLRGHLNDTRTLLELHKASTVSISEDESILDSIGLRSSTLLREQMESSGALQNPPLFREVEHALYHPFYATLDRLTHRWNIENFNTTEHQMLDTPYLSSRYTSRDILALGIRDFNSSQLTYQQELQHLKSWVKECRLDQLPFVRQNLAYFLLSAAGCMYSPELSEARTLCAKNGALITVVDDFFDVGGSKEELENLVMLVELWDEHRKIEFYSEHVEIIFSSIYNSVNQYGAKASLLQDRNVTKHLVQIWLDLLKSMMTEVEWRLNKYVPTEEEYMTNASLTFALGPIVLPALYFVGPKIPESIVKDPEYDELFKLMSTCGRLLNDVQSFEREYKEGKLNIVSLLVLHGGSMSISDARRKLQKPIDTCRRDLLRLVLREESVVPRPCKELFWKMCKVCYFFYSRTDGFSSQVERAKEVDAVINEPLKLQGSHTLVSDV

SEQ ID NO: 47650 - protein, 624 aa, Zea Mays
MPDVMAAALTGFSPRGVIPSRGRASLPGVARAYAERRLVAENTSLPNMHKEQLETIIRNQLRKPQLPPSSYDTAWVSMVPVRGSHQTPRFPQCVEWILQNQQDDGSWGVSQSDSSVSKDVLLSTLACVLALKRWNVGRENIWRGLHFIGRNFSVAMDEQFTSPIGFNFTFPGLLSLGIDMGLEFPVRQIDVCGILHRREMELKRLAVDSSFGRKAYMAFIPEGFGNMLDWDQVMKFQRKNGSLFSTPSTTAVALIHKYNDQALQYLNLLVNEFGSAVPAMYPSRVHCQLSMVDALEKMGISQRFVSEIESILDMAYNCWLQNDEELMMDIATFAMAFRLLRMNGYDVSSDELSHVAGASTFHDSLQGYLNDTKSLLELYKTSKVTLSENDLILDRIGSWSGNLLKDKMCCSRVQKDSIFGEIEYAVNFPLYSTLERLEHKRNIEHFDAWGSLMLTTKSSSFRINQEFLALAVEDFSFSQRVYRDELRHLDSWVKENKLDQLQFARQKLTYCYLSAAATVFSSELSDARISWAKNGVLTTVVDDFFDVGGSKEELENLIALVEKWHGHHAVEFYSEQVKIVFSAIYTTVNHLGAMASAAQGRDLTNHLVEINGRDANMYQQLKNT

SEQ ID NO: 47651 - protein, 535 aa, Zea Mays
MNLAVQAFAVPAMYPSRVHCQLSMVDALEKMGISQRFVSEIESILDMAYNCWLQNDEELMMDIATFAMAFRLLRMNGYDVSSDELSHVAGASTFHDSLQGYLNDTKSLLELYKTSKVTLSENDLILDRIGSWSGNLLKDKMCCSRVQKDSIFGEIEYAVNFPLYSTLERLEHKRNIEHFDAWGSLMLTTKSSSFRINQEFLALAVEDFSFSQRVYRDELRHLDSWVKENKLDQLQFARQKLTYCYLSAAATVFSSELSDARISWAKNGVLTTVVDDFFDVGGSKEELENLIALVEKWHGHHAVEFYSEQVKIVFSAIYTTVNHLGAMASAAQGRDLTNHLVEIWLDLLRSMMVEAEWQRCQYVPTVEEYMTNAVVSFALGPIVLPALYFVGQELLEHAVKDEEYDKLFRLVSTCGRLLNDYQSLEREGNQGKLNSVSLLVLHSGGSMSIEAAKKAMQKSIDVSRRDLLRLVLRKESAVPRPCKELFWKMCKILHLFYSQNDGFSSPKEMVSAVNAVINEPLKVQNSTTFLSSSSR

SEQ ID NO: 47652 - protein, 421 aa, Zea Mays
MDLSRFASGVGPSRVAPRAGLQIGAAENGFRACSLRRARHRGGGNGNLTAAASTLRGRGGLFYLAPTRRSHPSLRLFYLLPTRGSHLSLRARWRPRCQGNDSLAYVDGPLETAKGSGEVDDNVPTSSGSDDDRGLADVDGLREMLQRSRNELEVARVNSTMFEEKAQRISESAIAFKDRADGAQRDVCAAVATVQEIISKEADAKEAVQKATMALSMAEARLQLAAEALEANRGSVGPTEVSIEGMEQEALLSAQEEIKDCRAALSRCAEELSRVQDKKMELQKEVDRLTDLAGKAQMDASNAEEDVANIMVLAEQAVALEMEASQRVNDAEMVLLKAEKAIASIDTVVELPSPAEEQRSTEEDSVSEGALSSLNHPVKYMMKKAVIRCLLSLRKKLSLIQISRNKGRSKKWNERSTPRNH

SEQ ID NO: 47653 - protein, 181 aa, Zea Mays
MQRLTGRDMWDVEECQSPRMGSVILGVDGGASNTVCVCIPAAMPFNDPLPVLSRTVAGCSNHNSVGEDRARETLERVMSQALLKARRRRSNVCAVCLAVAGVNHPVDQQRMLDWLRDIFPSHVKLFVENDAVAALASGTMGKLHGCVLIAGTGTIAYGFTSDGREARAAGAGPVLGDWGRH

SEQ ID NO: 47654 - protein, 85 aa, Zea Mays
MVLDKKVLYETTSASARTSSPCTTSVTFSHLISATMSGVTCCLCFSDMGCQEHDLHRGPAPRSLPDGVRHVLRQDEQQGGGRADA

SEQ ID NO: 47655 - protein, 435 aa, Zea Mays
MASSLAPASWALPLQMVGAGAAAAGPSCRATLAVVTEPRWAASLRRARVLVALAPRCVALDGPGASGEEEAPKIEDERKKSGETKKPARGRPVWSRILFASKKTRTSDIPVLKEVEALTEPAVFNMVRFVVAAIPFVPFALRSFGDRSVRYAGLELGVWVSLAYLSQAIGLLSSDAGRASFITAFTVVVVPLIDGLLGASIPRLTWFGAIMSLFGIGLLECGGSPPSVGDILNFFSAVFFGIHMLRTEQISRSTDKKKFLALLGFEVLVVAFSSVLWFMFKDGYVDTSGSSFESWTFGMLWDTTVSFPWIPALYTGVLSTVLCMWAEMVAMGDVSATETAVVYGLEPVWGAAFAWFLLGERWDDAAWTGAALVLCGSLTVQLFGSAPEKSKKVKKRSSNALETPVKRRDYLSLSPIPVDSGKIIGRQLERKNKAV

SEQ ID NO: 47656 - protein, 253 aa, Zea Mays
MDPPRAVAFLLILLPVLAPVASGVPFVVLHGIGDECGNDGLSSFTKMLGEWSGSKGYCIEIGRGAWDSWLMPLQEQANTVCKKVKKMKELSEGYNIVGLSQGNLIGRAVIEYCDCGPPDMEDYLKGCKFLPKLNNEIPSARNTTYKERFSSLENLVLIMFEDDAVLIPRETAWFGYYPDGAFSPVLPPQETKLYTEDWIGLKTLDEAGRVKFVSVPGGHLRITRSDMKKYIVPYLTPEASSKKNIHIHRMLSL

SEQ ID NO: 47657 - protein, 191 aa, Zea Mays
MKDPFEADVEEQDSPPESPAPPEDEPGAAGPAEDPEDYDGGPPPRQPSAPASHAAGAKAKARVHREQQEDDDEDEDQIEVDLEKLPSSTGDPDKLAKMNAILSQFTQQQMNRYESFRRSGFQKSNMKRLLASITGSQKISIPTSIVVSGIAKIFVGELIETGKFRIVVLFTLFLWNRICYSVAELYVLYFV

SEQ ID NO: 47658 - protein, 181 aa, Zea Mays
MRKILNETKELQQITNDKQKNQVVRIQHFTFIFAEDVNKQNRQAAQTMEMMYTIIADEFKSMDNKDMRPEDYLNFFCLGNREEPPSNGSPESEKSTYKSAEIDIEFMKKKLEDLDKPMKRRNDKLLKIEHELCERIDPAQCRGDWRLNLEVLLKDVTLSQRVAHGELELNSSLDMIGKYLY

SEQ ID NO: 47659 - protein, 112 aa, Zea Mays
MLRRRLPHWNSCAPLAFLLPFNPQAFPGSIAQLGDVRRYLHIGNDRFRFSGDAWSGSRINQNKCEISVKFERLLNFQIRYQPKKVTLLTAYCVGKACQCDNRETNGELCSFC

SEQ ID NO: 47660 - protein, 133 aa, Zea Mays
MRKILNETKELQQITNDKQKNQVVRIQHFTFIFAEDVNKQNRQAAQTMEMMYTIIADEFKSMDNKDMRPEDYLNFFCLGNREEPPSNGSPESEKSTYKSAEIDIEFMKKKLEDLDKPMKRRNDKLLKIEHELY

SEQ ID NO: 47661 - protein, 158 aa, Zea Mays
MRKILNETKELQQITNDKQKNQVVRIQHFTFIFAEDVNKQNRQAAQTMEMMYTIIADEFKSMDNKDMRPEDYLNFFCLGNREEPPSNGSPESEKSTYKSAEIVCFCIFLILKEAFEDAEITHVDDTVDPVRDMETISEELRLKFSLDFVDLQDQLYNT

SEQ ID NO: 47662 - protein, 264 aa, Zea Mays
MAQVSVVTAARRELAGALNPDAREFLPWWRLGGSRKQLSADAPEFTRSSLGRAVAAAAANGAVIAAPNNAGVGKAARRSASNNGQHAESTMPTFFKSHRSQWDETVKRTIFVKYIDHNVVDCRICGDPTSDDGLRFGFVELQHEDEAIASLDLDGYIISVSPLSVSRSRTAICPINPKFLPQSEAEWETCLRTIYCTNISKNVCRVRLLDNKERSTNIAFIEFVEVYGAIAALGSGGIYVDGVPIRMCPSKSPIRTHCFGKLSS

SEQ ID NO: 47663 - protein, 279 aa, Zea Mays
MAQVSVVTAARRELAGALNPDAREFLPWWRLGGSRKQLSADAPEFTRSSLGRAVAAAAANGAVIAAPNNAGVGKAARRSASNNGQHAESTMPTFFKSHRSQWDETVKRTIFVKYIDHNVTEDILACLFQLFGTVVDCRICGDPTSDDGLRFGFVELQHEDEAIASLDLDGYIISVSPLSVSRSRTAICPINPKFLPQSEAEWETCLRTIYCTNISKNVCRVRLLDNKERSTNIAFIEFVEVYGAIAALGSGGIYVDGVPIRMCPSKSPIRTHCFGKLSS

SEQ ID NO: 47664 - protein, 115 aa, Zea Mays
MPPGLLPRGCLLLVVPHLRRHLPALCSTLRSSHSHKRPAVIFSPVRAVSGYSAMAAGSPEQQQRSVVVKETVELTETEERIFRRLLEVVRHFSLGTQLRVAGGWVRDKGGHSLFF

SEQ ID NO: 47665 - protein, 340 aa, Zea Mays
MAAARYDVEKGGRNNGDGKPSPPPPGHLYPQRDGEREWVPWLVPLVVAVNIVLFAVAMYVNNCPAHAASSRRGGAGSCVARGFLHRFSFQPLSENPLLGPSSATLQKLGALVWDKVVREHQGWRLVTCIWLHAGVAHLLANMISLVLIGLRLEQQFGYVRVGIIYLVSGVGGSVLSSLFIRNNISVGASGALFGLLGAMLSELFTNWTIYANKAAALVTLLVVIAINLAIGILPHVDNFAHIGGFLTGFLLGFVLLMRPHYGWMQRYALPSDVKYTTKKYLAYQWALLAVASVLAVIGFAVGLGMLFRGVNANDHCGWCHYLSCVPTSRWSCGNSQSYCT

SEQ ID NO: 47666 - protein, 180 aa, Zea Mays
MCSIALQKMKSTDLYMHELRLIHTDLKPENILLVSSEYIKVPSTKKNSQGEMHFKCLPKSSAIKLIDFGSTAFDNRNHNSIVSTRHYRAPEIILGLGWSFPCDIWSVGCILVELCSVRSLHTLYFSSTSLVIVFLTSHFLGGSIVSDTRESGTPSNDGEGFGTSTRGYDTESKLFSSEIF

SEQ ID NO: 47667 - protein, 146 aa, Zea Mays
MSKLGYDGVVALLVADISLSIGLDQIEALYQYAQFQFECGNYSGAADYLYQYGALCTNSERNVSALWGKLAAEILMQNWDLALEELNRLKEIIDSKLQNRIWLMHWALFIFFNHIRYLNAIQTNAHHLIRYLATAVVVNKKEKEYA

SEQ ID NO: 47668 - protein, 154 aa, Zea Mays
MSKLGYDGVVALLVADISLSIGLDQIEALYQYAQFQFECGNYSGAADYLYQYGALCTNSERNVSALWGKLAAEILMQNWDLALEELNRLKEIIDSKNFSSPLNQLQNRIWLMHWALFIFFNHIRYLNAIQTNAHHLIRYLATAVVVNKKEKEYA

SEQ ID NO: 47669 - protein, 189 aa, Zea Mays
MQGRVGVRQPLRGVRPQPPRQLPLLLPRMQGRGLLPRRRQGQELAPPARRRRQRRRRLHVLLAAARRPEEAELHPAHAAAGEAPQGHPAPRAVRQLHRRVLAPSLSVSTAAAAAALAVALHSTRAGNGTGTATTSFCRDTLWLAGWWCFSRWMPFGRCWLCFPQREGRKERLRKNQNTGFSSLLLGSLI

SEQ ID NO: 47670 - protein, 94 aa, Zea Mays
MRVDGEPWKQPLPKDDDTVVVEISHLGQVTMLANEPCRSKSVNDQSSLSPAHDSHGDYNDIAEEDEDEWEDGRRKFGAADTFKIPDEIDIAHFS

SEQ ID NO: 47671 - protein, 273 aa, Zea Mays
MAAVASSFSRFSFRCAVCPSPLRVRFSQPHPPARLRVSSTVVALHKRNPKRLKYAAERQFTRGDAGLLRVEVEPSGGDFWKLDPIIDLINRGAVGVIPTDTVYSVVCDLSNNESIERLRRLKGIGDSKPLSILCRSLRDIDTYTTGFPQGTNQGQANIFRVVKRAIPGPYTFILPASKQFPKQCIKHGSSTRYAKRRQVGVRIPDDPICQAILQNLDEPLICTSVKYLSEDEWILDPVIIADLYEPLGLKLDWMVAKDEEEDEAQSMFSFKSA

SEQ ID NO: 47672 - protein, 319 aa, Zea Mays
MEPKITDFGMSRLFGLQQSKIITKTCGGTLGYMAPEYLLKGLISVKADIFSLGVIIIEVMTGGRNYPTCEKSCEQFAVDVVGRWRKRLLEEAGRLTKVDVTNTDRGPPKTLEAATGLTGHPNLATRSFLDRFRRTIVIGMLKKALKIQDVSQLEQLLAKEVLLELHKIGTNATGNRSFLERLHASITMATLVQALHSLDLDPSAALRMEVLFLALENMRGKNNSRRRSEDVLELEERPEQIRSVLEAGTRARLSDEEHMPSVSVQAEDQAFPKPKLAKVRATAPVCVSAVWLAAGIGFLCGFTLGEMRGLRRTRVHERT

SEQ ID NO: 47673 - protein, 955 aa, Zea Mays
MDLVSGAIGKLAPKLLQLLQDEYNLQKGVRHQIQFLSEELESIHGALRKVAAVPPDQLDEQRMGKLFVDAKARRDIASAIEAIKGQLQQVSERRDRCKVDDIVAKLAASSTIDPRLEAMYREVTQLVGIDGAMGELIPMLSLTGDDVSNKELKVVSVLGIGGLGKTTLAKVVYDKLKSQFDCGAFVPVGRNPDLKKVFRDILMDLDEHRYTDLNMLILDERQLINKLRDFLESNRYIIVIDDVWEAKSWETLRLAFIDNNKGSRIISTTRKSEVTSGNKVYKPKPLSDDNSKRLFYTRIFGGEDKCPDNEVDEVSNKILRKCGGIPLAIITMASLLVGKSWGQWFEVCNSIGFGDKDIEQVDKTMSILSLSYYDLPCHLRTCLLYLSSFPEDYIIDKNSLIWKWIAENFVHKKPGVWLFEVGEGYFNDLVNRSMIQAVASKDSSIIDGCRVHDMVLDLLRSLAREENFVTVLYNDEDMLSEISSTRRLAHQKSTMDAHLHNYKQGMQHLRSLTVYRCGADKELSFLLSFKLLRVLDLENVYTTSWHNARHIGNLIHLRYLGLKHTYMPELPEEIGALKFLQTLDLVENFFMEELPSSIGQLTQLVCLRASGLITSMPRGVIKTLTALEELAVQCQFNERFCRYQGQFKELGSLSELRVLKIKVISTMEQSILPDLMQSLGNLHKIQSLKLESHPGCGRADNAMFDAMALPGHLRHLLVSEYFVHLYRLPSCINPLCLVKLSHLELYVIDMDEHSMQILGELAELRHLVLSTRSTVRVNNVAADGFFHKLRSCKFYTSMVLFVLNEDSSVSFTLWNGTDDLVLSYGKKDGECPSAPAVMPNLEELLFSAQPKWSLMKCQGSHGNLGLEHLRSLQKVTAVISCELYMFEAEKMEAELGISCDRYFVEAWVMDAEDGLRDAIGVHPNHPTLVLGRKNEGVLASDVSDDTDADSATRRT

SEQ ID NO: 47674 - protein, 371 aa, Zea Mays
MGACVSRPSACVGKPHSPRSGDASGRSGGGGGTRRRRSRRVGKGRRTAPSRAASMETIQEAEVPGSPSAAAAAADHRTYSNPAFQVSGSIEEDWYDSLAMSESDAEDDFHSVQDDAFSLNGFENEAALSMKDGNGGSFNGAAQSGEQHHKKPKSSELSKGSSENGVRTSISHEDAVSVSGADTTHGGGRILDNCGLLPNNCLPCIASAVGVNEKKRTPSSPTHSMKMPSLKLSFKKKSGEAHPSSTLLSTKDFLERPLAGSQVQLCLLETNTLNSWSRIDPGTFRVRGANYFSFECTFPGIRRKSLLQIMLHIIHLESMCTYHHRNSIIYLDLSNFLTFNSPASSHLFWWSMYRSHYIRLHYFRMKQMGKG

SEQ ID NO: 47675 - protein, 127 aa, Zea Mays
MTGSTQLLHQTGSALVEVTTTTEFHRPIRMTRKALHQGVRGPSGRSLKSPCQTGKRKRISWCSKDPSCLKDPRKELRSSREPSMYFVCPGTWLCDLTLERYEVREKKVSKKRPRGLKAMHDMDSDSE

SEQ ID NO: 47676 - protein, 162 aa, Zea Mays
MEKEARNHYRTRGSSRGSGGGGTAAERDLLLQWGNRKRLRCVKVQRRDVEAAATAAAEKAAISQRRAAAAAAAAQHHPTGHTHHRVLRKSEEFAIMKLPARQRQNDRIHTVASPDRECPGRGKRKRISWCSKDPSCLKDPRKELRSSREPSILYAQERGYVT

SEQ ID NO: 47677 - protein, 675 aa, Zea Mays
MKPKSLPFIAFEHKRDAYGFAVRPQHLQRYKEYAGIYKEEEEERSDRWKNFLERQPESSGQDAGDNATGDGSESLHEKTVAGPQKIQIWTPIRSSLSNIEQIMSLRIGKKQSSAGKQQAKDGTHHVKGEESKLSEDSDDEFYDVDKVDLSQEAQSSDTRNADVGSRNQEENYISREELECLVHGGLPMVLRGELWQAFVGTGARRIEGYYDSLAAEGELDNKSSPTSEGVQEKWIGQIDKDLPRTFPGHPALDEDGRNALRRLLIAYAKHNPSVGYCQAMNFFAGLLLLLMPEENAFWTLVGIMEDYFDGYFSEEMIESQVDQLVLEELVREKFPKLANHLDYLGLQVAWVTGPWFLSIFTNVLPWESVLRVWDVLLFDGNRVMLFRTALALLEFYGPALVTTKDAGDAVTLLQSLAGSTFDSSQLVLTARMGYQSVNETILQELSNKHRPSVMSAMEERAKGLGVWTDTNGLASKLYNFKRDPEPLVSLSNSADQLSDVGDGDANQESDPVNMDDEYVGVTVKSEIDSLPDPKDQVAWLKLELCQLLEERRSAVLRADELETALMEMVKQDNRRQLSAKVEQFEQEISEFREALSDKQEQEQAMFQVLMRVEQELKIAEEARISAEQDAAAQRYAANVLQVFTGWRASHRIYRFQQIAHTVTVSHIHSISARAQ

SEQ ID NO: 47678 - protein, 664 aa, Zea Mays
MKPKSLPFIAFEHKRDAYGFAVRPQHLQRYKEYAGIYKEEEEERSDRWKNFLERQPESSGQDAGDNATGDGSESLHEKTVAGPQKIQIWTPIRSSLSNIEQIMSLRIGKKQSSAGKQQAKDGTHHVKGEESKLSEDSDDEFYDVDKVDLSQEAQSSDTRNADVGSRNQEENYISREELECLVHGGLPMVLRGELWQAFVGTGARRIEGYYDSLAAEGELDNKSSPTSEGVQEKWIGQIDKDLPRTFPGHPALDEDGRNALRRLLIAYAKHNPSVGYCQAMNFFAGLLLLLMPEENAFWTLVGIMEDYFDGYFSEEMIESQVDQLVLEELVREKFPKLANHLDYLGLQVAWVTGPWFLSIFTNVLPWESVLRVWDVLLFDGNRVMLFRTALALLEFYGPALVTTKDAGDAVTLLQSLAGSTFDSSQLVLTARMGYQSVNETILQELSNKHRPSVMSAMEERAKGLGVWTDTNGLASKLYNFKRDPEPLVSLSNSADQLSDVGDGDANQESDPVNMDDEYVGVTVKSEIDSLPDPKDQVAWLKLELCQLLEERRSAVLRADELETALMEMVKQDNRRQLSAKVEQFEQEISEFREALSDKQEQEQAMFQVLMRVEQELKIAEEARISAEQDAAAQRYAANVLQDHDMCRKSTRKLWLHLPKWRTEL

SEQ ID NO: 47679 - protein, 61 aa, Zea Mays
MKNTSKRKKMPLLVQGGTHLVSQPSSLNPSDPGAWRIRLRWGSLWRGGSSSCSSGRSRRPG

SEQ ID NO: 47680 - protein, 145 aa, Zea Mays
MLAYSNRRPSLSSRSPPSSLLPPRRPPPRSSTRLPPTQISGALSSLRREQGRRLPWHRREPGITLPISLAFLPLFFLPCRQRKPRTARRNQAVLRTRSYRCRMQLPVVPRGAKTPPPPPHAEPMLAHPLWFTHTLPSSLLPRSRF

SEQ ID NO: 47681 - protein, 653 aa, Zea Mays
MPVARPEPQEPRVIAHVDMDCFYVQVEQRRNPALRGQPTAVVQYNGWKGGGLIAVSYEARGFGVKRSMRGDEAKRVCPGINLVQVPVARGKADLNLYRSAGAEVVAILASKGKCERASIDEVYLDLTDAANEMVLQAPPDSPEGIFMEAAKSNILGLPADASEKEKNVRAWLCQSEADYQDKLLACGAIIVAQLRVRVLEETQFTCSAGIAHNKMLAKLVSGMHKPAQQTVVPSSSVQDLLASLPVKKMKQLGGKLGSSLQDDLGVETIGDLLSFTEEKLQEQYGVNTGTWLWKTARGISGEEVEDRLLPKSHGCGKTFPGPRALKYSASVKGWLDQLCEELSERIQSDLNQNKRIAQTLTLHARAFKKNEHDSMKKFPSKSCPLRYGTGKIQEDAMRLFESGLHEFLESQNTGWGITSLSVTASKIFDIPSGTSSILRYIKGPSSAAALTIPDSPSSAAALAIPDSSFVPEDPSLDNDVFVEPIHEEECQPSTSEKEDDNNTHSASAFSAKKCRANEEKRISKKLPGVQGTSSILKFLSRGQSTLHEKRKSDGLICSHQGLLDCPGSSSEAYKAGAHNVPAEAEDRNNTNSCAEPSGSNTWTFNLQDIDPAVVEELPPEIQREIQGWVRPSKHPITKRRGSTISSYFPPARS

SEQ ID NO: 47682 - protein, 275 aa, Zea Mays
MKKFPSKSCPLRYGTGKIQEDAMRLFESGLHEFLESQNTGWGITSLSVTASKIFDIPSGTSSILRYIKGPSSAAALTIPDSPSSAAALAIPDSSFVPEDPSLDNDVFVEPIHEEECQPSTSEKEDDNNTHSASAFSAKKCRANEEKRISKKLPGVQGTSSILKFLSRGQSTLHEKRKSDGLICSHQGPGSSSEAYKAGAHNVPAEAEDRNNTNSCAEPSGSNTWTFNLQDIDPAVVEELPPEIQREIQGWVRPSKHPITKRRGSTISSYFPPARS

SEQ ID NO: 47683 - protein, 438 aa, Zea Mays
MEGIFSRSPEMPKIKILLNDRGQPIGKSARQLSSAIGCQVRKKLSIATTDWRLVDINKKYELWEDIKTYYDVDAAALNWVMRTAGKKWKQFKASIKQRYFNPELSIKEIPECPDKRVNDDDWHSMYNYWMSSEFQDRSEKAKINRQKLKMHHTAGSDQLNDVLGVYPELKDRSIQEGDAFSIVCGPKEPKGYVRVLGLGPTPQDIGTPELKSYTATRLQMEILARTKVQSEKAALEERVLELQTQIEQRAQPDRASEEPMSHRGSTSFQHKVMRNKFAAEDEEDNEEYCASEDEELDDEDDQIFHQMQGANSPRSTRHFAEASHSKHDDLVGKDVILYAMLRSDLPVAKGTIVSTKPSTTVGGQILGRQYCEVIVTCVIKRDTVLPRPCANVETMADAYMMSVAWPYKKLKLVHKAATPSSGGSIKTVFLFANVATIY

SEQ ID NO: 47684 - protein, 139 aa, Zea Mays
MPPSASMPATHTAVYVAAVPLRAPKGPAQLLMSAGYSLGMWDLQHFMVLLRPDPALAQALVFDFQPRDPEDVLAALAVLSRREIPGVVRRRTLRRVPDGRCWLVGHCCDAVGAATRFSERWTTGLVVGEHDCRDYTNDG

SEQ ID NO: 47685 - protein, 161 aa, Zea Mays
MPPSASMPATHTAVYVAAVPLRAPKGPAQLLMSAGYSLGMWDLQHFMVLLRPDPALAQALVFDFQPRDPEDVLAALAVLSRREIPGVVRRRTLRRVPDGRCWLVGHCCDAVGAATRFSERWTTGLVVGEHDCRDYTNGEKRVLESLRLRGNGSSTSGAAPP

SEQ ID NO: 47686 - protein, 138 aa, Zea Mays
MPPSASMPATHTAVYVAAVPLRAPKGPAQLLMSAGYSLGMWDLQHFMVLLRPDPALAQALVFDFQPRDPEDVLAALAVLSRREIPEERCGGSRTGGAGSWGTAATPSVPPQGSASGGRPAWWSGSTTAGTTPTGWSRS

SEQ ID NO: 47687 - protein, 145 aa, Zea Mays
MAFWDYSEKKLVAKTKAECSVTSEWSPDGRHFMTATTAPRLQIDNCIKIFDHNGSLQFKKMFERLYQADWKPEAAERFTDIADLTTSLSTLKIEETKKQVSAQGSKSAQTSSKAPAITAPKPTAYRPPHAKGSAELQDKVQASIQ

SEQ ID NO: 47688 - protein, 1126 aa, Zea Mays
MNTPGSPRQLRITSTQDLNLNISVSNTNMLSQAYASWNNISCGDELYKKETFSSTERPVLDVHQRRSYYVVPQNKLGQDIYVRTTENRGSLVTLLPSGDDRSIKVPALRDLSDSHLNGRSVKPYRLMITAILADAELKLLGSLNSLSFWVELASVSTLTWFPSQVKDDEGLETGEYMTAVRLFSENHSISVQQQSARTCAAIGEHLSQNTRKVNWNEMFFFKVERVDSYTLELLVLDAGKGQPVGIYSAPLEQVVQKLPPTSNPDSVKFDLALGDLMSTKTVEQETVKPSGKIRFAVLVSGRASVQQGNRASPESKTGYIQISPSKEGPWTSMKLNYAVPAACWRFGNCVIASEATVKEGNRYVSIRSLVSVTNTTNFIVDLRLKGRISQSARADEQGDSFGKEDQILIGTLEPNSTIPVPLSGLSHPLMPYMLQLRPAKHHDHENYSWSDVQERRSQTEFRKEEILDLCISDLYESENLLFCSQVDGTSNSCHGLWFCLSIEGKEIGKDVQMEPIYDWCIIIKSPLCLTYYLPIAAHYTVSSSHLDNEDSSCSLGTLSPGEAVKVHNVDPRNPLYLSLVPHGGWELMHEPVVISHPTQAPSKFINLRSSLSGRLPTLTLRLIDISGRKEKRRLLSRSHLERGEKQLYDIKHDELVEGYTIASGLNFKGLGLLSSVGHGGRFGSVKELSPLGDMDGAVDLSAYDDDGKCMHILLCSKPSSYQAVPTKVIHVRPYITFTNRAGQDLYLKLSIEDEPKVLHAYDWRVSFMYSKGTTDKLQVRLVDTEWCQPLEIVKEDTIVIAMRKQGGTQKFVKAEIRGYEEGSRFLIVFRLGPAYGPIRIENRTSHTTISTCQSGLGEESWIQVKPHATRKYSWDDPYGQKVIDVSIDKGDDTCVLCVDLENPIGSSTSFREHGLMFTVDTSDIKILKFADYIRKEEVYGLPGSELTDHQGSSLKENETEPGAGPLELIVELGVVGISLIDHKPRELLYLHLQKVFVSYLTGYDFGTTSRFKLILGELQLDNQLPLSTMPVVLSTESRPDSNRSVFKANVAVSNVTSNGIQVYPHVYIRVTDQTWRLNIHEPIIWALFDFYSNLRFVTTINSTTVTEVDPEIRIEDKAKNISGNCA

SEQ ID NO: 47689 - protein, 1519 aa, Zea Mays
MNTPGSPRQLRITSTQDLNLNISVSNTNMLSQAYASWNNISCGDELYKKETFSSTERPVLDVHQRRSYYVVPQNKLGQDIYVRTTENRGSLVTLLPSGDDRSIKVPALRDLSDSHLNGRSVKPYRLMITAILADAELKLLGSLNSLSFWVELASVSTLTWFPSQVKDDEGLETGEYMTAVRLFSENHSISVQQQSARTCAAIGEHLSQNTRKVNWNEMFFFKVERVDSYTLELLVLDAGKGQPVGIYSAPLEQVVQKLPPTSNPDSVKFDLALGDLMSTKTVEQETVKPSGKIRFAVLVSGRASVQQGNRASPESKTGYIQISPSKEGPWTSMKLNYAVPAACWRFGNCVIASEATVKEGNRYVSIRSLVSVTNTTNFIVDLRLKGRISQSARADEQGDSFGKEDQILIGTLEPNSTIPVPLSGLSHPLMPYMLQLRPAKHHDHENYSWSDVQERRSQTEFRKEEILDLCISDLYESENLLFCSQVDGTSNSCHGLWFCLSIEGKEIGKDVQMEPIYDWCIIIKSPLCLTYYLPIAAHYTVSSSHLDNEDSSCSLGTLSPGEAVKVHNVDPRNPLYLSLVPHGGWELMHEPVVISHPTQAPSKFINLRSSLSGRLPTLTLRLIDISGRKEKRRLLSRSHLERGEKQLYDIKHDELVEGYTIASGLNFKGLGLLSSVGHGGRFGSVKELSPLGDMDGAVDLSAYDDDGKCMHILLCSKPSSYQAVPTKVIHVRPYITFTNRAGQDLYLKLSIEDEPKVLHAYDWRVSFMYSKGTTDKLQVRLVDTEWCQPLEIVKEDTIVIAMRKQGGTQKFVKAEIRGYEEGSRFLIVFRLGPAYGPIRIENRTSHTTISTCQSGLGEESWIQVKPHATRKYSWDDPYGQKVIDVSIDKGDDTCVLCVDLENPIGSSTSFREHGLMFTVDTSDIKILKFADYIRKEEVYGLPGSELTDHQGSSLKENETEPGAGPLELIVELGVVGISLIDHKPRELLYLHLQKVFVSYLTGYDFGTTSRFKLILGELQLDNQLPLSTMPVVLSTESRPDSNRSVFKANVAVSNVTSNGIQVYPHVYIRVTDQTWRLNIHEPIIWALFDFYSNLRFVTTINSTTVTEVDPEIRIELIDISEIRLKISLETAPSQRPRGVLGIWSPILSAVGNALKIQVHLRKVMHRSRFMRKSSIIPAITNRIKRDLIHNPLHLIFSVDFLGVTKSTLSSLSKGFAELSTDGQFLQLRSKQVWSRRITGVGDGLVQGTEAFAQGLAFGVSGVLRKPVESARQYGVIGIAPGIGRAFVGFIVQPLSGALDFFSLTVDGISASFMRCVNILSNKSVPQRIRDPRAIHRDGIVRDYDKFEAAGQMALYLAEASRYFACTDLFREPSKYAWSDYYEDHFILPSQRIALVTNKRVMLLQCLDLDKMDKKPSKILWDVPWEEVLSLELAKAGYQRPSHVIIHLKNFRRSENFVRLIKCNIDNEREPQALSLCCSIRKMWRSHQAAMKVIPLKASVMCILCQMMIKRNPTVYLGLC

SEQ ID NO: 47690 - protein, 94 aa, Zea Mays
MLKSNAPFFVAKLAIKTLPCVILFKKGIVVDQLVGFQDLRSKEDFLTIALEHILILKTKGIIDEKKTDNDDDDEESEAKNRRVRSSTAQDSDSN

SEQ ID NO: 47691 - protein, 141 aa, Zea Mays
MLCCAGHQASLLLFALLSVSSLLLVDGSHQDQEFGEAVGSRILQTNPDAHEVHCSRERSRAAWEAIDEYLMPFVEKEKYELPSKCRLRPDNDMFREQEQHKIHFDINEWHCGFCKKAFRAEKFIDQHFENRHKNLVDNLVT

SEQ ID NO: 47692 - protein, 1724 aa, Zea Mays
MPWIGCSRGWPSPTTRTSRRCSPASSPTPSPHWRPPRRPSESSPEISLPMLELWKIYTEPTSSTMVRNFCILYIEMAFERLPTEEKGNIAPDLLINISNIPPQHQGIILRLVTKAIGECNTHKVDETIASKYRVITESSDGLLFADFCFHTLLYQAPPQGSGCPAGLSVVQSERVTGKQPLKIDVLASRKLGILNVIEAMNFTPEIVYPLYLSASSDSQDAVSKKGDEFLKRKASTVNLEDPDLIKRLFTLFNGTVGAENIAAELKVSPAHASLRMRLMSVFCRSVAAANAFPHTLQCIFGCIYGSGTTSRLKQLGMEFTVWVFKHAVTDQLKLIGPVILSGILRSLDGSSTAETDSTGRDTKIFAYQAIGLLASRMPNLFSDKTDMAIRLFTALRLEDQSLRLTIQEAATSLATSYKRASTIVLKDLESLLLENCEAEQSEVRFSAIRWATTLYDTRHCSSRYICMIGASDVKLDIREMALAGLNLMNDGRQSSAGSVDFSYPDIKEMINYICCQRPQLLHSDEQTNGKLLFPSKTFVSMIKFLMKCFESSDNLKLLQEDPSHSAVAKMCVILEHAMSYEGSSELHALALKSLVDLSSREPKLVSLRYAERINWLRSLLGHVDSDAREAVSRLLGIASSALSTSSALNLLSELTSTLSQNRPSRFENYHGVLCAIGYLTAGALKQSCITEDMVKNVVDILVKVVTSEGSALASVAMESLGHIGLRCALPSINQNSSTGTLLSVLRERLTKLLSENDTKAQQKILVSLGHISWNEMSFPHLNDALDLIFSLSRSKVEDVLFAAGEALSFIWGEVPVTADVILETNFVSLSQATNYLTGDASLVSSNSYEKSGCEEAHSIAREEIIKKLFETLIYSSRKEERCAGTVWLVSLTMYCGRHKKILELLPQIQEALSHLLGDPNELTQDLASQGMSIVYELGDASMKEELVHALVNTLTGAARKKKAIKLMEDSEVFQEGTIGNNPTGGKLSTYKELCSLANEMGQPDLIYKFMDLANYQAALNSKRGAAFGFSKIAKQAGEALQPYLNTLIPRLVRYQHDPDKNIQACYGRFMLLGLPKVCKHLRNIWTTTFRAMDDIKETVRTAGDSLCRAVSSLTIRLCDISLTSTSEANETMNIVLPYLLSEGILSKVSSVQKAAISLVMKLAKGAGPALRPHLPELVSCMLECLSSLEDQRLNYVEMHAGNAGIKTDKLETLRIAVAKDSPMWETLDICIKVVDKNSLDLLVPRLAQMIRSAVGLNTRVGVASFITLLVQKVMVDIKPFAAVLMKLLHSAVLEERSSAAKKAFASSCATVLKYASPPQAQKLIEDTTSLHSGGKNDQLSGAILIKAYLSNASDILGGYNAVVIPVIFVSRFDDDKDTSALYEELWEDIPSSERVTLTLYLPEIVSLLCDGMSLSSWAGKRKSAKAIKKLCDVLGEPLSAHYQNILKSLLKELPGRFWEGKDAILDALASLCACCHVAITAEDSCLPSVILNCVCAACSRKSKLYREAAFLCLHKVITAFRDPGFFNSVFPMLFEVSNQSAISKTKGSAELDESEGASVSLDKVLNCATSCISVAFPQDIINQKKNVVELILNSLLPEESWQVKLSSFLCIKELCLKFDNSGDSNTWPQDTAYLVEELFHLVSPKLVDSIRLVKIAQVHVAASECLLDLSKLYRDFPLSNRTEAKFEDELTELCESEKSEQAKAILKECLAILKALPGVTMTTD

SEQ ID NO: 47693 - protein, 816 aa, Zea Mays
MVKSFEVSELPVRSAKFISRKQWVVAGADDMFIRVYNYNTMDKVKVFEAHTDYIRCVAVHPTLPYVLSSSDDMLIKLWDWDKGWMCTQIFEGHSHYVMQVTFNPKDINTFASASLDRTTKIWSLGSPDPNFTLDGHQKGVNCVDYFTGGDRPYLITGSDDSTAKVWDYQTKSCVQTLEGHTHNISAVCFHPELPIIITGSEDGTVRIWHSTTYRLENTLNYGLERVWAVGYMKGSRRMVIGYDEGAIMIKMGREVPIASMDTGGKIIWAKHNEIQTVNIKTVGAGFEVTDGERLPLAVKELGSCDLYPQSLKHNPNGRFVVVCGDGEYIIYTALAWRNRSFGSALEFVWSSEGEYAIRESTSRIKIFSKSFQEKKTIRPSFSAERIFGGVLLAMCSSDFICFYDWVDCRLIRRIDVNVKNVYWADSGDLVAIASDTSFYILKYNRDVVASYLEGGKPVDEGVEDAFELLHEVNERVRTGIWVGDCFIYNNSLWRLNYCVGGEVTTMYHLDRPMYLLGYLANQSRVYLIDKEFNIIGYTLLLSLIEYKTLVMRGDLEHANEILSSIPKAQYNSVAHFLESRGMLEEALEIATDADYKFDLAVQLGKLDVAKAIVIEAQSESKWKQLGELAMSTGKLEMAEECLLQAKDLSGLLLLYSSLGDAEGIEKLASLAKEHGKNNVAFLCLFMLGKVEDCIQLLVDSSRIPEAALMARSYLPSKVPEIVAIWRNDLSKINPKAAESLADPSEYPNLFEDWQVALTVEKSVASQRDHYPPADQYLNHAEKSGMILVEAFKRMQVIEHEEPEDAAEENGEPDQQC

SEQ ID NO: 47694 - protein, 137 aa, Zea Mays
MEKVAKTVDSEEHYVLSIAYKIVMEPNVLHGASYPPLSRGKKAVSTWTVSLSLRTTITRLKLNSARSVMESSSSLIPTVSASLTAAESKVFYLKMKGDYYGIFLVEFMCIRYLAEFETGSRRKDAARIPWWHTNLLR

SEQ ID NO: 47695 - protein, 220 aa, Zea Mays
MGMEVCCTLGMIEKQQAEELKKAGLTAYNHNLDTSREYYPNIITTRSYDDRLQTLQHVREAGISICSGGIIGLGEAEEDRVGLLHTLATLPTHPESVPINALVAVKGTPLEDQKPVEIWEMIRMIATARIVMPRAMVRLSAGRVRFSMPEQALCFLAGANSIFAGEKLLTTANNDFDADQAMFNILGLIPKAPSFGEEEAAAAAVAAPVCTERSEQAASM

SEQ ID NO: 47696 - protein, 175 aa, Zea Mays
MVFSSNKIIIWMDGWMVFKRLACPVLPFVPSSPRASACSHFPLLRFDFEPGIIFTCCFVPLLCASVLPQIPLGRFASARRWERAEYGLAGLFSLRCILPAILVFVLIRYRPRLLSVWVAGLGPIGVVRVRHDGVWRGDTGRFTIIVDFGFKDILKTMVPNRRLTMACFGLSPAIP

SEQ ID NO: 47697 - protein, 229 aa, Zea Mays
MALSAQGPGELFMPFGPELLENMPINLDHPKLSVETTVQSAVTEVAAMVGENVKLRRGFMLSTTAHGVVSSYMHTCPQPASGMGRIAGLVTLETEDSSTLLDSVKSVGSSIAMHIVAAKPLFLSKELVSASALENEREILRTQAQSSGKSQMAMDKMVEGRLRKYFEEVVLMEQKYVLNDSTNIKTVLNDLSKEVGSKVTIGNFIRMEVGEGIERTEAADGLEVAGGAM

SEQ ID NO: 47698 - protein, 961 aa, Zea Mays
MAAATAADMVWVRVLEDGVFRFDASEAARAAAGPSLSFADPRRREAPHDGADMPAVVPVCEVAAGGSQKVVIKLPPGTSFYGTGEASGPLERTGKRVFTWNTDAWGFGPGTTSLYQSHPWVLAVLPDGKALGVLADTTRRCEIDLRQESTIKFSALSAYPVITFGPFNTPADVMTSLSHAIGTVSMPPKWSLGYHQCRWSYDSSEKVLKIRFPDPISMVDDLHSIGCKAIWMLDPGIKKEEGYFVYDSGSKSDVWIQKADGSPFVGEYASHSLHSGEVWPGDCVFPDYTSEKTRAWWASLVKDFISIGVDGIWNDMNEPAVFKTTTKTMPESNIHRGDADIGGVQNHSYYHNVYGMLMARSTYKGMEMGNAAKRPFVLTRAGFIGSQRYAATWTGDNLSNWEHLHMSLPMVLQLGLSGQPLSGPDIGGFAGNATPKLFGRWMGVGALFPFSRGHTETGSIDHEPWSFGKECEEVCRLALLRRYRLLPHIYTLFYHSHTKGIPVATPVFFADTQDPELRKVETSFLLGPLLVCASTLPNKGAHEYAHKLPKGIWLSFDFADSHPDLPVLYLQGGAILPVGLPIKHVSEASLEDDLSLIIALNENGKAEGVLFEDAGDGYAFTQGDYLLTYYIAELHSSVVTVKILKSEGSWKRPKRNLKINILLGGGAMISTDGVDGEVIHLTMPSESVVSSLVATSEFEHKKRMEMIQPIPDIEEPSGQEGAELSKIPVDLKSGDWFLKIVPWIGGRIISMAHIPSDSQWLHSRIEINGYEEYSGAEYRSAGCTEEYKVIRRHLEQSGEEESICMEGDIGGGLVLQRQISILKDNPKIVQIDSSIQARSVGAGSGGFSRLVCLRVHPTFTLLHPTEVVVAFTAINGSKQEISPEAGEITFEGDLKPNGEWMLVDKCVGLSLVNRFNPREVSKCFVHWGTGDVNMELWSEERPVSNETPLRICHQYEVQQTT

SEQ ID NO: 47699 - protein, 1048 aa, Zea Mays
MGWSPRPPPITRSTASLRLVPHFSHFRFSFHRAQESRGGGGSRRRTLRCCGGTAPAAAAGAAEGRMAAATAADMVWVRVLEDGVFRFDASEAARAAAGPSLSFADPRRREAPHDGADMPAVVPVCEVAAGGSQKVVIKLPPGTSFYGTGEASGPLERTGKRVFTWNTDAWGFGPGTTSLYQSHPWVLAVLPDGKALGVLADTTRRCEIDLRQESTIKFSALSAYPVITFGPFNTPADVMTSLSHAIGTVSMPPKWSLGYHQCRWSYDSSEKVLKVVRTFREKDIPCDVVWMDIDYMDGFRCFTFDSIRFPDPISMVDDLHSIGCKAIWMLDPGIKKEEGYFVYDSGSKSDVWIQKADGSPFVGEVWPGDCVFPDYTSEKTRAWWASLVKDFISIGVDGIWNDMNEPAVFKTTTKTMPESNIHRGDADIGGVQNHSYYHNVYGMLMARSTYKGMEMGNAAKRPFVLTRAGFIGSQRYAATWTGDNLSNWEHLHMSLPMVLQLGLSGQPLSGPDIGGFAGNATPKLFGRWMGVGALFPFSRGHTETGSIDHEPWSFGKECEEVCRLALLRRYRLLPHIYTLFYHSHTKGIPVATPVFFADTQDPELRKVETSFLLGPLLVCASTLPNKGAHEYAHKLPKGIWLSFDFADSHPDLPVLYLQGGAILPVGLPIKHVSEASLEDDLSLIIALNENGKAEGVLFEDAGDGYAFTQGDYLLTYYIAELHSSVVTVKILKSEGSWKRPKRNLKINILLGGGAMISTDGVDGEVIHLTMPSESVVSSLVATSEFEHKKRMEMIQPIPDIEEPSGQEGAELSKIPVDLKSGDWFLKIVPWIGGRIISMAHIPSDSQWLHSRIEINGYEEYSGAEYRSAGCTEEYKVIRRHLEQSGEEESICMEGDIGGGLVLQRQISILKDNPKIVQIDSSIQARSVGAGSGGFSRLVCLRVHPTFTLLHPTEVVVAFTAINGSKQEISPEAGEITFEGDLKPNGEWMLVDKCVGLSLVNRFNPREVSKCFVHWGTGDVNMELWSEERPVSNETPLRICHQYEVQQTT

SEQ ID NO: 47700 - protein, 242 aa, Zea Mays
MMACRRLARDAVAASLRRSAATETTASTPAFFSSSSAAASSCSSGAPVAGSPIRHFLARYSSPAFQIQPSAAGLGPSFAARVALGLRPQLSGLNLIKGFGTSTMLAMTLHQGQVTAATKEQPSKAIAGPPQGSLKTKLGSFWPLVRKLQLPVGLIFLIMSGLHSPLSLTLNILLLLYCSSPSRYSIYLFLQEYMRTRNIITEDYKFFSIGTIELVDGRVLHLIGMLGSWWIYRVSFKCKELV

SEQ ID NO: 47701 - protein, 319 aa, Zea Mays
MATTALLRALRRPSSEAALRLATKANVQTTNGYRHLNNRNLSVFNEFSKQLKGEAKSNPEFQKSMKEFSEKLDVVKEDLKVRTKKTTETIYKRVDDVWSEAEETSKKVTANIKEKMFAAKEEVKESFGVGKEESTSCRDGLPEGSKHEKTEASSHSDGTTEDATDSHTLFTKLKSTISSASPVVSGAFAKLKDTKVSTLAKQGYEIVKDELSSNSSRKKKHQARHASAKVEKSTRTDLVLTPTKKTVLGEKWEEFKNKIRGHPVYRRVDEYTKPVVTKGQEVAEDVRERWETSDNPVVQKIQEYYVPHYSLFYLIMEFD

SEQ ID NO: 47702 - protein, 484 aa, Zea Mays
MGSACQAGTDGPSRKDVLGIGNAALENGHHQAEADADEWREKEEDLANNGHSAPPPGMQQVDEHKEEQRQSIHWERFLPVKTLRVLLVENDDSTRQVVSALLRKCCYEVIPAENGLHAWRYLEDLQNNIDLVLTEVFMPCLSGIGLLSKITSHKICKDIPVIMMSTNDSMSMVFKCLSKGAVDFLVKPLRKNELKNLWQHVWRRCHSSSGSESGIQTQKCAKLNTGDEYENGSDSNHDDEENDDGDDDDFSVGLNARDGSDNGSGTQSSWTKRAVEIDSPQPISPDQLVDPPDSTCAQVIHPRSEICSNKWLPTANKRNVKKQKENKDESMGRYLGIGAPRNSSAEYQSSLNDVSVNPIEKGHENHMSKCKSKKETMAEDDCTNMPSATNAETADLISSIARNTEGQQAVQAVDAPDGPSKMANGNDKNHDSHIEVTPHELGLKRSRTNGATAEIHDERNILKRSDQSAFTRWSKIWGKLFTTR

SEQ ID NO: 47703 - protein, 321 aa, Zea Mays
MSTNDSMSMVFKCLSKGAVDFLVKPLRKNELKNLWQHVWRRCHSSSGSESGIQTQKCAKLNTGDEYENGSDSNHDDEENDDGDDDDFSVGLNARDGSDNGSGTQSSWTKRAVEIDSPQPISPDQLVDPPDSTCAQVIHPRSEICSNKWLPTANKRNVKKQKENKDESMGRYLGIGAPRNSSAEYQSSLNDVSVNPIEKGHENHMSKCKSKKETMAEDDCTNMPSATNAETADLISSIARNTEGQQAVQAVDAPDGPSKMANGNDKNHDSHIEVTPHELGLKRSRTNGATAEIHDERNILKRSDQSAFTRWSKIWGKLFTTR

SEQ ID NO: 47704 - protein, 154 aa, Zea Mays
MRRHACLPQKNELGSALCICHAHHLRLCCLLLLLEGMRAQCCFASVLSSIIAIFLPSLKMTQDTMIVCPPPAFSSFVTVTRPRLSFICQVCTLKYRETKCKAYCCFAIQFLAKTSKMLSGQEVFYTLDAITQILGFYHCIFFSLLLQPAVKLLS

SEQ ID NO: 47705 - protein, 231 aa, Zea Mays
MIRNQPLLWVLSIGFELMELTFRHMLPNFNECWWDSIVLDILICNWFGIWAGMKTVQYFDGRTYEWVGLSRQPNIISKVKRMLGQFTPAQWDKDEWQPTLGPWRFIQVLSLCVVFMAVELNTFFLKFCLWIPPRNPLVVYRLVLWWLIAIPTIREYNTYLQDSKPFKKVGSFCWLSLAICIVELLICIKFGHGLFPRSMPSWLVTFWSAVALLLALFVWTWKYRTVKRKRV

SEQ ID NO: 47706 - protein, 422 aa, Zea Mays
MKDWSIFSKLDHNGGYLPRFPMDSPISHDIGLRLVSQVGNLVECSFQHPRHICATGSGAVQEAFSCFNKFAGAFYFWFSRASNPKLFQRLSAAAGSSSRACRSHIKQVTSCLQHLPGLEFGSQLREDHAVQVLLARLASATFGRLWTEVEERHACNILMLAAATVIPPFENISPKMLAASMALRKDRGNIEPTEQSYSEENRPGCACVAVPRVLLPEDATEPTTGIKFPTVLEDNSNLTTEVLVGMGFRSMRIMRVKNLNLYAFGLYIQPDSVCKKLGPKYAYIPDAELKDHPDFYEDLLRENIDMTVRLVVSYNGLSIGTVRDAFEKSLGFRLQKMNPNTDYGCLKTFGSCFSEDIRIPAIDFRQTSDGQLITEIDGKQIGTVQSKDLCRAFFDMYIGDPPVSVETKQDIAQNVAGLIRRC

SEQ ID NO: 47707 - protein, 277 aa, Zea Mays
MKDWSIFSKLDHNGGYLPRFPMDSPISHDIGLRLVSQVGNLVECSFQHPRHICATGSGAVQEAFSCFNKFAGAFYFWFSRASNPKLFQRLSAAAGSSSRACRSHIKQVTSCLQHLPGLEFGSQLREDHAVQVLLARLASATFGRLWTEVEERHACNILMLAAATVIPPFENISPKMLAASMALRKDRGNIEPTEQSYSEENRPGCACVAVPRVLLPEDATEPTTGIKFPTVLEDNSNLTTEVLVGMGFRSMRIMRVKNLNLYAFGLSGSKVRLYSRC

SEQ ID NO: 47708 - protein, 367 aa, Zea Mays
MLSRPYAFGCVMRLRTSSQFKIVDSYGHFFPDPQYMHVQHINCCDSFATYSYDFEFEKDSQFSRKSSPPIIQIAFKYTVLVHNGDISDLPNSGCRFKYLLERRLRVRTIQYNTTANIWDLYDFVDPDVVLTILVHQVILASLSDALETRLWLQDWLVVVIAQYNKAYKNVTSGGGTEIYNIDVNFSHCSQLQPLSRFVFAILLSPLLQVSSEGIHPDYVTYLQCLLSALEPASLRQAIWPTLISYSSPDVEAEVHQSLSRTVFTSERPIYILDAYKDLLVYYSPTASSEIPFPPPRNCLLRSTVDRLKQERNITPKLVFIHGAHDDTTEFEKYLVEDQTLDGSPLSSSTGFSSFLDEVRSKVAEHGI

SEQ ID NO: 47709 - protein, 172 aa, Zea Mays
MASTAVKLIDIAVNFTDGMFKGIYHGKQCHAADIPAVLARAWAAGVDRIIVTGGSLKESREALQIAETDGRLFCTVGVHPTRCGEFEESGDPEGHFQALLALAKEGLDKGKVVAVGECGLDYDRLQFCPADMQKKYFEKQFELAEAVKLPMFLHMRAAGEDFCEIMTRNLHR

SEQ ID NO: 47710 - protein, 248 aa, Zea Mays
MVAHAKSSKSNPVARWHICQGSINAISFSPDGAYLATVGRDGYLRVFDFSKEQLIFGGRSYYGALLCCTWSSDGKYLLTGGEDDLVQVWGMDDRKIVAWGEGHNSWDTQLLLWDLALDEIVVPLRHPSSASPTFSSGSPSTHWDNACPPTGVLQPSPRMRDVPKLSPLVAHRVHADPLSGMVFTSESILTICREGLIKIWVRPEQSENNQQSNSSEFALGPASKDRAITSSNKASSSSFKKLPPVLVT

SEQ ID NO: 47711 - protein, 128 aa, Zea Mays
MTKTTPPAFVYRISTADEWAEFQRTGATLGGDLDSSTGCIHLSDLNQMTLKNFFLGRNDLYLLQIDTFKLADGLIYELSDGDNYFPHFYGPGRSFAPLQLDTVVKADKIEFADNDFTCGLLDGSYLPS

SEQ ID NO: 47712 - protein, 962 aa, Zea Mays
MAGKSKGGKNKGKAQVVGHSASAEPEVLATDGAELVNPDNGEVSEPGEVSDPPATEDGVADVEKGDGDAPEVVQSAKKPAEGELHLYPVPVRTQSGEKLELQLSPGDSVIDVKQFLLDAPETCFYTCYDLILHTEDGSAHQLEDYNEISEIADITSGGCSLEMVAAIYDERSIRSHLRRVRELLSLSTLHVSLSTSLTLQQESAQGKSADSGKSPIQELDGLNFMEDSAGALTNLLASTPAEIKCVESMVFSSFNPPPTYRRLHGDLIYIDVATLEGNKYCITGSSKSFYVNSSNKNIFDSKPTKQGLEASTLVGLLQKISAKFKKGFREVLDRRASAHPFENVQSLLPVTSWLGAYPVPEHRRDAARAEDSVVLSYGTELIGMQRDWNEELQSCREFPHGNPQERILRGRALYKVTCDFVDAAVKGAVGVINRCIPPINPTDPECFHMYVHNNIFFSFAVDSDYEDISKDHKPDCQNGSSRSTKVSSPDVITKPDANHGKSAEVVDSKSEEAQLADSEQATYASANNDLKGTKAYQEADVSGLHNLAMAIVDYRGHRVVAQSIIPGILQGDKSDSLLYGSVDNGKKISWNETFHSKVVEAAKQLHLKEHVVLDGSGNPIKLAATVECKGIVGSDDRHYILDLMRVTPRDSNYIGQEHRFCVLRPELIASFVEVESIKQSLKQKVPDAPVASTSDAKATSVEGDDKSEESSVHTHEENDNSSSEILFNPNVFTEYKLAGSAEEIAADEELVKRAGTYLVDIVIPKFVQDLCSLDISPMDGQTLTDALHLHGINIRYLGKIAGMVKHLPHLWDLFSTEIIVRSAKHVIKDILRQSLDHDIAPAIAHFLNCFVGKVLGASTKSSLSNAQSKTLKGHENSQTQKSTKGPKLSHAAVSRKSLSTYSHLTSDGIWFSIKEFAKSKYQFEVPDEARLSAKRVAVLRNLCRKMQRILWKQGKSGWLREH

SEQ ID NO: 47713 - protein, 97 aa, Zea Mays
MTLQYIAVLSVGLTIYLRFSTYEDSEDLEKDLKLLLSPVRVGADALSWAAKKIEPNKVGLPTSPSTTAVKDRVLQAAAKHESQPSDADESSVQTAEA

SEQ ID NO: 47714 - protein, 158 aa, Zea Mays
MASHQDKASYQAGETKARTEEKTGQAVGATKDTAQHAKDRAADAAGHAAGKGQDAKEATKQKASDTGSYLGKKTDEAKHKAGETTEATKQKAGETTEAAKQKAADAMEAAKQKAAEAGQYAKDTAVSGKDKSGGVIQQVAHDSFPILCLRAWISVPGH

SEQ ID NO: 47715 - protein, 261 aa, Zea Mays
MQVNNEAPLGCLKPNISQYNSPEQIGGVEGFPENNEKRNDIVAAEKIWEATPNQGLSRPIYRQEFYAWPYIYSDYQIVRQPLPYGFDNQFYQINRDHGFPIENRVQYLPFKMLPQGHPHDAQLQEFQYFVVIDFEATCDKVNNPFPQEIIEFPSVLVNSATGKLEECFQTYVRPTYHQFLTDFCKELTGIQQIQVDRGVPLGEALLMHDKWLEDKGIKNTNFAIVTWSNWDCRIMLESECRFKRIRKPPYFNRNAWRFCRL

SEQ ID NO: 47716 - protein, 356 aa, Zea Mays
MPRELKSLGSKAEESESSNWDVVESIDEDTSELTSVDPCMIESESSESESSYEEDPDRTPVSTNMEESCDPKPRFVRTASAKSDIFLSDRTPEDFTTWQRIIRVDAIRANTEWVLFARNQAEVSKEKALQSAISVGLKDFDHLEPYMIYHAARLVALLEAYAVYDPEIGYCQGMSDLLSPIVAVMEEDHEAFWCFVGFMRKARHNFRLDEVGIRRQLKTVSQIIKLKDSQLYRHLQQLQAEDCFFLYRMVVVLFRRELTFEQTMCLWEVMWADQAAIRAGIGRSTWARIRLHAPPTDDLLLYAIAACVLQRRKLIIEKYSSMDEILRECNSMAGQLDVWKLLDDAHHLVVDLHHRI

SEQ ID NO: 47717 - protein, 84 aa, Zea Mays
MIGVLELLIASLFELLSFYDHGILRQKYFTCTFAVFQLEKIFKTTFSSFVLHMGLVSRHLKEGGNDGVKFGQYIYTSMKCTTTM

SEQ ID NO: 47718 - protein, 228 aa, Zea Mays
MSLEWSASSEWILMSGGCDGAIRFWDIRRAGCFRVLDQSRSQLGKRPLVKSALYKDHTDSLGPSPSARRRTGISKKSSSALRKIQNPTHGHMQQRLHPGLSSSQNRATAHYGAVTGLRTTADGMYLLSSGSDSRLRLWDIDSGCNTLVNFEAMRLQTGKPLQLAVTEDPSLVFVPCMASIKAYNLWSGKTFQTFRGHYELVSCCYYSEQDQEDDDKILSAADEDNWSD

SEQ ID NO: 47719 - protein, 445 aa, Zea Mays
MWLEEVRRRERGELRARRFEAAARACRTASLALSNRKEFVTPHHGAVNSLQVDLTEGRYLLSGASDGSAAVFDVWNATEYETGFIAKHRNILLVDKQHQNGHKFAISAAVWYPVDTGLFVTASFDQFVKVWDTNSTQVVMEFKMPGKVYTAAMSPIATTHVLIATGSADVQWSASSEWILMSGGCDGAIRFWDIRRAGCFRVLDQSRSQLGKRPLVKSALYKDHTDSLGPSPSARRRTGISKKSSSALRKIQNPTHGHMQQRLHPGLSSSQNRATAHYGAVTGLRTTADGMYLLSSGSDSRLRLWDIDSGCNTLVNFEAMRLQTGKPLQLAVTEDPSLVFVPCMASIKAYNLWSGKTFQTFRGHYELVSCCYYSEQDQELYTGSNDRQILVWSPSTPAFTKMLMRITGATEKPWSREECVLYLLTSMLLMLTNNMSRLLGLVSSP

SEQ ID NO: 47720 - protein, 280 aa, Zea Mays
MEFKMPGKVYTAAMSPIATTHVLIATGSADVQWSASSEWILMSGGCDGAIRFWDIRRAGCFRVLDQSRSQLGKRPLVKSALYKDHTDSLGPSPSARRRTGISKKSSSALRKIQNPTHGHMQQRLHPGLSSSQNRATAHYGAVTGLRTTADGMYLLSSGSDSRLRLWDIDSGCNTLVNFEAMRLQTGKPLQLAVTEDPSLVFVPCMASIKAYNLWSGKTFQTFRGHYELVSCCYYSEQDQELYTGSNDRQILVWSPSTPAFTKMEDDDKILSAADEDNWSD

SEQ ID NO: 47721 - protein, 213 aa, Zea Mays
MPSRPQSILGLSAVPFPRRNPSSSPRRRAVRCPSPRLRAPSLLPSHLMFFSRNAFRDLDPIDSPASMASSKKVATRDEWERKLRDVKIRKEDMNRLVMNFLVTEGFVDAADKFRIESGTQPEIDLAIIADRMEVKRAVQSGNVQEAIEKINDLNPTILDMNPQLYFHLQQQKLIELIREGKTNEALEFAQEELAPRGEENRTIGCFSTFEDCK

SEQ ID NO: 47722 - protein, 623 aa, Zea Mays
MALVPSGGAGACKDEAALGLPWSEMFRSASRRRPKQESDDAPPKKPALKTAGAKEMKAKPSSVGTGAGAGADIAGLSLEPDARLALYIAMAHAGLATALLVLYGLYLLLADFLRPLQWALLCSVPLRETQRALVAFWEPPLRGGLSAALLALPLAVLRSSTATLADARAALLRRPLPSSPAFPRLLRWLVSFFFFLILFERLGAATALLLLVFALAFFAASPKLKRAASSRISGRPPSSRGLLLTGGILRHLKTLVALGLMLGMIAGFITGSIFFSYKIGLEGKDAVMSLKSHVEKSNYSEKIGLKKWMDDNDIPGLVDQYSAKIYDTLWEQVDQLAVQYNLTDFTSGFRHFLISQSVDPKSKALISSRPHPYSMKLQSIATRVRNREWVEIYWELDSFFRELLITREDLVIKAKELALQGTEIAKRLLSSSTSVLGGSANLMLSITLRIVSGAAEVVNFLSQLMVFLWVLYYLITVEGGGATEQIIDLLPVSKQVKDRCVEVMDHAISSVLLATAKIAIFQGGLTWLLFKFFKVHFVYTSTVLGFISALVPILPFWLSSIFATGQLLMEGRYVLALVVTVIHLMLMDYGTTTILEDIPGYNGYLTGLSIIGGMTLFPNALEL

SEQ ID NO: 47723 - protein, 210 aa, Zea Mays
MALPTGNLCGDQLRKSGMLKRRKLSGIQKFEDETLQPIHSDDSPPFVDEETSAGQDTDDPDDTNIRTEGRFGCNVSHVNTYSGIAEKSMDKFAALISSFRYPGPRASGLRAPLKDVKNTLSVRSILKAPEKDTFRRTAKKTGLGPPSKSRYTSDDKGSAASPPDISAFAYRPMKTVASDQGKTTVGRLNGSRFRETAPKATGGTSRSQFK

SEQ ID NO: 47724 - protein, 767 aa, Zea Mays
MHRVNMLRHFGVRPILVFDGGLLPIKSYQEGKRARSRKENLERAREHEAAGNSRAAFECYQKAVDITPRIASELIEVLKKENVNYIVAPYEADAQMTFLSVNKLVDAVITEDSDLIPFGCSRIIFKMDKFGQGVEFQITRLEQNRELDFNGFTRQMLLEMCILSGCDYLPSLPGMGVKRAHALIQKLKCHEKVIKHLRYGAVSVPPQYEEDFKKAIWAFKFQRVYDPATEDIIHLSSVPQSLIEDLEFLGPWLPQNIAKGIALGNIDPLTKEPFEINPECSAPSVHKVCPTREPIAPSNGRKKLDLPVQKNILTNYFCLASLEAKRKFRAPKVTHKQQILNEALPSPQAQGSATSDSVEDTRLPTDRIQASQCSSEHLSSEPPQNDPISVGSQCSSERFSCEYPLDDSANISQCSSLDGGSDPPYKDTGNKDRKVEAGYDNKNRIPTSPCIMGNLPWTSEPFLVPHNVGPSIPVQHYTESTVASNNNGITVSSYFKTANKRICTDQGDQLDDDYDVSTGNLCGDQLRKSGMLKRRKLSGIQKFEDETLQPIHSDDSPPFVDEGQDTDDPDDTNIRTEGRFGCNVSHVNTYSGIAEKSMDKFAALISSFRYPGPRASGLRAPLKDVKNTLSVRSILKAPEKDTFRRTAKKTGLGPPSKSRYTSDDKGSAASPPDISAFAYRPMKTVASDQGKTTGKTTDTIDGPPDLGLLAYTSTVCCPERSKHAGNPPDLSTFAYKPVKAAVGRLNGSRFRETAPKATGGTSRSQFK

SEQ ID NO: 47725 - protein, 555 aa, Zea Mays
MGLDDVLMETRTSLDNNVDRDDLQRKIVRPPANLLVFEGDVLDSEASELDSYLLSTCDFYGDFLLLDPCDAPSVFDFLQGKHSGKENSVARQGSPAPSKSQANVFTSPNARSAGTGCKAASGKVLGGLDSTQKNPDQPSTQETSPDDKHWSDPVEPNFTDDVEKPHPDDIGDPVGDYSDDEDPWKPLNPHEPGSLKIRPYRRVKGSLRGVIGTLRKKTLTSIFPVAKMVGVIIPEHAKSFEAQQSQQEEHYGSQSPPRFEKYLASFEFGEENSNVFGDLKDDNGSDIGINFDYNDPDMPNDIDVDPDVPTYPDEIIAATPKGTHGTQDDRDTRESLDDLCRSHLNALLASIAEVEKQSEMDARVSTWKERIEIALEEQDKNPPFDIGSYGEQILDALSSRTDSTGTASFSEIVCGRPKYEVARTFSALLQLVNSRSVYLDKGQATNELVCYTAENPFHVRLISPNRRPEMEAHFARKRVKSPLRNAGKGGESSLARHECPKKPLHKNGKIQVKTAIRLTPDGKRRRRSVTHLMQPINLESADECQWQTDSWASRA

SEQ ID NO: 47726 - protein, 156 aa, Zea Mays
MGTREVYEEKLRSGAHLHRDPTINPGLGSPRCPRCLSLLNPTARDWAITSVLHDATAVAGSGAGALLSAVHGFNTGIPFVQKHVKGPKWLQLLVGVPPLLIFSGASAVFGAYALPRFVQLTVTSYYAASTGSQYAVSHITRQIERAHFPESAQESE

SEQ ID NO: 47727 - protein, 467 aa, Zea Mays
MAGDDGRAPSGLRVVMFPFPFWSHINQMLQLGKLLRARGLGVTMLHTDFNAPDPALHPDITFVSIRESLPAEVVANPDMVEQMMQLNAVCEAPFQAALAGELLARGTTTGGPREVACVVVDGQWYKMLGAATRVAVPALVLRADGAATLLSMLATPRLRADGYLPIKERLDEVVPGLEPLRVRDLIRVDGSDDETVLRFITRNAEAVRASSSGVVLNTFEGIEGAALAKIRRELSGRPVFAVGPLHLASPDPAAAAAAGYQDAPDPTCLAWLDARPPRSVLYVSMGSVARVDRAVFEETAWALAGSGVPFLWVLRRGSVRGADEEVPPVPEELRETVRHRGKIVAWAPQREVLAHPAVGGFWTHCGWKSMVEAISEGVPMLVQPCFAEQIVNARYVTHQWGIGYEVGKPLERTAMAKAARKLMAGELGPQGPRERARLLKAQAKQCVAERGGISLALDGLVDYICSL

SEQ ID NO: 47728 - protein, 570 aa, Zea Mays
MDALQSQSLQVELRERMEQFNQYWISSQQQYAEMQRSLLHTIQQLQQELAEARERSGAQKDGPHVSREGSAESSLVQSIANSVTSNGSATADGSQQLLKNNGSVDVSLKGNNASAVPVPSLLGIGGPAAHIAAMHSFMIHPQGIPQPLASPNSGIPQFGSFQTQPMIQPNSHWPNQQEVQIVSQPQDETNYQTSQSGQTALQQDTINTDELSPKASEGGHPDHLNAQGKQQQSPASAPTESTHELTVVETNIAEHVPYDEQQKTLKEQDSLSNIKSHVGRVEPQEQNAESKVERAASDKQSEPQSRQHKPSNFPPTTQLNLKNSATENPNVVNQVDTMKSVTGGFGSQLPRVPKEPALLDERSLLACIVRAVPAGPEGGIRISSTLPNRLGKMLAPLHWHDYKKQYGKLDDFVASRPELFVIEGDFIHLREGAQQIISATTAAAKIAAATASSAPYSSLLPSVAVTPVAQSTRQKRGPAVDSRSSNAILSGNGFTDQFNIIQGVSDVPVSGKVRNTLDNGFLGEVRTGQPSVLTAAANGARHDKGTNNVIQGYGGKQQGRSTGMAYLSRR

SEQ ID NO: 47729 - protein, 283 aa, Zea Mays
MATASLLEATRLLSTPRPPRRSLHTHLLRTPRLSALRAHLHRSATLDAQEPTARPGALLVLDALRRSVVDSLAALKRPALALLLAGALLAAASMGGPHAAALAASGGRVGGSAFSSRSSSPPSYGYSAPAPRGGYTAAPYYSPSPFVSFGPAVGIGFGGSGFLVTLIGFAAFLYLAGFLSDSSGGTSVLTETDKTTVLKLQVGLLGMARSFQKELDQIAEKADTSTPAGLSYVLTETTLALLRHPDCCISAYSSVDVKRSVDDASRGIKEAAKDQVVLATSTL

SEQ ID NO: 47730 - protein, 1097 aa, Zea Mays
MMRAELRPERRRPILFRAQPITAHQTTSFLWSTRNAHVAYQTRPHLPHPDATTACALLAAAMLPYSGDHQRSPPPQPPPRAAFSSSLSPSAAPFPAADPVGPGPGPGRDLPTAPSVYTAGGDWGALSWMEPPASYMAPAATPPGYKGEATPYDIYSRNHFSNLFGLHSLRSESSNLTSEKHPGNWQESSETLTKDFGPSVFHQQQSAFVSKLLDHSGAEDTGPYPPRQDLNQYPFGSTYDKYMTQLSSCSTDTRPHIFSTQYVNSPEMANTTVPLMNDTIGESSFSFSHYMNPCRINLDYFDSVWNEQKGLGYQTTDKQHGKWSNPDDKATVGNYSLNSLGESHLNPEHLGNGRPMQGSSEMKHELGSFSSKVSSSESGFVQPRECSSEFPEVNNTSVDSPCWKGTPAQYQPSFGIIENNGAPPVVIGTVGYINSHQNQKLPELSFEYPWRFCEHQVSGSENDPFKAVKLPERCKISKDHKVLPIDVRVLNDMTTHASYLPDKQHPTTQKCNDSGEDSKNVITSSQQESSCSGRKPILLGEHGGSLTGSISELMSKSVMNPIAITPRVHTDHLTTGIPHGNIFSAAVEKEESTHKRVLLSTCKGGSSLQEDEEELLQSVIQNLTAASSKRSKVEQKNDDGLSNSSQMKFKDINYVRKHFWRSMHEDSEQENADSEFKATVSQVLTNHQEDKVLDNTEVPQASIYRNLWIEAEASACKLKYELQHALLKLETAKGLNDTIKAPDSLEDSKGSNSYIFSNKPQNHGKGTVSCAAAFQGHGGDSRDKQSPVVSRSIFNGVDADVFARFEVLQSRIDNINSLSEIDCGEQKEASKRPYAVEDTVMARLKVLKSRPDNITSLSQGSTKHQLDGSTNSADNVDDTVIARLGILESHPNNEALLGQESSKRQLDARTNREDGIDAAVMARLRILKSRPDNETSMGDANKEQQDACGEQLNGDDLGIVSNGAISNTLSEKCSKFTHSDDHLGEKNSVGVPDTFGDGNSAREKKEVGGSADVATPMRCKGTSDGVSVGSAVHGEDNLGENHVWLQTAGDSHVCTEGSQEAHPISSPVDQYGGSPTEWEHVLKENFFHPGKLANSDP

SEQ ID NO: 47731 - protein, 413 aa, Zea Mays
MVCVRFCTYHVLGGNYAMGNYLRNAFRWSETVGPWEERPGHFNDAWGYWTDDGLGFFEFLQLAEDLGASPVWVVNDGASLNEEVSTKTIASLVKDVVNGIEFASGGPKTTWGSVRAAMGHPEPFKLDYVSIGNQECWMLYYRGNYQKFYSAIKSAYPDINIISSCDRPTISPSNPADLYDVHVYTSSTNMFSKASMFDNTPRGAPKAIVSEYAVTGNDAGKGTLVAALAEAAFLIGLERNSDVVEMASCAPLFVNDNDRRWSPDAIVFNSGQHYGCPNYWMLHFFKESSGATLHPTAIQVSSYDQLVASAITWQNAKDKSTYLRIKVVNFGNQAVDLNISVVELATGVKKSGSKQTVLTSSSPLDENSFQQPEKVAPVSSPMANAGQQMGASVGPYSLTSFDLLLEPSKHDSV

SEQ ID NO: 47732 - protein, 225 aa, Zea Mays
MTQNAANFSLFLGFAGLLWAFAEAKDIRFILLVISAIFCGYVYQCPPFRLSYQGLGEPLCFAAFGPLATTAFYFSNSSLNTSSGGAALLPLTKTVIASSVLVGLTTTLILFCSHFHQIDGDLAVGKMSPLVRIGTKAGSRIVSIGIVMLYILLATFGTCGSLPPSCIVLCALTLPMGKTVVDYVLKHHEDNAKIFMAKYYCVRLHALFGMALASGLVLARNGILA

SEQ ID NO: 47733 - protein, 125 aa, Zea Mays
MRNLEVEANEVFSVYRDQYYEGGISSVYIWEDEDNGFIACFLIKKDGQGKRGYMQIGSWDAIHVVQMSMTLAVADGHLVNMGKMIEEMEGKLRNSLDQVYFGKTREMVCTLRPPPEVLNMRLPDS

SEQ ID NO: 47734 - protein, 215 aa, Zea Mays
MFLGHFQPQQGKPALWKLDSDQHYNIGRQGTLKEEIGRSFIKRSLSDGNILLESSLPVTICNNETDNTELLPVQQLDDIREASDSAPEISICEPNLCSSMNYGTVPGRHSMSEERQSYLKRLGYPELHSSNFFDLDLLSSSGNSFDEEVFERSLLINSPMDVISPESSMSYSEQGHTDEGRDDTDLSRSSSQLSDIRDYSDHFAQWVVNGDTLCY

SEQ ID NO: 47735 - protein, 468 aa, Zea Mays
MEAMTGGKFLQKFRLYETRSKFYLIGRDKSRIHWRVLKIDRSEFTELGVEEDPTIYTENECQELLRRIHEGNRLTGGLKFVTKCYGIVGFVKFLGPYYMVIITRRRKIGTICGHEIYSVGKSEMIAIPSVTVWPNMAYSRDENRYKHLLCSVDLSKDFFFSYSYNIMHSLQKNITEKNIGQVYETMCVWNEFMTRAIRDHLMNTCWTVALVHGFFKQSRFSVSGKDFWLTLIARRSRHFAGTRFLKRGVNGKGRVANDVETEQIVFEDTSGGIPTQMASVVQHRGSIPLVWFQETSRLNIRPDIILKPDLDYKATRLHFENLALRYGNPIIILNLIKTHEKKPRESLLCAEFAKAIHYINKSLSDDKCLKFLHMDLSNLFRRKGTNVLALLSKVASDVLDLTEFLHCEISTSTKSDDISSEEKTVAKPRDDRSSRDQTECAAKLGVNFMHWDLLKHIKLNCMILWLMI

SEQ ID NO: 47736 - protein, 204 aa, Zea Mays
MVRSKDPAIVPSPMASQLHAITHLSPSSSSGMASATSPSFRRALSTGDLIVQEDRDRDEEQRAVVAAATRYSAEERRERIDKYRSKRNQRNFQKKITYACRKTLADSRPRVKGRFARNGGDYTEADAVADHHVLGAAHQSESESESPATAATPEWWPAVQEELPAVAAAGINLAEFCADDDEMLAAYLGVSSISIADHHYSCQP

SEQ ID NO: 47737 - protein, 219 aa, Zea Mays
MSPSRPPLPNATPSFPQAQKALPHAVQLQARPNSPNPCSPRAFSPQIRPSLPCRGVPRAAPPGHHPPQPNPFSMAANRPTPFPWCARRLVLRSRRLPLRATPLLGSLSLQRAPLSAPAHSSREPPMVFVSPTLAPSIAVDLAQQQRRPPLRRARQVGPHAVALRSVSACRQNPCMCRRRASRVVSLQEAKSTCMHAQLHLGFSQVVRFRKIVVFVLFTI

SEQ ID NO: 47738 - protein, 203 aa, Zea Mays
MAPCLPAGLLYPTPPLPFPRRRKLSPTQSSSRPDPIRPTPARPELFRPKSGHPCLPWSSSSSPTWPPSSPAEPFLHGRQSSYSFPLVCSTPGASISTASPASDTSARLPLPAASSSVGAGPQQQGASHGVCFPNARPINSRRPRAAAATPSVASRSPSRASRRRSAQRFCVSSKPMVRPCCPAFLMFNKMTALIKCVIIVYVV

SEQ ID NO: 47739 - protein, 621 aa, Zea Mays
MERSEPSLKPEWLLRPTVPATTYKPATLPHTDDHGRGASSRNRSSGRDRDRSSQHSSSRRGSSSSGPRRNDRDGIGKSRGYGNFGKHNKERIQEKDLDFRDRESRLVQSDDPLRDGFESFSSCRSEKDRLNRTRSKVAISNRAVGVSLDNGNVSKKDNGVISFEREFPHLDSEDKNGKQDIGRVPSPGISTPIQNIPLVVSDGWNSVLAMLGDPNINSVSSSSTHAGSSKQTEVSNSGSALSMAETVMQSPLKISTTPQLSIDAQKIEERTMRQCILRPLTPSSNKIPASSSLDKLLKSKGARAGESNGPIKVAPQLSTQPSSNSVRTPVKTELVKQSQSGSLQVLSREQNGAVNTAAKDSTSNPVSPVLGRSSSMEPMRKSIVSPKLKVGTNGRSLHPLQGSFADRKASAKDKYKFFEMLRSKSVNGSSAAIESPSSLTDDQQNSNLDLPFKFIENGSSSCEEANSCEGSQRHLSDNETIPPSESHDVLDEGSLGIQVEDKDVSSSQVLGGTQDLSSKKPQEDNVNIVPIVPVYVNDGLMMPNSVDDEASLPLEETNPAEVLQHIGAGEENPCPAQEFESIGAGGEEELNLLRSMGWDENEDVQPLQQEEIADCCILLKR

SEQ ID NO: 47740 - protein, 634 aa, Zea Mays
MGGLCSKVSAVDKSPSDTALGRNQVADHEPGASLELEKPPVSRESAAPAKRLDEQLQSFSFLESVVPGVAFHAGANTGGEAGSRTSPQLTRSLSQRAGVGKAKAGAAKVSEVSSILGRASTAGLEKAVEVLDTLGSSMTSLNSSSGFVSSSAAKGNKISMLAFEVANTIVKGSNLMRSLSEPSIKHLKEVVLHSEGVENLISKDFDELLKMASADKREELEVFTREVVRFGNRCKDPQWHNLDRYFEKLASERTPQSYLKEKAESVMQKLVTCVQNTVELYHELHALDRFEHDCRLKQKEQDGLSSRGDNLDILKQELKVQSKHVKSLKKKSLWSKNLEEVMVKLVDIVHFLYLEIYNAFGRPDSEEPQEPAKHHNRLGPAGLALHYANIINQIDNLVSRSCAMPPNARDTLYHSLPPTIKSAFRSKLQSFEVKEELTASRIKAEMEKTLRWLVPFASNTNRSELNCKISGQMDMSRMETLYHADKEKTEALILELVVWLHHLISKSGNASGGVRSPIKSPVSSPTQKGAAITLLSGKTNNLPPILTQEDQDMLRGVKYRKFVPGISKSQEFDTKSSHSKHSRLSKSNSHSPASGSRKDLLPVRRSSMLPVIDFEIDRTKALDLIDRLDNLKVQ

SEQ ID NO: 47741 - protein, 134 aa, Zea Mays
MRLVLVGMASTACFVIVSKNDIPIYEAEVGSAPKKEDLSYHHQFILHAALDVVQDLAWTTNAMFLKSVDRFNDLVVSVYVTAGHILYKVTMTVLFLFQMAFDCASLCSVFKVWSWQCYIFFNCNSGTYQIHAAS

SEQ ID NO: 47742 - protein, 283 aa, Zea Mays
MRFDLDGLPVHFPYAAIYPEQHAYMGELKRALDARGHALLEMPTGTGKTAALISLITSYSLANPARPLRLIYCTRTVHEMEKTLAELRLLFAHLPPAASRSLLALGLSSRKNLCIHPQASAAAARDSVDTACRRLTASWVREKASSDPDSTPLCEFYETFDRAAAAGDLASFMPPGVYTLADLRALGRERRVCPYFLARQMVKYANVVVYSYQYLLDPKVASIVSREMQKECVVVFDEAHNIDNVCIEALSVSIRKQTLEGAERNLRRISQEIDRKVQGHRCQ

SEQ ID NO: 47743 - protein, 303 aa, Zea Mays
MKPIRHDVRAQMSNVNVGAGSYGGDEANGHGEHLDTSATGDPNKLAKQLSGSRYLQPVGVVLFLCALATSFFVFFKGQSSAVVAMLAKSGFTAAFTLIFVSEIGDKTFFIAALLAMQYQRALVLLGSMAALSLMTIVSVIIGRIFQSVPAQFQTTLPIGEYSAVALLAFFGFKSIKDALALPDNANGNLQGNSESGELAEAEELVKEKVSKNLTSPLEVLWKSFSLVFFAEWGDRSMLATIALGAAQSPLGVASGAIAGHLIATAFAILGGAFLANYLSEKLVGLLGGVLFLLFAAATLFGVF

SEQ ID NO: 47744 - protein, 469 aa, Zea Mays
MSCKTFDTRDPRTGDVLAHVAEADKADVDLAVKSARDAFEHGKWPRMSGYERGRIMSKLADLVEQHTEELAALDGADAGKLLLLGKIIDIPAATQMLRYYAGAADKIHGDVLRVSGRYQGYTLKEPIGVVGVIIPWNFPTMMFFLKVSPALAAGCTVVVKPAEQTPLSALYYAHLAKMAGVPDGVINVVPGFGPTAGAALASHMDVDSVAFTGSTEVGRLIMESAARSNLKTVSLELGGKSPLIIFDDADVDMAVNLSRLAVFFNKGEVCVAGSRVYVQEGIYDEFVKKAVEAARSWKVGDPFDVTSNMGPQVDKDQFERVLKYIEHGKSEGATLLTGGKPAADKGYYIEPTIFVDVTEDMKIAQEEIFGPVMSLMKFKTVDEVIEKANCTRYGLAAGIVTKSLDVANRVSRSVRAGTVWVNCYFAFDPDAPFGGYKMSGFGRDQGLAAMDKYLQVKSVITALPDSPWY

SEQ ID NO: 47745 - protein, 470 aa, Zea Mays
MSASYGSEDYRGGGGGGGYGGGGGGGYGGGGSGGYGGGGGGGGRGSGGGGFGGGGRGGGGGGRGGGGRGGGREGDWVCPDASCGNVNFARRAECNKCGAPCPSGGGGGGGGGYNRSGGGGGGYNRGSGDYGSGGGGFDRDGGDYNSGGRGGGSGGGGGYNRSGGSDRGFDDHRGGRGGSYGGRDQENQRGSEGGYSAGGYGQAPPQAPPSYGGPAGDYAAPPSSYGGNNAYGSDSAVPPPNSYSGGPGSYPPSYGAPPPHQYGGAPGGQGGLPPTYDGGYGGRSMPGGGGSGGAPPPYHGGGSGYTGSADPEPAGKVKQCDENCDETDNARIYISNLPPDVTVEELQELFGGIGQVGRIKQKRGYKDQWPWNIKIYADDSGKAKGDACLAYEDPSAAHSAGGFYNNYDMRGYKISVVMAEKSAPRAAPSYGHGGGRGGGRGGGGRRDNYRDGGGHGPNRNQGGGSRSRPY

SEQ ID NO: 47746 - protein, 470 aa, Zea Mays
MRNSVSERSFLIESDDDDDAAVEDGKRRGLGGGGGGDDDDDGSDSSSPCDSPRVVAARCSQPSSYTQQWPQSYRQSIDMYSSVHSPNLSFLGTPSLSRLSNSFLTNSFRGKPPEIISSLIKPLLPTSIASASDDQQQQQHEDVRKSSHYLPPSRKASSLQRIPEDQRPMVGGHEVGPYRQCSYTQGVMNGVNVLCGVGILSTPYAVKQGGWLGLVILAVLGALAWYTGILLRRCLDSKDGLETYPDIGHAAFGTAGRIIISACCIEYLILESDNLSKLFPNAHLTMGNLTLDSHMLFAILTALVVMPTTWLRDLSCLSFISAGGVIASIVIVSCLFWVGLVDHVGTVESEGTALNLPGIPIAIGLYGYCYSGHGVFPNIYSSLKKSNQFPAVLFTCIALSTVLFAAAAIMGYIMFGESTESQFTLNLPPNLVASKIAVWTTVTNPITKYPWTSTSAFCVHLFPYLTSNIT

SEQ ID NO: 47747 - protein, 176 aa, Zea Mays
MGMVASMCTEPIKRHRVERDLDGKVADALRERTRSRQRTFRSVNSITMRLPRFKEGLRDVKNIFDQYDEDSDGTIDSEELQSFGSRVRVHMSEEEMSNLHRYCDIDSRKGVQFQEFVVLLCLAYLLFGPDVTRRVRTFRSSSPASSITSSTSSSTRTSSSTRTGTACCGGETSPTG

SEQ ID NO: 47748 - protein, 196 aa, Zea Mays
MQDALQVTKVLADNCRSKGTAFRLGAVLKDVLVEFLPDDLHIRCNGRIRVAITQLSWRPRALLVDQFDSKEDVINAVITSSFIPGYLAPRPATFFRNRLGIDGGLTLFMPPTSAAETVRICAFPASRLGLQDIGISPDCNPENRASPRQLFNWALEPAADETLDKLYELGYLDAAVWAEQNYAELIAKNDQSLVAD

SEQ ID NO: 47749 - protein, 189 aa, Zea Mays
MTFRHMLYPAYKSNRTPTPDTVVQGMQYLKASIKAMSIKVIEVPGVEADDVIGTLAINSVSAGYKVRIVSPDKDFFQILSPSLRLLRIAPRGSGMVSFGVEDFVKRYGPLKPSQFVDVVALSGDKADNIPGVEGIGDINAVKLISKFGSLDNLLKSVDEVEDERIKQAMCFDFSLGTGNPLQKPGHAAF

SEQ ID NO: 47750 - protein, 180 aa, Zea Mays
MACCFVRVAAAPRLLIYRAAAPRQLPSPLNVFRKGFSEQSVLPVTDSIECFQGPSVPNTPRIPLYDDSVSSSILDTLSNPTGGVPHADPSKSRIMLVDGTSMMYRSYYKILAQLQHGQLEHADGNGDWVLTIFKALSLLLDMLEFIPSHAAVVFDHDGVPYGHYTAMPSKECHMAKGMGV

SEQ ID NO: 47751 - protein, 514 aa, Zea Mays
MPCSSSSSNPFHSLASAFPFLSSTSPPPSPPASPAPAAPHLAVPLLLPVSSASESRRGAQPLPGTRMVGAGATGGGNMASGGGGPAFVGQVFTMLDPSGNGLMAVTTRFELPRFLTNRTPMWFKRMLSPSKKTENSPVFRFFMDLNDAVSYVKRLNVPSGMVGACRLDVAYEHFKEKPHMFQFVPNEKQVCAKISQPTYNLSMPLEIISFPFQVQAANKLLKSLPQRGRRKKLDGVPVFSAQNLNIAVATNDGIRWYTPYFFDKNLLDNILEASMDQHFHSIMQNRHTRRRRDIVDDSLTSEIIEESAESLLEPPEVQELMNEIGPAGIPLNVVTKAAEIQFLDVVDKVLLGNKWLRKASGIQPKFPYVVDSFEESCQNNQETQSSEPSGDNSSYRNHNNEDHNHFPFSNLLPNIWPGHDRKFKSQESDNKFSRYDADVKSKLQANPLLPKITMVGISMGDGAQMSKANLKKTMEDLTKELEQTSEENMFGDEKDPLFVANVGDYSRITKISSA

SEQ ID NO: 47752 - protein, 531 aa, Zea Mays
MPGLAAKSINVLFSYVKPAIKDSDSLIQKRAYKVLSMLLKDAEFIEKNLDVLSELMISSLPCQFPSKRYRLECLYHLIVYILKDSSMVRKREIISSFITEILLALKEANKKTRNRAYDLLIEIARACENAGNDEGKEGLHQFFGMVAGGLAAGQTPYAISAVVTGLARLTYEFSELIGVAYNLLPQTFLLMQRNNREIVKANLGFVKALVAKSKADILHEHLTGVVEGLLSWQSDTKNSFKAKVKSLIEILVKKCGLDAVKAVMPEEHMKLLTNIRKINERKMRKAKSSEDGDAMSMASGATRQSRWNHTQMFSDFGSDDESDGPFSTQHTATSRSRTESKASTRLSRRRQGDKKLLDKFIDHSTGDPLDLLDQKTVRLALKSAAGKKRAAPDDDDDKFEVDPEGRIIVREEREKWKKKPAPRDDEEADGKSSVRSQSIKKRKTSGSGWAYTGHEYTSKKASGDLKKKDKMEPYAYWPLDRKLLNRRSDRKASARKGMSSVMKITKKLEGKSASAALSAKRSGKTKHKKNK

SEQ ID NO: 47753 - protein, 223 aa, Zea Mays
MAAAERDRERWILPGATALVTGGSKGIGHAIVEELAALGARVHTCSRNAAELEECRRRWAEKGGGLLQQVTVSVCDVAVRADREALMATVRDVFGGKLDILVNNAAQVVFKPAVECTGEEYTRIMATNLESCFHLSQLAHPLLRDASLAGGGSVVHISSTAGLLGFRGAVLYSTAKGSKLGGRRARNFTDSAAAGRRAGRGGVRGVVSVHAGGRLRHRPSHLR

SEQ ID NO: 47754 - protein, 175 aa, Zea Mays
MMSYRIVPHVSHINAEKCQYQQCHLGSTFVPELRGYFLATENFYFTSKDLSTLRKKHPNRSDEDFSRYCFSMAYIVALLHDSLGVSLDDKRIEYSNQVGDIQVEWALGAFITLIQNASLKPLHTAVESTHSNRPLFAVLGMFLLCGVLFVSRWRKHKTKVIYDLEKGRYIITHIS

SEQ ID NO: 47755 - protein, 492 aa, Zea Mays
MMRCTVTGGGCVASWIGDRRSPAVNPFSVRMSTGNGGWCGGLRSRAAELSGLEMAHLRGGIGGLFRASPRYGRLQATAAVDPEDIPLEKVQVKSSGHVMPYVGVACLGAILFGYHLGVVNGALEYLAKDLGIAENAVLQWTSAYCSGWVVSTSLAGATLGSFTGGSLADKFGRTRTFILDAAPLAVGAFLSATAQDIRTMIIGRLLAGIGIGISSALVPLYISEISPTEIRGTLGSVNQLFICIGILAALLAGLPLAGNPAWWRTMFGIAVVPSILLAVGMAFSPESPRWLFQQGKVIQAESAVKRLYGKEMVTEIMYDLRASGQSSSETEAGWFDLFSKRYWKVVSVGAALFLFQQLAGINAVVYYSTSVFRNAGITSDVAASALVGAANVFGTMVASSLMDKQGRKSLLMTSFSGMGASMLLLALSFTWKALAPYSGILAVVGTVLYVLSFALGAGPVPALLLPEIFASRIRAKAVALSLGMHWTSRFYM

SEQ ID NO: 47756 - protein, 350 aa, Zea Mays
MNDGTRKRVLINAFTVRALRDTFPPARAAGIMALSVTGSYYEMTEIATRILPNIVVLTFDPDSDVRTKAFQATDQFLQIAKQHHEKLNTGDNRVAESTGVKLKPGNAGLLGWAMSSVTQKGKPSDHAPISTANANNSQASTALTAAPETQASTPAYAQSTSSSLDQAAPASARSSEDGWGELEDDNIHEENSDKDGWDDVDPFEDKPSPSLLSNIQAAQKRPVAQPKQAVANSSKSNPLKAPKSEDDPLWGPIAAAPPKSAAKPADIKPSTSHNDEDDLWGSIAAPPPKSSGKPLKPAAANSDDLWGAIAAPPPGTKARPLASSGKGRGTKPAQPKLGAQRIGRTSSTGM

SEQ ID NO: 47757 - protein, 319 aa, Zea Mays
MALSVTGSYYEMTEIATRILPNIVVLTFDPDSDVRTKAFQATDQFLQIAKQHHEKLNTGDNRVAESTGVKLKPGNAGLLGWAMSSVTQKGKPSDHAPISTANANNSQASTALTAAPETQASTPAYAQSTSSSLDQAAPASARSSEDGWGELEDDNIHEENSDKDGWDDVDPFEDKPSPSLLSNIQAAQKRPVAQPKQAVANSSKSNPLKAPKSEDDPLWGPIAAAPPKSAAKPADIKPSTSHNDEDDLWGSIAAPPPKSSGKPLKPAAANSDDLWGAIAAPPPGTKARPLASSGKGRGTKPAQPKLGAQRIGRTSSTGM

SEQ ID NO: 47758 - protein, 396 aa, Zea Mays
MEGRLFDKPLNPNKLLKEQFVSNLTGSSLLEIAALSTVVPALVVLRKWSSRDNSRKESAKKNDDQVHTVRKDWMQYFSTLGVDYLTVVLPIILVFTVLSEWVFMCAISLVILISIYIMFKRSQFHLKDGFSQLPLLRADISSYRVSVVLVTCLCILAVDFKIFPRRYAKAETYGSGIMDLGVGSFVVANALVSRQARNIASMSFKAVLCSISPLLSLGFARIISTWGVDYQVHVGEYGVHWNFFFTLAAVSILTSVVRIHPKHCGLVGLLILAGYQIWLSSGLNEYLISHKRSADIITQNKEGIYSILGYWGMFLIGVSLGFYLFVDTSSKGKNRNTQVMQIWVLAASFWILAIIFDSYIERVSRRMCNFAYVMLVFGQNFQRTYIGLLFNNMNFI

SEQ ID NO: 47759 - protein, 205 aa, Zea Mays
MLRLKHMVVASSFKAVLCSISPLLSLGFARIISTWGVDYQVHVGEYGVHWNFFFTLAAVSILTSVVRIHPKHCGLVGLLILAGYQIWLSSGLNEYLISHKRSADIITQNKEGIYSILGYWGMFLIGVSLGFYLFVDTSSKGKNRNTQVMQIWVLAASFWILAIIFDSYIERVSRRMCNFAYVMLVFGQNFQRTYIGLLFNNMNFI

SEQ ID NO: 47760 - protein, 689 aa, Zea Mays
MPHRRRALNPTLPPPPPAATAFHLGGDEARLPLLADYALLHQPAASAVDAPASSEWSAGSAFTATSDAATTTASSTATAPPGSSQSQLLAAGGRDSDTWVRRAREGYYLQLSLAIRLTSQAFLAGAPPAPDLLFGCSPVVVADHHAAAGDGADDSEAISYRLWVNGCLSWGDKIAHGFYNILGIDPHLWAMCNVAEEGRRLPSLAALRAVGASESSLEVVLVDKGADSVLLDLERRALDLVRSLAVLVSDHMGGALRSEDGDLYLRWKAVSKKLKKRQKCVVVPIGGLSIGFCRHRAILFKVLADFIGLPCRIAQGCKYCSAPHRSSCLVKVDSERRYVREYVVDLVVEPGSISCPDSSINGQLLSTVPSPFKTSSAVGSGNYTTPVAAWNQSTAGERRNMVSSNPQCSVARCRVVENSSAQVARSKEDLVPKCGQITQNGNCNGVSVLQVSMQLKAMDIGAENGNKENVPGADLPKPMSIEPPFAVDWLEISWEELELKERVGAGSFGTVYRADWHGSDVAVKVLTDQDVGEAQLKEFLREIAIMKRVRHPNVVLFMGAVTKCPQLSIVTEYLPRGSLFRLINKAANGEMLDLKRRLRMALDVAKGINYLHCLNPPIVHWDLKTPNMLVDRNWSVKVGDFGLSRFKANTFISSKSVAGTNGWRLSFCAASHRTRSAMFTASASSCGSS

SEQ ID NO: 47761 - protein, 712 aa, Zea Mays
MEAEQQKQQPQRPRRKGLKRKLEDEASAAVAAAATSAAASAAAASLGSAGADDDNEEEDGSAGTPEICCRHSHAALAREVRAQVDALVRCASSWRHADRAAAKRATHVLAELAKNEEVVNVIVEGGAVAALVCHLEEPAVAAPTQEEQQLRPFEHEVEKGAAFALGLLAPEHQQLVVDAGALPPLVKLLKRQKNTTNSRVVNSVIKRAADAITNLAHENSNIKTSVRMEGGIPPLVQLLESQDLKVQRAAAGALRTLAFKNDENKTQIVQCNALPTLILMLRSEDAAIHYEAVGVIGNLVHSSPKIKKEVLNAGALQPVIGLLSSCCTESQREAALLLGQFASADSDCKVHIVQRGAVCPLIEMLQSADVQLREMSAFALGRLAQDTHNQAGIEDYVSDFIKVGGVQKLQDGEFIVQATKDCVAKTLKRLEEKINGRVLKHLLYLMRVGEKSVQRRVALALAHLCAPEDQSSVFIDNNGLDLLLDLLISMSSKHQQDGSAALYKLANKAAALSPMDAAPPSPTPQVYLGEQYVNSSTLSDVTFLVEGKRFYAHRIALLASSDAFRAMFDGGYREKDARDIEIPNIRWDVFELMMRFIYTGSVQVTSEIAQDLLRAGDQYLLEGLKRLCEYTIAKDVNLDNVSDMYDLSEAFHAVSLRHTCILYILEHFNKICTRAGSAQLIQRVIPELRNFLTKALSSSRSPSTTDDRNLQT

SEQ ID NO: 47762 - protein, 468 aa, Zea Mays
MADEKLAKLREATAGLTQISENEKSGFLSLVGRYLSGDEEHIEWAKIHTPTDEVVVPYDTLESPPEGTEATKKLLDKLAVLKLNGGLGTTMGCTGPKSVIEVRNGFTFLDLIVIQIESLNKKYGSNVPLLLMNSFNTHDDTLKIVEKYTNSSIEIHTFNQSQYPRVVADEFLPWPSKGKTDKDGWYPPGHGDIFPSLMNSGKLDLLLSQGKEYVFIANSDNLGAIVDMKILNHLIHKQNEYCMEVTPKTLADVKGGTLISYEGRVQLLEIAQVPDAHVNEFKSIEKFKIFNTNNLWVNLKAIKRLVEADALKMEIIPNPKEVDGVKVLQLETAAGAAIRFFDHAIGINVPRSRFLPVKATSDLQLVQSDLYTLVDGFVTRNSARTNPSNPSIELGPEFKKVGSFLGRFKSIPSIVELDSLKVSGDVWFGSGIVLKGKVTITAKPGVKLEIPDGAVIGNKVLAQRDAKV

SEQ ID NO: 47763 - protein, 223 aa, Zea Mays
MNMSHADQVALWESVMKGNLDGYKNISTRLKLGPFEDDVLVRTASVERQRQQNSDEPESPGSSKPCRVPVRLYVRNVQEDLEYIEHAVPVSDWENVSYINRPFETRKAEGRSYITLEHALQTLLPEFFSSKPPGSADGSQHAGAMDAAADSSDATNSSSRSQEAEQALASPAEAGSAKRAKVKLVRVQGVELDMDIPFLWVADHLKNPEYYVHICVYVGTRKQ

SEQ ID NO: 47764 - protein, 437 aa, Zea Mays
MLDKVNSEEAPLDLKVPETFDEFIWDMKNNDYDLRSFAFKLKATMESMDKELRSSRLSEQLNKHYAAIAIPKGLYCLSLRLTDEYSSNALARKQLPPPELVPCLSDNSYFHFVLASDNILAASVVVRSTIRSSLKPERIVFHVITDKKTYPAMHSWFALNSLSPAIVEVKGVHQFDWLTQENVPVLESIETQRAARDRYHGSRRPITSANDSPRVFAAKLQAGSPTYTNVLNHIRIYMPELFPSLNKVVFLDDDVVVQHDLSPLWDIDLSGKVNGAVETCRGGDSWVMSKRFRNYLNFSHPLIAKNFDPSECAWAYGMNIFDLNAWRKTTIKDKYHHWVKENLKSNFTLWRLGTLPPGLIAFKGHVHPIDPSWHLLGLGYQEKTDISSVEQAAVIHYNGQSKPWLEIGFKHLQPFWTKYVNYSNEFLRNCHIMEPQL

SEQ ID NO: 47765 - protein, 221 aa, Zea Mays
MGDHEARGDDFEKKAEKKLSGWGLFGSKYEDAADLFDKAANSFKLAKNWSRAASVYIKIANCHLKGDSKHEAASAYVEAANCYKKFSPQEAAQALNQSVNLFLEIGRLNMAARYSKDIGEIYQQEQDLEKATDYLERAADLFDSEGQSSQSNTIKQKVAEIAAQLEQYPKATEIFEAIARQSINNNLLKYSVRGILLNAGICQLCRGDPIAITNSLERYRN

SEQ ID NO: 47766 - protein, 242 aa, Zea Mays
MHRGRNRSRKPVESKTASSSSPAHPSPPQLSTVTTTAPLEPLAAAGGKVHGLSLGGGAAGSSHLGVDASNAHYRYGSKYPLGAKPDGGELSFFSGASSGNNSRGGFTIDSPSDNNSWHSALASSVPPFTLSTKSGDSGLLPGAYASYSQSHSHMEPPRELGQVTIASLAQEQERQQPFSGGMLGNVKQENQNQPLRPFFDEWPGTRADSWPPEMDGAPRAGRTSFSSSTTQLSISIPMPRCD

SEQ ID NO: 47767 - protein, 287 aa, Zea Mays
MPTPFLRFQVPVDADDAEIEERIMQHLAAAAAIRRSHRHARREGRRSSRAAAAHGHGHPQPQTQVLFFPSAGEATPGGSGSPSPHPRQEHAASSVVSPPPLPAVASAEGTDADSTASVGGAVGPDDRFPGASLRLSTTMKLDHLLTRSHSQTRSNLGCSQSLQSIYHSQSPTFPLLLRTPDACPCLILNRRLTYIAIHSLFSNLNDGWQVQGLHNEEHARVEGEVVRAEQRHVESWLGDEEGGRCWDRRRFPHDREAAGDTAGWEWDSAVACYRFVSSSRPPWFGCK

SEQ ID NO: 47768 - protein, 519 aa, Zea Mays
MDAAEASEVQARLAAAVHALNHDARPEARLAANQWLLALQRSPQAWAVATSLLATPDPLPPADLLFFAAQMLRRKIQSPGPALLGLGLASQLLDALLLAARRFCAAPAPRQLLTQICLALAALALRAEGGVDGLFARMPHLPPPAVLELLTVLPEEAAQDQGGDTGVDAAARCRFTRELLAHAPSVLEFLHRQSEKAPADDDGVPLDERNRRILRCLLSWVRVRCFSETPAASLARHPLLTFAFNSLQVSFSFEVAIEVMTELVSQHQELPEAFLSKTPYIREALLLPALANRNEKIIAGLACLMCEVGQAAPALVAEGGSQALALTDGLLRCSLAHFILGIDVKSAKRNVVQELFVPVFSSLLDALLFRAQMDTDEHGSDGAPCIPERLTQFRMNLEELLVDICLLLGAPAYINRLFSGGWDFSSQTIPWKEVEVRMYALSMVADTILQDEGSFDFSIIMHFVNILSSRTPVELNGNLFLVYKSFGDVVGSYSKWLSSSQSYFARQEFQNPYHQMLAP

SEQ ID NO: 47769 - protein, 781 aa, Zea Mays
MVAAVRVDARGWYTGPGMVVPGVVSHATGDEDGATQLELPEAFLSKTPYIREALLLPALANRNEKIIAGLACLMCEVGQAAPALVAEGGSQALALTDGLLRCVAFTSEDWEIAESTLQFWCSLAHFILGIDVKSAKRNVVQELFVPVFSSLLDALLFRAQMDTDEHGSDGAPCIPERLTQFRMNLEELLVDICLLLGAPAYINRLFSGGWDFSSQTIPWKEVEVRMYALSMVADTILQDEGSFDFSIIMHFVNILSSRTPVELNGNLFLVYKSFGDVVGSYSKWLSSSQCNIKPLLLFCASGISKSVSSNACSLALRKLCEDAPSFIHEPQNLEILFWIGEGMNKGNLQLEDEEEIISAITHALSSISEKELKKSSLARLLCSSYSAVEKIIDIDRDQLLRQNPAAYTQSLDLAVRGLYRMSALFHHLATSVTSGLVDDDIIIVLLGIFWPLLESLFRSSHMENVHLSAAICRSLSSAIHSCGHHFHILLPKVMECLSANFLLFQRHDCFLRTAANVIEEFGHKEEYGALCVRTFEILSSASSISALNSSYTCDQEPDLVEAYTYFTSMFIRCCPKEAIVASSSLIELSFQKAAICSTAMHRGAALAAMSYMSCFLETALAAVLESPECIPNGSPGVALIQILARCGEGLLSNVLYALLGVSALSRVHKSATILQQLAALCSFSEGTTWKAILSWNSLCGWLQSTVKSLPSEYLKQGEAEIIVPSWLKVLQDAGSDYLHSRTGDNIRSHQGYMQGKGGRTLKRIIRDFAESHRNVPIPSPT

SEQ ID NO: 47770 - protein, 507 aa, Zea Mays
MASDGDHGGALQKPLLPKAPRSGGWFRKGTSTARLGAAAAGTSSKAAALRPPHHVPALLCTLVVALGTVQFGFTSGYSSPAQDGVTRDLDLSISEFSVFGSLSNVGAMVGAIASGQMAKYVGRRGSLMIAAVPNVMGWLAISLARDTSFLYVGRLLEGFGVGVISYVVPVYVAEISPQNMRGALGAVNPLSATFGVVFADVLGLFFPWRLLALIGTLPCLLLIPGLFFIPESPRWLARMNMMDECEASLQVLRGVDADITVEANDIKIAVASANKSGAMSFQELNQKKYRTPLILGMGLLVLQQLSGINGIIFYAGSIFKAAGLKNSNLDTCVLGAIGVLASVVTTKILDRAGRRILLIISSSGMTLSLLTVAVVFYIKGNISHDSDLGNTLSMVSLIGVLACVTAYSFGMGAIPWIIMAEILPVSINSVAGSFATLANWLTSFGITMTANLLLSWSAAGTFALYMMVSAFTVVFVILWVPETKGKTLEEIQCPGTPQSPPRCLHLL

SEQ ID NO: 47771 - protein, 466 aa, Zea Mays
MASDGDHGGALQKPLLPKAPRSGGWFRKGTSTARLGAAAAGTSSKAAALRPPHHVPALLCTLVVALGTVQFGFTSGYSSPAQDGVTRDLDLSISESLMIAAVPNVMGWLAISLARDTSFLYVGRLLEGFGVGVISYVVPVYVAEISPQNMRGALGAVNPLSATFGVVFADVLGLFFPWRLLALIGTLPCLLLIPGLFFIPESPRWLARMNMMDECEASLQVLRGVDADITVEANDIKIAVASANKSGAMSFQELNQKKYRTPLILGMGLLVLQQLSGINGIIFYAGSIFKAAGLKNSNLDTCVLGAIGVLASVVTTKILDRAGRRILLIISSSGMTLSLLTVAVVFYIKGNISHDSDLGNTLSMVSLIGVLACVTAYSFGMGAIPWIIMAEILPVSINSVAGSFATLANWLTSFGITMTANLLLSWSAAGTFALYMMVSAFTVVFVILWVPETKGKTLEEIQWFFQ

SEQ ID NO: 47772 - protein, 337 aa, Zea Mays
MASDGDHGGALQKPLLPKAPRSGGWFRKGTSTARLGAAAAGTSSKAAALRPPHHVPALLCTLVVALGTVQFGFTSGYSSPAQDGVTRDLDLSISESLMIAAVPNVMGWLAISLARDTSFLYVGRLLEGFGVGVISYVVPVYVAEISPQNMRGALGAVNPLSATFGVVFADVLGLFFPWRLLALIGTLPCLLLIPGLFFIPESPRWLARMNMMDECEASLQVLRGVDADITVEANDIKIAVASANKSGAMSFQELNQKKYRTPLILGMGLLVLQQLSGINGIIFYAGSIFKAAGKLCTCLLACGFRLLVEHHNFSNGFFTPSKFDWSSRVLRNCLAVY

SEQ ID NO: 47773 - protein, 483 aa, Zea Mays
MIEAVEVHADGMALSCRAYDLLHGLIVSLSTEEKFVEILNDSQSQERASNPNTEVHRLSIQIQRNNMLHPLPKAWMKQVQSLVVSSDTVPDLSDFQGLHAMDLGGCDSLQVDHLKGISKTTSLIYLAIGGKYIADVPKEVSWLKKLRTLDLTASGLSELPRCILTLTNLERLFVNSHMKIPGKISKMSGLQELGDINIVKPELLKRLRKLSKLRVLRIAMWSWDEGSKSSVKLWWETLHSLIGSCKKIESLCILTFCSLDFMDGSGDDNKWPPQTLKNLEISHSAFLDKLPSWFDSLSTISSLTIEVNKLSKNITDTLAKLSALRSLSLTSIEKPEPEVRFVIGSAGRFENLESLKFVCNEMVNLLERPESNATQQLTGLTIVFHASRTERSRNKDFRFGLDKLLSLQHVRVEINCSNATQRTVKNAEAAIGEEISKIRRDDGSQPILEIRRLQEESMIAGKDQTQDANKTPSSSVSSQAPRK

SEQ ID NO: 47774 - protein, 146 aa, Zea Mays
MLYGTLTEFCTPESCPTMTAGPKYEYRWADGVQIKKPIEVSAPKYMEYLMDWIEGQLDDESIFPQKLGTPFPPNFKEVVKTIFKRLFRVYAHIYHSHFQKIVSLKEEAHLNTCFKHFILFTNEFGLIDKKELAPLQELIESIIVPY

SEQ ID NO: 47775 - protein, 371 aa, Zea Mays
MATGKPPWSQQYQEVALLFHVGTTKSHPPIPEHLSPEAKDFLLKCLQKEPELRSTAPDLLKHPFVTGELDDLQPLNHAARKNSFNEIPSDDMPNGLGLNKSSNWSTMNSSKSSKIKPLWEGGCDDDDMCEFADKDDYAGVGSSYNPMSEPFDNWENKFDISPEQNSHQPMEFGELAKHVESSITGNDFTFPVGGSCEDDDVLTESKIKAFLEEKALDLKKLQTPLYEEFYNTVHGGSFQGADQTSKGKLPISPKFPPRGKSPPCKTRVGACDTSNDTAPESCSKQFPRSSVVDSSRILREIASPQLNEFADKIHLDAQDSPSISFTERQRKWKEELDQELERERVLRLAGCGKAPSPNRGSNVKKEYHADH

SEQ ID NO: 47776 - protein, 728 aa, Zea Mays
MEAHAPLDFALFQLSPRRQRCELVVCGNGRTEKIASGSVKPFVAHLRAVEEQASAQPPPPAIRLQLDRPAPWFSKGTLERFVRFVSTPEVLELTSTYDLEMSQLEGARKIYAQGGTGDATSGGTAENVTGSAAAVAADITKKELLRAIDVRLSTLKQDLAAACSRASSAGFNPNSVSELLLFANHFGASRLSEACTKFMSLCQRRHDISPQTAQPAVSSHWKVFDDGNVRGSSSSDMSIDEPQVDLGESNNKSTVGGSGSQVHRLSNSQGLEVAAEQQPKPTIPQAIDKQEAETDASPAPAAGGLSRRLSVKDRINMFESQKKEQTPSSGNSNSAGTGRVVPGRGEHRRVPSGASMEKLVRRWSSVSDMSIDLSNNESVNINDKKDNGTPVVTPTSTDLEANSKAKADVDSNGQKDLVTSHSWPYQKDNVPMDPTTTDLCPPSTLSNTLAPHSDGAGNDMVINSSIESESSFGKEAGVIQGLTRMSNHATSNVSTRNHLKSSAKPVEEGLLKNKDILTSTSLEEHVRMIDKEITAVPHEVLVASEQIPQNDIRGLHTKDIHTESEVTGRKDQPSRSFGKVSGGVNPKPKTSSNSRANVKGSSGRANVKGSSGRDEITFTETEFRDVSLQRNRLPRKAEDVGRKVTGGSDSDSSGRQGTNLSRQSSITIQELNFQARVMGPGKGNQDRHGELQMKANELEKLFAEHKLISSRRGKPTDVQVDSTRTVSE

SEQ ID NO: 47777 - protein, 410 aa, Zea Mays
MSNKEEKECQMTKEEKRRKKREKHKDMGQSGDYEGKAVMSNKEEKDCQVTEEEKKRKKGKKHKDKGQGSNSDSSCARNHSIEMEQADVSAKMAEDSCLEHAEAVTSKSSAKKHRKKKRKDKEVETIGQKQILDADENVGSEDTKRNSREREHDRKSKKHKRKHQDDETASNGSSGNQIVLGEDKRTEKEYLVTLDLEEDNKSDMSKIGKKTDSKKKRRKERNDGVDLRQNTLVGEGKNGKNNKEKKMCEDENGGGEREKENMGKQKDKCRRVSFTDHVEVFNIGGSDDVEGDGSGETELVHGRRFSPEEDAKLMEAILKYAELKQLGEKGLQMIGESNKHPETRGCWAEIALPHRPKKAKYARGKVLLQRSAERKWTAEEYEIIRRFVEKNGRNWKGLGVRMSTKTCLIW

SEQ ID NO: 47778 - protein, 679 aa, Zea Mays
MTPAGGANHSPAPRSLVFAFYLTGHGFGHATRAIEVVRHLIADGHEVHVATAVPEFVFTAEVRSPRLRIRRVILDCGAVQADALTVDPLATLDKYREAAVLPREFILRAEAEWLSSIKADLVVSDVVPIVCKVASDLGVRSVCIGNFSWDFIYAEYIMEAGYHHRSIVWQIAEDYSHCDILLRLPGYGPMPAFRNVIDVPLVVRGLRKSRSEVRKELGIEENAKVLVFNFGGQPAGWKLKQECLPDGWICLVCGASDSQDVPPNFIKLAKDAYTPDVMAASDCMLGKIGYGTASEALACKLPLVFVRRDYFNEEPFLRNLLEHYQNSIEMVRSDFLAGHWKPYLLRALTLQPCYNGPINGGEVVSQILQDTAIGNKCISDKASGARRLQDAMVSGYVLQRVPGRDAGIPDWYSVSETKTGGGPTSQNVATKESAALCIEDIEILHGDLQGLTDTVDFLKSLSELNGNDLKSPKKQDLERTAASVLFDWETEIYVARAPGRLDVMGGIADYSGSLVLQMPLREACHVAVQRNHPSKQKLWKHTKARQLVNGGLVPVIQIVSFGSDLSNRAPTFDMDLSDFMDDGKPISYEKARELFCQDPSQKWAAYVAGTILVLMTELGAQFTDSISILVSSAVPEGKGVSSSASVEVATMSAIAAAYGLNIIPRDLALLCQKLELLVE

SEQ ID NO: 47779 - protein, 330 aa, Zea Mays
MKKCPSELELEAFLRGREDATAAAAAAVAEQKPTHDIAALAPFGAGGVFPSSDLSAFSFADSNTLNGTGNIHNHLWSHNHNVRHPAVSTTIESQSSICAAAASPTSATNLYLKESQALGGTSGSDSDSDSLLDIEGGPCEQSTNPQDVKRMRRMVSNRESARRSRKRKQAHLADLETQVDQLRGENASLFKQLTDANQQFTTAVTDNRILKSDVEALRVKVKLAEDMVARGALSCGLGSLGLSPALNPRQACRGPDVLSVSGLDFPGADDACFTGLSPAEQLQLQSSPLQSIAASLESLDNRMASEVTSCGGPGVDVWPWDHHSNGGLSK

SEQ ID NO: 47780 - protein, 158 aa, Zea Mays
MDQWGSETRPDNLFRSSYGYDPPAVRCHTAAELVTTQSVELVVRLFRSWSVVLFRVLGKMDAEAARRKQVAPPQEKRKRGRLELRRIQDRTSRQVRFSKRRSGLFKKAHELSVLCDAEVAMVVFSPAGRLYHYASLGTRIKPRSIFFSEANVGMAYTL

SEQ ID NO: 47781 - protein, 88 aa, Zea Mays
MRAEGRGEGGQAHHGQGGEHRGCLRGEDAVGAGPSHWLLPPGGWRQGGGRGGASRQAAHQEDRQLNQSSCRAVRLRLFSASSSLGPRA

SEQ ID NO: 47782 - protein, 468 aa, Zea Mays
MASSSSLFSPCALTAKLGIGHASYGSGRRANLRRRGRLSVVAVQTGPQKPSPSSSQAAAAEDEADALQKLLKREYKYGFVSDFESFSIPKGLSEATVRRISELKAEPAWMLDFRLAAYRRFLTMVEPTWSDNEYAPVDLQSICYYSAPKTKPKLNSLDEVDPELLKTFDRLGIPLTEQKRLSNVAVDAVIDSTSIATTHREALMAKGVIFCSISEAIREYPDLIRRYLGSVVPPGDNYYAALNSAVFSDGSFCFVPKDTVCPMEISTYFRINDKETGQFERTLIVADERSTVSYLEGCTAPAYDSNQLHAAVVELVCEEGAEIKYSTVQNWYSGDEEGKGGIYNFVTKRGRCKGHGSKISWTQVETGSAITWKYPSVELIGDDSVGEFYSVALTKDCQQADTGTKMIHKGKNSRSRIISKGISAGKSRNCYRGLVLMNPSAENAYNSSQCDSLLIGDNAAANTYPTIQ

SEQ ID NO: 47783 - protein, 832 aa, Zea Mays
MAKSSADDAELRRACAAAVAASGARGEEVAFSIRVAKGRGIFEKLGRLAKPRVLALTVKQSSRGEANKAFLRVLKYSSGAVLEPAKLYKLKHLTKVEVISNDPSGCTFVLGFDNLRSQSVAPPQWTMRNIDDRNRLLFCILNMCKEILSYLPKVVGIDIVELALWAKENTLTIDNQVSTQDGQETSVATQTERKVTVTVENDLVSQAKEEEEDMEALLDTYVMGIGEADAFSERLKQELVALEAANVYQLLESEPLIEEVLQGLDAASATVDDMDEWLRIFNLKLRHMREDIASIESRNNGLEMQSVNNKGLMEELDKLLERLRIPQEFAASLTGGSFEESRMLKNVEACEWLTGAIRSLEVPNLDPCYVNMRAVREKKAELEKLKTTFVRRASEFLRNYFSSLVDFMISDKSYFSQRGQLKRPDHADLRYKCRTYARLLQHLKSLDKSCLGPLRKAYCHSLNLLLRREAREFANELRASTKAPKNPAVWLEGSGGSGHNGSSSDTSQVSDAYSKMLTIFIPLLVDESSFFAHFMCFEVPALVPAGSPNANKSKSGGNDPDDDLGLMDPDGNDLKPDSTSAELGTLNEALQELLDGIQEDFYAVVDWAYKIDPLRCISMHGITERYLSGQKADAAGFVRKLLDDLESRISVQFSRFIDEACHQIERNERNVRQTGILAYIPRFAVLASRMEQYIQGQSRDLIDKAYTKLVSTMFATLEKIAQSDPKTADIVLIENYAAFQNSLYDLANVVPTLAKFYHQASESYELACTRHISSLIYLQFERLFQFNRKVDELTYTIAAEEIPFQLGLSKTDLRRVLKSSLSGRLVHPTVSP

SEQ ID NO: 47784 - protein, 398 aa, Zea Mays
MMATEPLSPGNLVEDVETLPLDSSSTLAATTDPLLRPPPPSSTFSPTAGENHGAFLDEEDEDVVDDFTPPLAPHAATAATKSREASPWFAEITVSEPRKHAEPATGAVGVIPGSASYVSYLIATQVPDGGEFRVRRRFRDVVALADRLAETHRGLFVPARPDKSIVEGQVMQRHDFVNQRCVTLQRYLRRLAAHPVVGRNPILHAFLTEPSGIPTSDGESPRWSPAMSAATSMAASAPVTPTKSGRDFFGVFKGLKQTVTNGWVAVRPPLVEEEIDTKYLVHKAKLEDLEKHLVTASQQAEAFVKAFDDLRSTTGLLGMSFIKLAMFEKEQAACSSQKRRAADISNFASAVIRVSRSQTKLNTEIVKHLIYISCIPGQENLNLYQREEWIRRDQGIKR

SEQ ID NO: 47785 - protein, 399 aa, Zea Mays
MMATEPLSPGNLVEDVETLPLDSSSTLAATTDPLLRPPPPSSTFSPTAGENHGAFLDEEDEDVVDDFTPPLAPHAATAATKSREASPWFAEITVSEPRKHAEPATGAVGVIPGSASYVSYLIATQVPDGGEFRVRRRFRDVVALADRLAETHRGLFVPARPDKSIVEGQVMQRHDFVNQRCVTLQRYLRRLAAHPVVGRNPILHAFLTEPSGIPTSDGESPRWSPAMSAATSMAASAPVTPTKSGRDFFGVFKGLKQTVTNGWVAVRPPLVEEEIDTKYLVHKAKLEDLEKHLVTASQQAEAFVKAFDDLRSTTGLLGMSFIKLAMFEKEQAACSSQKRRAADISNFASAVIRVSRSQTKLNTEIVKHLQIYISCIPGQENLNLYQREEWIRRDQGIKR

SEQ ID NO: 47786 - protein, 256 aa, Zea Mays
MRAPAPAAPIPALLSRCSSPPSSAPRRLLSSSRTPAACCPPPAVVRSVSVDLLAVAGEPAVAGAPSATPCRRLILLRHGDSATGGRFTRDHDRPLSKAGRADAISVSNKLQQMGWVPELILCSDAMRTKETLKILQEHVHGLSEAVVHFIPSFYSIAAMDGQTAEHLQKAICEYSSDEILTVMCMGHNKGWEEAASMFSGDSVLLETCNAALLEAAGKSWVEAFFVAGLGGWKLHGIWFLHATEAFGLKVSTWLDR

SEQ ID NO: 47787 - protein, 441 aa, Zea Mays
MPLDPDSSSPPPPHRDWFFPPAPPFLASSRSRTPSAPFPSTYRSSKPYSAYPLADRRPPPTPRSRSRSPHPPPEQQQKTPTPPTPTSAPRRRDPRYAGVRREDARTAASEQAAAPMAAPVHGRKPAASAIAPRWSGVLSVAVILLCLASLLRRNFSLHDQVYLLQEQLAVATAKLQSCTVDSSLNTSIINLFYQDAANSTTQSRSLKNLSLLISLSVLYAPLLILKYVDLVSKIRRSRDSEQVPINKRFAYRVDIFLSLHPYAKPLVLLVATLLLIALGGLALYGVTDDSLSDCLWLSWTFVADSGNHANAVGLGPKLVSVSISIGGMLVFAMMLGLVTDSISEKFDSLRKGRSEVIEQSHTLILGWSDKLGSLLNQIAIANESLRGGTIVVMAERDKEEMEADIAKMEFDMKGTAVICRSGSPLILADLKKFQRRGQLLF

SEQ ID NO: 47788 - protein, 138 aa, Zea Mays
MASPDDEISRLFRIRRTVYEMLRDRGYGVRDEQIKLERHKFIERYGNPVRRDELTFNATKLNGPSDQELRREDEERERLRRHTRRAAGAQRLRTQRRSGGLPEVPPRGLPAAPDSDYRPDSKILWDEAWAGREDHKSQ

SEQ ID NO: 47789 - protein, 437 aa, Zea Mays
MVLEHAKVVQKSVYEHLHVIHEGHLRIIFTPELKIISWEFCSRRHEEYTTRKTIAPQVNNLLQVVQKYQAVVTESGSAGISNNDAQTICNMFVTASQQLAKNLEHHTLNEHGLSKRYVRSLQISEVVNHMKDLIEFSHKNGLGPKESLNSYSKTMAKFQNMHDSRQLMAAANLANNQSNTKLMGTKEEASASATNQTPGVGAIGNNALQHATPLNSYQNMLRSSSANPVLLQQEASSVFKGPTAMHSGIQLEAARSFRGPNQVQFQHPAAIQQQQPMPQQSNFQGFGGVNPQYQHHVLNQLLQEVKNNNHVKAQQLPPDAPKASGGLAPGVAIPNVAAAGEQGQHINSNTRDHNGAVKGAAPAGTGPSNVINNTASMPPGRNNSFKSVSSSPAAATGGIAVNSKVDDSFHQLEDLDLDGLITNELMESGLFGAGQGW

SEQ ID NO: 47790 - protein, 775 aa, Zea Mays
MNGTHPWTSMSGGACSNLGYARDMNGNVPISTTNSSGPSIGVSSLVTDANSSLSGGAQLQPSTSMNGDSLMRVPASPMSFSSNNISGSSVIDGSIMQQSPPQEQMQKRRSSSVTSQHVIDAGGALHAQKKSRTDVSQGDIMQHQLIQHLIHGQNSLHFQGQQNPQLQAFIQQHKLAQLQQRQQQHLLQPFSQMQQPQVGIPRQPQLRPPLAQTGMQLGGPVRTPIERGVCSRRILQYLFHKRHRPENNSITYWRKIVEEYFAPRARERWCVSSYENRGNSSAAAPQKALDTWRCGICNTHAGKGYEATYEILPRLCQIRFDHGVIDEYLYFDSPNEFGLPNGQMVLEHAKVVQKSVYEHLHVIHEGHLRIIFTPELKIISWEFCSRRHEEYTTRKTIAPQVNNLLQVVQKYQAVVTESGSAGISNNDAQTICNMFVTASQQLAKNLEHHTLNEHGLSKRYISEVVNHMKDLIEFSHKNGLGPKESLNSYSKTMAKFQNMHDSRQLMAAANLANNQSNTKLMGTKEEASASATNQTPGVGAIGNNALQHATPLNSYQNMLRSSSANPVLLQQEASSVFKGPTAMHSGIQLEAARSFRGPNQVQFQHPAAIQQQQPMPQQSNFQGFGGVNPQYQHHVLNQLLQEVKNNNHVKAQQLPPDAPKASGGLAPGVAIPNVAAAGEQGQHINSNTRDHNGAVKGAAPAGTGPSNVINNTASMPPGRNNSFKSVSSSPAAATGGIAVNSKVDDSFHQLEDLDLDGLITNELMESGLFGAGQGW

SEQ ID NO: 47791 - protein, 657 aa, Zea Mays
MASVLVDYAQSKSVGPKSDNVAEFQIFPGEGIYGEIDGEGVYIGNKRILSRASCETVPDMKDMKGVTVGYVACKGQLIGVFTLSDSCRTGSDEAIRELRSLGIKSVMLTGDSSAAASYAQNQLGNILDEVHSELLPEDKVRIVDELKAKHGPTLMIGDGMNDAPALAKADVGVSMGVSGSAVAMETSHITLMSNDIRRIPMAVQLARRTHRTIVVNIVFSVITKLAIVGLALAGHPLIWAAVLADVGTCMLVIMYSMLLLRSESNGGRKVKKCCASSQHGSHSHARKKHCVSHHCSDGPCNKSTAGCSKESPSAGKHACSDHGHAHTHCKEPSNHRPERHACHDHGHSHNHCKEPSSHVVTEKHVCHDHGNTHSHCEEAGNQLLLVESHGCNDHGHGHSHDRCKELSSPRFTSKHECHDHEHSHCKEPKTPCADSEAACHGHGHGHEHRHCEGDSHSHATGEHGCHEHDAHSHCEEHGHSDTAVEHACEHECHGEHQTVHAVETHHCHDHDHEHGQHELGEIEEPEKDCHDHSHHCCHEPHGKDKVAAEPVEEVTISIAALPKDEGHHHSEEQHNGEHCRKAKDCGGGGGAAPTDCAASKNCCGVKGGDACSSVQAARARETGPCCRSYVKCPRTAAASRSSCCGHSMLKLPEIVVE

SEQ ID NO: 47792 - protein, 995 aa, Zea Mays
MAEPVRPPLRAPPRRLALRAPLASPQVVRAGGGGRRPAADRPQELRGRAEAHPRRQHTHAHRSFRGDSSQGLLRGWVHRVPVHYGRMAGDQGEPQGDCWDVVADEHGATEGCRSRDGGGGGGSGRQGGHGASRQSRGGRAHRRRGRGRAERGRREHPHRGVLPGRQAAGVPGYIAVRTTAMADNSAVAKMARMVEEAQNSRSRTQRLIDTCAKYYTPAVVVMAAGVAVVPVVVRAHNLKHWFQLALVLLVSACPCALVLSTPVATFCALLTAARTGLLIKGGDVLETLARIKIAAFDKTGTITRGEFSVEEFQAVGERVTTPQLLYWVSSIESRSSHPMASVLVDYAQSKSVGPKSDNVAEFQIFPGEGIYGEIDGEGVYIGNKRILSRASCETVPDMKDMKGVTVGYVACKGQLIGVFTLSDSCRTGSDEAIRELRSLGIKSVMLTGDSSAAASYAQNQLGNILDEVHSELLPEDKVRIVDELKAKHGPTLMIGDGMNDAPALAKADVGVSMGVSGSAVAMETSHITLMSNDIRRIPMAVQLARRTHRTIVVNIVFSVITKLAIVGLALAGHPLIWAAVLADVGTCMLVIMYSMLLLRSESNGGRKVKKCCASSQHGSHSHARKKHCVSHHCSDGPCNKSTAGCSKESPSAGKHACSDHGHAHTHCKEPSNHRPERHACHDHGHSHNHCKEPSSHVVTEKHVCHDHGNTHSHCEEAGNQLLLVESHGCNDHGHGHSHDRCKELSSPRFTSKHECHDHEHSHCKEPKTPCADSEAACHGHGHGHEHRHCEGDSHSHATGEHGCHEHDAHSHCEEHGHSDTAVEHACEHECHGEHQTVHAVETHHCHDHDHEHGQHELGEIEEPEKDCHDHSHHCCHEPHGKDKVAAEPVEEVTISIAALPKDEGHHHSEEQHNGEHCRKAKDCGGGGGAAPTDCAASKNCCGVKGGDACSSVQAARARETGPCCRSYVKCPRTAAASRSSCCGHSMLKLPEIVVE

SEQ ID NO: 47793 - protein, 379 aa, Zea Mays
MSARLRVAELRAELQRRGLDVSGTKPALVRRLDAAICEAEKAVVAAAPTSVANGYDVAVDGKRNGGNNKRKRSGDGGEEGNGDTCTDVTKLEGMSYRELQGLAKARGVAANGGKKDVIQRLLSATADPAAVADGGPQGEKEVIKGGDEEVEVKKEKMVTATKKGAAVLDQHIPDHIKVNYHVLQVGDEIYDATLNQTNVGDNNNKFYIIQVLESDAGGSFMVYNRWGRVGVRGQDKLHGPFPTRDQAIYEFEGKFHNKTNNHWSDRKNFKCYAKKYTWLEMDYGETEKEIEKGSITDQIKETKLETRIAQFISLICNISMMKQRMVEIGYNAEKLPLGKLRKATILKGYHVLKRISDVISKADRRHLEQLTGNLPIEIL

SEQ ID NO: 47794 - protein, 286 aa, Zea Mays
MAPRSRAPSRRPLWFIVLVAFVCVVAIGAYLYTPQHYTACYLVPSEACNSRPPPEPARVYTDDEIAARVIMRDIIRARPVQSKNTKIAFMFLTPSLLPFEKLWEKFFMGHEDRYTIYVHASRDIPSHSSPIFAGRDIRSEKVIWGTISMLDAEKRLLAHALQDPENQHFVLLSESCVPLHNFDYIYSYLMETNVSFVDCFDDPGPHGAGRYSEHMLPEIVKKDWRKGAQWFTVKRQHAILILADTLYYGKFKRYCKETNGITAIQTSTTCQPSLTWLIRLESRTGR

SEQ ID NO: 47795 - protein, 119 aa, Zea Mays
MQVAVRPLAPSAVGGGGGRGGGAARDAGGDAEAAGGAGRAAGGAGRAQDAAANATSSSGSVPGPSHDDNWAGIISRRAARVFSDIRGVLDAWTRHPHHLHQRHVQPVHKTLRGRRRSTA

SEQ ID NO: 47796 - protein, 353 aa, Zea Mays
MSERPGYALEKQVAETATGPNSTEIAGVVRGCVKTVVSAGTTTTQQANKDDPIYTKVGYILGLRVSPSHRRKGVGKKLVDRMEEWFRQRGAEYSYMATEQDNEASVRLFTGRCGYAKFRTPSVLVHPVFRHALRPSRSAAIVALEPREAELLYRWHFAGVEFFPADIGAVLSNALSLGTFLALPSSPARWEGAEAFVAAPPASWAVLSVWNCMDAFRLEVRGAPRLMRAAAGATRLVDRAAPWLGIPSIPNLFAPFGLYFLYGLGGAGPDAPRLARALCRSAHNMARDGGCGVVATEVGACEPVRAGVPHWARLGAEDLWCIKRLADGYGSGPLGDWTKAPARRSIFIDPREF

SEQ ID NO: 47797 - protein, 247 aa, Zea Mays
MSWLNKIFKGSVNRVSRGHYDGDWHEGHSSDHTRDTYDDSDNEDIDRAIALSLAEEDHNKGKSVAIDTDYNLEEDEQLARALQESLNAESPPRQNVPIEDVPVPQWNIPVERVPPRQYVPANEPTPHVYPRGGSRICAGCQNPIGHGRFLSCMDSVWHPQCFRCFACNKPISDLLCMMISHTTNPATKSFFIRNAMFATTLFQQIEMASLNTEHILSGCRSTVLPMKMMALLGAAVVNEWSQGRSST

SEQ ID NO: 47798 - protein, 374 aa, Zea Mays
MSWLNKIFKGSVNRVSRGHYDGDWHEGHSSDHTRDTYDDSDNEDIDRAIALSLAEEDHNKGKSVAIDTDYNLEEDEQLARALQESLNAESPPRQNVPIEDVPVPQWNIPVERVPPRQYVPANEPTPHVYPRGGSRICAGCQNPIGHGRFLSCMDSVWHPQCFRCFACNKPISEYEFAMHDDQPYHKSCYKEFFHPKCDVCNNFIPTNRDGLIEYRAHPFWMQKYCPSHEDDGTPRCCSCERMEPREIKYITLDDGRKLCLECLNSAVMDSPECQHLYMDIQEFFEGLNMKVEQQIPLLLVERQALNEALEAEKNGHHLPETRGLCLSEEQVVRTILKRPQIGPGNRILDMIIGPYKLSRRCEVTAILILYGLPR

SEQ ID NO: 47799 - protein, 922 aa, Zea Mays
MQSPLSSEGLRSPPISCKRHAESMSSPKPRIVKAGTLGKQDVISRANSFKKSNKGGLSSVDNIPVRTTQAVKSSDSQTLSRSYSLGNMVNAKAPVPSPRGFLSKQLSFNSTNNGPKVKQLADGVSSKLRPAEHSPRDPRDKKSIKKIVQSGSFKHEGSDSIVAGSSKKKQTFHLSQDEKPGVLKVIKENNLTERRASFSLKKRNIPSSPRPDSCMKSGERKNDQDISRSGTSILKSSKKPGYAEKKQNNDLSRSDNGKEDVTVHPKTMEVSGKDAYVVKTSDPPVQPQCAKKDRPNDVEDDDLLISVNNVNIAPNEHAEVVPTTFAAMTYESDLQDVPRESTSDDSAPKVVCCQQKLLENTGDDSGKIVEVVQDSGDILSVTPHGLQMAHNLYPPDNKLHKPDLKKEAFADQSSALGNCLKDFVIPEQSYIWQGGFEVSGHGNSPEMFDGFQAYLSTCASSKVREVGEQLPDKIQLAEVPRHSSWPLQFNEVNPTEDNIALFFFAKDVESYERAYGKLLDNMLLGDLSLKANIGGTELLIFPSDKLPERIQRWNGLPFFWGIFYARKASSPLELPTNNCPLEQINEPVIQHDIGSPKAHQPLGIDLNECPNDYISDLSLSLGSESEKSGASLDRNIVLESKREDRSLNASEIHHEETAGTRQIIPGHPSVASCGTNLPTISTGGHDMIQDYLAAAKGSTGTPGGNKMEKTDQNETLFRFSQQLGATRSISHEIELNKHGLLPSHCHLSGSKICDDQTKSTPNSDMGPLDFDITNKRQKTYGKHSCIFGDAMTPMKCLSKIHPLPAGQDNPCDVLQHCHRGPSDPASLKKPLPDHFIHVLSSDDEDSPEPSTSLNKASSKADEGSSILCSLSLSMVATKRNLSGSDIVDDEPLSLSLGLPSVVGGRADQEMKQFLPEKPGINT

SEQ ID NO: 47800 - protein, 118 aa, Zea Mays
MEVTQLEDDEIVNKKKSELKRQGADAFSKEDYLNASVFYTQALKVDQFDATLFSNRSLCWLRLGDGKKALLDAIECKHLRPNWGKAYYRQGAALMSLEVQQQKITLQIKNLCCSSSAT

SEQ ID NO: 47801 - protein, 282 aa, Zea Mays
MAFIIQYLSHHLGNVTQHLGQTSARLNSMFQNNSLIQCNPGDYLSEETILLNHAGPMVFAEKMVLAVFGGLIVLWMTRNLTADIPGWGALFHNNVGDGTVTIMMATLLFIIPSRKNKGEKLMDWDKCRKLQWDIILLLGAGFAIAEGFRSSGLTDILSDGLRFLKGAETVVIVPVACIVSGVVTEFTSDDATTTLLLPLFAELAKAIDVHPALLMVSGAVGAQLSYLLPTGSPSNVIGFSTGHITIKDLVTTGLPLKLVGIAALTVLMPTLGSQVFGTNSKF

SEQ ID NO: 47802 - protein, 365 aa, Zea Mays
MGSSPSKATGEDALVLCKDRMRHIRQAIDSRDALSAAHLSYTQSLRSVGTALRQYAESEISPESSLSISEVDKSPSHSSMASPSPSRAVESVASLGHRASPSITPPSTRIHCMKAAATTPLTFVIDQSTAEFVGRESPVSAFVPPPPPLPPELCTTWDFFDPIDAAGTSSSNNENEVTLNFSRLRDLRESRVAEVVPLKEVEEEIMSRRHTEISDDNTPPEQEREPKQGGTGKPSQLVDTSTKATSEQVAAKLEESEMEKELCAEAEDPSEFITHRAKDFVSSMKDIETRFMRAAEAGNEVSRMLETKKIRLDICAKIPGSPVKLPSARFVSALRVCCNRDVILNQACFKGCHMEAFCLISFIII

SEQ ID NO: 47803 - protein, 656 aa, Zea Mays
MCFFVGNDFLPHMPTLEIREGAINLLMSIYRSEFTSMGGYLTDVGEVILDRVEHFIQSVAVNEEQIFQKRARIQQARENNEEKHKMQRENSEEDQYVDKVKLGEPGYRERYYADKFKEEAESKPIVQVRRDVVQKYVEGLCWVMRYYYQGVCSWQWFYPYHYAPFASDLKGLAELEITFFLGQPFKPFDQLMGTLPAASSNALPKYYGDLMSDPDSPLKSFYPKDFEIDMNGKRFAWQGVAKLPFIDERRLLAETRKLEDTLTEEEKFRNRTMLDIIYVRDTHPLITQIIFLYQNYYHLSRTDPYVIPIEPAASGGMNGFLCLSERNWYSVTVTSPVKGFNGIAQNRVLNAAYLNPQYHKHIPEPPAGVIIPAKILKPSDFKPFPVLWHQDNSRRQVRERPQVSGALSGSLLGEAAHRLVKNSLQIRSGNAAGLLYMPYRGAPYGPGNRPRPAGPLGYERGFVDNPYHAHMSRSVPNPHAQFFGDSQANRQPMRILERPDSRSHDAGIRASMSKLTIQEGPRPHQNNRMQNSGYWPNQPHPTHFTGPPAQRPMQNISFTPQRPFQTGGFPQQRPVNGAPPPLPPSNWIGKQPSGCHMSVSPAKLDPRTAPDRQPKQDNPRSQQDKRQQATKVYRVKTQATNVNGLSEPGKQEEPEG

SEQ ID NO: 47804 - protein, 218 aa, Zea Mays
MCPGHKDAIFILYAHTSPEKKLKGSLIGAASLNLACVGTRRPLVTGLGLCSGASKMQGVLSRVRRPFTPTQWMELEHQALIYKHFAVNAPVPSSLLLPIKRSLNPWSSLGSSSLGWAPFRSGSADAEPGRCRRTDGKKWRCSRDAVGDQKYCERHIKRGCHRSRKHVEGRKATPTTADPTMAVSGGSLLHSHAVAWQQQGKSSAANVTDPFSLGSNRI

SEQ ID NO: 47805 - protein, 363 aa, Zea Mays
MEGGRDVFLGAAARAPPPPPSCPFHGSATATRSGGAQMLSFSSNGVAGASKMQGVLSRVRRPFTPTQWMELEHQALIYKHFAVNAPVPSSLLLPIKRSLNPWSSLGSSSLGWAPFRSGSADAEPGRCRRTDGKKWRCSRDAVGDQKYCERHIKRGCHRSRKHVEGRKATPTTADPTMAVSGGSLLHSHAVAWQQQGKSSAANVTDPFSLGSNRNLLDKQNLGDQFSVSTSMDSFDFSSSHSSPNQAKVAFSPVAMQHEHDQLYLVHGAGSSAENVNKSQDGQLLVSRETIDDGPLGEVFKGKSCQSASADILTDHWTSTRDLRPPTGVLQMSSSNTVPAENHTSNSSYLMARMANSQTVPTLH

SEQ ID NO: 47806 - protein, 140 aa, Zea Mays
MAAGLSFPRAGAPFILLRTSCFSPWAALVPRRRLLSGPPTAGDPPPPALPPTSKLAAPPVVGTPEPPLPFRAVEAEILRDIDPVVLLIKDILHSDRYGDGECLCPRDENVVVEKLLSYHPRAQDKIGCGLDAIMTTSTSL

SEQ ID NO: 47807 - protein, 348 aa, Zea Mays
MLKDMVLKLSGTHHRQHGAQHRRGGSPPPPRGRATSLYRSGYYRPGVVQDDMAVPPATYLGGGGAGASSASSTPAWDLPAAARADGEACREWVAQVEPGVQITFVSLPGGAGNDLKRIRFSREMYDKWQAQKWWGDNNERIMELYNVRRFSRQVLPTPPRSDDAERESFYSQSQVGSPSATPSPAPLTPERISWGAFARQVAAPPASSGATGAARQHSFRPMSPPPPSSSNPSERAWQQQQQRHIGGGGGGGAAGGKSPAASEAAAAATEAARTTTSSRDDVSVSNASELEVSEWIIQDQPGVYITVRELADGSRELRRVRFSRERFAELNAKLWWEENKERIQAQYL

SEQ ID NO: 47808 - protein, 387 aa, Zea Mays
MALHHLRLAPLALLRAASLPPLASSRIAARGHRRVLLFAPPSWPWRLLSPGARPRALATAAAEADDATSGSGNEFFAESTSWASLGVSERLASALCSAGLSRPSLVQATCIPHVLMANDVIVAAETGSGKTHGYLVPLIEKLCSKSSTTKDDNCQDTTPGAHDMVLVLCPNVMLCEQVVRMANSLLDESGKPLKRAAAVCGPNGWPAVHPDILVATPAALLNYLFDYDPEKRRRERFMRNVKFVVFDEADMLLCGSFENQVIRLINMLRFDEKLLSRAQDSGKDISLGSDDEYHEDSKFETAEFGSSDKEIEDNIVEDRLVKLENSHVGAHKDWRRVRKIYRRSKQYVFVAATLPQSGKKTAGGVLQRMFPDAVWVSGTYLHRHNPS

SEQ ID NO: 47809 - protein, 662 aa, Zea Mays
MPMPPPPRKDFPAFPFAPYPIQSEFMSFLYAALSSGPGALALLESPTGTGKTLSIICSALQWLLDHREAAVVAATALAHPSGASGSGGDDDEPDWLRDFKPAAAVKESTKKKAKPPAMRKTLVSRKPDGFGEEDGGDDEGEFLLEEYESDSEDVARRGVGKRAHCGSSSSSSSEDDDEMTPKVFFTSRTHSQLSQFVGELKRTEFAGRIRTVCLGSRKNLCINKDVLKMGSGNRINERCLELQKNKKSTKIKVCGYANKLSSIQNQFDLQLHDEGSSIACFQALVDFLRSLLNSNDDGRIIVAKQKLGGQPDEAYLKFVMLCAEKIFSEVTQDAYAVILAGGTLQPIEETRLRLCPSLPPTDIKFFTCNHIVPPESILPIAVTRGPSGKAFDFSYNSRSSPSMIEELGRFICNIITVVPEGVVMFFSSYDYERRVYDAWMTTGTISRISKKKHVFREPRNSADVEAVLNKYKEAIESCSNFSQDTGVNGALLLAVVGGKISEGINFSNGMGRCVIMVGLPYPSPSDVELIETIKHIESISSSFSVGDDKALSRKYDDECELQPGYDILRKCTRGGREYYENLCMKAVNQSIGRAIRHINDYAAMLLVDSRYAQTSSTKSFSCPADKLPQWIKARLSCAQNYGEVHRSLHQFFKFNKKNVEIL

SEQ ID NO: 47810 - protein, 212 aa, Zea Mays
MDVMFGGTETVASAIEWAMAEMMHSPDDLRRVQQELADVVGLDRNVSESDLDRLPFLRCVIKETLRLHPPIPLLLHETADDCVVAGYSVPRGSRVMVNVWAIGRHRASWKDADAFRPSRFAAPEGEAAGLDFKGGCFEFLPFGSGRRSCPGMALGLYALELAVAQLAHAFNWSLPDGMKPSEMDMGDIFGLTAPRATRLYAVPTPRLNCPLY

SEQ ID NO: 47811 - protein, 209 aa, Zea Mays
MFGGTETVASAIEWAMAEMMHSPDDLRRVQQELADVVGLDRNVSESDLDRLPFLRCVIKETLRLHPPIPLLLHETADDCVVAGYSVPRGSRVMVNVWAIGRHRASWKDADAFRPSRFAAPEGEAAGLDFKGGCFEFLPFGSGRRSCPGMALGLYALELAVAQLAHAFNWSLPDGMKPSEMDMGDIFGLTAPRATRLYAVPTPRLNCPLY

SEQ ID NO: 47812 - protein, 1090 aa, Zea Mays
MAWGEDEAIGPDVASAGLHVSERIGRDAAAQPDLEEALEASRYASHPYSSHPKEWPPLVEVAETRQLPPMLIERYNTAAGEGTALCGIFSDIHRAWATVDNSFFIWRFDKWDGHCQEHNVDEQAICAVGLARAKPGIFIEAIQYLLVLATPVELILVGVCCSASADGTDPYAELSLQPLPEYMIATDGVTMTCITCTDKGQIFVAGRDGHIYELQYTTGSGWRKRCRKVCLTTGIGSLLSRWVLPNAFKFSTVDPIVDMVMDEERNTIYARTEGMKLQLFDLGVNGDGPLTKITEEKNIVDPRDGPYGGRRSNAPRAARSPRPSIVCISPVSSVESKWLHAVAVLSDGKRLFLTTSGGSGSSVGLNSGLQRPTCLKIVATRPSPPLGVGGGLTFGAVSVAGRALPEDLALKVESAFYSAGALVMSDSSATAMSSLLAVQKDSAAQLSLPSTFGTASRTSRALRETVSALPVEGRMLCASDVLPLPDAAYMMQSLYADVECFTCFRKPSEKACIKLWAKGDLPTQHILPRRRVVVFNTMGLMELIFNRPVDILRKLFDGNTLRSQIEEFFNRFGAGEAAAMCLMLAAKLLYAEDSLISNAVSEKAAEAFEDPGLVGMPQINGTTALSNTRTQAGGFSMGQVVQEAEPLFSGAYEGLCLCSSRLLYPIWELPIMSIRGPSGNNKREDGVIVCRLSAGAMKILESKIHSLETFLRSRRNKRRGLYGYVAGLGDSGSILYKTGPIIGPGGHSNGRSPYNSQIRDMNPVDKSASNKKPRLLYTSAELAAMEVRAMECLRRLLRRSGEALFLLQLICQHNVARLAQTLGNDLCKKFVQLTFHQLVCSEDGDQLAMRLISALMEYYIGPEGRGTVEEISTKLREGCPSYFNESDYKYYLAVECLERASMTNNADERDILARDAFNLLTKIPDSADLSAICKRFENLRFYEAVVRLPLQKAQALDSNADIINGQIDPRHHDTIMLQREQCYRIVMDALCTLKGVGHSRMQSADKSSALATAADPASRSKYIKQIIQLSVQWPDTVFHEHLYRTLIELGLENELLEYGGSDLVSFLQSAGRKHQEEFLQLHLELLRCMI

SEQ ID NO: 47813 - protein, 134 aa, Zea Mays
MRAVVQRVLSASVEVEGRIVSAIGPGLLVLVGVHEADTDSDADYICRKVLNMRLFSNDKTGKAWDQSVMQRNFEVLLVSQFTLYGILKGNKPDFHVAMSPAKAKPFYASLVEKFQRSYSADSVKDGVFGAMMKV

SEQ ID NO: 47814 - protein, 65 aa, Zea Mays
MDEGATTSDSSAAETFDPDLIHAIFKLVWRRRAGKGAGGGGSIEDIDAEPMRLLLKSAANFYGYL

SEQ ID NO: 47815 - protein, 251 aa, Zea Mays
MQVERIYVFSFPCSQHYPRFDMKEPKIAAEIAKELRKFHQVDIPGSKEPQLWNDIFKFLKKAAALKFEDNMKQKRYEKISFREIQDEVQELKDLLDILRAPVVYAHNDLLSGNLMLNDLEGKLYFIDFEYGSYSYRGYDIANHFNEYAGFDCDYNLYPDKDAQYHFFRNYLHTDRPSEVDAQDMEVLYVETNTFRLASHIYWALWALIQAKVSPIDFDYLGYFFLRYGEYKKQRESCFSLAQSFLSELKNG

SEQ ID NO: 47816 - protein, 251 aa, Zea Mays
MPLVISDSAESIEKTSQALKILKQIGAHADAEKAKDSVGIRPGKGKMRNRRYINRKGPLIVYGTEGSKVVKAFRNLPGVDVANVERLNLLDLAPGGHLGRFVIWTQSAFNKLEEVYGSYDAPSQKKKGFVLPRPKMSNADLGRIINSDEVQSVVKPLNKEVKRREKRKNPLKNMAAVLKLNPYLGTARKMATLAEAARVKARKAKLDSKRTKLTPETAKVKAAGKAWYKTMVSDSDYTEFENFSKWLGVTQ

SEQ ID NO: 47817 - protein, 469 aa, Zea Mays
MVVRISFLRSARLQSQLVPSGVKETPIVDQNKRPASSDMLDIVECKRLKQEGQKDFHEYPTYTTCRRSFDSPLSESEDSEDEGVDSPLHFSHAHTYVEDDLWPASFHHALGPFPLRKPVPIGPNHQAELPECRPFCGRTEEGESVKWIRNGVVPMPDTGASSLVLEPVHCKADCECHDEGSIICVKKHVREAREKLKGSVGADTFRELGLNDMGEEVGSRWTEEEEHLFQQVVLSNPASLCRNFWDELPLAFPSKSSKELVSYYFNVFMLRKRAEQNRFDPVNIDSDDDEWQAGDDGEYPITGRTDEYLPTESLTDQDDVACNPVPLERDLYEDSDDEDELDNASGDRHNGAQRAGMLSEGNRVMSVIEHNQQTFKLDAEAQDDSCTSFEAHQVGVEGGTHTDIADDNHYRSDGFGGGAEHGFFGNQCDTKEWDFGLSIGWEKHDFLSTNNVIEEVFGKCCDTADQDLI

SEQ ID NO: 47818 - protein, 480 aa, Zea Mays
MVVRISFLRSARLQSQLVPSGVKETPIVDQNKRPASSDMLDIVECKRLKQEGQIVTKEDNHTSAEDFHEYPTYTTCRRSFDSPLSESEDSEDEGVDSPLHFSHAHTYVEDDLWPASFHHALGPFPLRKPVPIGPNHQAELPECRPFCGRTEEGESVKWIRNGVVPMPDTGASSLVLEPVHCKADCECHDEGSIICVKKHVREAREKLKGSVGADTFRELGLNDMGEEVGSRWTEEEEHLFQQVVLSNPASLCRNFWDELPLAFPSKSSKELVSYYFNVFMLRKRAEQNRFDPVNIDSDDDEWQAGDDGEYPITGRTDEYLPTESLTDQDDVACNPVPLERDLYEDSDDEDELDNASGDRHNGAQRAGMLSEGNRVMSVIEHNQQTFKLDAEAQDDSCTSFEAHQVGVEGGTHTDIADDNHYRSDGFGGGAEHGFFGNQCDTKEWDFGLSIGWEKHDFLSTNNVIEEVFGKCCDTADQDLI

SEQ ID NO: 47819 - protein, 501 aa, Zea Mays
MRGADNGRPNFLPEKCQIAVCQRGEKVSLFDEGLIHGVDLTNHIAQSQLVPSGVKETPIVDQNKRPASSDMLDIVECKRLKQEGQKDFHEYPTYTTCRRSFDSPLSESEDSEDEGVDSPLHFSHAHTYVEDDLWPASFHHALGPFPLRKPVPIGPNHQAELPECRPFCGRTEEGESVKWIRNGVVPMPDTGASSLVLEPVHCKADCECHDEGSIICVKKHVREAREKLKGSVGADTFRELGLNDMGEEVGSRWTEEEEHLFQQVVLSNPASLCRNFWDELPLAFPSKSSKELVSYYFNVFMLRKRAEQNRFDPVNIDSDDDEWQAGDDGEYPITGRTDEYLPTESLTDQDDVACNPVPLERDLYEDSDDEDELDNASGDRHNGAQRAGMLSEGNRVMSVIEHNQQTFKLDAEAQDDSCTSFEAHQVGVEGGTHTDIADDNHYRSDGFGGGAEHGFFGNQCDTKEWDFGLSIGWEKHDFLSTNNVIEEVFGKCCDTADQDLI

SEQ ID NO: 47820 - protein, 523 aa, Zea Mays
MLHQENSEPFVRHHSEQLACGNMRGADNGRPNFLPEKCQIAVCQRGEKVSLFDEGLIHGVDLTNHIAQSQLVPSGVKETPIVDQNKRPASSDMLDIVECKRLKQEGQKDFHEYPTYTTCRRSFDSPLSESEDSEDEGVDSPLHFSHAHTYVEDDLWPASFHHALGPFPLRKPVPIGPNHQAELPECRPFCGRTEEGESVKWIRNGVVPMPDTGASSLVLEPVHCKADCECHDEGSIICVKKHVREAREKLKGSVGADTFRELGLNDMGEEVGSRWTEEEEHLFQQVVLSNPASLCRNFWDELPLAFPSKSSKELVSYYFNVFMLRKRAEQNRFDPVNIDSDDDEWQAGDDGEYPITGRTDEYLPTESLTDQDDVACNPVPLERDLYEDSDDEDELDNASGDRHNGAQRAGMLSEGNRVMSVIEHNQQTFKLDAEAQDDSCTSFEAHQVGVEGGTHTDIADDNHYRSDGFGGGAEHGFFGNQCDTKEWDFGLSIGWEKHDFLSTNNVIEEVFGKCCDTADQDLI

SEQ ID NO: 47821 - protein, 512 aa, Zea Mays
MRGADNGRPNFLPEKCQIAVCQRGEKVSLFDEGLIHGVDLTNHIAQSQLVPSGVKETPIVDQNKRPASSDMLDIVECKRLKQEGQIVTKEDNHTSAEDFHEYPTYTTCRRSFDSPLSESEDSEDEGVDSPLHFSHAHTYVEDDLWPASFHHALGPFPLRKPVPIGPNHQAELPECRPFCGRTEEGESVKWIRNGVVPMPDTGASSLVLEPVHCKADCECHDEGSIICVKKHVREAREKLKGSVGADTFRELGLNDMGEEVGSRWTEEEEHLFQQVVLSNPASLCRNFWDELPLAFPSKSSKELVSYYFNVFMLRKRAEQNRFDPVNIDSDDDEWQAGDDGEYPITGRTDEYLPTESLTDQDDVACNPVPLERDLYEDSDDEDELDNASGDRHNGAQRAGMLSEGNRVMSVIEHNQQTFKLDAEAQDDSCTSFEAHQVGVEGGTHTDIADDNHYRSDGFGGGAEHGFFGNQCDTKEWDFGLSIGWEKHDFLSTNNVIEEVFGKCCDTADQDLI

SEQ ID NO: 47822 - protein, 197 aa, Zea Mays
MCLQSRRKTREPKEENVTLGPTVREGEYVFGVAHIFASFNDTFIHITDLSGRETLVRITGGMKVKADRDESSPYAAMLAAQDVAQRCKELGITALHIKLRATGGNKTKTPGPGAQSALRALARSGMKIGRIGKERTLPRSPLTALAERAVGGEGGCRRLVCVAFAGSWPVAIMKLALSGWCCCSVFVKTSFNFALCG

SEQ ID NO: 47823 - protein, 420 aa, Zea Mays
MPCRLGVQEGSVGSITAHHNVKFHQNSTMEKDLSSPFDHTVISNANEMQCNRNADDNGLPEDSSKHTKRTGRKVGILSHCPKRLVALKVMYFGQRFYGFSSEGNIEPTVESEIFKALERAKLMVANRKESCYSRCGRTDKGVSATGQVISLYLRSNIKDVGGDMLDERSEIDYVKVLNRILPRDIRVLGWCPVPADFHARFTCLSREYKYLFWKGDLDILEMQKAASKFIGEHDFRNFCKMDAANVSNYRRHITEFTISACDRRSNNDELCSMTIKGSAFLWHQVRCMVAVLFLIGQGLESPSVVDSLLDIMKTSRKPQYKMAPELPLILQSCLFDKANFMCSADASRSLTEHLNDEYRHHMLQAEIFHIASSCLPFPEPNSSETPQKKRNHIPLLSRETEPSYEERISKVKAKLADNLK

SEQ ID NO: 47824 - protein, 782 aa, Zea Mays
MLMNFRDWISYRLGSSLLSARPFALSPGADDGASEGDAHAHNDFVDTVTANTFSSNDMRASEVTANSGSGAIYSGIVQQDDDNKKSDPLMKVEALQIKFLRLVYRTGVSPSADVVAQVLYRLQLANLIKASESDARRTNLAINKARVIAAQQEAPGGPDLDVSMQILLLGKSGVGKSATINSIFDERKVATDALVPATHRIKKIEGTIKGIRVTVIDTPGLVSHYHGQRRNMKILNSVKHFIKRSPPDIILYFERLDHINSRYSDYPLLKLMTDILGSPMWFNTVLVMTHCSSSPPEGPDGYPLEYDTYTRYCKNVVQRHIQAAVSNTQLDNPFVLIDNHPMCRRNTKGERVLPNGQVWVSELLLLCGATKLLTEANSLLKFQDSFLLSQANTRLPSLPHLLSSLLKPHSSSSSDAIDSQLTEMSDEEDEYDQLPPFRILKKSEYENLTNEQKSAYLDELDYRETLYLKKQWKEGIRRKKLTEAQSDEVGDDYDESASPEIVHMSDMDIPLSFDSDYPVHRYRHIITDDQLFRPVLDPQGWDHDIGFDAINFEASQELKKNVSAAITGQMRKDKEDMYIHSECSVSYNAQRGCSLMGGMDMQTASKDLVCTVHGDAKFHNLPWNSIGGGISVTKFGNKYFAGAKLEDSVTIGRRVKLVANAGRMSGCGQVAHGGGVEITARGKDYPVREGSVTAAVSALSFEKETVIGANLQSDFRVGRGSKISVSANLNSRNLGNLSVRTSTSDHAEIALITVVSLIQFILRRRSAADNKDEQQIGTNLDD

SEQ ID NO: 47825 - protein, 172 aa, Zea Mays
MAAEGAPVLVRHAGGVEELRQLPPGFRFRPTDEELVVQYLRRKALGAPLPAAVIPVVRDLYSLDPWDAVDVPAAPDASSQGERYFFAVRPAGGVGSARRATASGRWRPAGKEKPVALPRPCGGGSLLVGVKRAMAFVPRRKKKKAAAAAALAIGWVMHEYRLAAPLHKHKSP

SEQ ID NO: 47826 - protein, 358 aa, Zea Mays
MIYVLVLLLITSAQDPGIVPRAAHPPEDEFSYGNALSGGTPGRLQFPRVKEVLVNGMPVKVKYCDTCMIYRPPRCSHCSICNNCVERFDHHCPWVGQCIGQRNYRYFFMFVSSSTLLCIYVFAMSALYIKFLMDEDYPTVWKAFKHSPASLGLLIYCFIALWFVGGLTGFHLYLISTNQTTYENFRYRSDSRPNIYSQGCLNNFLQVFCSKTKPSKHKFRAYAQEEVRPPTVSFGREVDEEPVGGPRPKVEDDLEIGTDLLKISQRRNYEDVDAETGGRRSRSSEVEGTASARPAVACSESQIPAVGGTDVRVRHSSWDRRSGNWDMSAVLTRSASDVIGRSSVFAADAARPSLEETR

SEQ ID NO: 47827 - protein, 237 aa, Zea Mays
MHWAALYIKFLMDEDYPTVWKAFKHSPASLGLLIYCFIALWFVGGLTGFHLYLISTNQTTYENFRYRSDSRPNIYSQGCLNNFLQVFCSKTKPSKHKFRAYAQEEVRPPTVSFGREVDEEPVGGPRPKVEDDLEIGTDLLKISQRRNYEDVDAETGGRRSRSSEVEGTASARPAVACSESQIPAVGGTDVRVRHSSWDRRSGNWDMSAVLTRSASDVIGRSSVFAADAARPSLEETR

SEQ ID NO: 47828 - protein, 504 aa, Zea Mays
MEYAFALHPRTVSVVSAASLTETDTHQRERETERRASGTSKHGGGRPSAQAASSAAYQGLSFLIPLAVCPCLHLPASSPEKIAPPPESRPRRIALFVEPSPFAYVSGYKNRFQNFIKYLREMGDEVIVVTTHEGVPQEFHGAKLIGSWSFPCPWYQKVPLSLALSPRIIAEVARFKPDIIHASSPGIMVFGALIIAKLLCVPLVMSYHTHVPIYIPRYTFSWLVKPMWLIIKFLHRAADLTLVPSVAIGRDLQAARVTAANKIRLWNKGVDSESFHPRFRNMEMRSRLTNGEPEKPLVFYVGRLGVEKSLDFLKRVMDRLPGARIAFIGDGPFRAELEQMFSGMPVVFTGTLQGEELSQAYASGDVFVMPSESETLGFVVLEAMSSGVPVVGARAGGIPDIIPEDQEGRTSFLYTPGDVDDCVGKIKRLLSSEELREAMGRAARKEMEKFDWRAATRKIRNEQYSAAIWFWRKKRAQVLRPLQWVLRLLRRTMPGAADAAAKQS

SEQ ID NO: 47829 - protein, 163 aa, Zea Mays
MLMRARSKGWRVVVFNSRGCADSPVTTPKFYSASFTGDLRQVIGHILGRYPQSNVYATGWSLGANILVRYLGEETDKCPLSGAVSLCNPFNLVIADEDFHKGFNNVYDKALARALTTIFKKHALLFEGLEGEYDIPKAANARTVRDFDEGLTRGLQQRLTQLY

SEQ ID NO: 47830 - protein, 216 aa, Zea Mays
MDNWQQINRATEEMNPIATAALTPSSFFASNRRFAPRLRSVLPAAAMSYAAVSASAPSPSSGTGEQVKAAPLPHSTLEIAGARRGLLSGFASLRAPYRAFPVLASNRHVETIFAALTRSLPAVKLRRECLRAPDDGAVALDWVSGDDRVLPNDAPVLILLPGLTGGSDDTYVRHMLMRARSKGWRVVVFNSRGCADSPVTTPKVLQIPFPILLLAL

SEQ ID NO: 47831 - protein, 697 aa, Zea Mays
MPPKKRAAAAASSKKPQPSQPSQPAKFGILHFFERQTQASQNAKRQKPDPPAPPPPPPPPPEKEPSEVSPEVTKTLAPKRVRFSPGMLIKQSQDDGVAEVVTWKISPVNHRLGTTKSKQFLGMAPHPYSSEKNSSLDAMKKWHSSPLGLSRCTTLGSNSGVLGSAIVGCDGVGDTQSPFRTPPSLSYGCNEQVSSGVTSEGGAEPSGAGQHKKALLDLLDQVEDAIMEEELPADPGNKGGQTTNEDITNNSRSPVADTDLTIPSKKTIHVPPFNSFLVLEVSEKHKADDSSCDRYPVKVLRLLNEHSGTECAVHLCDEWFDSIVGPGDTVNVIGEFSNHGKCIVDHDNNLVIVHPEQLISGTRAASSFQCLRRSVLDERLKSNEYSTSALTGTLLHQVFQAGLLNDAPSWQFLEQQAKEVLLKNIETLYACGVNESNMYSTLIEAIPKMLNWFKCFLKGSKCSDVDFGHNEVRKTVGVTEVMDIEEMAWAPRYGMKGVIDASVRSRVESHNGGSYDRIMPLEFKTGKATSGQAAMEHSAQVMLYTLLMTERYLNEDIDLGLLYYLHTDQTLGIKVKRTDLIGLIMRRNELATEILKASMSQSFPPMLQSPSTCNRCRHLISCTIYHKAHGGSGTTSGLGDLFDNLVNHLTVTHHNFLKHWDRLIDLEARASQILQEKAKDTYIILFSKRCSLKQLIS

SEQ ID NO: 47832 - protein, 1078 aa, Zea Mays
MPPKKRAAAAASSKKPQPSQPSQPAKFGILHFFERQTQASQNAKRQKPDPPAPPPPPPPPPEKEPSEVSPEVTKTLAPKRVRFSPGMLIKQSQDDGVAEVVTWKISPVNHRLGTTKSKQFLGMAPHPYSSEKNSSLDAMKKWHSSPLGLSRCTTLGSNSGVLGSAIVGCDGVGDTQSPFRTPPSLSYGCNEQVSSGVTSEGGAEPSGAGQHKKALLDLLDQVEDAIMEEELPADPGNKGGQTTNEDITNNSRSPVADTDLTIPSKKTIHVPPFNSFLVLEVSEKHKADDSSCDRYPVKVLRLLNEHSGTECAVHLCDEWFDSIVGPGDTVNVIGEFSNHGKCIVDHDNNLVIVHPEQLISGTRAASSFQCLRRSVLDERLKSNEYSTSALTGTLLHQVFQAGLLNDAPSWQFLEQQAKEVLLKNIETLYACGVNESNMYSTLIEAIPKMLNWFKCFLKGSKCSDVDFGHNEVRKTVGVTEVMDIEEMAWAPRYGMKGVIDASVRSRVESHNGGSYDRIMPLEFKTGKATSGQAAMEHSAQVMLYTLLMTERYLNEDIDLGLLYYLHTDQTLGIKVKRTDLIGLIMRRNELATEILKASMSQSFPPMLQSPSTCNRCRHLISCTIYHKAHGGSGTTSGLGDLFDNLVNHLTVTHHNFLKHWDRLIDLEARASQVKKNILQPHNSNYGSGSSAVPYFVLDIKNGHSIDSSGKSKRYIYNFVQQKMQPETADQLDAQFDSIDFSLKVGDFVVLSTQSGRIAVANGCIREIISHSHITVSLPRRLRIPDSNSLSEQEDLTREIWRIDKDEFSSSFGIMRLNIVQLFAQNPQNSHLRKLIVDLEAPRFDSGGLFSQDPALSYIRSLPNLNNDQQRSLHKILGAKDYALILGMPGTGKTYTMVHAVKSLLIRGESILLTSYTNSAIDTLLMKLKTEGVDFIRIGRPEAVHPDVRAHCLSTTEAQSVDAIKARMEQVQVVGVTCLGMYHPLLAHKKFDTCIMDEAGQITLPVSLGPLMLATKFVLVGDHYQLPPLVQSSEARENGMGISLFWRLSEAHSQAISALRCQVVLWFIGNCKCQTQVFW

SEQ ID NO: 47833 - protein, 941 aa, Zea Mays
MSLENLVTMENVLLTMTIILLLSIQSNSFPGHGFQCLRRSVLDERLKSNEYSTSALTGTLLHQVFQAGLLNDAPSWQFLEQQAKEVLLKNIETLYACGVNESNMYSTLIEAIPKMLNWFKCFLKGSKCSDVDFGHNEVRKTVGVTEVMDIEEMAWAPRYGMKGVIDASVRSRVESHNGGSYDRIMPLEFKTGKATSGQAAMEHSAQVMLYTLLMTERYLNEDIDLGLLYYLHTDQTLGIKVKRTDLIGLIMRRNELATEILKASMSQSFPPMLQSPSTCNRCRHLISCTIYHKAHGGSGTTSGLGDLFDNLVNHLTVTHHNFLKHWDRLIDLEARASQVKKNILQPHNSNYGSGSSAVPYFVLDIKNGHSIDSSGKSKRYIYNFVQQKMQPETADQLDAQFDSIDFSLKVGDFVVLSTQSGRIAVANGCIREIISHSHITVSLPRRLRIPDSNSLSEQEDLTREIWRIDKDEFSSSFGIMRLNIVQLFAQNPQNSHLRKLIVDLEAPRFDSGGLFSQDPALSYIRSLPNLNNDQQRSLHKILGAKDYALILGMPGTGKTYTMVHAVKSLLIRGESILLTSYTNSAIDTLLMKLKTEGVDFIRIGRPEAVHPDVRAHCLSTTEAQSVDAIKARMEQVQVVGVTCLGMYHPLLAHKKFDTCIMDEAGQITLPVSLGPLMLATKFVLVGDHYQLPPLVQSSEARENGMGISLFWRLSEAHSQAISALRCQYRMSSGIMELSNSLIYGNRLCCGSLEIANAKLKFSGREPMQLKLKEILNPDRAVIFANTDQIPALEAKEHRTVNNPTEAHIISWIIKELLRRGVAQDAIGIITPYNAQVNIIQQYTDCLVEVHTIDKYQGRDKECIIVSFVRSTANSRASGSSLLGDWHRINVLLTRAKKKLIMVGSRGTLSTIPLLRLLVDKVAEIGGLLDLTNKDAHSFSRT

SEQ ID NO: 47834 - protein, 427 aa, Zea Mays
MLQSADVQLREMSAFALGRLAQDTHNQAGIAYNGGLVPLFKLLDSKNGSLQHNAAFALYGVADNEDYVSDFIKVGGVQKLQDGEFIVQATKDCVAKTLKRLEEKINGRVLKHLLYLMRVGEQSVQRRVALALAHLCAPEDQRAIFIDNNGLDLLLDLLISMSPKHQQDGSAALYKLANKAAALSPMDAAPPSPTPQVYLGEQYVNSSTLSDVTFLVEGKRFYAHRIALLASSDAFRAMFDGGYREKDARDIEIPNIRWEVFELMMRFIYTGSVQINSEISQDLLRAADQYLLEGLKRLCEYTIAKDVNLDNVSDMYDLSEAFHAVSLRHTCILYILEHFNKICTRAGDPQFSNQGTEFIKKSKSKRQELADLMSPNSLAPTPSSDQSCWRSCTVKFLALSVQWYLFWVHGGAVLEINISNVTKFSKI

SEQ ID NO: 47835 - protein, 737 aa, Zea Mays
MEAEQQKQQRPRQRPRRKGQKRKLEDEASAATAAAASSLGSAGADDDNEEEDGSAGTPEICRHSHAALAREVRAQVDVLIRCASSWRHADRAAAKRATHVLAELAKNEEVVNMIVEGGAVAALVCHLEEPAVAAQTQEEQQLRPFELEVEKGAAFTLGLLAPEHQQFIVDAGALPPLVKLLKRQRSTTNSRMVNSVIKRAADAITNLAHENSNIKTRVRMEGGIPPLVELLESQDLKVQRAAAGALRTLAFKNDENKTQIVQCNALPTLILMLRSEDAAIHYEAVGVIGNLVHSSPNIKKEVLNAGALQPVIGLLSSCCTESQREAALLLGQFASADSDCKVHIVQRGAVRPLIEMLQSADVQLREMSAFALGRLAQDTHNQAGIAYNGGLVPLFKLLDSKNGSLQHNAAFALYGVADNEDYVSDFIKVGGVQKLQDGEFIVQATKDCVAKTLKRLEEKINGRVLKHLLYLMRVGEQSVQRRVALALAHLCAPEDQRAIFIDNNGLDLLLDLLISMSPKHQQDGSAALYKLANKAAALSPMDAAPPSPTPQVYLGEQYVNSSTLSDVTFLVEGKRFYAHRIALLASSDAFRAMFDGGYREKDARDIEIPNIRWEVFELMMRFIYTGSVQINSEISQDLLRAADQYLLEGLKRLCEYTIAKDVNLDNVSDMYDLSEAFHAVSLRHTCILYILEHFNKICTRAGSAQLIQRVIPEIRNFLTKALNSSRSPSPSDRNSQT

SEQ ID NO: 47836 - protein, 196 aa, Zea Mays
MANPRDAVDVSSSMSELSVEAAPSSIEVQVPKQGSPRHADTLDREWIHRQSQFQKMGYRDGVTEGQKDSAQEGFNVGFRQSVNVGYKWGLVRGVGSALASLPDSLKEKLVPDVQRRGKLQDLHRSVQEISADDAVQMFHESICQSNRPSDGSGSHVTSTSDGATESNRMKSLSKDLVLLLRECSDIKVSEELASDS

SEQ ID NO: 47837 - protein, 154 aa, Zea Mays
MAPGLLAAAAVLAAVAASLAAHVALNCPVQPVPSHRPPPTPPPNNLLQRLEKLGEGALDAPEDVYVDAAAGGALYTATRDGWLQRMMHPNNGSWERWRFVGGTGLLGVAPSADGTMLVCDADKVHRSDRILVGSVGCVVSSSTYKSTLRVRNYG

SEQ ID NO: 47838 - protein, 185 aa, Zea Mays
MNEDKASVSEKLTFAAKGVLSKVFPKPRRAWLPTGCLKLMDTLHQALPSMSLIASDFSYLPDVSIPGDRAPLVSSKKDGKTSDHRNYFDAQGDADIFFPTDFRLLEQIDHNCAGFSKEQKNPGAFKPVKKRRTIILDTAAFMEEFGMPLKTRTKDGYNPLLDDFKNTKFYLSVPTHNVPTHSRRN

SEQ ID NO: 47839 - protein, 555 aa, Zea Mays
MDYLRTVVPSQLLAERGSNLVVINPGSGNVRMGFASQDVPFNIPHCIARHINPQEGEEPRFSVRDQMLNCHATSSQNAERESAYDIIAALMKIPFLDDEEMPSPNQPLPPKMGRVDGFSSQQNRDDNKFTWTDVSERIIKPSTPFDRSVYKDAEEDTLPSTSDDDNGQDFKENKYKEMIFGEDALKIPPSESYCLSRPIRRGHFNVSHNYSVHQVLEDLRTIWNWILTEKLHINPRDRGLYSAILVLGETFDNREIKEMLSIVLHDLGFSTAVVHQEALSAAFGNGLSTTCVVNIGAQVTQVVCVEDGVALPHTALALPYGGDDISRCLLWVQRRHGTWPNFQTDPMSNPIDMLMLNKIKESYSQIKTGSIDAAVLVHSYDNERSGGHQKTRLSAINVPPMGLLYPRVLVPEEYPPPPRSWFQDYDDMLEDTWQTSDGLYPSGNGRVDLQKKLFGSIQLVGGAASTAGLAQVLEQRVRTKISANQSIEKVEVLQSRTYPLFVPWKGGVILGVLDIGKDAWIHREDWIKNGVHIGSGRKYKDSYFLQAQVMCYYNV

SEQ ID NO: 47840 - protein, 695 aa, Zea Mays
MRRFFFFGSPAANAGEGAGQPVNDSRTGHRKTDEGKDISTARLSRSRSRRQKRNKEEPANPKQLRRSMSFSSPARSSCVEERCFSFSGDVPCSLYDESDAPHHAKDVAPDMWSPEGNPFSREYAIRTPKDHSAMENDSPRSKYCSCSAGHSPVSSPVAIQCRSTRLGNLLNRNEVLDRYIDRGHGDAIVDEKQKQCVPTVSNLGRPPRPHSTVPSIPRPFKETTESYPDVDLNDAFLWRLAQEGIGDTHKITTMCSASRRHINMSDASERESATTVEDIYEDLQDVRLPNVICPSTCPNSAVEETDDMLLQRVKEVESRFTIPCGDEYEFSMLRYKSSTSNDMFQLIQQLTEDRKQLAYELSSEIKARVTERFAAKEQYKQLKKELDNRTRRLEKEKSEVQTTLEGEMDRRSDDWSIRLSRFQSEEERLHERVRELAEQNVSFQREVTSLGATKAEALMKAASLETQNSKLNDDLEKLKNEHEKLHYSSTDLQARFAEIVEERDHIREYLKAKEGENKALHKVIARLQTTCNEQERTITGMRQGCIDELGRKFVEYSTNDKTRKLQMELIRLTGVEQKLRGEIRSCNLEVKSLRQENIALLNRLQGAGNGASFSSIRLDQELQARVDNLSWQEAKQLRRNISIMQDEVVSLKKKIEALDEDILVKEGQITILQDSIDKPFDIICSPRSMREFDMA

SEQ ID NO: 47841 - protein, 110 aa, Zea Mays
MIIDNGAYPSPLGYCGYPKSVCTSVNECICHGIPDSRPLEDGDIINIDVTVYLNGYHGDTSATFLCGDVDDEAKKLVKVTRECLDKAISICSPGVEIKQIGRTIQYVISE

SEQ ID NO: 47842 - protein, 336 aa, Zea Mays
MLGANMENVDAPSVSQANELRQDVLDPSELQYDVPSVPSHAYSNTDTLQPSTIEEPQGNNQAHTLSHLSNLMALKAGVFSNAQSTQSLPSTSIQTGLPLPQQLAHHPYSQPTLPITHFPNMVGYPYLPQNYATYLSSGTFQQAYPSSGPFHQSAAAALLASGMKYSTPEYKNNLSATGLQQQHQPQPQPLSSVISGYGGFGSSSNIQGNFTLSQSTGSASALGFDEALSRQYKNTSQYMALQQGDNSGMWVHGSGSRAASTLPPNHFYGYQGQSQLGGFARAQQPQPSQFGGHGYPTVYQSQGQEHPQNLAEGSLNGFQVTPSQPSHPSWQHQHTY

SEQ ID NO: 47843 - protein, 542 aa, Zea Mays
MSGGGAGGKGAAAPVPPGSRKLVQGLKEIVNRPEAEIYAALRECGMDPDETVSRLLSQDTFQEVKSKRDKKKEIKEVPETRYRSANSSTNRGLRSGVDRGGRNNSMHSSSTDNMTSRPPGSGTASGTSSQRQTVASPSANKHMVADGPAASLQSSSGFQHGGWSGTPGQLSMADIVKMGRPQGKTSIKPVVTADRGYAGQYPSLPSTNQNLKQSGSMVPPTELDKGLQPAQDSVQVKDHDHSTADSKLPYGTDWSPQDGPTFANQSSLPEPSGDPSLYEASFQSSTLVTDVVNSHENSHLDENDTFAMGPAPASERHLDPSDGISEYNDVILNNSSSYQPHNYSYTEQQEVEDSSADVSAAAANFQSLSLHNDELAAKKSAEDNPAVIIPDHLQVTNTECVKLSFGSFGSGAFSGLLPQNTTDSNVEFPAREESAPVDQIDARNQDYYESGAVTSPADENLEAMLGANMENVDAPSVSQANELRQDVLDPSELQYDVPSVPSHAYSNTDTLQPSTIEEPQGNNQAHTLSHLSNLMESCVSFH

SEQ ID NO: 47844 - protein, 214 aa, Zea Mays
MSHGGGGGRAKVTPNLAVDGEGTRTLNLTVLQRLDHAVEDILITAAHVTLYDFDTDINQWSRKDVEGSLFVVKRNAQPRFQFIVMNRRNTDNLVEDLLGDFEYQLQAPYIMYRNAAQEVIGIWFYNSQECQQVANLFSRILNAFSKVAPKPKIPSVQSEFEELEAAPSLVDGPLEAQTSNIMSTTTHVQEDPLSAFFSNDEFVDLVYREIMNRQ

SEQ ID NO: 47845 - protein, 177 aa, Zea Mays
MVVLHVKLAPPAAAAATAAASSPMQDVDEETEFLYECAASAVVADVAAALGALAGLQAAILSLCRRLRARCAGAMGELERALDEAEAYASKVQRNRFLSPRALREHIKNIEKKCANTLQEPLEALSLQESSSDNKHERIQIWWAGKELAMDQKLSDYIGVNDKTKIVVRLIEARDEC

SEQ ID NO: 47846 - protein, 433 aa, Zea Mays
MKQCIGGTLLRLKGSVRRLKTTLCLQYKPQYIAAGSLYLAAKLHNIKLPLHGAHVWWHQFDVAPKPLEAVIHQMMELAALKKLMPARPNPVKLKETLCEAKLSLSNSPDSVLNQSNLLISSSSPDIGEPSDKVQVDSCQYLISSHMGDCRVSGPDSSSLNTCANRNVSCKAHDEESLDQALIIKHDSGMMPSSNQTSLYATVGTEGSAELKQDVSHCNDFNIRVNDESLNQVLRNQHGDAIPLPDVVSLDAKVDKERSWCVEPLIANSDCCTDSVNVDSLCTDQRLADAPSGPTADAPSMLAEEESYPFSAKLENIDVARIKGLLMKRKSRREIQDRAIASDGLSEEDWIERELESGIVTNQEANCAAISDELSDEAWIERELESGIVVGPRNEQAITFDGLSEDDWIERELESGIIVEPAPATKKRKLESSC

SEQ ID NO: 47847 - protein, 489 aa, Zea Mays
MYRRDTAAAQRIRQKDVFEKQKALILIGERLLLTTIRFDFNIQHPYRPLLDAMQNLGINQKEVKQVAWNFVNDWLKTTLCLQYKPQYIAAGSLYLAAKLHNIKLPLHGAHVWWHQFDVAPKPLEAVIHQMMELAALKKLMPARPNPVKLKETLCEAKLSLSNSPDSVLNQSNLLISSSSPDIGEPSDKVQVDSCQYLISSHMGDCRVSGPDSSSLNTCANRNVSCKAHDEESLDQALIIKHDSGMMPSSNQTSLYATVGTEGSAELKQDVSHCNDFNIRVNDESLNQVLRNQHGDAIPLPDVVSLDAKVDKERSWCVEPLIANSDCCTDSVNVDSLCTDQRLADAPSGPTADAPSMLAEEESYPFSAKLENIDVARIKGLLMKRKSRREIQDRAIASDGLSEEDWIERELESGIVTNQEANCAAISDELSDEAWIERELESGIVVGPRNEQAITFDGLSEDDWIERELESGIIVEPAPATKKRKLESSC

SEQ ID NO: 47848 - protein, 229 aa, Zea Mays
MSQQEKQTVIPSSVASASVSNAAAPQAIINSDDVAWAHCFCPDANKKHWLKCKYCDKLCKAGITRIKWHLAVLVVKQKPTKGSSSLSCRTVVRGGTIDRFYKPSTIEEFVQMMHKGINLSNKVQTTLSTQKREERRDKACEYICQFFYEASIAHNTVTLPSFALMLEAIGQFGKGLRGPSPYEMSGPFLQKRKQKVLDGFKNHKESWEQTGCTIMTDAWTDRKGRGVIF

SEQ ID NO: 47849 - protein, 326 aa, Zea Mays
MENPRPQAPALTPPMAPLPVPIHPPIAPIPVPPPRVPAPAPAAAASMASTPTPSTGDGGEAEYEVSDDHRAARERHERAVQELLQRRRAYAMAVPTNDSAVRARLRRLGEPITLFGEREMERRDRLRALMVRLEADGQVDRLLRAQEDDQAARIGEEEEEEQIEYPFFTEGSQELLKARLDIARYSLPRAKARIERAKRRHEDPDEDPEAEAELVVKQAGEFVLECSEIGDDRPLTGCSFSRDASMLATSVFFLLLKGRSGAAARAISLSHQVVGAKQFLCICGGRRIVTVYPFPRPHSCGSLQHWVCPCCNFFVGSPYQWRELSH

SEQ ID NO: 47850 - protein, 189 aa, Zea Mays
MLAYWLPNTTHTLPVNATHRVSVGAFIMNDKREVLAVQEKSGVLRGLGVWKFPTGVVEPGEDINVGAVREVKEETGIDAEFVEVLAFRQSHKSFFDKSDLFFVCLLRPLSYDITKQDSEIEACQWMPVEEFAAQPFVQKHELVKYILEVGLAKVDKEYAGFSPISIKSAFTDKLSLFYMNRRDLDRASG

SEQ ID NO: 47851 - protein, 118 aa, Zea Mays
MIAHALGQKVQNTTETAASKESKGKQLSNGKTIPTHSRNNFCPVTPDNIEAVLMGMPSSAGSNSYQTPPSQRCHATNTRAVTAESLKKEQTGAAKRMFAHALGLSAARGSCGTLPKPK

SEQ ID NO: 47852 - protein, 65 aa, Zea Mays
MEKKAFSSPMEQILERLRAFGEFEIIIFGDKVILDDPIEMYVMRTQELGIASYTILLSVGQTVIA

SEQ ID NO: 47853 - protein, 376 aa, Zea Mays
MGSRSSVRPRHAACLHRASRATARTTHEDLLARQRISATHVVTSVAASPPAQPHRAPPRWDLGAARPPRWDLGGGKQSSIFGNELGRLANVGDLAVKRVNPEAGIVELTNHVNYYVQSHIQGNHLNDWTKQQLDDHGFHIFYLRPFLLRVRVGYCLTDFFCLLTGTSLKHPTGAKRPEYRQIKYQEKYMNSKIKPAGKYEIPELELVNPITFPGSRAIEARAIRAGASNLQQAVESSVSVNSHLLHASNAGFVDKGKSVSVNSHLLHASNVYLFVRLLIRDGFEIAFSSPMEQILERLRAFGEFEIIIFGDKVILDDPIEIWPNCDCLIAFYSSGFPLQKVQAYAALRRYIFYSLFLYISLSNGNYSCKHVSIFLI

SEQ ID NO: 47854 - protein, 189 aa, Zea Mays
MVHMEYPSICCFLMITKALLDVYTIKREIGTLDGIKLGLVGDLANGRTVRSLAYLIAKYQNIKIYFVSPDVVKMKDDIKNYLNSKGVEWEESSDLLEVASKCDVIYQTRIQKERFGERIDLYEAARGKYIVDKKVLDVLPKHAVIMHPLPRLDEITVEVDSDQRAAYFRQAKNGLYIRMALLKLLLVGH

SEQ ID NO: 47855 - protein, 311 aa, Zea Mays
MPRAALSHLSHSHPRASLSHQQATPPLHHRSPDHRLSPSSSSSPTHRPSLLRCRAFKQEADDGDGDPTEADARKRRKGPMYKLKAAIQGLAGSRSAAAEVYGGEYQFQRAVENLCEPRFPNPLTRAHRCGFLCCFPPSRALLLHGAMAGSGNRRFGRDMVSSSTHFSQWQMVWVGDHVPGGRVDLQCGGPIWPPMSARSGANSDSLAVTTFRCSFRCSDDLSLHPWISRQLGTRHQNEGNQESKRPRESQSTRRGTRELGIVKRARGDELLRFMDGASKEPLRKVNTNTRFLFNPRSFPEIWCYNPCSFDS

SEQ ID NO: 47856 - protein, 152 aa, Zea Mays
MQTSLLGLLAPHISWGIMWEMAKLWMKGYKVIILDIPLLFETKIDRWTNPVTVVWVNPETQIQRLMSRDGCSEEQAQNRVNAQLALDWKRSEADIVINNSGSLDDTRLQFQDVLRKVSEPLTWKERLRSRDGLISVVVCTAVGVLLARKNLL

SEQ ID NO: 47857 - protein, 254 aa, Zea Mays
MDNAQSENRIDTKQDDDVRQIKHDDEEARLEEYKKIIDQKTSLRRSNLNPERPDANYLRTLDSSIKRNTTVIKKLKTINDEQKDGLMDELKSVNLSKFVSEAVSYICEAKLRSADIQAAVQVCSLLHQRYKDFSPCLIQGLLKVFFPGKSVDDLDADKNSRAMKKRSTLKLLIELYFVGIVEDASIFVNIIKDLTSAEHLKDREGTQTNLSLLSTFARQGKFFLGLQPHGQEAYDEICLGHLVEFLLIHLLCIA

SEQ ID NO: 47858 - protein, 238 aa, Zea Mays
MGRGKVELKRIENKISRQVTFAKRRNGLLKKAYELSLLCDAEVALIIFSGRGRLFEFSSSSCMYKTLERYRSSNYSTQEVKAPLESEINYQDYLKLRTRVDFLQTTQRNILGEDLGPLSMKELEQLENQIEVSLKHIRSRKMLLDQLFDLKSKEQELQDLNKDLRKKLQETSPQNVIHDVSWEEGGHSGSSVLGPFQGLLQHHGNDPSLQTRYHQQAYMDQLNEDMADPDEHGRSGWI

SEQ ID NO: 47859 - protein, 483 aa, Zea Mays
MRSATEASLGTDAWRLYQYICQHFIGTVSPDCRYTRTAIEFTSGGETFHCVGYRVTSKGFTSIMPWLAVSENSLPAFKKGDSVSIHKADIYEGSTTPPDYLTESELISLMEKNGIGTDASIPVHINNICERNYVQVNSGRRLVPTPLGTTLIRGYQCIDADLCLPDIRSFIEQQITLIAKGKADHLRVVQHVIQQFMKKYSYFVKKIENMDALFEAQFSPLADSGRLLSKCGKCGRYMKYISTQPMRLYCITCEDVYYLPQNGSIKLYKEIVCPLDGFELLLFSMVGPDAKSFPLCPFCYNCPPFEGIDKLFGALKLDDTGKVGKGAGMPCFLCPHPTCKQSMITQGVCACPECSGTLILDPVSAPKWRLYCNMCNCIVLLPHAAHRITTTDKKCLTCESTIIEVDFNKKTTPLQDGATLHEGCILCDDLLHSLIEMKHGKSFFIRRGRGRGRGRGRGRGSSRGRGRRGNSRYDDPKMSFRDF

SEQ ID NO: 47860 - protein, 360 aa, Zea Mays
MDNLVLPNKDESLSVDARQEIDLKVGVAFTRFQTRYFQGKYGNLDSRVISYGPCQTPTLGFCVQRHQQITTFKPEKFWSLKTYIIKDSDEIQLEWDRKKLFDFDVTVMFQKMVISDGTLKVADISVKEECKTRPSGLNTVNMLKVASSALGIGPQTAMHLAERLYTQGFISYPRTESTAYPSSFDFRGALAALLNNPLWSNDVRKLLDAGFVKPRQGHDAGDHPPITPMRSATEASLGTDAWRLYQYICQHFIGTVSPDCRYTRTAIEFTSGGETFHCVGYRVTSKGFTSIMPWLAVSENSLPAFKKGDSVSIHKADIYEGSTTPPDYLTESELISLMEKNGIGEFWKKISEALLSNRLL

SEQ ID NO: 47861 - protein, 682 aa, Zea Mays
MSSWLRSAVSKAVEAGGRSGVARTVLGYADAVAHHAGQAVAEGAKIINERSTQNFKSVKQTVKRLEEVAVSSRRDERVQVLRRWLGALQEVEAEVGGSGGSQRQNVSSSEPNSSKPSLAKVLFYDADIGGPPMNFRDIFLYSHALEGITLSMILEAPKEEEVSLLLEIFGICLTGGKEVNNAIVSSIQDLAKSFSNYHDEVLVKREELLQFTQSAISGLKRNADIVRIDSEALDLWKKLHEKEASRAQSIGDPDKVTEKTSTIESFKEALNEVRFCSRMEELLLKKKTINTGDSLEIHSQKVEKLKVLATSLANSSSKAEKRILDHRRQKEEALNFRAKKENEVIAVEKDLTAEISELEKQKDELEAQLKKVNISLNAAICRLKQTREERDQFHEANNQMIFTLQAKENDLSKSIDSCNMEASVVKTWVNFLEDTWQLQLSYNEQKETKTNDELERCTSSFLKLTKHHLSYFKEVLSPSIERIRTYVDNLAVLNSREESIEHEGDDEISVQTSPQKSLEEEYLETEKKIVIAFSIVDRMKKMFYSEQAANSRQDDAEVRTLFSEIEKLKEVFESVERPTLDIEVRKAKDPMKDKSGSNRSAKDKSESSHSPVQVPSSPKDVPVESPKSPVKPEQTMDPDSEFAKLELEFGKVNRDHEEIGGWDFDELEEELRADLSKSTNPK

SEQ ID NO: 47862 - protein, 93 aa, Zea Mays
MGASLASAGLVNYPLVAALLAFALAQSSKFFTTWYKEGRWDARQLIASGGMPSSHSATVTALSVAVGIQEGFRSATFATALVFACVVLCTSSC

SEQ ID NO: 47863 - protein, 243 aa, Zea Mays
MDGTGDLFKDAAFRSKCSCRLSKKRGLSLEEKREQMLQIFYESQEFFLLKELEKMGPKKGVISQSVKDVVQSLVDDDLVLKDKIGTSVYFWSLPSCAGNQLRNTYNKLESDLSNSRKRYMDLVEHRDNLKRGREDSEEREAALEELKTVELHHKKLKRMLLILLIQQLTGGQTTFSLCNNGVQPHSQKQKNNWNICTGRLGSQKILSICSDVQQPITASKMCHGMLDRSQMQVYHVGAVSYLQ

SEQ ID NO: 47864 - protein, 223 aa, Zea Mays
MSKKRGLSLEEKREQMLQIFYESQEFFLLKELEKMGPKKGVISQSVKDVVQSLVDDDLVLKDKIGTSVYFWSLPSCAGNQLRNTYNKLESDLSNSRKRYMDLVEHRDNLKRGREDSEEREAALEELKTVELHHKKLKRMLLILLIQQLTGGQTTFSLCNNGVQPHSQKQKNNWNICTGRLGSQKILSICSDVQQPITASKMCHGMLDRSQMQVYHVGAVSYLQ

SEQ ID NO: 47865 - protein, 227 aa, Zea Mays
MDGTGDLFKDAAFRSKCSCRLSKKRGLSLEEKREQMLQIFYESQEFFLLKELEKMGPKKGVISQSVKDVVQSLVDDDLVLKDKIGTSVYFWSLPSCAGNQLRNTYNKLESDLSNSRKRYMDLVEHRDNLKRGREDSEEREAALEELKTVELHHKKLKEELAAYADSDPAAVEAMKDATDIAHSAANRWTDNIFTLQQWCSTTFPEAKEQLEHMYREVGITEDFEYLQ

SEQ ID NO: 47866 - protein, 386 aa, Zea Mays
MTHHYPPTRITRGERHYCCRRQWLSALTEPMDDLTVGGLALFAAVADFIDDSAPAMPQPAAASTAHEPEPEPGSPCSVASDCSSVATADFEGFADLGSALVLDDLVSSASTSASSASGPRAAAAAPARSVFALDCVPRWGLQSVCGRRPEMEDAARVLPTFFHVPLWMLAGDAPVDGLDRASFRLPAHFFGVYDGHGGLQVANYCRERIHEVLAEELTKAEEAASDADLGGLDPNTQKHWEKAFVGCFSRVDAEVGGDAATEAKPVAPDTVGSTAVVALVCSSHVIVANCGDSRAVLCRGKQPVALSVDHKPNREDEYARIEAQGGKVINWNGYRVLGVLAMSRSIVTGEPQCTVLMPLFQRSNPLHLKLTTTDPNRLVDEKGTDT

SEQ ID NO: 47867 - protein, 218 aa, Zea Mays
MRPSDGRTQLSGFAQSDESTLDVEGHCYHQQSFPSSPSMQPIASGCTHTENSAAYFLWPTSNLQHCAAEGRANYFANLSKGLLPKSGRLPKGQQANSLLDLMTIRAFHSKVLRCFSLGTAVGFRIRKGALTDIPAILCFVARKVHKKWLNPDQCLPAIVEGPGGIWCDVDVVEFSYYGAPAQNPKVQMFTELVDKLCGSDECIGSGSQLCTMIVLHQT

SEQ ID NO: 47868 - protein, 168 aa, Zea Mays
MGFKLTKQSGYSPAQSWEAVSTSRPLSATHFMGMHQSLGIQLAQLGKDASAAGAARRVSAQRKAVEVESVAAAGKQEIREVVKKLFRAEFVEKRYEGLDEDIDLRALENGFISVTPLNVHGQVELEIGATASDWLSAAVSLDKEKVAASATADQQDVAAEEKEAPSAA

SEQ ID NO: 47869 - protein, 193 aa, Zea Mays
MASSLARLGAALPRAAARALPPGRWAAAVLGIGASRRAERCQVHSDIKVAPTSDVKDDSKSETRRIKMLYDGDCPLCMREVNMLRERNKSYGAIKFVDISSKDYSPDDNQGLDYETVMGKIHAILSDGTVITDVEVATMANAIYGVWAKYRMQITGRPPLEKLQANVKMTKYARCEHKKCSTVLHTSLTYIHA

SEQ ID NO: 47870 - protein, 257 aa, Zea Mays
MAAGLKRDPLVILRMDGEDLRDFAAGSRYEPTAAAVFSQVVDLGSEVASPRQCVLAALQKLSVDHGVPPASDAWVAKHIVEPALQQLLPADQPGQQPASRDDLFQQLKKLLGAVADRLQEQPVIVAHTENHYDGSGVKRLLANKFELDKLLDSVWKNLAAEDKNKASKGCLITALDKMADAASLPYYSAVKEVDAVVEESIKTAGVEEGKAVDEAEFKKSLTEILRAIMLRLNDSPVFVSTDVVVHEPLSGTSSSVN

SEQ ID NO: 47871 - protein, 641 aa, Zea Mays
MSASVDAASAVAVPAVPPAVEEAGGAVEQARTLIAALNLLSRNLPLPPDVMRAVSSIYHDGGAGDRAGEEEKGGDEEMPAADGAAEGNCSVYAAGGATEGTTLIEELEDAILKNQRTPITYSELAAIREGRFNASIQHRLAELEGLPSTRGEDLQMKCLLELYGLKVLRPFLLRRKKDEVEKYLPVKTQVILKCDMSAWQKAYYEQVTSREKVALGYGIRKKALQNLSMQLRKCCNHPYLFVEHYNMYQREEIVRASGKFELLDRLLPKLQRAGHRVLLFSQMTKLLDVLEIYLQMYNFKYMRLDGSTKTEERGRLLADFNKKNSEYFMFLLSTRAGGLGLNLQTADTVIIFDSDWNPQMDQQAEDRAHRIGQKNEVRVFVLVSVGSIEEEILDRAKQKMGIDAKVIQAGLFNTTSTAQDRRALLQEILRRGTSSLGTDIPSEREINRLAARNDEEFRLFEKMDEERRLKENYKSRLMDGNEVPDWVFANDNETLRKKTVADEFRNIIVGSKRRRKEVVYSDSFGDQWMKSDEGFEEIAKMTPRVKRTAYSPDIQVEYNERRKRPKSVENSADGASNPTRTPDKGRAGVSSYSKDETEDDGEDEVITSGLQKGNSFTWKTLGRKRSSHLSSSSDSKGRPSF

SEQ ID NO: 47872 - protein, 581 aa, Zea Mays
MSASVDAASAVAVPAVPPAVEEAGGAVEQARTLIAALNLLSRNLPLPPDVMRAVSSIYHDGGAGDRAGEEEKGGDEEMPAADGAAEGNCSVYAAGGATEGKAFTLQGTTLIEELEDAILKNQRTPITYSELAAIREGRFNASIQHRLAELEGLPSTRGEDLQMKCLLELYGLKLLDLQKKVRSDISAEYWLQKKCAYPERQLFDWGMMRIRHPFSMYGIGDSFSVDVDDVHRRKRFTERMSRLEEEGKNQADIRKRKFFAEILNASREHQVQLGTTFKQRKQRNDGVMAWHVRARQRITRQEKSRINLLKTGDQEAYMRMVEESKNERLKMLLDKTNELLEGIGKAVQRQKDAEHVSKPEGGSEVPKGSESEDCSQISGIKSESAEESPSDDDGDLPGPADESKFNAGRRLDFTVHSIEEKVTEQPSALEGGELRPYQLEGLQWMLSLFNNNLNGILADEMGLGKTIQTIALIAYLLEKKEVAGPHLIIAPKAVLPNWSNEFKTWAPSIGTILYDGRPEERRLLRDKNFDGEQFNVLLTHYDLILKDKKFLKKVHWHYLIVDEGHRLKNHECALARTLVSG

SEQ ID NO: 47873 - protein, 517 aa, Zea Mays
MELNLVSWVSSLLLLALSAAYVYYTTRRRSPQRLPPSPPGWPVIGHLHLLSEMPHHAMAELARTMKAPLLRLRLGSVRAVVISKPELARAALTTNDPALASRPHLLSGQFLSFGCSDVTFAPAGPYHRMARRVVVSELLSARRVATYGAVRVKELRRLLARLTKNTSPAQQPVDLSECFLNLANDVLCRVAFGRRFPHGKGDKLGDVLAEAQDLFAGFTVGDFFPELEPVASTVTGLRRRLKSCLADLRAVCDEIVDEHISGKRQRIPGDREEDFVDVLLRVQKSPDLEVPLTDDNLKALVLDMFVAGTDTTFATLEWVMTELVRHPRILKKAQDEVRRVVGGKGRVEESDVGELHYMRAIIKETFRLHPAVPLLVPRESVAACTLGGYHIPAKTRVFINTFAMGRDPEIWDSPLEYRPERFENGGEIDLKDPDYKLLPFGGGRRGCPGYTFALATVQVSLASLLYHFEWALPPGVAAEDVNLDECFGLATRKKEPLFVVVTKSEAYEFKGEELNEV

SEQ ID NO: 47874 - protein, 100 aa, Zea Mays
MLAAKRPLPHRGRLLAAVMEAGPLLQNLLVAGQLPRWRNPPTVRAPDTLPLGASRAAGYADDAVTLAASGCTKRPMAAALPVLPAASCSPGFIAKRQRLH

SEQ ID NO: 47875 - protein, 258 aa, Zea Mays
MNFQDATELMHQIFTNPAGPIVLLVILLFSSHIISLTCIVSGEVISENFFGVKLPLSAHHLLPKGLAMVLNIYFAKVAGPEGIYQLLIMCPVIQAMLLPSSIIPILRVSSSRLLMGRYRIALCIEIFAFLAFLLVVFTNIIFTAEIMFGTSTWTNNLKGDTGSPAILPYSVVVLISCASIGFTLLLAVTPLKSASNEAQTHLSSMHSQRGALGTTQREATSLKKFEHEEVQSCSVGAVLMGSSEGHKKSVHLRRTLSG

SEQ ID NO: 47876 - protein, 526 aa, Zea Mays
MNSVHSIESLAAGDAQHKLFQTLGPTLLISMAYIDLGKWLVAVDAGSRFGYDLVLLVLFFNFSAILFQYLSTCIGMVTGKNLAEICCLEYSKVICVVLGLQAWLSLLTSELTMIAGMAVGFNLVFEHDNLITAICFASVVVNLLPYTLSRLDKVAGICNACIAGFTLLCFVLGLLISHPHTPVNMNAMFPKLSGESAYSLMALLGANIIVHNFYTHSAFVQVQRRSSHTLGSLFHDHLFSILFIFTGIYLVNYILLSSAADESSETVVMNFQDATELMHQIFTNPAGPIVLLVILLFSSHIISLTCIVSGEVISENFFGVKLPLSAHHLLPKGLAMVLNIYFAKVAGPEGIYQLLIMCPVIQAMLLPSSIIPILRVSSSRLLMGRYRIALCIEIFAFLAFLLVVFTNIIFTAEIMFGTSTWTNNLKGDTGSPAILPYSVVVLISCASIGFTLLLAVTPLKSASNEAQTHLSSMHSQRGALGTTQREATSLKKFEHEEVQSCSVGAVLMGSSEGHKKSVHLRRTLSG

SEQ ID NO: 47877 - protein, 155 aa, Zea Mays
MESTALMTARLPLLTSGSRSKPLPFASFTRAACRLASAPFSGSGSVVLLSRRSRDYAGVGSLVSAAADPGDTADAGSESILLSVQGMMCDGCAASVKRILESQPEVTSATVDFKEASAVVWTTDEAKGTQGWQKQYGEKLAKHLGTCGFESRLQE

SEQ ID NO: 47878 - protein, 51 aa, Zea Mays
MLHVFVLLSMHDTVEDDTKLLWCSYRRTFYLSIHGLFPIFASTSVCTDLIK

SEQ ID NO: 47879 - protein, 109 aa, Zea Mays
MESTALMTARLPLLTSGSRSKPLPFASFTRAACRLASAPFSGSGSVVLLSRRSRDYAGVGSLVSAAADPGDTADAGSESILLSVQGMMCDGCAASVKRILESQQGRPPS

SEQ ID NO: 47880 - protein, 142 aa, Zea Mays
MEIRDRTETNLVNLRRTIYLTIMSSVDFEEAGHKLMKIKLEPGQEMELCIMLLECCSQERTYLRYYGLLGQRFCMINKVYQENFEKCFVQQYSMIHRLETNKLRNVAKFFAHLLGTDALPWHVLAYIRNYRSTWAYAYSMRG

SEQ ID NO: 47881 - protein, 532 aa, Zea Mays
MLCSSHLLLRAQVNSCLRPPRPTPVPMARSAPTFVAVFLLVLVLLTMDAAQGQQPFPLSTDPSDADALHAVFRQWRLEGGAAMEDPCRKGVWSESSGINASVECNCLPSRVCRITSLNVSGHGNISAIPRELFNLTELVSLDLSNNNLSGSIPPEVINLSKLETWHFNNNPLSGGFPHELSLLRNLRSLWMFDNYIVGPFPAFIQNLTNLTDLRIYGTNLQGPIPKNFSNLSNLEVLMLGDLAGNHSYLNVIGAWANLSVLSLRKCGLTGQVPNTPPNLPKLKYLDLTSNNLSGSIGGLLLSYKTSNYIYVGGNNLSGPVPSEIVQSSVSLDVSYNYYVDGSLSNNPSGQKQFINYLGTSIDASGRINSGNLTILNCLRMNECNINNLTKIVITHGPGKRLFDIDIQDQNIRKDFDITKEAGGSRKATNITYEVTVDNSILAIHLYWSGRGTCCIPYEGAYGPLVSAIKVTHSQDPKTSPPQAPHSDSARDDVKRRGVVAGIAALSIAAAVISSSVVYLWWKWVSLVKRPMA

SEQ ID NO: 47882 - protein, 447 aa, Zea Mays
MFDNYIVGPFPAFIQNLTNLTDLRIYGTNLQGPIPKNFSNLSNLEVLMLGDLAGNHSYLNVIGAWANLSVLSLRKCGLTGQVPNTPPNLPKLKYLDLTSNNLSGSIGGLLLSYKTSNYIYVGGNNLSGPVPSEIVQSSVSLDVSYNYYVDGSLSNNPSGQKQFINYLGTSIDASGRINSGNLTILNCLRMNECNINNLTNRATSFAINCGGKQVEYSDLMPIMFSEDSTDLGGSGFHVNATSHWVVSHVGSDPFNESTGIVNTSDIFETNMQELYQTARTSTSSLWYYVVGLANGNYTVQLFFAEIVITHGPGKRLFDIDIQDQNIRKDFDITKEAGGSRKATNITYEVTVDNSILAIHLYWSGRGTCCIPYEGAYGPLVSAIKVTHSQDPKTSPPQAPHSDSARDDVKRRGVVAGIAALSIAAAVISSSVVYLWWKWVSLVKRPMA

SEQ ID NO: 47883 - protein, 637 aa, Zea Mays
MLCSSHLLLRAQVNSCLRPPRPTPVPMARSAPTFVAVFLLVLVLLTMDAAQGQQPFPLSTDPSDADALHAVFRQWRLEGGAAMEDPCRKGVWSESSGINASVECNCLPSRVCRITSLNVSGHGNISAIPRELFNLTELVSLDLSNNNLSGSIPPEVINLSKLETWHFNNNPLSGGFPHELSLLRNLRSLWMFDNYIVGPFPAFIQNLTNLTDLRIYGTNLQGPIPKNFSNLSNLEVLMLGDLAGNHSYLNVIGAWANLSVLSLRKCGLTGQVPNTPPNLPKLKYLDLTSNNLSGSIGGLLLSYKTSNYIYVGGNNLSGPVPSEIVQSSVSLDVSYNYYVDGSLSNNPSGQKQFINYLGTSIDASGRINSGNLTILNCLRMNECNINNLTNRATSFAINCGGKQVEYSDLMPIMFSEDSTDLGGSGFHVNATSHWVVSHVGSDPFNESTGIVNTSDIFETNMQELYQTARTSTSSLWYYVVGLANGNYTVQLFFAEIVITHGPGKRLFDIDIQDQNIRKDFDITKEAGGSRKATNITYEVTVDNSILAIHLYWSGRGTCCIPYEGAYGPLVSAIKVTHSQDPKTSPPQAPHSDSARDDVKRRGVVAGIAALSIAAAVISSSVVYLWWKWVSLVKRPMA

SEQ ID NO: 47884 - protein, 276 aa, Zea Mays
MSSPPRGQPATAAVPAVAAATSPQLPAASHTLPRAFLATSSPRAIVAAPAPPLFTGRPLNPNPPAHGSSVPHGILYPVLKSASTSNSAAAAVTAQLRRVPPMAVGYPRTHAVAIPIAQQQQPLVHAQPRSFAAVPRALVTGVSTGSEQPPRGVPIGSQPKVNPVPPVGPSNEQSNPKDREKSREEPTVVVINDRKVNLLDSESGSFYALCRSWVRNGVPHESQPSFGNGEPLLPRPLPASVVDSRISDKDDNDVAGEDSDEEPQKMPTVNTIQVIY

SEQ ID NO: 47885 - protein, 524 aa, Zea Mays
MDNSDISTSDQPKSLRRSPRSRDYFPQDQSCWYDDCGDESGRIGELRWKSREKTRGTDRSCNTASTSNNKTRERHSYNFCSCGHPEDYGVMDSCFLPTVRSVREMKIARKSGVEKPKVQYNRCYTLDSFIVPKGNHAGCTQKNAIPKQVWEPMDARRKTNLHNTVHDSGSINDVDPLKHVVFDNSGSHKFSVRCESQPQASESSRDVCNSDQRCANGGRNQTTSCASTLMVNKQNCYSENDEGSRHDVELMTNSASSDSTSSCMSQGDRESSSSSTTSSSAQNPESSSESEESPERINSTVGTPSSRAASRSLLEACAGNGFREYQPKTTRPAHNDMFGYNVSPVQDQLLHYQITHPPQQPPITMGFHDRSWAAPTNGNFHHIPPEPIHKAAGSFRAVPLSLPFQNGHRQVAEHTQRDMNLERHPSKLTMLTGKDPPEDKNKSGLKYLPEDKNKSWEADASFSLFQFNLPIASPVTPSSKDKSGKLAARTPLVEVQPQLCLREQADVKQYNLFSSKDNGIFSFM

SEQ ID NO: 47886 - protein, 449 aa, Zea Mays
MQKQKKCGPGTRAYREASKQLKSGQSMSINATDDCNYLFLIIHAGLGNRMLEITSAFLYALLTNRILLLDRYKEIADLFCEPFPGTSWLVPSDFPLNDDEFGQSSAESYGNMLQNKAFGGGTDRSLVGNRLPPYVYLHLDGNYGFHDKLFFCEDDQQFLRGVPWLVMRTDMYFVPSLFLVPAFQDELGRLFPEKDTVFHHLARYLFHPTNGVWYSVTRCFRSYLAKAEKRVGIQIRIYETKGILQRNGPFPHILNQILSCAQNEKLLPEISMAEGAADGTRNNRTAAGSGTRNNRTIAVLTTSLSAWYSEQIQEKYDEQSAVDGVSVRVFQPSHEEYQRSRNKGHNMKALAEIYLLSMTDVLITSGFSTFGYAAQGLAGLKPWIMLKSENHVTPDPPCVRAMSIEPCFHQAPFYDCKARKDTDLGKVVPYVRHCEDVSWGLKIVDQTHL

SEQ ID NO: 47887 - protein, 216 aa, Zea Mays
MDTSKSKQGPEHLLVLVHGIMASPKDWTYGEAVLKRRLGDDFFIYASSTNSYTKTFDGIDVAGRRLANEVLEVVNKMPSLRKISFLAHSLGGLFARYVIAILHSVSVETKNAGQSSALIVPTTRGPAKSRCASGLGSIAGLRPINFITLATPHLGVRGRNQVHHQNVSDYVYKIYCTLSSKGSIPGKTNSLFVILFIHVDFEVAWYDFYKLGLYHC

SEQ ID NO: 47888 - protein, 170 aa, Zea Mays
MASDCDDKNYISALAAFKNRVLYANVSYDHMVGWRTSSLRREKNLIKPSHRSLDGYKHIVNVEYCSPVSSEGPHFPSKAARAKEAAQRSPNRENTEEYHQMMEEEMLHGLQKVGWKKVDVNFHSSFWPYSAHNNIHVKNEWLHNAGAGVIAHVADSIKQQESRPCLPANL

SEQ ID NO: 47889 - protein, 179 aa, Zea Mays
MVILARHLSCYRWHPTVMTKTTYQPWQLLRTVSCMPTSHMVGWRTSSLRREKNLIKPSHRSLDGYKHIVNVEYCSPVSSEGPHFPSKAARAKEAAQRSPNRENTEEYHQMMEEEMLHGLQKVGWKKVDVNFHSSFWPYSAHNNIHVKNEWLHNAGAGVIAHVADSIKQQESRPCLPANL

SEQ ID NO: 47890 - protein, 180 aa, Zea Mays
MVILARHLSCYRWHPTVMTKTTSLAAFKNRVLYANVSYDHMVGWRTSSLRREKNLIKPSHRSLDGYKHIVNVEYCSPVSSEGPHFPSKAARAKEAAQRSPNRENTEEYHQMMEEEMLHGLQKVGWKKVDVNFHSSFWPYSAHNNIHVKNEWLHNAGAGVIAHVADSIKQQESRPCLPANL

SEQ ID NO: 47891 - protein, 217 aa, Zea Mays
MTPANGAPARAAEAGPHEVESEADAFRRQVDDLVSKTDVLERRVKEVADFYDGKKHGSGGRKGGGGGRYGASSRGMPDLMRQFGVLLKEITSHKDAWPFLEPVDVVTLQLPDYHNIITQPMDFSTIQKKMERKDGTCYTNVREICSDVRLIFANAMKYNDDQNVIHLMAKSLLEKFEEKWLHFLPKVESETKGGGIKGCCSHKYFSRSCNRKISKRH

SEQ ID NO: 47892 - protein, 710 aa, Zea Mays
MAAAAPPVAKKVPRQLVEHGDVRVDNYYWLRDDSRSDPDVLAHLRAENDYTAAVMSDVKQLEDEIYAEIRGRIKEDDIDAPLRKGRYYYYERTLTGKEYVQHCRRPVSTDAPITVHDVMPTGPDAPDEHIILDENVKAEGHDYYSIGAFKVSPNNKLVAYAEDTKGDEIYTVYVIDTESGEYVGQPLKGITSDIEWAGDDHLVYITMDSILRPDKVWLHKLGSDQSSDACLYHEKDDTFSLGLQASESKRYLFVESGSKNTSFIFYLDIPKQNKELAVLTPRVYGIDTTASHRGNHFFIKRRSDEFYNSELVACPLDNVAETTILLPHRESVKIQDFQLFDNHIAVYERENGLPKVIVYRLPAIGESIGQLQGGRAIDFIDPTYAVDPEESQFHSSVLRFHYSSMRTPPSVYDYDMDSGVSVLKKIHTILGGFNASNYVTERKWAAAADGTQVPMSILYRNDLVKLDGSDPMLLYGYGSYEICIDPSFRGSRFSLVDRGFIYVIAHIRGGGEMGRKWYEDGKLLKKKNTFTDFIDCAEHLIKSKYCSREKLCINGRSAGGLLMGAVLNMRPDLFRAAVAGVPFVDVVTTMLDPTIPLTTAEWEEWGDPRKEEFYYYMKSYSPVDNVMAQEYPNILVTAGLNDPRVMYSEPAKYVAKLRELKRDDNLVLFKCELGAGHFSKSGRFEKLQEDAFTYAFILKALGMTRKLASL

SEQ ID NO: 47893 - protein, 487 aa, Zea Mays
MAAAAPPVAKKVPRQLVEHGDVRVDNYYWLRDDSRSDPDVLAHLRAENDYTAAVMSDVKQLEDEIYAEIRGRIKEDDIDAPLRKGRYYYYERTLTGKEYVQHCRRPVSTDAPITVHDVMPTGPDAPDEHIILDENVKAEGHDYYSIGAFKVSPNNKLVAYAEDTKGDEIYTVYVIDTESGEYVGQPLKGITSDIEWAGDDHLVYITMDSILRPDKVWLHKLGSDQSSDACLYHEKDDTFSLGLQASESKRYLFVESGSKNTSFIFYLDIPKQNKELAVLTPRVYGIDTTASHRGNHFFIKRRSDEFYNSELVACPLDNVAETTILLPHRESVKIQDFQLFDNHIAVYERENGLPKVIVYRLPAIGESIGQLQGGRAIDFIDPTYAVDPEESQFHSSVLRFHYSSMRTPPSVYDYDMDSGVSVLKKIHTILGGFNASNYVTERKWAAAADGTQVPMSILYRNDLVKLDGSDPMLLYGYGSYEEPAMSN

SEQ ID NO: 47894 - protein, 205 aa, Zea Mays
MAMQGFTQKIVGMMKSENLFASQGVPIILSQASIIFSLGLIENEYGPEGREFRPAGQAYINKAAKMAVGLGTGVPWVMWKEEDAPDPVINACNGFYCDAFSPNKPYKPTMWTEAWSGYTMEEQILGALLGVPSSQQAMIMMLQLMNMDFLENQSTVILKNSTELLSYASRLWFLLTQQLLPLYHARGPRLPISIWLCSFPCKLQF

SEQ ID NO: 47895 - protein, 240 aa, Zea Mays
MDAGNGCSARALAACVVGGIVLGASVLALHLAGGPAAIPPLPLPPPIGALLRRRRRPVRVYMDGCFDMMHYGHCNALRQARALGDELVVGVISDDEIKANKGPPVTPLHERMVMVRAVKWVDDIIPDAPYAITEEFMNKLFNEYNIDYIIHGDDPCLLPDGTDAYALAKKAGRYKQIKRTEGVSTTDIDGCFFVLERDHLMHITTRHYKGSSVVDMVRKLMILDLELEQEYLIFFPHLGE

SEQ ID NO: 47896 - protein, 554 aa, Zea Mays
MVKIVTYNVNGLRPRVAQHGSLRCLLDALDADIICFQETKLSRQDLSADVIMADGYEAFVSCNRSSKGRGAYSGVATFCRVTSSFSSQEVALPVAAEEGFTGLQDYAKNSQTVGDFSIAMPVEEEGLGELTREDLLRVDNEGRCIITDHGHFVLFNIYGPAVDGDDKERVRFKLLFYKILQKRWERLLALGKRVFVVGDLNIAPASIDRCDAAPGFEKQMFREWLRSMLREHGGPFFDAFRSKHPERWKGGRSSKLEGSDHIPVYILLKEIPELPVHNIPPSAARYLPEIRGRQQSIVSFLDKGKIYELQNAANLIQSEDTVLDSYCSDGLENTILAKKGLATGITEFAKGGNLPSLMCKGTDLNQWINEGLMGISHVSQKKSLSSTKFVPQKKIKRNLSSQPTIKSFFQRPGSKTVNASTSTLVTPAETLDLTNQACVSNGDTLPENMQCTTSAAKVQDNTDASSCSLSTDKSNAAALEWQRIQKKMKMTLPRCKGHSEPCIPRSVKKGPNIGRLFYVCARAQGPASNPEANCGHFQWAPGKSKEKSSKEKRL

SEQ ID NO: 47897 - protein, 388 aa, Zea Mays
MEVPFLMLLDQNTLKGAYTCFNQKIGAEEYNYGSRIDHILISGSCLHRCDSVEDHSIFCCHVEECEIMNHFKRGNSENLSKWKGGRSSKLEGSDHIPVYILLKEIPELPVHNIPPSAARYLPEIRGRQQSIVSFLDKGKIYELQNAANLIQSEDTVLDSYCSDGLENTILAKKGLATGITEFAKGGNLPSLMCKGTDLNQWINEGLMGISHVSQKKSLSSTKFVPQKKIKRNLSSQPTIKSFFQRPGSKTVNASTSTLVTPAETLDLTNQACVSNGDTLPENMQCTTSAAKVQDNTDASSCSLSTDKSNAAALEWQRIQKKMKMTLPRCKGHSEPCIPRSVKKGPNIGRLFYVCARAQGPASNPEANCGHFQWAPGKSKEKSSKEKRL

SEQ ID NO: 47898 - protein, 211 aa, Zea Mays
MLINAECALLLWGFYRILSCDPGIFACDSSYLAEAGCKDFVEAIYTSERLPMLSRVRQCTWCKANIRGYDHHCPAFGTCIGQKNHRLFMALLTGFVVAESTYTMCSTKYITICISSGTIKSENPVSLNMVISTMLFSILQVLWQIVFLMWHIYCICFNIKTYEWINWKKYPEFQMKEQPRSDSEVKSMNPYDKGMLCNIRDFLKPVLSTKT

SEQ ID NO: 47899 - protein, 154 aa, Zea Mays
MLINAECALLLWGFYRILSCDPGIFACDSSYLAEAGCKDFVEAIYTSERLPMLSRVRQCTWCKANIRGYDHHCPAFGTCIGQKNHRLFMALLTGFVVAESTYTMCSTKYITICISSGTIKSENPVSLNMVISTMLFSILQVLWQVVFSLGVSCS

SEQ ID NO: 47900 - protein, 468 aa, Zea Mays
MYCKCGDLDSAHQVLDRLEHVDEISLSALVYGYASCGQLHKALCLFDKMESPSIALWTSLISGCNPAYHGDGAFVLFVRMLRSEMLPNSTIYAIVLNMCGFLGMLKPGQQTQACALKSGAVNDLIAASALIDFYSKCGLWADACQAFSELRHHDTIVLNSMITVYSNCGQIDEARRVFRLIPSKSVISWNSMIVGFSQNGHALDALELFCEMHRLGLQLDNVAISSVLSASGSICSVSSGEQIFGLAIALGLQSDHIVASSLIDLYCKCGNLANGRRIFSGIANPDEVLWNSMLIGYASNGYGLEALKLLDLMQSRGLKPSERTFVGVLSACCHSGLVEEGLRWFYRMKEDFGVSPSAEHYACVTDLLVRAGRLDEAVEFIENMPFKADAISWTSIIGGCKAQGNEVLLDKVANKLMETGLSTHSSLYVQLSSTLAAHGDWDKSAEIRSMMHDRRISKNAGRSWVDRA

SEQ ID NO: 47901 - protein, 362 aa, Zea Mays
MSLTGSALEAALQAVGRGLDAAGDHRLLYCKGGGRLVALEEDRARDLPLPDGGVLPSVPPDVEVEQCRRDPERIRPFPSGPSSAAADGPFVCSFDKMAEYFNRKSCLSETVPLGSFNSLFSFTGSWKNDAAATKALAIDGYSLPLFRVKIRSSELTLLESVKHAIPNVWDPSALASFIENYGTHIIISVTVGGKDEVYIKQHSSSQLSGLEFKNYVREIGRERFSDVENKSNATPINYSEKDITVIFRRRGGCDLVQSFSDWKGTVASAPDVIGMTFLSIVSLVDDVPGKKHLARAVELYLTYKPPIEELQYFLDFQVPLVWAPAPPGIASHHRKEPVCPSLQFSLMGPKLFISTEQVKVTP

SEQ ID NO: 47902 - protein, 364 aa, Zea Mays
MLAIDPVVGAFAAGNAVALKPSEVAPATSLLLADLLPRYVDPSCVRVVQGGIAETTALLELQWDKIFYTGNSRVGRIVMSYAAKHLTPVVLELGGKCPVVVDSDVNLHVAAKRIAAGKWGCNSGQACVSPDYVVTTKSFAPKLLESLKRVLFEFYGEEPLRSPDLSRVVNSNHFNRLMALMDDYSVSGNVAFGGQIDERRLRIAPTLLLDVPLDSAMMKEEIFGPLLPIITVDKIGESFAVINSMPKPLAAYLFSNDGQLKQQFERTVSAGGIMFNDTGIHLTNPNLPFGGVGESGMGAYHGAFSFDAFSHRKAVLDRSFLGEARARYPPYTPAKLAILRGVLNGSPLATVQAAAGCTGGASAD

SEQ ID NO: 47903 - protein, 627 aa, Zea Mays
MLRLRAFRPTSDKVVKIQLHPTHPWLVTADANDRVSVWDWEHRQVIYELKAGGVDERRLVGAKLEKLAEGDDSKGKPTEAIRGGSVKQVSFYDDDVRFWQHWRNCSAAAEAPTAVSQQSSTFIAPAPSTRGRHFVVICCENKVIFLDLVTMRGRDVPKQELDNRSLLCMEFLSRTSSSDAPLVAFGSSDGVIRVLSMLTWKLVRRYTGGHKGAIACLMTYMSAAGEVHLVSGGSDGLLILWSADHIHDSRELVPKISMKAHDGGVVAVELSRVMGSAPQLITIGADKTLAIWDTVTFKEIRRIKPVPKLACHSVASWCHPRAPNLDILTCVKDSHIWAIEHPTYSALTRPLCELSSLVPPQVLALHKKLRVYCMVAHPLQPHLVATGTNIGIILSEFDPRALPAIAPLPTPTGNKEHSAVYIVERELKLLNFQLSNTANPSLGNAGVASDAGRSMNNSIEQLIVKQTKKHISTPAPHDSYSVLSVSSSGKYVAIVWPDIPSFAVYKANDWSVVDSGTGKLFAWDTCRDRYALVESALAPRMPLVVKGGSSKKAKEAAAAAAQAAAAAASAASAATVQVRILLDDGTAHVLQRSIDGRNEPSFDSNSYINCSIDALIRFWWKWIIFCI

SEQ ID NO: 47904 - protein, 290 aa, Zea Mays
MAAALAPGVSRKLKKVLETRTDNPDLLASLGALSTFYVQNTPQARRNLKSSIEQRALAINRHFLDASLPAHKALDRVEGEVHALNDSWKKIEEALNSCSASTGDIISTTERLQQELEVITQRQEIVSCFLRDYQLSNEEINALREEEIDDKFFKALLHVQEIHSNCKVLLRTHHQRAGLELMDMMSVYQEGAYERLCRWVQAECKKLGDTDNPEVSELLKMAVCCLKERPVLFKYCAEEVANMRHHALFRRFISALTRGGPGGFPRPIEVHAHDPLRYVGEMLGWLHQNI

SEQ ID NO: 47905 - protein, 297 aa, Zea Mays
MAAALAPGVSRKLKKVLETRTDNPDLLASLGALSTFYVQNTPQARRNLKSSIEQRALAINRHFLDASLPAHKALDRVEGEVHALNDSWKKIEEALNSCSASTGDIISTTERLQQELEVITQRQEIVSCFLRDYQLSNEEINALREEEIDDKFFKALLHVQEIHSNCKVLLRTHHQRAGLELMDMMSVYQEGAYERLCRWVQAECKKLGDTDNPEVSELLKMAVCCLKERPVLFKYCAEEVANMRHHALFRRFISALTRGGPGGFPRPIEVHAHDPLRYVGEMLGWLHQWSNFSTSVW

SEQ ID NO: 47906 - protein, 471 aa, Zea Mays
MAPPPAGLVLVALLALVLALALAPAPARGDKPARGGASSSIAAGAETEPSSAVFPLYGDVYPHGLYYVAMNIGNPPKPYFLDVDSGSDLTWLQCDAPCRSCNEVPHPLYRPTKSKLVPCVHRLCASLHNGLTGKHRCDSPHEQCDYVIKYADQGSSTGVLINDSFALRLTNGSVARPSVAFGCGYDQQVRSGDLSSPTDGVLGLGTGSVSLLSQLKQRGVTKNVVGHCLSLRGGGFLFFGDDLVPYQRATWTPMARSAFRNYYSPGSASLYFGDRSLGVRLAKVVFDSGSSFTYFAAKPYQALVTALKDGLSRTLEEEPDTSLPLCWKGQEPFKSVLDVRKEFKSLVLNFASGKKTLMEIPPENYLIVTENGNACLGILNGSEIGLKDLSIIGDITMQDHMVIYDNEKGKIGWIRAPCDRAPNDINTVHGFEEGYCWPQFLPGIIGLPNEDCPAYYRSNKERFAKAQGGGR

SEQ ID NO: 47907 - protein, 89 aa, Zea Mays
MTRLCNNICTSVPWQTLQAANKVKAIWRLSELLTTKLPTGTFPVKVNYLAPWLHYPCFQQITSCHLFQSQCMVQSNHEKWQSVRFLQGR

SEQ ID NO: 47908 - protein, 509 aa, Zea Mays
MMRSEVIEAGKLVNLWNEWGLQILVIASFGLQVFLLVFGGVRRHSNSTALTFFLWSAYLLADSTAIYTLGHLSVDSMSDEHQLVAFWAPFLLLHLGGPDNITAYALEDNALWLRHLQTLAVQVLGAAYVIYEYIASRGALLFLASLSMFFAGLLKYGERIWALKCGNISSIRSSISIRKIKTDPYQLLTLGTSEEDLLLGAHSQFDICKGVFADIIMLPNPLVRSQPKPRSVISYLGEDLYKLVEMELSLMYDFLYTKAAVIHTWYGFCIHFISLFGTATTFLLFQLSISNSGNRYSRVDVAISYVLLVGALVLEIISVCRAVLSTWTCSLLHRRGRGWEWSLHIVTSLGQRVHPASRRLWSGSIGQYNLFHLCTRNTNEIGSRLATKLGLEDWWNKMHFSGTFPHANSSLSIQDIKKLVLQALRSKEQALQHQDTDLNSRGSFILKRMEAYKDFARWSVNIDFDESILVWHIATEVFIRKSKARHAKELLEATEALRGITYISPPANN

SEQ ID NO: 47909 - protein, 398 aa, Zea Mays
MGRYELVRSDDAPAVAADLEAGTAAPCDGYPKRRVFTPSPSPSPAPASTRYRQRLVSLDVFRGITVLRVPDKLDASRKALLRALKLFCLGLVLQGGFFHGVRSLSFGVDLQEIRLMGVLQRIAIAYLLTALCEIWIRGDEDVDYGYDLLKRYRYQLFVGAVVAITYMSLLYGTYVPDWEYQTSAPGSTEKHLFVKCGVRGDTSPGCNAVGMIDRKILGIQHLYGRPVYARSKQCSIDSPQNGPLPSDAPSWCQAPFDPEGLLSSVMAIVTCLIGLQYGHVIVHFQKHRERMMNWLIPSFSMLVLAFAMDFFGLHMNKPLYTLSYTLGTAGAAGLLFSGIYTLVDIYGYRRPTVAMEWMGMHALMIYVLIACNVLPIFIHGFYWKEPKNNLLKFIGIGA

SEQ ID NO: 47910 - protein, 894 aa, Zea Mays
MPPRKPLAGGKLKKPLTDKQRAAAEQRLSHLRAHLILRSLDSPAGGARALPPPQEAALDALGLLNFFRLDLQSDTPRPDLIAPLVAYYDPVCKRSFVRGVRVSVSRHHITRALCLPSKPASAAPAPADVDPAAVVPAVMQLLQDYVLLPFQGGDMCILPQEVAAAEQMVREGAAHRVDWGGLIWGLVEKEMLELPKREDGVCYYGPHLQRLIYSEKPHLLELVEEGPVPEASADVEMEDEDGDVDLKSKNLVELEPGDGDGEAGNDVRSESLKDSELGNAGARNDGLDKLELGDAVTRNKVMEELGLRDVDARNNSIEELEVVEEDARSKSLNECEAVDAINNNIVELDAVNEDARCKSLNDESELVEEEFKSPSFDDMNTVDEHVNGTDTDGLCLGFVEVEAVPAVHEAMPDNNEETTEEAPAGGADVAGSDNVAVPTDVDCEEHYVEAVVVTQEVVAVAEELGDEEAKRDEEKDVMGLSLGFNSTNGYGAMDVEKETNVESLDEDESDSGNEEAEESEDGAFDVNDGEDMNWRIGDVNGGEGMTHSLQRCNTFGGMEFENLNKGEDEMRDELRFDDFPARASLERMTSSNLLQAMNSIPSSYNVSENVHDLPSGDFLAMGADAHKSGVDLGPGSSYLFGNNGKRNIDDIDGYNGNMQVQEGFPRSNQQKRMRHSNSSNISPGSGFFNASFSVPIQNLMVEASRLYEQNEQKLQSLQFEKQHWSDMLQQKEAIIQSLNSARFEQHNKYQAELRRFEHDLNVMAQLVTTYKKALKQTRASFDEYRKKFPCNVPLYGDVACGGGLVLSVRELEKRRCEEQQQNIAMVNGMIERFQYKWLSKFEEWGLSVNSLWSRMEGLYKEIELLKENRRARFATPATEESTLATEGSTPATEE

SEQ ID NO: 47911 - protein, 276 aa, Zea Mays
MHFIGGESAALGRVHEYFWKKDQLKDYKVTRNGMLGPDYSTKFSPWLASGSLSPRYICEEVKRYEKQRVANDSTYWVLFELIWRDYFRFLSAKYGNAIFHLGGPRKVVSKWSQDQALFESWRDGRTGYPLIDANMRELSATGYMSNRGRQIVCSFLVRDMGVDWRMGAEWFETCLLDYDPASNYGNWTYGAGVGNDPREDRYFSIPKQAKSYDPEGEYVAYWLPELRSLAKERRNFPGASYIRQVVPLKFDGGNQRKDQQFNRQRRPNNVYIRQVK

SEQ ID NO: 47912 - protein, 376 aa, Zea Mays
MKAVGYNLYDSSGTDDDLPPAQNRGLRGRVFSGNGRASAGAFPYMRANNDLESEIHRVEQDAYTGVLRAFKVQSDAISWEKESLITELRKELRVSDEEHRELLNKVNEDGSIRQMRELRQAGGIPSGLHRGNRVLYDAEPGPTTKRQRASHSIPSQSAGLQSPMMPSHSVSSAKWGPLSARGKKAKMPIPLVLPSVDPSSLINHKVYTRWPEDNNFYEATITKYNAVTGEHELVYDMGTQAETWEWVRLCDMAPEDIRWEFDGHLSNHDGWGPSGPMLKRHMTNNGAMAGSIRGRGRLSINEPIKDYAPPQNDINRNFDYIDIPNTESVVTEVERVLANPNMPEIEKARKLLKDQEQSLLDAIARLDEASDSDSGN

SEQ ID NO: 47913 - protein, 253 aa, Zea Mays
MKAVGYNLYDSSGTDDDLPPAQNRGLRGRVFSGNGRASAGAFPYMRANNDLESEIHRVEQDAYTGVLRAFKVQSDAISWEKESLITELRKELRVSDEEHRELLNKVNEDGSIRQMRELRQAGGIPSGLHRGNRVLYDAEPGPTTKRQRASHSIPSQSAGLQSPMMPSHSVSSAKWGPLSARGKKAKMPIPLVLPSVDPSSLINHKVYTRWPEDNNFYEATITKYNAVTGEHELVYDMGTQAETWEWVRLCDVN

SEQ ID NO: 47914 - protein, 221 aa, Zea Mays
MDMEVYERLTAETSHYRGTRFDALIGLDEVEPSDEEEDEEEEERAAGAGAGDELLCPFCSEELDAVGLWCHMDDEHRAEVCPICTDKVDMNLIVHISSQHRGFLKDKWRNQQGSSGVRYSTLALLKKDLHERISGSSRAAPVSTVPDPLLSSFVGSFYEVDLPKDAKKESLVETEVRSDNIEQRAAESFDEPLLPEVKEEKTRRSQFVQGLVLSLMFDDIL

SEQ ID NO: 47915 - protein, 187 aa, Zea Mays
MAKLMNKLVDSFEHDEILDVGCVRAVLAELVLTFLFVFTGVSAAMAAGDPGARPGQGHQPDAGPGDGGHPHLLPALRHLRHDPGPAEPGPRHRPAADGPHRRRQQPRRRQLHRRVHEPGTLLRPGPGHRGLDKPLGLLDRPAARRAPGRLRVRVAVPGAEDARAAAQWGSLTTISPCVVAHASCLFL

SEQ ID NO: 47916 - protein, 155 aa, Zea Mays
MASSSENAAVPPEEEPQAPPPPDTEPTEAAPGEAEDEPQTLERAQELFDRGSKAIEDEDFVDAVDCLSRALEIRASHYGELAPECASTYFKYGCALLYKAQEESDVLGNVPKSLPNEDSVKSTATKDDSGTSKVSGTDAEDAASSEKVDAEEVHY

SEQ ID NO: 47917 - protein, 901 aa, Zea Mays
MAAAVTRRVGLHVEATNGGADDESRRNSSAADHSPVAKRINDAAANAKRNDVWVAAQEGEMPAAAGNSSQPPLLFRTMKVKGSILHPYRFVILLRLVAIVAFFIWRIRNRNRDGVWLWAMSMVGDVWFGFSWVLNQLPKLNPIKRVPDLAAIRDQYEQPSASGGESNNKLPGIDVFVTTVDPVDEPILYTVNSVLSILATDYPVEKYACYLSDDGGTLVHYEAMLEVASFARLWAPFCRKHSVEPRAPESYFGVKRRQPYTGSVQGEFTSDHRRMRREYEEFKVRIDSLFSTVCQRSQAYNRKHAKDDEAGMVMKATWMADGTQWPGTWIEQAENHRKGHHAGIVVLNHPGHKPELGSPASIDNPFDFSNTDTRLPMLVYMSREKRTGYNHQKKAGAMNAMLRVSALLSNAPFLINFDCDHYVNNSQAFRASMCFMLDPRDGRNTAFVQFPQRFDGVDPTDRYANHNRVFFDGTMLSLNGLQGPSYLGTGTMFRRAALYGMEPPRWRTTGSVKVIDDDDDHKGKEYGRSTLFRNAVLDDAANQERSITPVFLDDDETTTISSEVASLMTCAYEDGTTWGRDVGWVYNIATEDVVTGFRMHRQGWRSMYCSVEPAAFRGTAPINLTERLLQVLRWSGGSLEMFFSHSNAFLAGARMHPLQRVAYLNMSTYPVVTVFILAYNLFPLMWLVSERYYIQRPFGTYVLYLVATIAMIHVIGMFEVRWAGITLLDWCRNEQFYMIGATGVYPTAVLYMALKLVTGKSIHFRLTSKQTEACSGGDKFADLYVVRWVPLLVPTIAVLAVNVAAVGVAVGKAATWGLLTQQAQHALLGMVFNVWILVLLYPFALGVMGRWGKRPAILFGVLVMAIGAVAVVYISFRATYYPTGWSEMETTSALGKAESFF

SEQ ID NO: 47918 - protein, 317 aa, Zea Mays
MEKQGLDMHVAALINDAVGTLAGARYYDKDVVAGVIFGTGTNAAYVEKANAIPKWEGELPHSGDMVINMEWGNFFSSHLPITEYDQELDKESLNPGEQIYEKLTSGMYLGEIVRRVLLKISLQSAIFGDIDHTKLQTHFLLRTPHISAMHHDETSDLKIVAENFEENLEITGTSLEARKLVVEICDIVATRAARLAAAGLAGILMKIGRDHSVEDQRSVIAIDGGLFEHYTKFRRCLETTLGELLGDEASKAVAIKHADDGSGIGAALIAASQSQYKNDLVAVKHADDGSGVKYAEDKRADDGSEIGAALIAASQSQ

SEQ ID NO: 47919 - protein, 319 aa, Zea Mays
MDDASIGGHWWPLTPPQTSPSLRRQRRFGQRPPTGSQVLLTVRHRVEPDITTMTMRHRRSSRSHFCCPLPTPVNFVCLHAVKPHLRPLAMAVSTVSIHIFGDVPSSPLVGLLQDKINNWRETSLILTSILFAAVVFWFIGVSEAAQDALDHLFNQGHNLVTENEISDTFTRLVERLPQVVLGSEETTTLSHARMLLALTFYAGHSSQFSGSMDKLIVSKPLSIGYLYSVAELKSGAYSKDTTNISLHATSTFAASKISVIHDNALPNSLLGTVEYELPHVPPWFIHAGIQKLYGVLAGIIRLVGLSTVSVGWCGLLSSR

SEQ ID NO: 47920 - protein, 204 aa, Zea Mays
MDDASIGGHWWPLTPPQTSPSLRRQRRFGQRPPTGSQVLLTVRHRVEPDITTMTMRHRRSSRSHFCCPLPTPVNFVCLHAVKPHLRPLAMAVSTVSIHIFGDVPSSPLVGLLQDKINNWRETSLILTSILFAAVVFWFIGVSEAAQDALDHLFNQGHNLVTENEISDTFTRLVERLPQVVLGSEETTTLSHARMLLALTFYAGP

SEQ ID NO: 47921 - protein, 309 aa, Zea Mays
MRSLPPWQSPFLGHQKFDTSPSKYSISSTKVTTKEDYLSSFWTKLEESRIARIGSSGDSAVASKLWNYGSNSRLFENDTSIFSLGTDEKVGDPTKTHNGSEKVAATEPLGRCSLLITPTEDRTDGITEPVDLAKNNENAPQEYQAASEIIPDKVAEGNDVSSTGITKDTTGHSADGKALTSEPHIGETHVNSASESIPNDAAPPTQSKMNGSTKKSLVNGVLDQPNANSGLESSGNDYPSYTNSSSAMPPASTELIGSAAAVIDVDSAENGPGTKPEQPAKGASRASKSKVVPRGQKRVLRSATRGRAT

SEQ ID NO: 47922 - protein, 572 aa, Zea Mays
MAGKEQGGGGPPQRPPMPAASMQPPIKKLVRQLDFNSAALAGNPAMAAAAAAVSRALQPRALPAGFQHPQHVRAAVPMVVPQQLHQRALPVMRPHPVVGHVPRHAVPLAVPVPQLRPMPPQPVQRPPVAVPLKPDSPKPWARLYEGKDSTPTKKKCCNCRNSRCLKLYCECFASGTHCDGCNCTNCFNNPENEVARREAIEATLERNPDAFRPKIGSSPHTNRNNCMDCKNFEGSEERRNLFQGDHKNAINIQQATNAAVNGAIGTTGFPSPSTSRKRKHIDPSLDHSNKEHAAHRNCHIPQKNAVPDGSIPISQSAHPPTLGPFKVTYRPLLADIVQAEDVKELCKLLVVVSGEAAKTYADRKAKEERVGKKEDERAEQKEDDRAGSLALTNHDREGNNQDPDKKASIDDHSSRGTHTGKANQEESRPNCADDQKSNRPMSPGTLALMCDEQAFEKMCDEQDTVFTASQNAVPQQTVTVNQNQSALYAEQERIVLTEFRDCLRKLVTYGRMKEERYAMEIKSETSGHPGQVNGVSQVPYSKVEVPVVKTDPQSSSSHPVAGKPVTGLLDKN

SEQ ID NO: 47923 - protein, 289 aa, Zea Mays
MDDNKITMDMASQIFEILRKPGCTYLTQDDFKPVLKELLATHPGLEFLQGTPEFQERYAETVIYRIFYSINRSGNGHLTLRELKRGNLIAALQQLDEEEDINKVLRYFSYEHFYVIYCKFWELDADHDFLIDKENLIKYGNHSLTYRIVDRIFTQIPRKFTSMTEGKMGYEDFVYFILSEEDKSSEPSLEYWFKCIDLDGNGILTYNEMQFFYEEQLHRMECMAQEPVVFGDILCQMIDMIGPENESYFTLRDLKRCKLSGNIFNILFNLNKFMAFETRDPFLIRQRIY

SEQ ID NO: 47924 - protein, 105 aa, Zea Mays
MYSLEFRRSNLRPVIPLSCPAALKLLIEQCWSWQPEKRPDFQQIVSILEDLKTVLETDGTLHKVPSSICQALESNDQNKKKAGNWIQRLSYAQPDFSGPPPPKLL

SEQ ID NO: 47925 - protein, 244 aa, Zea Mays
MGQGSPGGMGKQPGLPGDRKQGDGKKEKKYEPPAAPSRVGRKQKRQKGSEAAARLPAVAPLSKCRLRLLKLERVKDYLLMEEEFVASQERLRPSEDKTEEDRSKVDDLRGTPMNVGSLEEIIDESHAIVSSSVGPEYYVGILSFVDKDQLEPGCAILMHNKVLSVVGILQDEVDPMVSVMKVEKAPLESYADIGGLDAQIQEIKEAVELPLTHPELYEDIGIRPPKGVILYGEPGTGKTLLAKV

SEQ ID NO: 47926 - protein, 438 aa, Zea Mays
MADPDDLGRRLAAVAVSESPTAAAAALESSNNNLFQVMRAVEDAEATIRQQLEENSRLKDELMLKTRELHRIRSEATDQASSHGIRIHQDRALGAHTDTSSTAPIRTTATAAEAFEWGAGDAGINHKYLEANQANGIPRKSPSAPDSAFPSQLSTPSSRSLSPTRHHKETDYDSRLNLSGQGALPVSDLNSNVVIWKQDLLVKVKEQGEEIAQLRRHLSDYSVKEAQILNEKHVLEKRIAYMRMAFDQQQQDLVDAASKALSYRQDIIEENIRLTYALQAAHQERSTFVSSLLPLLSEYNLQPPVLDAQSIVSNLKVLFKHLQEKLIITEEKLKESQYQITPWHAESSNNTSAAAQSPSHPPGNALIKANLDIVPQQAYSHVHSPVSSPVQTRRDWDLLGNENRQVIRSEVATTSAEHDNVGRTSPSTRLLVVTSKIQ

SEQ ID NO: 47927 - protein, 106 aa, Zea Mays
MSSAAGRAPAPTPMGSADRCKSLCNACGIRYRKKRRQELGLDRKLQQQQNNGEAKTDEAKDSSSNSSSGSSNLQVVQKRRLLMGVEEAALLLMTLSSSPTSTLLHG

SEQ ID NO: 47928 - protein, 157 aa, Zea Mays
MSHAMGQYAYPNIDPYYGSLYAAAYGGHPLMHPTLVGMHPAGLPLPTDAIEEPVYVNAKQYNAILRRRQSRAKAESERKLVKGRKPYLHESRHQHALKRARGAGGRFLNSKSDDKEENSDSSQKEIQNGVAPQKGGQPSTPPSPNGASSAYQAPSRE

SEQ ID NO: 47929 - protein, 179 aa, Zea Mays
MAAAAAAGAASSILSSTPPRRLTFPPAHIRKPLAAAAPKALNLSSQKLPPLSSSATASPPPPPDGDDKPDPIKLAFARAAAYKKGRDSHSPSPSPAPAPPPTPPPQSSPPSQPQASVSEPGSKEAFKRALEYRNGNGAGAGAAGGDSPLLGGSPDFVWRWKKYTPWWRDSKCRRKGSQR

SEQ ID NO: 47930 - protein, 73 aa, Zea Mays
MVEKFAHCTTCVVPWSNGVQFFGTSRLIWAVRPVGLWTVDKARRGFLEMGSDRQLGLGIGSQANPNGSCRSFP

SEQ ID NO: 47931 - protein, 125 aa, Zea Mays
MRDMGTEMTPIASQEPSRTATPMIASSPTSSRTPTPQRTTEFSVSNIDSNKMAMSEEEVHISTRQEIMDLGERLGKTTIAAWASKEEKAAARSTDTAADNAVDVNRENRAADWQEAEKAKYLARN

SEQ ID NO: 47932 - protein, 399 aa, Zea Mays
MLRGLEKHQRNSGEDTSPEANDSGELDDRRSLECSTSTEMSSNSGHRSRNRAPDDDSFDSESSSSGPPTVKRSAAVAALLPPFSRPTPSKWDDAEKWISSPTSNRTGRAGPTAGTMPKKSALAFPEHGARQPAVAKVVTDVPTIAGPLVKNSDGLAHPDLLKLAHDASIVDGPAPAVRSVSMRDMGTEMTPIASQEPSRTATPMIASSPTSSRTPTPQRTTEFSVSNIDSNKMAMSEEEVHISTRQEIMDLGERLGKTTIAAWASKEEKAAARSTDTAADNAVDVNRENRAADWQEAEKAKYLARFHREEAKIQAWENLQKAKIEAEMKRIEAKIERKRAREQDRLASKLAAVSHRAEAKREAAEARRDQEAARTEEQAAQIRETGHTPSSFSCWCWCL

SEQ ID NO: 47933 - protein, 388 aa, Zea Mays
MAGYGEENQNAMNGYEEEEEEEEVEEVEEVYEEEEEGDGEGEGDEGAAAEAAAMAAETRSVDGGRGLAEAVGNVDAGGEDERDADSSGGDASGKVFVGGVAWETTEETFTKHFQKYGAITDSVIMKDKHTRMPRGFGFVTFSDPSVLDRVLEDEHVIDGRTVEVKRTVPKELSSKDGPKTKKIFVGGIPPSLTEDKLKEHFSSYGKVVEHQIMLDHSTGRSRGFGFVTFESEDAVERVMSEGRMHDLGGKQVEIKKAEPKKPGAGDSSSNGRHSRGGGHRDSYRGSGVSVNSGGGYGYGGGYRSAAAAYYGSTAYGAYGRGYGYGATSGYGSGYGSAYGGSMYGGPYGAYGSYGGAYGGYGSYGGAGGMGGGGSAGGRGSSRYHPYGK

SEQ ID NO: 47934 - protein, 501 aa, Zea Mays
MPPLVPSLLLPIPALILPAPPRLSRHRCFLPAVSSSSSSSSSPHSREPYRRRRRDTPSQTPTPAPRPSSQPQPPPRRANAATPGARSQEELEAAIYDFMCRSAKPGAFPTREELVAAGRSDLAAAVASSGGWLSLGWSSTAAEGPATTAAPCSSGGGHPDYPPETGVYYRGDLAPVSVEDSEWEDDEEDASPSGRESGTEEASEVRLNAGIEGMLTRLQKDRERARPPPRTSTHDTQGQSDDDAGNSGAPSHTAAGGRHIPRAPENGSVHGSHSQNGTIEGNSTFQGSNDDAWQTWTLGKGDLSHFEAAEVLPIERRKVSRHDDIASVQNDIHRSSNGVAVSDFSSDGVGTGRDEIHSRLQILELDLSAALKTLRSRFDKVLSDLSNSNGATVLDDISDDWEFEETKVMQAQEELRSIRAKIAVLEGKMALEIIERNKIIEDKQRRLDKVEKALSELRTVCIMWANPASDVLVVGSFDGWTSQKHCRHKDEWGQTGKWWLI

SEQ ID NO: 47935 - protein, 697 aa, Zea Mays
MDCLVAGANFLLKAIRHEAFTHMDGQKQYVQIDQNDLFPFLLVNVGSGVSIIKVDGHGKFQRVSGTNVGGGTYWGLGRLMTKCKSFDELLELSQRGDNSTMDMLVGDIYGGLDYSKIGLSASTIASSFGKIISENKELSDYRPEDISLSLLRMISYNIGQISYLNALRYGLKRIFFGGFFIRGHAYTMDTISFAVHFWSKGEAQAMFLRHEGFLGALGAFMSYEKHGLDDLRVHHLVERFPMGAPYVGGKIHGPPLGDLNEKISWMEKFVQKGTQIIAPVPMGVPATTGMGGFERPTAKGDILRSDASAALNVGVLHLVPTLDVFPLLEDPKTYEPNTIDLDQDEFKYWFKILSDHSPDLVDKAVASEGGTDDAKRRGDAFAHAFSAHLARLMEEPAAYGKFGLANLLELREECLREFQFVDAYISIKQRENEASLAVLPDLLMELDSMNEEARLLALIEGVLAANIFDWGSRACVELYHKGTIIEIYRMSRKKMQRPWRIDDFDMFKKRMLTDRKDQSYKRALLFVDNSGADVVLGMLPLARELLRHGTEVVLVANSLPALNDVTANELPEVIAEASKHCGILRKAAEAGGLIVDAMAGIQDDLKDETVSVPLMVVENGCGSPCIDFRQVSSELAAAAKDADLLILEGMGRSLHTNLNARFKCDALKLAMVKNQRLAEKLFNGSLYDCICKFEPVP

SEQ ID NO: 47936 - protein, 588 aa, Zea Mays
MQGLAVSCQLPPAAAAARWRPRASSSNREAVLQCWKYELSQDHYLGGPLRIGQSQGSLHRHRSTNFLRPAAAAISVEQDEVNTYLPKGDMWSVHKFGGTCMGTPKRIQCVANIVLGDSSERKLIIVSAMSKVTDMMYNLVQKAQSRDDSYAIALAEVFEKHMTAAKDLLDGEDLARFLSQLHSDVSNLRAMLRAIYIAGHATESFSDFVVGHGELWSAQMLSYAIKKSGAPCSWMDTREVLVVTPSGCNQVDPDYLECEKRLQKWFSRQPAEIIVATGFIASTAGNIPTTLKRDGSDFSAAIVGSLVRARQVTIWTDVDGVFSADPRKVSEAVILSTLSYQEAWEMSYFGANVLHPRTIIPVMKDNIPIVIRNMFNLSAPGTMICKQPANENGDLDACVKSFATVDNLALVNVEGTGMAGVPGTASAIFSAVKDVGANVIMISQASSEHSVCFAVPEKEVAVVSAELHDRFREALAAGRLSKVEVINGCSILAAVGLRMASTPGVSAILFDALAKANINVRAIAQGCSEYNITVVLKQQDCVRALRAAHSRFFLSKTTLAVGIIGPGLIGGALLNQLKNQESCVILLR

SEQ ID NO: 47937 - protein, 500 aa, Zea Mays
MAGVPGTASAIFSAVKDVGANVIMISQASSEHSVCFAVPEKEVAVVSAELHDRFREALAAGRLSKVEVINGCSILAAVGLRMASTPGVSAILFDALAKANINVRAIAQGCSEYNITVVLKQQDCVRALRAAHSRFFLSKTTLAVGIIGPGLIGGALLNQLKNQTAVLKENMNIDLRVIGITGSSTMLLSDTGIDLTQWKQLLQKEAEPADIGSFVHHLSDNHVFPNKVLVDCTADTSVASHYYDWLKKGIHVITPNKKANSGPLDQYLKLRTMQRASYTHYFYEATVGAGLPIISTLRGLLETGDKILRIEGIFSGTLSYIFNNFEGTRAFSDVVAEAREAGYTEPDPRDDLSGTDVARKVVVLARESGLRLELSDIPVKSLVPETLASCSSADEFMQKLPSFDEDWARQRSDAEAAGEVLRYVGALDAVNRSGQVELRRYRRDHPFAQLSGSDNIIAFTTSRYKEQPLIVRGPGAGAEVTAGGVFCDILRLASYLGAPS

SEQ ID NO: 47938 - protein, 363 aa, Zea Mays
MPARSILKRTISQRKIKSNATLSTINEENIDDAATMDSVASGKRIINSKFASENSLEVSGGTEITLDALAAYLKYLEGTGNASWQELHDKVRLAETRYGASFYILFGPAIQLGVISRRKAYTETIQYEKDRNAGFLSPFGYSTPTVTSAVDAICSMEWYWLLASKSQVCIEGKYSIRIWRWKGYLVQYTFLGNEGPPVLLVHGFGAFLEHFRDNIDKIAATGHRVWAITLVGFGKSEKPNVNYSELFWSELLRDFIVEIVREPVHLLGNSIGGYLCAIAAGLWPSLAKSLVLLNSAGSVVPNYSFIPLSEERRTSWISRLQAQLLLLFLRSRAEGILKEYYPTRTERVDKPLLDQIKVSLTNK

SEQ ID NO: 47939 - protein, 109 aa, Zea Mays
MANSAPGGMRSFLQAVSTVTEEAPTPLRVVQMEGLAVLKIIKHCEEFAPALVTGQLLGLDVGSVLEVTNCFPFPIREEDDEADADGANYQLEMMRCLREVNVDNNTIGW

SEQ ID NO: 47940 - protein, 179 aa, Zea Mays
MDLYRNNGLTGEKLREKKLSWVDIFEEIPIKVSNSALVSAFMKELEPESPVTQCDLDRLKLSTAPFMERNLEFLIGCMDDLSSEQNKFQYYNRNLSRQQSQQQAWLQKRRQENMARKAAGEEPLPEEDPSNPIFKPIPEPSRLEGYLVTNQISSYCNHINGVAGQNFDRLYLMKALHED

SEQ ID NO: 47941 - protein, 444 aa, Zea Mays
MEDDDTEGVGESTCPPAADRGGSSSAGGGGGDSHSYTDIEKEVFDRLMEKRIPEVVADPVAFREELRRHFERLPLSYAVDVNVDKAEDVLLHRRILNECAHPENRPIFHVGFLNCIPPSVDPQYNTQSISTSENGNCGGSQDSTLRKFEPCEGIEDLSLTGQKVVVDSVASSSRGDEEILHVHEIIFSTIDKPKLLAQLSALLSEVGLNIREAHVFSTTDGFCLDVFVVDGWDTKETDTLLQILKETAARNHASLSNPTNSAASERVLELQEKIGDSNIDRNFLQIGEKIASGSSGDLHRGTYQGMDVAVKFLRTEHVNDSSKVEFLQEIIILKSVNHDNVVRFYGACTKQRKYVIVTEYMPGGNLYDFLHTLKNTLDLPTVLRIAIGISKGMDYLHQNNIIHRDLKTANLLMGSDYVCILLSLYLLITNSRFIKHWVVLENRL

SEQ ID NO: 47942 - protein, 444 aa, Zea Mays
MEEAAPESSAAAAAAADATSNSDDDRARPGDIMTRAAAAASVKQQRQPLCDLSGSRADVCDLTGDIRLNATASEFIVVDPAAADDGPTTAYEIRPYARKGDATSMGRVTAVTVRVRATADAAPRCTVTHAEPAVAFSVGGYTGNLFHDFTDVIVPLYGTAQRYRGDVRLVVTDAGSSSSWWLAKYDAVLRGLSRHPPLHLHLAKAAGEVHCFGHVVLGLRARRELMVEPDPDPDRGRPDGVGMADFARFLRRALSLPRDAPTRPAAASSDDRRKPRLLVVSRRGTRRLLNADAVARVAEEVGFEAVVSELEVSRDAAGVGRLINSFDALVGVHGAGLTNMVFLPPGATVVQIVPWGGLQWIARMDFGDPADAMGLRYIQYEIAVHESSLADKYPRDHEIFTNPTALHKKGFKFLRHTFLIGQDITLDVDRFRVVLLQALRNLTE

SEQ ID NO: 47943 - protein, 573 aa, Zea Mays
MAMNPWTANNGARSCNLRLTLESLNHCLVHLRTPINHYSTAQANLFFYTDLPRLHPILHQGKVLDCLILLKVLHGTQAFHHQHQRLAPGQPPLQNYINMQPHLFHHHQPPDVPSPRDKRSRSGRGGKHNIRFSQQPSDAGSQHSESSGIKFRSKYMSSEEIESILKMQHSANHSNDPYFDDYYHQACKAKRSVTFQKSNFCPMSIKDFPSKSRSGVDQHSYLQVDANGGVSFSAIRRPRPLLEADLPGSGDGFYDHKSSKRSLEKEPMLAARITVEDSLRLLLVVDDIDRFLQSSQPQDSSFQLKRRREVLLEGLATSLQLVDPFGPNKHGHSGGLAPKDDLIFLRIISLPKGRKLLARYLRLLFSGSELTRIVCMAVFRHLRSLFGGLPSDYSAAETTIVLAKAVSSCVRHMELSALSACLAAVVCSSQQPPLRPLGSASGDGASLIIKSVLDRATELLADPHSAANYSRSARSLWHASFDAFFGLLTKYCDSKYESIVQRFAMQGSNSMGGPETTKAVSREMPVELLRASLPHTNEQHRQTLLDFARKSTHLPGFSPTANRGLVNSESVPG

SEQ ID NO: 47944 - protein, 612 aa, Zea Mays
MLPLALTWVPTSNGIANGFCVGKNIGIDPQPGKAALRIHESACYVNDAKMQGFLHACADRHLEKGQGIAGRALKSNLPFFSPDIREYSIEDYPLAHHARKFGLHAAVAIRLRSTYTSYDDYILEFFLPVNCKGCGEQQMLLNNLSSTMQRICKSLRTVSEAEIENVSATAAMFEKTSGTCLPTGNSESSSHDDQPITESALQDLSLGDKQGDREPDKPQRSSMRVADKKRSASEKNFSLDVLRKYFSGSLRDAAMSLGVCPTTLKRICRQHGISRWPSRKINKVNRSLKKIEKVIKSVHGVDRSLQYDPATGSLVPATSLPEKMPFSACDTLPTSSLGRAVEETCSPKSEQDFSSPDGWQRETSQFHVSGIPKRGGDEVRTLANNNKGRRNYVSGIANITQHSNSEGTHGPSYPNPIGAVNSLHTGETGNIDSLTSLHPSMDGIEGQTTVRNSPFVQQADVTMVDGHDTKEQTLPSTSGMTDSSSGSASSEPTFKGNPGRALKDRSSPALTVKATYNGDTVRFKFVPARGWYHLLEEIAKRFKLTAGAFQLKYKDDEDEWVILANDADLQECMDVLDSISSRNMKLQVRDLSCHVGSSGSSSSCLQVEAHSS

SEQ ID NO: 47945 - protein, 144 aa, Zea Mays
MAAKGLHLPGQTATLHCILQMIHYPGTHLIEVSSIGYFFSPVRVDISARNPGYIQAALTETRRVLNELVLEPLKEEQYYEVREPFSIMSLLKSPMGLMVGFMVLMVFVMPKMMENIDPEEMKQAQEQMRNNPVSFSGLLARAQG

SEQ ID NO: 47946 - protein, 216 aa, Zea Mays
MAASSLCHGHLLLFLLVSVTSACLGTAAAHQAGSGEGYTIAGRVKIDGMSEKGYGLPAKTSNTKVILNGGQRVTFARPDGYFALYPTNDSLPHNVPAGTHLIEVSSIGYFFSPVRVDISARNPGYIQAALTETRRVLNELVLEPLKEEQYYEVREPFSIMSLLKSPMGLMVGFMVLMVFVMPKMMENIDPEEMKQAQEQMRNNPVSFSGLLARAQG

SEQ ID NO: 47947 - protein, 56 aa, Zea Mays
MTTNQFLFSLDIDNINIVEFCHFVKDINIIHKVNFLIYNHCLKLVVYNLFDALSEL

SEQ ID NO: 47948 - protein, 74 aa, Zea Mays
MQCFRLLLLKKDLNQVFLITALKRKKRETKPEKRRKTGYMGLPWPTAGMRPTAKAGPRAAFSHRGGGHIPIRIL

SEQ ID NO: 47949 - protein, 409 aa, Zea Mays
MRSSVSERSLIIESDDDDDDHPQSRSSAAARSRRRHHQHEEDSAAGSDSDSGSSSSSCGTPRGPATDSSYTQQWPQSYRQSIDILSSVQSPNLSFLGTPTLSRLSNSFRGKTPEIISNLVKPLLRPTTSDDHHHHHQQQPEERKSSQYLLPSRKPSLQQIPEDQKPVPVAHEVSPYHKCTYTQAVVNGINVLCGVGILSTPYAIKQGGWLGLVILCLFAILAWYTGVLLRRCLDSKEGLETYPDIGHAAFGATGRIAISIILYVELYACCIEYLILEGDNLSKLFPNAHLSVGSLTMNSHVLFTILTTIIVMPTTWLRDLSCLSYLSAGGVFASILGVICLFWVGVVDNVGFENKGTALNLPGIPIAIGLYGYCYSGHGVFPNIYSSLKKRNQFPSILFTCGDGIQNVW

SEQ ID NO: 47950 - protein, 516 aa, Zea Mays
MRSSVSERSLIIESDDDDDDHPQSRSSAAARSRRRHHQHEEDSAAGSDSDSGSSSSSCGTPRGPATDSSYTQQWPQSYRQSIDILSSVQSPNLSFLGTPTLSRLSNSFRGKTPEIISNLVKPLLRPTTSDDHHHHHQQQPEERKSSQYLLPSRKPSLQQIPEDQKPVPVAHEVSPYHKCTYTQAVVNGINVLCGVGILSTPYAIKQGGWLGLVILCLFAILAWYTGVLLRRCLDSKEGLETYPDIGHAAFGATGRIAISIILYVELYACCIEYLILEGDNLSKLFPNAHLSVGSLTMNSHVLFTILTTIIVMPTTWLRDLSCLSYLSAGGVFASILGVICLFWVGVVDNVGFENKGTALNLPGIPIAIGLYGYCYSGHGVFPNIYSSLKKRNQFPSILFTCIGLSTILFAGAAVMGYKMFGEATQSQFTLNLPENLVVSKIAVWTTVANPITKYALTITPLTMSLEELLPPNQQKYSNIVMLRSALVVSTLLIALSVPFFEWNKLIHYHIIPYGGV

SEQ ID NO: 47951 - protein, 93 aa, Zea Mays
MCYWCYSACTANEIGPTTQGTYTREIEDTILLALQKPEVYDDIARATCCKFGIDRPQVVPVQGLPQEKMKWNSNFSGRTSVEPVDDQVFQLVF

SEQ ID NO: 47952 - protein, 93 aa, Zea Mays
MFSVEMLYRKVVDHFFILLVYKFHDHRFSSLGVMIFPSTVYESIQILYRFRKLSCLIKLNLESVLSNYKEVVVLFLSFPKKFGSPFLVIYKLS

SEQ ID NO: 47953 - protein, 322 aa, Zea Mays
MAASSSEAATATPTTTVGLGGSGTPGPPPPTPSNHHAAPSSAAGGATDASLSAFLHRLLLSSPAPQLRSPLAARSQASPPSLPPLVSLESPDQRALRNAADVGYFHLAGHGIPSGLPSSALAELSRIDASTRLESNLRTLGFSVEEGEEQDVDGGADDPAVVFDACEGDLDALPAAAEYARRMKDVGMRVVALLSGCPDTGFREKPFAEGRRKPRCLLWASRVSTADTAPPAVGKAKAYPYVVALHCQWEASGQEEAPPSWVMNHGGEWTAVAARDDAMLVTVGDIAQNVQHRAAEMASIRFVYAAASAQRHQILKCGAMAS

SEQ ID NO: 47954 - protein, 96 aa, Zea Mays
MEPLSCTPAEPCHRPSRDFRHASPPCEIAAPGRECAVCPSRQLLSPSPTCRIVPTTATSRARPGSAATGTASILPCLLAMHHVRVQRDNRRPPLLS

SEQ ID NO: 47955 - protein, 335 aa, Zea Mays
MWALFMESWGSWRNDCLNLSPIPFTDPVTNLPLWHVREESPLLLYGFSKEIVECPGYWPFNAHACGFWFLPMDWQFSCDKCMELSGNINSSFGGMLCANHSSLEHFLTRNAYSSRPIFVGLSSIGRMGFLRNPKAFLMVLKAAIESTDYMFILFSSGYKPLDSAIQSIASSVNESRGVDSPSLGGDSALLFNGRLFCFLGSIPYSWLFPRCAAAIHHAGSGSTAAALLAGIPQVTCPFMMDQFYWSERLQWLGVAPEPLQRQNLVPDNDDALSIHNAADVLVGAIRSALSPETKAQAARIADRLSSEDGIGEALRILKARVLTQNKIISSFIASK

SEQ ID NO: 47956 - protein, 163 aa, Zea Mays
MASSLGSDDSAGSAAAVCCMCGDHGLPLELYRCDLCRIRTQHSDLYPAAAAAGPYRSCNWCLRQGGADVGGGCHSPSPVNKVSAAAGTGTRRRISINGSRGDGESATAMDAPAGQRSRRTPGSRSRSLKRAVKKERCSGRSRCSRRCLRKRGGWCSLPSRGSR

SEQ ID NO: 47957 - protein, 159 aa, Zea Mays
MAAASLALASPLRLLLRVRHPRGAIAVPCYFISRGRYSTAIAVAAARDLAVKGSVDRNSAEEVRNILNMAERASQRRNVFHTNFLTPPIVKEAMLALEKFADTKAVAQGGYPQAERCRISVGHPDVMTSNPDVVAALRNNKGESWRYSFAGGTRCPGPC

SEQ ID NO: 47958 - protein, 82 aa, Zea Mays
MPFVLLRMQTSCAMAPAFSVFLTSYSYGDSMSMARAVEAIKEGGPRGSKSLVYSMMTIASRSRWCLWMLQQERSKVLLDGCS

SEQ ID NO: 47959 - protein, 109 aa, Zea Mays
MRRHQTSQGRSPYAALCRPPLPAIYVLLLPLAIPMTASRQPAPCGSPPLHIPVLSCSQLPGGTPDHTKWIGFFSSKQDFIDVVEAIFRGAMKGKLIVSCPLPPERIPRF

SEQ ID NO: 47960 - protein, 331 aa, Zea Mays
MDAKEGTTTGVSAKDRAKTVMTLASPDSKPEDLNRPGHIFPLKYREGGVLKRAGHTEASVDLAMLAGLPPVAVLCEIVDDADGSMARLPKLRVFAEKENLKIISIADLIRYRRKRDRLIERASVARLPLKWGNVHAYCYKSVIDGIEHIAMVKGDIGDGQDILVRVHSECLTGDIFGSARCDCGDQLAMAMEMIEKAGRGVLVYLRGHEGRGIGLGHKLRAYNLQDDGRDTVEANEELGLPVDSREYGIGAQILRDLGVRSMKLMTNNPAKYSGLKGYGLSIAGRVPLITPITSENRRYLETKRTKMGHVYGLANAQANLANGSQSTEENH

SEQ ID NO: 47961 - protein, 262 aa, Zea Mays
MDRGVVHKSSAALVREMGEAGHSHGWWSMNNLLRPPFEQQHHASLFMPSTTTSSSTAAAAPSSSSSSSPPLQSFSSLLLSNHYPLPTTTSTSPWQHDTSITSSHGQPDSWSQLIHSKESQQMAFPTTICSESGGGGSSYVVYGAAAASHGSSTSDVEIQLPWGSSSVLQQQQKASSPRSSSRTTATTTSPGSNMLEFSNNSSSSPRECISTVSGSAFKKARTQEPSPAQSTVKVRKEKLGDRITALHQLVSPFGKLYVGVDQ

SEQ ID NO: 47962 - protein, 389 aa, Zea Mays
MDRGVVHKSSAALVREMGEAGHSHGWWSMNNLLRPPFEQQHHASLFMPSTTTSSSTAAAAPSSSSSSSPPLQSFSSLLLSNHYPLPTTTSTSPWQHDTSITSSHGQPDSWSQLIHKESQQMAFPTTICSESGGGGSSYVVYGAAAASHGSSTSDVEIQLPWGSSSVLQQQQKASSPRSSSRTTATTTSPGSNMLEFSNNSSSSPRECISTVSGSAFKKARTQEPSPAQSTVKVRKEKLGDRITALHQLVSPFGKTDTASVLLEAIGYIRFLHSQIEALSSPYVGGSNGGGGGSKQNQQLHEASAQRESRHSIFPEDPGQLLHDSSAIKKRAGLQPADESCDEEKKKDLRSRGLCLVPVSCTLDVGVDVVAGPADYWAAAAPAFGMGFGA

SEQ ID NO: 47963 - protein, 313 aa, Zea Mays
MKHLSVPPPFLKIWGKVLPSAVYTRAVKHHLDLSTCRRDSFSAVQPGNNVPHQSTEFNDHPSTQLPYSPPPPSQSQHPSPSQSYSSPSYQATTDYPSSDFHKPSPNYSTPGYTSTDFPTNEVHKPPSNYSPPPYTRTDRPSNDGYNPHSNGKPDVSAYPQAYQPSPYTFDPQHNSQNYYSTEAPAVPYNYPNFQSYPSFQDNTSASVLTHQSSFYPESDDPAATSHTPASNSSVPTHYHPTADCSPQVTPPAAPPASQYRYDSSYQPEVEKIAEAHKAARFAVGALAFDDVSVAVDHLKRALDLLTNPSAEPH

SEQ ID NO: 47964 - protein, 591 aa, Zea Mays
MEETHNTLKFASRAKRVEIYASRNRIIDEKSLIKKYQKEISSLKQELDQLRRGIVGGASQEEIMSLRQQLEEGQVKMQSRLEEEEEAKAALMSRIQRLTKLILVSTKNNIPALTDGHQRHNSVSEQDKLSTSQDSSTLVQNEGTTKDHLPDSLDEINQLRSGSGEHSSATCSATDSMQIENLEREIQQKRRHMRALEKQIMESGEASVANASMVDMQQTITKLTAQCSEKAFELELKSADNRVLQEQLQQKNAEVNDLQEKVFHLEQQLSAKVGISPEQETDCAQQEAIDLKSKLQSKEAEFEKLKFEHLKITEEQCDLINQNHKLSEEAAYAKELASSAAVELKNLAEEVTKLSVLNVKQAKELLVAQEMAHSRVHGRKGRTTSRGRDEVGTWSLDLEDMKIELQARRQREAALEAALAEKELLEEEYKKKFDEAKKKELSLENDLAGMWVLVAKLKRGALGISDFNVDDRTVNLADITNGTKENKGEKNFALVEKQVSEDSVKSLSTEEHRSPEFEPLLVRLKEMKEKDTDPLSDKDGNSHVCKVCFESATAAVLLPCRHFCLCKPCSLACSECPLCRTRIADRIITFT

SEQ ID NO: 47965 - protein, 358 aa, Zea Mays
MQEQASYPADQQVLIHQGKVLSDDTTLEENQVTENNFLVIMLRQNKGSSSAAPAKTTANQAPPTQTVPVVPPQTSAAPAAPAPIVPVSALAATATASAAPAVAVSTEADSYGQAASNLVAGSNLEGTIQSILEMGGGIWDRDTVLRALRVAYNNPERAVEYLYSGIPEQMDVPTSPPSIQPVNPVQAAQAAQTAAPSGPNANPLDLFPQSLPNASANAGTGNLDVLRNNVQFQNLLGLVQANPQILQPLLQELGKQNPQVMQLIQENQAEFMRMINEPLEGDEENEMMLDQMADAAETIAVTPEENEAILRLEGMGFDRALVLEVFFACNKNEQLTANYLLDHMHEFDNDDGLGGPPL

SEQ ID NO: 47966 - protein, 492 aa, Zea Mays
MNVVVVASECAPFCKTGGLGDVVGALPKALARRGHRVMVVIPRYGEYAEARDLGVRRRYRVAGQDSEVTYFHSYIDGVDFVFIEAPPFRHRHNDIYGGERSDVLKRIILFCKAAVEVPWYAPCGGTVYGDGNLVFIANDWHTALLPVYLKAYYRDNGLMQYARSVLVIHNIAHQGRGPVDDFVNFDLPEHYIDHFKLYDNIGGEHCNVFAAGLKMADQVVTVSNGYLWELRTSEGGWGLHDIINQNDWKLQGIVNGIDMSEWNPAVDVHLHSDEYTNYTFETLDTGKRQCKAALQRQLGLQVRDDVPLIGFIGRLDHQKGVDIIADAIHWIAGQDVQLVMLGTGRPDLEDMLRRCEAEHSDKVRAWVGFSVPLAHRITAGADVLLMPSRFEPCGLNQLYAMAYGTVPVVHAVGGLRDTVAPFDPFNDTGLGWTFDRAEANRMIDALSHCLNTFRNYKESWRGLEARGMAQDLSWDHAAVLYEDVLVKAKYQW

SEQ ID NO: 47967 - protein, 524 aa, Zea Mays
MADPPPVLTLLVKKGPCEGKTVHRRAGATALRVGRVAKGNDLSVGDAGASQRHLSVKFLPPPAARWSVTDLCSSNGTLLNGTPLVATIPAPLSDGDLIKIGEATVLAVSISTEAGPVPGAAATRRSARNAAAVATAAEEQVAAVSRRVGRRKAVSAEAPEAGNEVEEEAALPTRRGGRRKAVEPAGVETEEEDEEEEAAIPRRSRPRKAAATVVLPPQPQNMRSTRAAARRVEVLGCENDEGEVVRTGSGRGRGRVTRANARNGTGVTPGEEEDESEVALARDREGTAAERKGEVVPAAGRGRSKRSRGGRGRGRATRASTRKPEGAIVGNDENEQEETDIVDGRERLSVLTVNDGSQEDKVANEVDKLDGNSKTPLEDEKMVDVEHATLTERTIEGRVNAQHSPADSGGLEEEEVKNLTKGGEIEVEKELRERVSPESKLDGVGEVEKNDKREVIGAGGEKGHVWERKGRHRLENMTLGEWFVQIEKYLLAKNEEAAEMAISEVQEKHRRFCEHVKTFELKKG

SEQ ID NO: 47968 - protein, 405 aa, Zea Mays
MWCTYDVHFYASFALLDLFPKIELSIQRDFARAVLREDNRRVRFLADGTWGIRKVIGAVAHDLGAHDPWHELNAYNIHDTSRWKDLNPKFVLQIYRDFAATGDKSFGKDVWPAVCTAMEYMEQFDHDGDGMIENDGFPDQTYDAWTVQGVSAYCGCLWLAALQAAAALAGSLGHDDYAERCMTRFVKAKTVFEARLWNGSHFNYDSGTSYSSRSIQADQLAGQWYTASSGLPPLFDEDRIKCTLQKIFDYNVMRVKGGRMGAVNGMHPNGKVDETCMQSREIWTGVTYSLAATMLLHGMEHQAFTTAEGIYTAGWSEEGYGYWFQTPEAWTIDGHYRSLIYMRPLAIWAMQWALSPPRSILEAPKVNTMDRAHISPGTFQFLQDSVRKMTPKNGCFGNTVINLDC

SEQ ID NO: 47969 - protein, 376 aa, Zea Mays
MDTAEKMRWPFSDGSVTDLLDARSLHGSPDIKKKAQFHSSLVQKLALEKEMEGHVGCVNAIAWNSSGSLLVSGSDDTRINLWNYNNRELVHDIDTGHSANIFCTKFVPETCDEVVVSGAGDAEVRVFNMSRLSGRRPREISMEPTMVYQCHSKRVKKLAVELGNPNVVWSASEDGTLRQHDFRECSSCPRAGSANQECHNVLLDLRCGAKKSLADLPKHPLALKSCDISSVCPHQIIVGGSDAFARLYDRRMLPPLSSCQTKTKPPPCVKMFCPLHLANSKTYLHLTHVAFSPNGKEVLLSYSGEHVYLFDVDPDNLSSVRYTADYVREQLFVPPFHKVPAKEHAKEKKTSVNTAPRNLSRICARNLCKLQQDLWR

SEQ ID NO: 47970 - protein, 494 aa, Zea Mays
MDTAEKMRWPFSDGSVTDLLDARSLHGSPDIKKKAQFHSSLVQKLALEKEMEGHVGCVNAIAWNSSGSLLVSGSDDTRINLWNYNNRELVHDIDTGHSANIFCTKFVPETCDEVVVSGAGDAEVRVFNMSRLSGRRPREISMEPTMVYQCHSKRVKKLAVELGNPNVVWSASEDGTLRQHDFRECSSCPRAGSANQECHNVLLDLRCGAKKSLADLPKHPLALKSCDISSVCPHQIIVGGSDAFARLYDRRMLPPLSSCQTKTKPPPCVKMFCPLHLANSKTYLHLTHVAFSPNGKEVLLSYSGEHVYLFDVDPDNLSSVRYTADYVREQLFVPPFHKVPAKEHAKEKKTSVNTAPRNLSRVDMCKKFMQVATRSLEIGKNLMHGIEACSEVLESTEPDIDDDMRHGFLCTRAALYLKRKWKNDVYMAIRDCNRARKIDATSYQAHLHMAEALLQLGRLKEASEYAEAANRLLPPHCQLSQQVDDFKQRVASGE

SEQ ID NO: 47971 - protein, 334 aa, Zea Mays
MPWTRTEGARVCYVVVAPASGGVSCSGWGNMMKQIFGRRKASKTADKEFTGGRTFSQLSGSGVADLSGQPPILSSTGHAYGSGNRTGFQDSRINDNLFSSNFRPLPSFKDVPNTEKQNLLIKKLDVCCTLFDFTDASKNMKEKEIKTLMLLEIDEYVRTANVKFPEIVVEAITKMISVNLFRTLISPPREKKALQAFDLEEDEPLMDPAWPHLYHVYELLLTFVQSPQNDAKLAKRYIDYSFILRLLDLFDSEDARERDRLKMVLHRIYGKFMVYRPFIRKAINNIFYQFIYETEKHNGIAELLEIFGSIINGFALPLKEEHKLFLHKGGTVLG

SEQ ID NO: 47972 - protein, 237 aa, Zea Mays
MARGARFLLVLALLVALLAVVFQLYRLRKPRLWTVEELSLYNGTDEGLPILLAILGSVFDVTKGRSHYGPGGGYHHFAGRDASRAFVSGNFTGDGLTDSLQGLSSSEVNSIVDWRKFYFERYIFAGKLIGRYYDSQGNPTKYLKGVEMKAKRGAQLLEKQKSDEAKIPGCNSKWSQQEGGEVWCDTGYPRLVRRPGDIALTGQVSQRCACFQENELDKAGLVVYEGCDYLSQSCKVN

SEQ ID NO: 47973 - protein, 218 aa, Zea Mays
MATASEIAAVGVIGAGQMGSGIAQLAAAGGCAVLLLDADPTALSRAVISISASLRRLAAKGQLSQAACEDSIKRIRCVSAVQDLRDADLVIEAVVENEAVKKKLFVELDKVTKPSAILASNTSSISITRLASATKRPSQVIGMHFFNPPPVMKLIEIIRGADTSDEVFAAVRSFSERLGKSVICSQDYPGFIVNRILMPMINEAFWALPSSVRPKSSL

SEQ ID NO: 47974 - protein, 407 aa, Zea Mays
MADIVIRDLERVVKVALAIKKAVETAKQNKEDCVKIGERAAEVSTHMKRLKENTKAMEDPLMSDTLKSMEETLQRALKLVNECQRKHVVLHYLNAGGMSKKLRQVQEDISYKLWNGVLATVVDTRIALEKQIQSAIDAPLHQHQQRAGQVETSQSSHSRTDQASEKGKAMLARVKREQSELLSGVPQFSLSQLNAATNEFSEGCVVERGYYKGVLHDGLDVAIKKLAVSDDTQERRLQLELNIRAKLEHGNILKLLGYCLDAQEKEKLYFLVEEYIPNVESLEKFINVSRLDWSSCFKIIQGIAKGLHCLHKHHILYMDLNPANILVRSDMNPVVINFGSSIVLDRDDDKVTGDAVAGTLGYVAPEKLMEAYASMMSDVFSFGIIIIEIITGRRASPFVDLPEWLMR

SEQ ID NO: 47975 - protein, 348 aa, Zea Mays
MPAACPRSCARCRRIYHINCGMGSWPPLSTQGLLWKSRSNLLLMPLCTNTNSVQGRWKPHKVVIQELIKLGVPQFSLSQLNAATNEFSEGCVVERGYYKGVLHDGLDVAIKKLAVSDDTQERRLQLELNIRAKLEHGNILKLLGYCLDAQEKEKLYFLVEEYIPNVESLEKFINVSRLDWSSCFKIIQGIAKGLHCLHKHHILYMDLNPANILVRSDMNPVVINFGSSIVLDRDDDKVTGDAVAGTLGYVAPEKLMEAYASMMSDVFSFGIIIIEIITGRRASPFVDLPEWGSVDEMITSAKGLFDPALANESQLMKINRCREVGLKCIERDPKRRPTMGNVLEMLSS

SEQ ID NO: 47976 - protein, 390 aa, Zea Mays
MVLVKMRETAEAYLGTTIRDAVVTVPACSTDLQRQATWNAGVLASLNVMRIIPEPTAAALAYGLDRKSAQVQGLYNVLVFDLGGGTFDVSVLDKVEGVFEVLATAGAAHLGGEDFDNRMVNHFVQEFKRKTKEDISGNPRALRRLRTACERAKRTLSSTLEATIEIDCLYEDINFYSTITRARFEELNMDLFRKCIDIVEDCLSDAKMDVGSVHDVVLVGGSSRIPKVQQFLQELFNGKKLFKSINPDEAVAYGATIQAAIMSGEDEIQDYLMNDATPLSLGLATDGGVMTVLIPKNATIPTRKEVVLSTDSDNQPCIRIQVYEGEGAMARDNNLLGEFEFSIPPAPKGVPQITITFHIDADCILDVAAEDKTTGEKMRKTITKRFRLKH

SEQ ID NO: 47977 - protein, 186 aa, Zea Mays
MASEVEDDAAVPGAPLVANGAADVRRRRDQAKAILSKQAVKIATKAEQHERFIFKVTHLLGVLGFGGFCYLLGARPQDVPYVYCLFYVIFVPLRWIYYRYKKWHYYLLDFCYYANTFLLVMILFYPKDEKLFMVCFSFAEGLFYSLSGGGIHKHLLPCTRKEEMPESHGHMWRTNHICGHGFFLFH

SEQ ID NO: 47978 - protein, 134 aa, Zea Mays
MAVLERRSRLPAVAQLAVAFWLAATSACLCRSVIPDPDLEPGRPCVGRLFCRWPPLPLPSPPPPPVVTPPPPETTTPPPRHHHTPPFCPSPLCRHRLPPHLPRPIYPPPTPLSPESPPLPPPPPVVTPPRESRS

SEQ ID NO: 47979 - protein, 164 aa, Zea Mays
MSLFSAFWRCHPLSLGRLLVKLASVTMLLCWIKKMPKLNFEVAKPCTQNRSFVVEAPCELRYLQLYTIECSSNLKLQLLLQLLLAYFVFPITSSCLPRHCPSASLRLACAVGSLVSPLFQPWPIVSIAGFATTFPCQGKPLHFEHVPNPNFTLPSFESYVRFQI

SEQ ID NO: 47980 - protein, 346 aa, Zea Mays
MHMQEFFARWGQQGTVDLKQELEQVLMLITARCLLGKEVRERMLHEVFSAYRDLTENSLHLTSLLFPYAPTPAARRRDRARATLSGIFSEIVRSRRRSGRRAGDDDGDVLQSLVDARYRDGRGTTEAEVTGLVIAILFAGKHTSSATSTWTGARLLRHAECLDAAVDEQRRVVAERGSGVDYDALAEMGFLHCCIKEALRMHPTAPLFLRRAHRGFTVRTREGAEYDVPSGQTVASPLLINHYIPYVYRDPHVYDPRRFGPGREEDRVGGRFCYNAFSGGRHACPGEAYAYMQVKVIWSHLLRNFELKLVSPFPRTDWMKLSPEARGKVVVSYKRRMVPVGSVLEN

SEQ ID NO: 47981 - protein, 214 aa, Zea Mays
MEIAVKTLSKTSAQGLDEFKNEVLLIAKLQHRNLVRLLGCSVSGQERMLVYEYMANKSLDYFLFEKDNVVLDWQVRYRIIEGITRGLLYLHQDSRYRIIHRDLKAANVLLDKEMTPKISDFGMARIFGNEETEINTRKVVGTYGYMSPEYAMDGIFSVKSDVFSYGVLLLEIVSGRRNRGVYSYSNNQSLLGHVSDNLPRLVNKYQLYETSETW

SEQ ID NO: 47982 - protein, 488 aa, Zea Mays
MEAALKGYFGYSTFRPYQREIIQKVLDGRDCLVVMATGSGKSICYQIPPLVTKKTAVVVSPLLSLMQDQVMSLKQKGVKSEYLGSTQTNSSVSNEAEKGTFDVLYMTPEKAISLPSRFWSNLQASGICLLAVDEAHCISEWGHDFRTEYKQLHSLRNLLVGVPFVALTATATERVRQDISTSLVLCSPHVVVGSFDRHNLFYGVKTCNRSMSFISELVKDVSKRSDVGESTIIYCTTIRDTEQVHEALVTSGIKTGIYHGQMGSRAREESHRSFIRDEVLVMVATIAFGMGIDKPDVRCVIHYGCPKSLESYYQESGRCGRDGLPSICWLYYQRSDITKADFYCSEAKNETQRKAIMDSFMAAQKYCLLATCRRRFLLQYFGEEWNIDCGNCDNCTAVKNERDLSKEVFLLLSCIKSCGGRWGLNLPIDVLRGSRAKKIVDNNYDKLQMHGRGKDYSSNWWKALGGLLIAHDYLKETVRDTFRFVRNA

SEQ ID NO: 47983 - protein, 648 aa, Zea Mays
MDPEKQNEMSLIDKRELVYEVARWPQGAMEILRCWTRRELLELICVELGKERKYTNVPKAKMIAYLLKLVSRNSGKNGQLKNDNPNVMLLGQDNKDEIQMKESDEQSRPLKTANSDSSISREACAGSSVVCSNVACQATPNAGDKYCKRCSCCICNKYDDNKDPSLWLVCSSDNPYSGCSCGVSCHLNCALKNKRAGIVKNGCNKLDCSFYCVSCGKINWLMRCLQKQLAIAREARRVDVLCERLSLSHKIIQGSERYKEIASIISSAVKTLEIEVGSALDQVSVITGRGIVNRLTCGAEVQKLCSSTLEIVDSKVDNILEFESNNSPKLLGPQPQILFHEITPFSVVIVLNYQHDIGKEQIDGSKIWHRSARVCNYSSEPTCHILRPNTRSLVSGLSPSTEYFFKVLPFSSTHGFTEWETKCSTRSLDHGSSQCSTQNSESMCLKDDSMQHHKKDLNVQNHQRTIQYDSPKGSTNSSENNLSCDRYSKRAKVARLDGASDNDESQLPPTSEVLPFASSNSSPSEAPSKPDLLIGTPDSASKNYVEQQYEYCVRVVRWLEHEGHMDNDFRVKFLTWFSLKATTQDRRIVGAFVDVLIGDPASLVGQLVDAFKDAICIKEKPSQAQQKDACCKLEDQAISIHQLLLDGK

SEQ ID NO: 47984 - protein, 649 aa, Zea Mays
MDPEKQNEMSLIDKRELVYEVARWPQGAMEILRCWTRRELLELICVELGKERKYTNVPKAKMIAYLLKLVSRNSGKNGQLKNDNPNVMLLGQDNKDEIQMKESDEQSRPLKTANSDSSISREACAGSSVVCSNVACQATPNAGDKYCKRCSCCICNKYDDNKDPSLWLVCSSDNPYSGCSCGVSCHLNCALKNKRAGIVKNGCNKLDCSFYCVSCGKINWLMRCLQKQLAIAREARRVDVLCERLSLSHKIIQGSERYKEIASIISSAVKTLEIEVGSALDQVSVITGRGIVNRLTCGAEVQKLCSSTLEIVDSKVDNILEFESNNSPKLLGPQPQILFHEITPFSVVIVLNYQHDIGKEQIDGSKIWHRSARVCNYSSEPTCHILRPNTRSLVSGLSPSTEYFFKVLPFSSTHGFTEWETKCSTRSLDHGSSQCSTQNSESMCLKDDSMQHHKKDLNVQNHQRTIQYDSPKGSTNSSENNLSCDRYSKRAKVARLDGASDNDESQLPPTSEVLPFASSNSSPSEAPSKPDLLIGTPDSASKNYVEQQYEYCVRVVRWLEHEGHMDNDFRVKFLTWFSLKATTQDRRIVGAFVDVLIGDPASLVGQLVDAFKDAICIKEKPSQAQQKDACCKVASELCRDRHWALEINF

SEQ ID NO: 47985 - protein, 169 aa, Zea Mays
MDNRTELDQIVVENVLAFDAGFWVRLAARIDLCKSDDDKKDYEELAENVMNIVDRLVHKTNQKIEQSTDVLKAIISPAMHEGDVKWPPRDPDTLKLMEKEITRREQEGQLDEGFLSEVSAQLRQLSLYVFRLNKTEISQGFRLCCKRCCSYMLLNLSKNVVMHTKGGKL

SEQ ID NO: 47986 - protein, 251 aa, Zea Mays
MATTAAASTSLRPLSPSPPRIASLPRRWCWGIPVQSSGRSAFHAERRRRSTLLCAADKAPEESLKKTIEVDRLIDMLRDANPREVNVNLDQIVVENVLAFDAGFWVRLAARIDLCKSDDDKKDYEELAENVMNIVDRLVHKTNQKIEQSTDVLKAIISPAMHEGDVKWPPRDPDTLKLMEKEITRREQEGQLDEGFLSEVSAQLRQLSLYVFRLNKTEISQGFRLCCKRCCSYMLLNLSKNVVMHTKGGKL

SEQ ID NO: 47987 - protein, 247 aa, Zea Mays
MATTAAASTSLRPLSPSPPRIASLPRRWCWGIPVQSSGRSAFHAERRRRSTLLCAADKAPEESLKKTIEVDRLIDMLRDANPRELDQIVVENVLAFDAGFWVRLAARIDLCKSDDDKKDYEELAENVMNIVDRLVHKTNQKIEQSTDVLKAIISPAMHEGDVKWPPRDPDTLKLMEKEITRREQEGQLDEGFLSEVSAQLRQLSLYVFRLNKTEISQGFRLCCKRCCSYMLLNLSKNVVMHTKGGKL

SEQ ID NO: 47988 - protein, 120 aa, Zea Mays
MNIVDRLVHKTNQKIEQSTDVLKAIISPAMHEGDVKWPPRDPDTLKLMEKEITRREQEGQLDEGFLSEVSAQLRQLSLYVFRLNKTEISQGFRLCCKRCCSYMLLNLSKNVVMHTKGGKL

SEQ ID NO: 47989 - protein, 641 aa, Zea Mays
MKQSPASTAVSDSGMLGRRLALLPAATVGRGGRTTRARMTMGCVLLDHVAPRLAVASATLVGAREVIAAAAAAGAGGSGAVHGAVASTLAQVAVTAVAIASGACLSTKVDFLWPRIDQLPDTLIFEGVEVTGYQIFEDPKVQKAIEFASTAHLGQFRRTGDPYITHCIHTGKILAALVPSTGERAVNTIVAGILHDVVCDTSESLKSIEEQFGADVASLVSGVSKLSYINQLLRRHRQKNTGGSTLTSEEANNLRVMLLGMVDDPRVVLIKLADRLHNMRTIYALPVPKAEAVAQETLAVWCSLASRLGVWALKAELEDLCFAVLQPQIFKKIQSELTLMWNRTGKSKNMRRSSIRNELLASMKDGNMVSINDLFSSCNQERPNMKDLLQAVLPFDIFLDRKRRSYFLSNLNSNSGESIPNPKIVDDAAVALASLASCEEELERELLISTSYIPGMEVTLSSRLKSLYSIYCKMKRKEVGIRQVYDARALRVIVGDKNGAMHGSAVRSCYSILDIVHRLWTPIDGEFDDYIINPKGSGYQSLHTAVQASDSSPLEVQIRTQRMHEYAEHGLAAHWLYKESKVEYRSSMSKRIRQSTSYSSSSSEDESSVQDDIPSKYSSMKVGHPVLRIEGSHLLAAVVVR

SEQ ID NO: 47990 - protein, 717 aa, Zea Mays
MKQSPASTAVSDSGMLGRRLALLPAATVGRGGRTTRARMTMGCVLLDHVAPRLAVASATLVGAREVIAAAAAAGAGGSGAVHGAVASTLAQVAVTAVAIASGACLSTKVDFLWPRIDQLPDTLIFEGVEVTGYQIFEDPKVQKAIEFASTAHLGQFRRTGDPYITHCIHTGKILAALVPSTGERAVNTIVAGILHDVVCDTSESLKSIEEQFGADVASLVSGVSKLSYINQLLRRHRQKNTGGSTLTSEEANNLRVMLLGMVDDPRVVLIKLADRLHNMRTIYALPVPKAEAVAQETLAVWCSLASRLGVWALKAELEDLCFAVLQPQIFKKIQSELTLMWNRTGKSKNMRRSSIRNELLASMKDGNMVSINDLFSSCNQERPNMKDLLQAVLPFDIFLDRKRRSYFLSNLNSNSGESIPNPKIVDDAAVALASLASCEEELERELLISTSYIPGMEVTLSSRLKSLYSIYCKMKRKEVGIRQVYDARALRVIVGDKNGAMHGSAVRSCYSILDIVHRLWTPIDGEFDDYIINPKGSGYQSLHTAVQASDSSPLEVQIRTQRMHEYAEHGLAAHWLYKESKVEYRSSMSKRIRQSTSYSSSSSEDESSVQDDIPSKYSSMKVGHPVLRIEGSHLLAAVVVSIDKGGKELIVAVSFSLEASEAVAELRSSFQLKRWEAYARLHKKVSEKWWCAPGHGDWSTNLERYTLCQDGIFHKII

SEQ ID NO: 47991 - protein, 309 aa, Zea Mays
MLLGMVDDPRVVLIKLADRLHNMRTIYALPVPKAEAVAQETLAVWCSLASRLGVWALKAELEDLCFAVLQPQIFKKIQSELTLMWNRTGKSKNMRRSSIRNELLASMKDGNMVSINDLFSSCNQERPNMKDLLQAVLPFDIFLDRKRRSYFLSNLNSNSGESIPNPKIVDDAAVALASLASCEEELERELLISTSYIPGMEVTLSSRLKSLYSIYCKMKRKEVGIRQVYDARALRVIVGDKNGAMHGSAVRSCYSILDIVHSHYTQQFRHLIAHRWRSRLEPSECMSMQNMDLLLIGCIRRAKLSTEVA

SEQ ID NO: 47992 - protein, 285 aa, Zea Mays
MESSMSMSAAASVVVRTCVPAAVMLPLSPSFTRPAPRTTGRGFRCRCSSTSSATKDSAVVYSRLLDDALFRSAEVIQWESGKSMNAIATAQGIQIRRRCRPRYPSEGTGAERAVPRNILEQIIWDKEVEVAQRKARTPLCEVKASAALAPPPRDFVGALRAACRRNAVPALVAEVKKASPSKGLLRDHFDPVEIARTYEKNGAACLSILTDEKHFQGSFENLEAVRSSVPSALQGVRHRRLADLLRALERRGRGPPDRGRAAGHRHHLLPPRLQEPWDDSSRRGS

SEQ ID NO: 47993 - protein, 880 aa, Zea Mays
MFEVPISSGNGSYPFPVEVPGNTRFLFSSKTRTLSKAIAKSVVYLLKPKSLAFEYFEKLINFLEQFYHPSNGGRWTYSLERFLRYLVVYFEKRLQHEQFVMAVEDHDQSYLGKEERSVFVKAILKLLDRGQYSKDNSLAETVSVATSILSYIEPTLVLQFVAKNFQRALETTTATHQLKNAVTSVAFSGRALLLCSLCSSQNDDSSVVDSFSDLVVASLSNALLGMDANDPPKTIATMQLIGSIFSNLAAVSDDVPILLQSTTLSNWLDEFFSRLFSVLHNLESSSPINEGYQSSFMSGTFLVDSPYYFCMLEILLGKLSKPLFNQSLKRIAKFVNANILPGATSEVGLLCCACVHSYPEEASVYLVKPILETIMSSFEGTPTTGYVGRVVADKASTKAALSPALETAIDYYLRVLAISISYAGPTLLNYKEELNHIITSAFQSPSWKVNGAGDHLLRSLLGNLVSYYPIDQYKPFTCQPIGNIIEPWGCSKAHQDREDEMLNFPPKWHDPSHDELSFANELLQLHFQSALEDLLTICQTKVHSDTGDEKEHLKITLLRIHSALHGVMSCLPEIRPSYKDGRSLEVESAFFIAGSAGSTVGSSEMREKAAEFVHIACRYLLKERTDDSILLSLVVRVIDALVNYGSLEYQEWSSHVQAWKLESASIIEPPCNFIVPFHAQGKKRPRWALVDKANLHSTWRCSQSSYHRYRMNADVSPSVPMINLMNDLLDLSLHNYETVRSYAGRSLTKLLKRWPSLISNCVLTLTGNLRDPKAPEHVVLGSCSILISQTVLRHLTTDSVSLSSFIMGILESSHHESLKCQKAITELFVTYNIRFSGISRSFFKTPENQADKPGFLSLISQINALGFETNGLHWRRTAHH

SEQ ID NO: 47994 - protein, 1656 aa, Zea Mays
MHLYNAWLPPPVSTAARGEAAAFAGAVRTAADAWLPGDSDSAYATLKWISVFDLFIKAKSDIASEDLQALVKLGLEVFHASHNKFVVQIKWGGLLIRLLRKHGKRLSLVVQWRPLYETLIRTHFKRNMGPEGWKVRKQHFETVTSLVCASRNFFTEGVAAEIWSEFRPLLENPWHNSAFEGVGFLRLFLPANSRNQDHFTTDWIRNCLDIWDSVTNCNFWDIQWASIIARCIKNSRSVNWDAFLPLLFTRYLNMFEVPISSGNGSYPFPVEVPGNTRFLFSSKTRTLSKAIAKSVVYLLKPKSLAFEYFEKLINFLEQFYHPSNGGRWTYSLERFLRYLVVYFEKRLQHEQFVMAVEDHDQSYLGKEERSVFVKAILKLLDRGQYSKDNSLAETVSVATSILSYIEPTLVLQFVAKNFQRALETTTATHQLKNAVTSVAFSGRALLLCSLCSSQNDDSSVVDSFSDLVVASLSNALLGMDANDPPKTIATMQLIGSIFSNLAAVSDDVPILLQSTTLSNWLDEFFSRLFSVLHNLESSSPINEGYQSSFMSGTFLVDSPYYFCMLEILLGKLSKPLFNQSLKRIAKFVNANILPGATSEVGLLCCACVHSYPEEASVYLVKPILETIMSSFEGTPTTGYVGRVVADKASTKAALSPALETAIDYYLRVLAISISYAGPTLLNYKEELNHIITSAFQSPSWKVNGAGDHLLRSLLGNLVSYYPIDQYKPFTCQPIGNIIEPWGCSKAHQDREDEMLNFPPKWHDPSHDELSFANELLQLHFQSALEDLLTICQTKVHSDTGDEKEHLKITLLRIHSALHGVMSCLPEIRPSYKDGRSLEVESAFFIAGSAGSTVGSSEMREKAAEFVHIACRYLLKERTDDSILLSLVVRVIDALVNYGSLEYQEWSSHVQAWKLESASIIEPPCNFIVPFHAQGKKRPRWALVDKANLHSTWRCSQSSYHRYRMNADVSPSVPMINLMNDLLDLSLHNYETVRSYAGRSLTKLLKRWPSLISNCVLTLTGNLRDPKAPEHVVLGSCSILISQTVLRHLTTDSVSLSSFIMGILESSHHESLKCQKAITELFVTYNIRFSGISRSFFKTPENQADKPGFLSLISQINALGFETNGLHWRYNLMANRVLLLLILASRSESGIYSQMLAKIAGHFLRNLKSQLPHSRMLAISALNTLLQGSPHKTSAQNSKQPIDHPEDCNISSTEEILNEIIREEGFMNETLNSLSHVHIISDNDGSSKASYGASSFQSGSDKAITYFYFDFSASWPRTPSWISLLRGHTFYSSFARIFKRLIQQCGMPVISSLQSTLEEFLISKERPRQCVAAEAMAGMLHSDIIGNLECENNWLMAQLHKIMLAPSVESAPEWAACIRYAVTGKERAGTRAPVLRQKVLECLCTPLPHSMATSVLAKRYSFLSVALIEISPPKMSPAEKQYHVKILDELLDSMNHSSAQVREAIGIAMCVTTSNMRLSGLFGTGCSPQGLHGDVSMIEQTGNKYWSERLTDGANELAVSIQNSTQSKQLESTSDSAEDSMDDREQADAKRMETIFHFMIASLKSGRSSVLLDTIIRLVYPILSLQETSNKDLSLLAKSAFELLKWRILHRPFLETAITSILPLVSDPNWRTRSALLSYLRTFTYRLGSMLLVFLQA

SEQ ID NO: 47995 - protein, 249 aa, Zea Mays
MVGGMEGPPHRSRERETRLWSIHMTGEPDPDANGKQQWRHPDPGAPTAPARPAPSFGGSGTPRDTGPCPCGMGWDGMEHFWAASGRQKLKPNAQLLARLLGEAIGYGSLLPMPSAPSSPRIAAFPSPFSSVRMVAAVTPTPLLRPQGSASSQPSRLHLRKIVVSLRVQGVRFQDHLGFEDFGCNLQLSKGTVPLNLLMNYLSPYMLCICSNNVDPWLVLVHSLSVHLNNESTVRIRQHRHCLWGDVIFQ

SEQ ID NO: 47996 - protein, 191 aa, Zea Mays
MLAGYSSHHQGGSIYAAVWFSFWAASGRQKLKPNAQLLARLLGEAIGYGSLLPMPSAPSSPRIAAFPSPFSSVRMVAAVTPTPLLRPQGSASSQPSRLHLRKIVVSLRVQGVRFQDHLGFEDFGCNLQLSKGTVPLNLLMNYLSPYMLCICSNNVDPWLVLVHSLSVHLNNESTVRIRQHRHCLWGDVIFQ

SEQ ID NO: 47997 - protein, 81 aa, Zea Mays
MNPIIPNMYAVFYKVVINCWSKVNNRQLSLSANQFDWNRLSWVILLIPLVQILAELAMGKTVAHFTQAVLRIKRKSLDWCR

SEQ ID NO: 47998 - protein, 175 aa, Zea Mays
MSPMTVARIASEDARAICMREYGSSPDVDIYGDPGFTFPYVTPHLHLMIFELVKNSLRAVQERYMDSDKLAPPVRIIVADGAEDVTIKISDEGGGIPRSGLSRIFTYLYSTAENPPDLDGHNEGVTMAGYGYGIPISRLYARYFGGDLQIISMEGYGTDAYLHLSRLGDSEEPLP

SEQ ID NO: 47999 - protein, 255 aa, Zea Mays
MIKMIRVRHTNVVPAIALGVQQLKKDLGGPKAFPPGIHEIHQFLDRFYMSRIGIRMLIGQHVALHDPDPEPGVIGLINTKMSPMTVARIASEDARAICMREYGSSPDVDIYGDPGFTFPYVTPHLHLMIFELVKNSLRAVQERYMDSDKLAPPVRIIVADGAEDVTIKISDEGGGIPRSGLSRIFTYLYSTAENPPDLDGHNEGVTMAGYGYGIPISRLYARYFGGDLQIISMEGYGTDAYLHLSRLGDSEEPLP

SEQ ID NO: 48000 - protein, 397 aa, Zea Mays
MMMMMAGEHVLAALATLLLASLLTLVLNHFLPLLLNPKAPRGSFGWPLLGETLRFLTPHASNTLGGFLEDHCSRYGRVFKSHLFCTPTVVSCDQDLNHFILQNEERLFQCSYPRPIHGILGKSSMLVVLGEDHKRLRNLALALVTSTKLKPSYLGDIEKIALHVVGAWRRHGGVRVVAFCEEARKFAFSVIVKQVLGLSPEEPVTARILEDFLAFMKGLISFPLYIPGTPYAKAVRARERISSTVKGIIKERRSAGSWNKQGDFLDVLLSSNELSDEEKVSFVLDSLLGGYETTSLLISMVVYFLGQSAQDLDLVKREHDSIRSNKGKEECLTSEDYKKMEYTQQVINEALRCGNIVKFVHRKALKDVKYKGHKPRDKQEVYTVRWWPPALPRIRAR

SEQ ID NO: 48001 - protein, 478 aa, Zea Mays
MVGLMAEASSKPMSPPTSHNALPRVLAFYHYWRKIYGPNFLIWFGPTPRLTVAEPELVREIFLTRAEAFDRYEAHPVVRQLEGDGLVSLHGDKWALHRRVLADAFYPDNLKRLVPHVGRSVAALAEKWRAMASASSSGEVEVDVAEWFQAVTEEAITRATFGRSYDDGRVVFAMQGRLMAYASEAFRKVLVPGYRFLPTKKNWQSWKLDREIRRSLTRLIARRSDEAEAEEEEMGSHSGGFRDLLGAMINAGERKTPPAGAIPVADMLEECKTFFFAGKQTTTNLLAWATVLLAMHPEWQERARREVLDVLGPDELPSKEHLPRLKTVGMIINETLRLYPPAVATIRRAKTDVQLSNGCLIPRDTELLIPIMAIHHDARLWGADAAQFNPARFAGGAARAAKHPLAFIPFGLGARACIGQNLARLEAQLTVAVLLQRFEIRASPNYVHAPTVLMLLYPQYGAPVIFRPRRPARPAAAS

SEQ ID NO: 48002 - protein, 100 aa, Zea Mays
MQCLRKVSRPVIHGHIPPRVPRAASPRLHPVRSLFRSIELSLFIPSHYCIEISSLIIFSWVSGKEKTRFMLSILDLQRSTEIHQHTSTFHTEQSRRDDME

SEQ ID NO: 48003 - protein, 87 aa, Zea Mays
MRRPWRRPRTTPAWLLRSRSSTRRACMGLRNGRVAIFRDRESERKDPDYDRSYDRFMLSILDLQRSTEIHQHTSTFHTEQSRRDDME

SEQ ID NO: 48004 - protein, 135 aa, Zea Mays
MRRPWRRPRTTPAWLLRSRSSTRRACMGLRNGRDRESERKDPDYDRSYDRVSRPVIHGHIPPRVPRAASPRLHPINRVEFVHSKSLLHRDIKPDNFLMGLGKRENQVYVIDFGLAKKYRDTSTHQHIPYRTKPEG

SEQ ID NO: 48005 - protein, 893 aa, Zea Mays
MPTAVPTPKAVVHQRFGAKARYTVEEVREDVGGCPGLAPQTRNVYRCALDLPGLSVATPGTFLRKKDAEQAAAQIALDKLGIHPTANSPTTPQEAWAELIARISGFFIDEVNTLCKLIDHRAEFDPLLVLSLLYNAAKQSPGVSVSDSNFWIQSEKPYSPEAVDSALERWSGTTDPVEVEAVLVPHMLEDELKTVRINLRDNEHYMSYVAAELSAIDSSHVLVSRTIGKTSSEIRLYFAAANIHAVSDMSKHALDSLGDGDINWQVNKRASYICGQTIYGDALLANIGYTRRDSELHTEDVNLCSYYRILLGKLPDGNCKMSRDSILAAELPSAYSRFSWKGLSPRDLLCSFCRLQRLPEPHFAVSRVSCDTLMSAVSSEERGAPAGSAENQYTNDVRINKEKPDLFKCEVNIRSRKQEVLLEYSAADTWSKESDAIQNSSLKVLIWFNNYFKKLTSKTGKLYLSESTAGVKVHSNIFLQEFAMCLSVYGKNGCSDSAMCSAVGPFSMDTQKKHLESTAKLTHIEGPDSGVFPSHGSLTCISYTASLVTKDKAKTYLLESHNEFEFEIGTGAVSNQLESCVTQLSVNQTARFVAELPPRDLIMAASCEFSHDLSNVSSESCFLEFSVKVLQVTEPLEDRMEKALFSPPLSKQRVEFAVRHINELHATTLVDFGCGSGSLLDSLLEHPTTLEKLVGVDISRKGLTRAAKSLHQKLSKKSTTQTNVPTAVLYDGSITDYDSRLYGFDIGTCLEVIEHVEEDQATLFGNVVLSSFRPTVLIVSTPNYEYNPILQGSAMPNKDDEADESAGPCKFRNHDHKFEWTRLQFQCWATGLAVKHSYSVEFSGVGGSGEEPGYASQIAVFRRLVQGQEAMCLDEDGDQPYEVLWEWPNACVN

SEQ ID NO: 48006 - protein, 130 aa, Zea Mays
MASAVFTYNKQFHNVLAVSKADYKNCIATKPTATWSTGNDSVVLNTTGHHYFLCGYPGHCAAGQKVDIRVASSAAPSAAPSPTPSGSKPSGGATAAPSPHPNAAPKALSASSVAAAVATSLLSLAAAVLA

SEQ ID NO: 48007 - protein, 459 aa, Zea Mays
MLMSEIFIVLQPYGTVNLLSALTSEAVKSVLNNQSEEETWGIDSLDILLETWNVLLGDVDADKNPISTDGALASSSLFKMIVESHLKAAADSAFEDTDDTEYFHVSVSKRDEQLALYALIARASANTTIPFLAQLFSERFARLNQRNGESDPTQTLEELYWLLLVTSHVLTDSGEGETLLIPEALQAGFPNVIEAAHHPVVTLSWSIINFSRQCLDPGIRAKYFSPRLMEAVIWFLARWVATYLVPLDVSRGKVSREIDNVGTNGSQHSRKLLNSFAWENNQGELVLDFVVLISMLALTTYQGENELQTLTCQKLLATVVRRKHTCTYLVQLDSWRDLTRAFASGRSLLSLSGRLQRSLAETLASAASCIKDPEASAQYLRDLMGPVAGCLVENASRSDLKSVAQQADVIYMVCCLLERLRGAARATQPRTQKVLFEMAHTVMNPLLTLLEVYKNHSYT

SEQ ID NO: 48008 - protein, 1064 aa, Zea Mays
MEHASSPDGYVQSKVSAVAARLLKRGWVEFSDQEKAAIFFEVEQSIRGIHGPNRQFAAINFLETLVSEFSPSTASAMSLPKEFHEQCEYSLEVQFLKDFYCWAQAAVFNTADKILNSTVTIPDERACSAALRLMFQILSWNFKHTVEHESSDAKINFGLRIDTINLKKFERSLVKPGSMWREILISSGHPTWVLNFYTTLRQKYSYDTLWGDSPIAVSCRQLIVQLCSLAGSVFPNDNGDAQIKHLMLILSAVVLWIEPPDVITASIRNGGSESEFIDGCHALLSIASLTTGSLFDNLLKSIRPYGTVNLLSALTSEAVKSVLNNQSEEETWGIDSLDILLETWNVLLGDVDADKNPISTDGALASSSLFKMIVESHLKAAADSAFEDTDDTEYFHVSVSKRDEQLALYALIARASANTTIPFLAQLFSERFARLNQRNGESDPTQTLEELYWLLLVTSHVLTDSGEGETLLIPEALQAGFPNVIEAAHHPVVTLSWSIINFSRQCLDPGIRAKYFSPRLMEAVIWFLARWVATYLVPLDVSRGKVSREIDNVGTNGSQHSRKLLNSFAWENNQGELVLDFVVLISMLALTTYQGENELQTLTCQKLLATVVRRKHTCTYLVQLDSWRDLTRAFASGRSLLSLSGRLQRSLAETLASAASCIKDPEASAQYLRDLMGPVAGCLVENASRSDLKSVAQQADVIYMVCCLLERLRGAARATQPRTQKVLFEMAHTVMNPLLTLLEVYKNHSTVVYMILKFVVDFVDGQAVFLDAKETSALVSFCLQLLQIYSSHNIGKVMLSLSSSLRNESQAEKYKDLRALLRLLTNICSKDLVGFLSDCGGEGSPDIAEVIYIGLDIVTPLISLDLLKYPKLSRDYFVLISHLLELYPEKVAHLNSDAFTRIIGSLDFGLRNQDSDVVERCLAAVNALASYNFKERLGGRGRLNSQLMESEGSNGKLQESISSHFLRLLLQILLFEDFRSELAGYAADALLPLLFCEQELYQRLVHELLDKQQNPTVKSRLATAFHNLTSSNNLSSSLDRPNRQRFRKNLLSFMADVSGFMQIK

SEQ ID NO: 48009 - protein, 175 aa, Zea Mays
MDLSAVQAAAASQGFTTDEWPYSVHLLAHLYINDLARFFWKSLPQEVKDTRPELAAVWRIGQCLWKRDYAGVNTAAQGFEWGPDLADFITAFLESYRQRIFKLLTSAYSTIRVADVAHFMGMSEEDATNYAVQNGWSLDAAAKMLTVKKPKSQTNQKLDASKLQRLTECVFHLEN

SEQ ID NO: 48010 - protein, 179 aa, Zea Mays
MLQRKEFSEERKISKFYRALVTGILDDDEVVVTQPIGLVHYPGVAEGLYAACSSGKPAMSKVCVLERLAHQNHTLVQVEIHSGRPHQIRIHLAYIGHPLVDDPLYGIGGHPNFVEPESTGTDSSFASDGGYERPLQPVPGDCGYHLHAHWLVLCHPTTNKDERLLTPLSLSFRWSGFQA

SEQ ID NO: 48011 - protein, 336 aa, Zea Mays
MCLTGCVSLPCFNVLLSGEGSLKENRASEQVGAPSDQKVVKGSGEPKRKVIKHSKLEKDKELFQLAQQYHKVVAERDQAIAVKDRLESLCREFQRQNKMLKEECQRVSTEGQNMRTELSEKFDHAIKGVSAKLEEQRVERISQLEENNTLRSKLKDLADQYNITQQKYAHQLKEKMLELELADLRLQQHQEKAAQEHTQMQLYAEQVSQLMTTEKNLRLQLASDGERFQHFQDALSKSNEVFETYKQEMEKMISVIKNLKKENEFLKGKCENSDIAIVKLIEERELTKKQIEKLKNQREKLESLCRTLQAERKQGPSASIPDAPSSQEVSATSQES

SEQ ID NO: 48012 - protein, 190 aa, Zea Mays
MGGQPRHWLCHDEGKLEECKDFFKTLYMFIYFLGTYLKPHVAILDGITMGGGGGVSIPGTFRVATDRTVFATPEVHIGFHPDAAASFYLSHLTGHVGEYVALTGEKLNGTDMIALGLATHYFMSGHLDLIDERLAKLVTDDPSVIDSSLAQYGDMVYPDKKSIVHRLEVIDKCFSHDTVEEIVDALVSTD

SEQ ID NO: 48013 - protein, 414 aa, Zea Mays
MKDNHYDARTFAVRLKATMENMDKEVKRSRLAEQLYKHYAATAIPKGIHCLSLRLTDEYSSNAHARKQLPPPELLPLLSDNSFQHYILASDNILAASVVVSSTVRSSSVPEKVVFHVITDKKTYPGMHSWFALNSVSPAIVEVKGVHQFDWLTRENVPVLEAIESHRGVRNHYHGDHGTVSSASDNPRMLASKLQARSPKYISLLNHLRIYLPELFPNLNKVVFLDDDIVVQRDLSPLWAINLEGKVNGAVETCRGEDSWVMSKRFRTYFNFSHPVIARSLDPDECAWAYGMNIFDLAVWRKTNIRDTYHFWLKENLKSGLTLWKFGTLPPALIAFRGHVHGIDPSWHLLGLGYQDKTDIESVRRAAVIHYNGQCKPWLDIAFKNLQPFWTNHVNYSNDFVRNCHILEPERVKE

SEQ ID NO: 48014 - protein, 256 aa, Zea Mays
MARVFVGNLDPRVTAREIEDEFRTFGVLKSVWVARKPPGFAFIDFDDRRDAQDAIRDLDGKNGWRVELSTKDGGGRGRDRNGSDMKCYECGEVGHFARECRLRIGSGGLGSGRRRSRSPRYRSRSRSRSRSPRHRRSPSYGRRSYSPRDRSPRRRSYSRSPPLPPPPPRNNSMSPRGAREMSRSSPPPPKNNSSSPREAREMSRSPPPPAKNNRSSPREAREMSRSPPPPPPDARRSYSRSPEQQPQHESPYANDA

SEQ ID NO: 48015 - protein, 829 aa, Zea Mays
MATAAAMADDDDFASPPLAPRAREEGGGRGVYQVGGVPVEFPYKPYGTQLAFMGRVIATLDRARRQGRSHALLESPTGTGKSLSLLCSALAWQRHYPLRSPPAPDPLLHGGGFVPDDTQPQPTPVVPEKAVKKKNAPIIYYATRTHAQISQVVREYRKTSYRVRMAILASRKHYCVNKFACASDNIDEKWNAQKLSRHPSLQIGGCYEVHDIEDLVRVGQKAKGCPYFAAQHMAEAAQLVFCPYNYLISPVVRRAMDIDISGSIIILDEAHNIEDIARDAGSIDIDEESLCLLQGELQNLAANEAVAMIYQPLHDIIQALIGWIAEREDNLHNHEFGHPASYWTGEKAMNELQRAGISPMYFPVLQECATKAIKAASDTESDGSHLSGGSAMTLESLFSSLSYFFAQKGRNSCDYQLALQRFVKKEGKDVISSTCTMSLWCLNPAVVFQEIADRTLSVILTSGTLSPMGSFTSELGVQFEACMEAPHVINADSQVFAAVLSSGPTRQILNASYKTADNSSFQDELGASLEEICRIVPGGALVFFPSYKLMDKLQVRWSQTGQWARLNAQKHVFVDTNIDSTWIRNDVQVKLKRRYNDSYKSSKHLLSGSEWYCHQAFRALNQAAGRCIRHKSDYGGIILIDERYQDDRNVLYISKWLRNAIKKYDSFQETMAKLQKFFQNAQEKIKIKDCGIFPKVKLDNEAPQSFSDDKRKLPWPELSSSNHSVSRCNQKVKTECLSQRIPDIDGVAVNQKVVGVANTGANYGVKTEIIKLEEDDFKPRYAEITILNPLEDRSRQPTLVEGTSAATPVASPSNYAEKSFFPVHTGSYS

SEQ ID NO: 48016 - protein, 269 aa, Zea Mays
MCNGKGIQTCLQCSGECVIWQESVDEQPWEKVRSSSPLKVKEDDEVDKLEININNPKRSKRTYASTSPEVAKKISRSLRSLNAQTGLFTKHMKIIHQDPELRAQRVAAIKRTKGTDVARKRASEIQKAFFSDPENRLKRSIAMKGVKFYCSKCGQEGHRSFYCPTLREGSTRVRFRCRLCGREGHNSRTCGKPKSEKEHKQRPHHCSRCGEKGHNRRNCPTSTDLGSDASGYVVNKVNGSNSAVYQCSICLEKGHNRRTCPKRKATLLK

SEQ ID NO: 48017 - protein, 490 aa, Zea Mays
MKMHRFALRGLGFLVLWMLHCGSELAAAVPPGASRSRRCTTEAFSSSAAAAETRTDTARRRPASSPRRSWCTTSTRPPCTPSHNADKTPMKITVASGSLQPFTTDQWAMHQQDTIRKRRKRVATIHVADPQGARVVGASVSVQQTAKDFPIGSAIASTILGNQAYQQWFVDRFNAAVFEDELKWYSTEPMSGQLRFDVPDQMLAFVRSHRVMVRGHNIFWENQDATPRWVKNLTADDLRAAVNTRIQSLMTRYRGEFAHWDVNNEMLHYNFYEQRLGPNASAEFFSVAQDADPLATLFMNEYNVIETCDDPFSTVDTYVSKLKDLRSAGAILEGIGLEGHFSKPNIPLMRAILDKLATLGLPIWFTEIDISNKFDAQTQAAYLEQVLREAYSHPAVSGVMLWTALHPSGCYQMCLTDWNLSNLPTGDVVDRLLNEWRTLQAAGQTDAHGAYSFTGYLGEYVLTVSYNNRTTQSTFSLSPGDETRHINVQM

SEQ ID NO: 48018 - protein, 401 aa, Zea Mays
MKITVASGSLQPFTTDQWAMHQQDTIRKRRKRVATIHVADPQGARVVGASVSVQQTAKDFPIGSAIASTILGNQAYQQWFVDRFNAAVFEDELKWYSTEPMSGQLRFDVPDQMLAFVRSHRVMVRGHNIFWENQDATPRWVKNLTADDLRAAVNTRIQSLMTRYRGEFAHWDVNNEMLHYNFYEQRLGPNASAEFFSVAQDADPLATLFMNEYNVIETCDDPFSTVDTYVSKLKDLRSAGAILEGIGLEGHFSKPNIPLMRAILDKLATLGLPIWFTEIDISNKFDAQTQAAYLEQVLREAYSHPAVSGVMLWTALHPSGCYQMCLTDWNLSNLPTGDVVDRLLNEWRTLQAAGQTDAHGAYSFTGYLGEYVLTVSYNNRTTQSTFSLSPGDETRHINVQM

SEQ ID NO: 48019 - protein, 630 aa, Zea Mays
MQISCLSELKKCFPVAMHWYLLTTSWPGGQPVQIVHRYHFASHLKRMSVIVRIQQKFYAFIKGAPETIQEKLVDLPAAYVETYKKYTRQGSRVLALAYKLLPEMPVSEVRSLERDQVESDLTFAGFAVFNCPIRSDSGAVLQELGQSSHDLVMITGDQALTACHVASQVHISSKPVLILTRIKTGGFEWVSPDETDRAPYSAVEVAVLSESHDLCINGDCFEMLQSTEAVLQVIPYVKVFSRVAPEQKELVLTTFKSVGRVTLMCGDGTNDVGALKQAHVGVALLNAEPVQKVDSKSKAENKSGKLKNKKPANEASSQVTPVANSSGKASSSLSLTAAERQREKLQKMLDEMNDESDGRSAPIVKLGDASMASPFTAKHASVTPTLDIIRQGRSTLVTTLQMFKILGLNCLATAYVLSVMYLDGVKLGDVQATISGVFTAAFFLFISNARPLQTLSAERPQPNIFCAYVLLSILGQFAMHIFFLITAVNEASKHMPEECIEPDSDFHPNLVNTVSYMVNMMIQVATFAVNYMGHPFNQSISENKPFKYALYGAVAFFTVITSDMFRGLNDYMKLEPLPEGMRGKLMLWAILMFCGCYGWERLLRWVFPGKIPAWEKRQKQAVASLEKKHH

SEQ ID NO: 48020 - protein, 151 aa, Zea Mays
MSCTSPDPPDYCSAESPELKLYQAFIFSVPVFFTFVLLLFFYLFYLRRRRANWQSLRMRTNNLIRGDNARVLGLPSRIRTGREASEDTSLWAYLPHQLYRPLALHKHHLPPLPSIAPSRPQGNQHRTGSGSTDCGRRGVSERTSSPGGGTR

SEQ ID NO: 48021 - protein, 318 aa, Zea Mays
MMCQEGKPQAAVDKTLDSKVFKGWVETDNPWTSDDETDNNEMTYVNLQLNPERYTGYTGDSARRIWDAIYKENCPKYPSEELCHEKKALYKLISGLHSSISVHIAYDYLLDESTNSWGQNLPLLYDRVLKYPERVQNLYFTYLFVLRAVTKAANYLEQAEYNTGNPEDDLKTESLVKQLLYNSKLRSACPLPFDEAKLWQGENGPELKQEIQKQFRNISAIMDCVGCEKCRLWGKLQVHGLGTALKILFSVDGDSHMNQPLQLQRNEVIALFNLLNRLSESVKFVHEKGSSIEEVIEEQIPSTVQKSVSMPNLKLDFL

SEQ ID NO: 48022 - protein, 457 aa, Zea Mays
MELFYELLLTAAVTLLAALLLATLFAANDSHRRTDRAAAAIAEEVAEEERIIEVDEVMRSEGMAAVAPSEADGWVEAEKAPAVVVAEVKEPESLPEEEGVPVKAVREVRLAAEVEEGEDGGGGVKRPDLTSATVVAAVGAEASQLVSGAEVVPKEVSGAAGLEERTVQDVVVNQYDLGAEVALVPVEVLEAGPDKQGVEVVGVAQVPPLETEAAEVKQHHLVAEAAPAEDVLDVGLVDKSVRAIEVRPNELDSETVLEEILDAVLEEEEQVEHELPAGAAPQPVLDVPLAGKGELKHHQPVEEAAEVHEDVQCKQEAECEAQTVDQQQELVPEEESVAGKNDDVNVIHECSFSDEVVTELPVGEVTSQGLPKDDPEADMEFEEWEGIERSEVEKRFGAAAAFAASGAGAAALSKLDSDVQLQLQGLLKVAIDGPCYDSAQPLTLRPSSRAKWRSGTV

SEQ ID NO: 48023 - protein, 1214 aa, Zea Mays
MVKGSTGHHSNPIAPVPFEAFHNGSWHGANSIMIRDGGLLVKFVSSGYAVAVQHDIDGSYLRVRSRKATCSDCSHVLKPGADVCVWQAVYRGETKDSVLLCCRDARLIKIKRNHQSDRCLCLFAVIFYKDQCPGSKEKVISGTIADVVTIDDICILQNLQPEELQDGSVRWNSAVDCFHHNRSKLLSARFSLEVAYLIVLSSLRRMEFNIKMVDGNIIYQIIKGDQARDSIDSMSIPPGFGKNMDIISFKPRGEALRPITRTVPVTQVEEGNLTEDGCIAVKGESDSAQDVEILYAHVDIRRSKRMKTQPDRFTSYDARNFNRTYNKKEADGPSTKYEDSESGLSCDSSEQRESSDEEALENPRSMAAEHKYPVKRNQCSLPVKEKQISMEIKKNTTDQGCSDSYIPHTPAKNTERPRFRLKPFASSRSLDGNSEPAFCQKRGRKRKKHMCQIEYKRMIDQCIGNIQCEVERDSDFKFGDQILDGCVRAYQEVDFTWPSSADSQEEKDELDELWKEMDYALATVAILEQKQMTDSEVVHESNTDLGKGGEHCHHDCMLDEQLGLTCRLCNVVCIEAKDIFPPMFTGKDHERPERNHFGQDGHVLDLSFFEICAPEFSKIKESGNVWASITDLEPKLLAHQRKAFEFIWKNLAGSLQLEEMDGSTSRGGCVVAHTPGAGKTLLLISFLVSYLKVHPRSRPLVLTPKAAIHTWRTEFQKWGILLPLHVLHHSNRTSKLMGGLSSKLQAVLKSFHQPSWKTMRIMHCLDKLCKWHEEPSILLMTYSSFLSLTKEDSKLRHQAFITKVLMNNPGLLILDEGHNPRSNKSKLRKLLMKVKTEFRILLSGTVFQNNFEEYFNTLSLARPRFVNDVMTTLVTESEKRTRSRTGKHQEALARHVFVERVGHKIESSSKHDRMDGISLLNELTQGFIDSFEGTKLNILPGIRVYTLFMKPTDVQEEVLAKLLMPLSGNARYPLEYELLITIASIHPWLINTTKCASTYFTPAEVASVDKYKRNFAAGCKAKFVIDLLHKSSFRGERVLVFCHNVAPIAFLVTLIEIVFGWRLGQEVLVLQGDQELHVRSDVMDKFNSDRRGKRKVLIASTTACAEGISLTGASRLVMLDSEWNHSKTRQAIARAFRPGQERMVFVYLLVASGTWEEDKYNSNRRKAWIAKMVFFGRHFDDPLQNRVTEIDDEVLKELADEDETNTFHMIVKQD

SEQ ID NO: 48024 - protein, 235 aa, Zea Mays
MSHSPLPPPVFQNISLRFSESFSLQGTETTGAFTPPAFPSPPGTTGLLAIIRPSMAKLVNKLVDSFDHHEAPAPDVGCVRAVLAELVLTFLFVFTGVSASMAAGDPGARPGRWHQPDAGPGDGGDPHLLAALRHLRHDPGPAEPGPDHRPAADGAHSRRQQPRRRQLHRRVHEPGAVLRSRHGHRGLDQPLGLLDRPAARRVPGRLRVRVAVHGVQDARAAAQWRHLTTVGPPGQ

SEQ ID NO: 48025 - protein, 303 aa, Zea Mays
MLSALMDYLKSCWGPASPAGRPRKGSDATGRQDGLLWYKDGGQVVDGEFSMAVVQANNLLEDHSQVESGPLSTSEPGLQGTFVGVYDGHGGPETARYINDHLFNHLRRFASEHKCMSADVIRKAFRATEEGFISVITRSIGDVYLKKPEFNREPLHSKFRLQETFRRPLLSSDPAITVHQIQPTDKFIIFASDGLWEHLSNQEVVDMVQSSPRNGIARKLVKSAVQEAAKKREMRYSDLKKVDRGVRRHFHDDITVIVVFFDSNAMTTAAWSRPSVSLRGGGFPIHSNTLAPFSVPTELNNSY

SEQ ID NO: 48026 - protein, 382 aa, Zea Mays
MAAPNSNDAASASGTGPAGEEDISIEALARRVQEHMTLSSNPAARRHKFWETQPVGQFRDVADTSLPDGPIEPPTPLSEVRADPYPLPAAFEWLTCDLDDDALLADLYSLLAHNYVEDDENMFRFNYSPAFLRWALKPPSFFRAWHIGVRAKESKKLVAFISGVPARIRARDDVVRMAEINFLCVHKKLRSKRLAPVLIREVTRRVHQENIWQAAYTAGVVLPTPITTCRYWHRSLNPKKLIDVGFSRLGPRMTMSRTVRLYKLPDAPLTPGFRRMELRDVAAVTRLLRAYLARFVVAPDFDEVDVEHWLLPQEDVVDSYLVESPETHEKNYDVFNALDVMENESFLKELKFGPGDGQLHYYLYNYRIRNGIKPSELGLVLL

SEQ ID NO: 48027 - protein, 199 aa, Zea Mays
MEVPWLLLVHGSVTALVVVSFLCGQWPIFEGTFIQSINHFLTFGAYHYLLRFVQSVCGTGARDLVLGVEGYCCDRPNPILQVFYVAIIGVTYFIIVQTSFQYIPGYYVSGLHRYLSVVAVSVGAILFVLTSFSDPGTVTAENVSQYVSSYPYDNIIFVEKECSTCKITRPARAKHCRICDKCVARFDHHCGWMVLVLTN

SEQ ID NO: 48028 - protein, 431 aa, Zea Mays
MQMICNRILRWEAGPKEFDGIWAPWWYGSVHKSSGFSKPRQYPLTFPFVFYDLLEQSLPFYNMLKRQIRKIRGPQQPPLSDPPLPVPANKNILVWVGDELLPRNSAKVSVFDSVVQGGDAVWEGLRIYDGKVFKLDEHLDRLFDSAKAMAFSNVPTRDWIKDAIFKTLIANGMFNNAHIRLTLTRGKKVTSGMSPAFNLYGCALIVLAEWKPPVYDNSHGIKLVTATTRRNSPNSIDSKIHHNNLINNILAKIEGNLAQAEDAIMLDKDGFVSETNATNIFMVKKGIVLTPHADYCLPGITRATVMDLVVKENFVLHERRISLSEFHAADEARTRMAKVCVAAAAAQMPLQHMSLLPQKLPWTLPLQAQSAWAWVLSPHSCRNPFLLVSSGTMAPCQCRCGPLSPNDSFTAYFTLVTTIATQVCCRCSGVL

SEQ ID NO: 48029 - protein, 357 aa, Zea Mays
MLEAYYLPQNAGDIARKFIKDQELLSFIDAECFIVSTVNALQTPMINASMVLCDRHFGGINYPVGGVGGIALSLADGLVEKGSEIRYKANVTNVVLENGKAVGVRLSNGKEFFAKTVISNATRWDTFGKLLKEKELPEEEKNFQKNYVKAPSFLSIHMGVKASVLPAGTDCHHFVLEDNWNNLEKPYGSIFLSIPTVLDPSLAPEGHHILHIFTTAGIEAWEGISRKEYEEKKEMVANEIIRRLEKKLFPGLQDSIVLKEVGSPKTHRRFLARNDGTYGPMPRGKPKGLLAMPFNTTSIDGLYCVGDSCFPGQGVIAVAFSGIMCAHRVAADIGLEQKSPALDAGLLGLLRWLRTLA

SEQ ID NO: 48030 - protein, 365 aa, Zea Mays
MATAQVLFHRFYCKKSFVRFSAKRVAASCVWLAGKLEESPRKSKHIIFVFHRMECRRENLPIEFLDVFSKKYSELRRDLIRTERHLLKEMGFICHVEHPHKFISNYLATLEAPPELTQEAWNLANDSLRTTLCVRFKSEVVACGVVYAAARRHRVPLPEDPPWWTVFDADEAGIQEVCSVLAHLYSLPKAQYIPVYKEYDSFTVKRISDPQALKESPARAVASDKGTPIPSSSNQEKDSVAKTIPNRVKEKSDDEGRHLPAEFDGKENLVVNSKIEKSDSGVDWSRERERERERSRGRERDARGRDSDHDSRGRDSDRERDRRRRSRDRSSGHSDKEKSRRHPSHDRVDYYSSHSSREKDRHRHH

SEQ ID NO: 48031 - protein, 98 aa, Zea Mays
MTRSEPSAASSLGKFSADDREKVLTAVGVHTAISIAQPTSQIQEEGDNHTGNQEIIPRSNRMGRQLESLSRGLGIKIPTQITEGNKSQSHLFKLLSLH

SEQ ID NO: 48032 - protein, 213 aa, Zea Mays
MSFFFRMASRLRPSTPEEVVRSIKDSFLALHTRTHAKALEEVEKNMSSLRLLIFGDGEVEPNEEQVLQITLEICKEDVISLIVQDLPSLGWGVRKDLAICWCILLRQKVDETYCCVQYLENHLELLDFLVGCYKNLDIALNCGNMLRECIKYPTLAKYILESGSFELFFEYVELPNFDIASDALNTFKDLLTKHEVVVAEFLSSHYEQALVIN

SEQ ID NO: 48033 - protein, 230 aa, Zea Mays
MSFFFRMASRLRPSTPEEVVRSIKDSFLALHTRTHAKALEEVEKNMSSLRLLIFGDGEVEPNEEQVLQITLEICKEDVISLIVQDLPSLGWGVRKDLAICWCILLRQKVDETYCCVQYLENHLELLDFLVGCYKNLDIALNCGNMLRECIKYPTLAKYILESGSFELFFEYVELPNFDIASDALNTFKDLLTKHEVVVAEFLSSHYEQVTTCSEIHLWLCQQKKGIRKLF

SEQ ID NO: 48034 - protein, 290 aa, Zea Mays
MSFFFRMASRLRPSTPEEVVRSIKDSFLALHTRTHAKALEEVEKNMSSLRLLIFGDGEVEPNEEQVLQITLEICKEDVISLIVQDLPSLGWGVRKDLAICWCILLRQKVDETYCCVQYLENHLELLDFLVGCYKNLDIALNCGNMLRECIKYPTLAKYILESGSFELFFEYVELPNFDIASDALNTFKDLLTKHEVVVAEFLSSHYEQFFELYSRLLSSTNYVTRRQAIKFLSEFLLETHNSQIMKRYIVEVRFLNIMINLLKVIVHASSQVKIFWVGLLLELYLYLHNI

SEQ ID NO: 48035 - protein, 91 aa, Zea Mays
MSLRTTAWLSARPGHHQPVQCLSSPEKPRRRSANYQPTSWDYDALLSLDSGRPGDQGVIQVSLIIAPDSSQIHLSIRTNVRSNAVYADRTD

SEQ ID NO: 48036 - protein, 513 aa, Zea Mays
MSLRTTAWLSARPGHHQPVQCLSSPEKPRRRSANYQPTSWDYDALLSLDSGRPGDQVHPSSYYKMKRRIRDMLLKKVEPSSKLQTIDAMQRLGISYHFEDEISNILYSISNESTKAQYTYDNIAFTALKFRLLRENGFPTILGPLGYHNYEKFITKTPSLEDANTLLLLYEASYLAFGDEEKLDVARTFSAKALKQLMPFMLPHLREGVAHSLELPLHWRASRLETRWFIDYYARDRNMCPLLLQFAELDFNQVQYEHQKDLAVVTRWWKKIGLGEKLPFARDRLMECFHYANGIVWDPKLGTCRQMLAKVSNLIVYLDDLYDVYGTIEELVLFTNAIARWDAIPNETLPEYMKALYSIIYDTSNEVAEHALKKHGCSMHYLLQKSWYDICLAFLVEAKWHHGNYRPSIQKYLENGWVSSSAPLLLLHAFAMLDSVVNMSTISPLQTKLRLVQHVSLILRLCNDSATHLDELGRGDAPSFIALHMIENGGNENDSRKAMQEHILKSWKKAKVQ

SEQ ID NO: 48037 - protein, 310 aa, Zea Mays
MFGMFFKQVEELYSLDVGSLSQLRPVYGLIFLFKWIPGEKDERPVVRDPNPNLFFAHQVITNACATQAILSVLMNRPEIDIGPELSQLKEFTGAFTPDLKGLAISNSESIRTAHNSFARPEPFISDEQRAATKDDDVYHFISYLPFEGVLYELDGLKEGPVNLGQCDGADDLDWLRMVQPVIQERIERYSQSEIRFNLMAIIKNRKEVYSAELEELEKRREQILQEMNNASSTESLSSSLTEVISAIETVTEKVIMEEEKFKKWKKENIRRKHNYIPFLFNLLKMLAEKQQLKPLVEKAKQQKSASPSTS

SEQ ID NO: 48038 - protein, 305 aa, Zea Mays
MGGELLLALLLVSAAAAPQVLGVGNGDNHMRIIQEDIIETVNNHPSAGWTASRNPYFSNYTIAQFKHILGVKPAPQNALSNVPVKTYSRSLELPKEFDARSAWSRCSTIGNILEQGHCGSCWAFGAVECLQDRFCIHLNMSILLSVNDLLACCGFMCGDGCDGGYPIEAWRYFVQNGVVTDECDPYFDPVGCKHPGCEPAYPTPKCEKKCKEQNQVWQEKKHFSIDAYRINSDPHDIMAEVYKNGPVEVAFTVYEVSKDMTKAEQEKHKPKNKSGFRTLQIWSVQAHHRWHYGWPCRQVDWMGNQ

SEQ ID NO: 48039 - protein, 251 aa, Zea Mays
MPRDLRPAGMRLFGVTIAPVPEANPPGRNPSPNPPVAAREDVMRKCKSMGNLAALGAGLDGGGGCADGGVAGDGYLSDGGLMQSCGKRRRAQERKKAVPWTEEEHRTFLAGLEKLGKGDWRGIAKKFVTTRTPTQVASHAQKYFLRQTNPNKKRRSSLFDMMPRELSPTPNCPVLPPSMAKVHDVVAMTKQLQNSNLEGASSSNAANVVSQVGRDLPPVPSFKATNIDSSFSKFSHMVQKHQSSYKVEVLK

SEQ ID NO: 48040 - protein, 871 aa, Zea Mays
MFWHGVADRLTGKNKEAWNEGKIRGTVRLVKKEVLDVGDFNASLLDGVHRILGWDDGVAFQLVSATAADPSNGSRGKVGKAAHLEEAVVSLKSTTDGETVYRVSFEWDGSQGVPGAVLVRNLQHAEFFLKSLTLEGVPGRGTVVFVANSWIYPHNLYSQERVFFANDDELKILRGDDNPGPYKEHDRVYRYDYYNDLGEPDKGEDHARPVLGGSQEHPYPRRCRTGRRPTETDPNSESRLFLLNLNIYVPRDERFGHLKMSDFLGYSLKAIIEAVLPTLGTFVDDTPKEFDSFEDILGLYEPGPEAPNNPLVAEVRKRIPSEFLRSILPNGSHDHPLKMPLPNIIRSDVLKKAPEFKFGWRTDEEFARETLAGVNPVLIKRLTEFPAKSTLDPSQYGDHTSKITEAHIQHNMEGLSVQNALKKNRLFILDHHDHFMPYLNKINELEGNFIYASRTLLFLKDDGTLKPLAVELSLPHPDGQQHGAVSKVYTPAHSGAEGHVWQLAKAYACVNDSAWHQLISHWLNTHAVIEPFVIATNRQLSVVHPVHKLLSPHYRDTLNINALARQTLINADGIFERTVFPAKYALGMSSDVYKSWNFNEQALPADLVKRGVAVPDQSSPYGVRLLIKDYPYAVDGLVIWWAIERWVKEYLDVYYPNDGELQRDVELQAWWKEVREEAHGDLKDRDWWPRMDAVQRLARACTTVIWVASALHAAVNFGQYPYAGYLPNRPTVSRRPMPEPGSDDYKKLEAGQKEADAVFIRTITSQFQTILGISLIEILSKHSSDEVYLGQRDEPERWTSDARALDAFRRFGSRLVEIEKRIRTMNDSPTLKNRKGPVEMPYMLLYPNTSDVTGEKGEGLTAMGIPNSISI

SEQ ID NO: 48041 - protein, 422 aa, Zea Mays
MEVVSCSHSCSALHQTPASTWRLRGSALGLGLGHARPSRTRRYTVACVGTTSGASNPGGSGKVHAAQGFHVSDVDAALQGIPSMKAGEAERVMIQGLPEGPDSSPISTGFWEWKPKLTVYYERSGMKNSKAPAVLFLPGFGVGTFHFEKQLRDLGRDHRVWTMDFLGQGMSLPGEDPAPSSIASEDAFWGFGQDSQPWAEELVYSVDLWQNQVQHFIEEVIREPVYIVGNSLGGFVALYFAASSPHLVKGVTLLNATPFWGFFPNPATSPRLSKIFPWAGTFPLPSFVRKITEAVWQKISDPKSIQDILKQVYADHSTNVDKVFSRIVEITQHPAAAASFASIMFAPRGQISFQEAISRCQDQGIPISLMYGREDPWIRPIWGLKVKQQVPEAPYYEISPAGHCPHDEVPEVNRTRATLHPA

SEQ ID NO: 48042 - protein, 258 aa, Zea Mays
MAPAHDRLRRLVLLLVVATAAAALLLAPTTADAALPRVQHTPTKADGSLAILVVGDWGRRGQFNQTLVAQQMGVVGQKLDIDFVISTGDNIYDDGIANTSDPLFKESFSNIYTANSLQKPWYLVLGNHDYTGNALAQLDPAIRKVDSRYTAIAKSFIVNSGIADFFLVDTTPFIVHYWNNTKFDWRGVAPRDTYIANLLKDLKCALTASKAPWKIVVGHHPISSACGHGNNTELEELLLPVLRARPKLSGLHTGLTCT

SEQ ID NO: 48043 - protein, 105 aa, Zea Mays
MVPWMPAPLLDAPARFLACSPRPMPSSHGRPGSPWLSFLPAGSPQIAPGLFPLVENTSALNPPLLMVDVSSSMVPRSPSPCPCSLFSSRQPWRNFRCWRAKSSKF

SEQ ID NO: 48044 - protein, 240 aa, Zea Mays
MTGYRSRSPSRSYSPRRRYSRSPPRRKRYDDPRDRYRWAGAGGGGDRRGYGRPLAQSGLLIRNISLTARPEDIRATFEQFGPIKDVYLPRNFHTRELRGFGFVKFRYPEDAAVAKREMHHQVIGGREISIVYAEENRKTPQEMRMRTRTSGRYMDERYTRLSRSPRSRSHSYSPPPSPVRRDFRGRERPDSYSPQYSHSPRPRDSRHHRSDGRSPTPSLDDHKPKATPVNGGHGPAVASR

SEQ ID NO: 48045 - protein, 378 aa, Zea Mays
MVGAVTSGRLADFLGRKMTMRISATICIFGWLSIHLAKSAIMLYFGRTLLGFSTGVLSYVVPVFIAEIAPKNLRGGLATSNQLLICSGSSATYIIGALVAWRNLVLVGLVPCVLLLAGLFFIPESPRWLANVGREKEFHASLQKLRGEDADEYIESLYSLPKARLRDLFLSKNIYAVIVGVGLMVFQQLGGINGVGFYASYIFSSAGFSGKLGTILIGIIQIPITLFGAILMDRSGRRVLLMVSASGTFLGCFLTGVSFYLKAQGLFSEWVPTLALSGILVYIGAYSIGMGPVPWVVMSEIFSINMKATGGSLVTLVSWLGSFAISYSFSFLMDWSSAGTFFMFSSASLITVLFVAKLVPETKGRTLEEIQDSLNTRR

SEQ ID NO: 48046 - protein, 245 aa, Zea Mays
MPPPVEPYIPSFTAGLSAHEAADADKDYLYFLRHVRLDGDAYTVVIPSKDGASCPPQIIRYEQPHSDHNAGAPVAGSECGRQRAHPPSEENSWATGEAAPHGVKRKVPGASPAGEVRSGAVRMEEDTPTLVAKSAWYDLQPDIDDDYRFFLQNARVVNDKLVFKTGNCSITIGDHSDAEEHDDTEEEEKEEEGEGEEDDEEEADDLPASGQSGEDGIGMEEAGPVSETEDGVDSDLPIPKVFELV

SEQ ID NO: 48047 - protein, 359 aa, Zea Mays
MAGLAATLPSPAAGASPLLLHCNAAPSVSFRHRRRWQRPAATRHDGRVAQLLLPVARRWLPAAAPPGVNGARGGIAASGSGAGAVAGEAPYRGNEGQGSLWMVFLATAVVVCGSFEFGTCVGYSAPAQAGIVSDIGLSNSEYGVFGSVLTIGAMIGAVTSGSLADILGRKMTMRFAAVVGIFGWLTVYFAKDAMMLYAGRVLLGYCTGVLSYVVPVYISEIAPKGIRGGLATSNQLFICSGCSAAYIIGALVSWRCLVVVGLIPCAVLLVGLFFIPESPRWLANIGKEREFHASLQEFRGEDSDISEEATEIKDYIKSVRRLPKAKIQDLFQRKNMYAVTVSKLDKFCPLKKRGIYSSF

SEQ ID NO: 48048 - protein, 438 aa, Zea Mays
MVFLATAVVVCGSFEFGTCVGYSAPAQAGIVSDIGLSNSEYGVFGSVLTIGAMIGAVTSGSLADILGRKMTMRFAAVVGIFGWLTVYFAKDAMMLYAGRVLLGYCTGVLSYVVPVYISEIAPKGIRGGLATSNQLFICSGCSAAYIIGALVSWRCLVVVGLIPCAVLLVGLFFIPESPRWLANIGKEREFHASLQEFRGEDSDISEEATEIKDYIKSVRRLPKAKIQDLFQRKNMYAVTVGVGLMIFQQLGGINALGFYTSYIFSSAGFSGKLGTTLIGVIQIPITFFGALLMDRSGRRALLLVSSSGTFLGCFLTGLSFYFKAQGLCTQLVPTLALCGILVYYAAYSVGMGPVPWVIMSEIFSIDMKAIAGGFVTLASWIGSFAISYSFNFLMDWNPAGTFFLFSAASLVTVLFVAKLVPETKGRTLEEIQTLLKAT

SEQ ID NO: 48049 - protein, 393 aa, Zea Mays
MSSAAAVDEMELDGIERHRDKERRERHRREEKDHNGSGRRDREKEKDDRRRDKDDGKHRDRDRDRERDRDKDSKYRDRDKEPERERNRDRDRGKDREREPDRQRDKDRSKDRDKEAERDKERERRDRDKERSRNRDKDKDRTQREDRDHEKSRVKGRGEDEADLSKGDKGVQKQRVDASGDAEQPAADELRERIARAKEERLKEKKEGGILDGNDGASEILSWVGKSRKLDEKRQAEKEKALRLARALEEQDNILAENGDDDDDDKEEDTQVGDHLSGVKVLHGLDKVLEGGAVVMTLKDQSILANGDINEDADMLENIEIGEQKQRDEAYKASKKKGTYDDKFNNDSSSKKSILSHYDDQMEDEVNILFSFICLHFEIFCNCILFNLSGRDP

SEQ ID NO: 48050 - protein, 359 aa, Zea Mays
MKVLCIRKPDEPIDLFMVEIMHMRHKFDVDTRLVEGLVLDHGSRHPDMKRRAENCYILTCNVSLEYEKSEINAGFFYSNAEQREKMVAAERRQVDERVKQIIELKNKVCAGGDKNFVVINQKGIDPPSLDLLARAGIIALRRAKRRNMERLVLACGGEAVNSVDELTEDCLGWAGLVYEHVLGEEKYTFVENVKNPRSCTILIKGPNDHTIAQIKDAVRDGLRSVKNTVEDEAVVLGAGAFEVAAKKHLIDNVKKTVKGRAQLGVEAFAEALLVIPKTLAENSGLDTQDVIVSLQNEHDRGLVVGLNHHSGDPIDPQMEGIFDNYSVKRQIINSGPIIASQLLLVDEVIRAGRNMRKPT

SEQ ID NO: 48051 - protein, 1032 aa, Zea Mays
MEGRNPVQRFVDSPKPYNRRKARGMQTRMDSSDHGDRQGPRACEELPGKMDNDRADRQRLKACEFPAKMDNNHADRQVSKACESKGNACELPGKMDNDHPVRQGLKARGLLQPKSDASEDGVCEGLKACGLTANKMDATDQCDHKGSKVCRVVTTKTDTSDQGDCQTFKVCGIAAKMDVNDHADHQGSKASGMPTKTDANDQCSNQGPFKTAERLDHLLNQPANRYCADCGAPDPKWVSMTFGVFICIKCSGAHRSLGVHISKVVSVKLDEWADEQVDILADSGGNAAVNMIYEAFVPENYAKPRQDCSAEERNDFIRRKYEAQQFLTNPQLSCPPRRNEKHNHQQHSTSSSRHGLGHSFRNSWRRKEHEAKSTKKTIEVGMVEFVGLIKIDIIRGTNLAIRDVMSSDPYVIINLGHQTMKTKVVKSSLNPVWNERLMLSIPDPVPLLKLQVYDKDTFTTDDRMGEAEINIQPLVAAAKAHETSAIADTAQLNKWLAKDGIWIPRDSAISIVNGKVKQVVNARLQNVERGQLEMELDHLNRCKYLLGMTILCCILAMDAAALESLILDLHAIEVVKLGSFTLKSGIKSPIYLDLRALVSHPRLLSAVASLLHALPATRPYGLVCGVPYTALPIAAVLSVDRSIPMLMRRKEVKAHGTAKSIEGSFSPGDTVLIIEDLVTSGASVLETAAPLRAEGLVVADAVVVVDREQGGRENLAANGITLHSLMTLTEVLAVLLKHGKVTEEKAQEVRQFLDANRKVAVPGAAPVTPRVLRKTFSERANLATNPMGKKLFELMETKQTNLCVAADVGTTKELLELADKVGPQICMLKTHVDILSDFTPDFGSKLRSIAEKHNFLIFEDRKFADIGNTVTMQYEGGIFRILDWADIVNAHIVPGPGIVDGLKLKGLPKGRGLLLLAEMSSAGNLAHGDYTAAAVKIAEQHSDFVMGFISVNPESWSVKPSSPAFIHATPGVQMVAGGDDLGQQYNTPESVINYRGSDIIIVGRGIIKASDPMKKAWEYRLQGWQAYKNSLL

SEQ ID NO: 48052 - protein, 1061 aa, Zea Mays
MEGRNPVQRFVDSPKPYNRRKARGMQTRMDSSDHGDRQGPRACEELPGKMDNDRADRQRLKACEFPAKMDNNHADRQVSKACESKGNACELPGKMDNDHPVRQGLKARGLLQPKSDASEDGVCEGLKACGLTANKMDATDQCDHKGSKVCRVVTTKTDTSDQGDCQTFKVCGIAAKMDVNDHADHQGSKASGMPTKTDANDQCSNQGFVTCTAHIPILLPLVNCPFKTAERLDHLLNQPANRYCADCGAPDPKWVSMTFGVFICIKCSGAHRSLGVHISKARHVVSVKLDEWADEQVDILADSGGNAAVNMIYEAFVPENYAKPRQDCSAEERNDFIRRKYEAQQFLTNPQLSCPPRRNEKHNHQQHSTSSSRHGLGHSFRNSWRRKEHEAKSTKKTIEVGMVEFVGLIKIDIIRGTNLAIRDVMSSDPYVIINLGHQTMKTKVVKSSLNPVWNERLMLSIPDPVPLLKLQVYDKDTFTTDDRMGEAEINIQPLVAAAKAHETSAIADTAQLNKWLAKDGIWIPRDSAISIVNGKVKQVVNARLQNVERGQLEMELDHLNRCKYLLGMTILCCILAMDAAALESLILDLHAIEVVKLGSFTLKSGIKSPIYLDLRALVSHPRLLSAVASLLHALPATRPYGLVCGVPYTALPIAAVLSVDRSIPMLMRRKEVKAHGTAKSIEGSFSPGDTVLIIEDLVTSGASVLETAAPLRAEGLVVADAVVVVDREQGGRENLAANGITLHSLMTLTEVLAVLLKHGKVTEEKAQEVRQFLDANRKVAVPGAAPVTPRVLRKTFSERANLATNPMGKKLFELMETKQTNLCVAADVGTTKELLELADKVGPQICMLKTHVDILSDFTPDFGSKLRSIAEKHNFLIFEDRKFADIGNTVTMQYEGGIFRILDWADIVNAHIVPGPGIVDGLKLKGLPKGRGLLLLAEMSSAGNLAHGDYTAAAVKIAEQHSDFVMGFISVNPESWSVKPSSPAFIHATPGVQMVAGGDDLGQQYNTPESVSTVCLCGHWNIGVYSRILMLLVCYTCVHTCSFLGLVTPLHSTIFKASVCW

SEQ ID NO: 48053 - protein, 513 aa, Zea Mays
MSDSPVELPSRLAVLPFRNKVLLPGAIVRIRCTNPSSVKLVEQELWQKEEKGLIGVLPVRDSEATAVGSLLSPGVGSDSGEGGSKVGGSAVESSKQDTKNGKEPIHWHSKGVAARALHLSRGVEKPSGRVTYIVVLEGLCRFSVQELSARGPYHVARVSRLDMTKTELEQAEQDPDLIALSRQFKATAMELISVLEQKQKTVGRTKVLLDTVPVYRLADIFVASFEISFEEQLSMLDSVHLKVRLSKATELVDRHLQSILVAEKITQKVEGQLSKSQKEFLLRQQMRAIKEELGDNDDDEDDVAALERKMQNAGMPANIWKHAQREMRRLRKMQPQQPGYSSSRAYLELLADLPWQKVSEERELDLRVAKESLDQDHYGLTKVKQRIIEYLAVRKLKPDARGPVLCFVGPPGVGKTSLASSIAKALNRKFIRISLGGVKDEADIRGHRRTYIGSMPGRLIDGLKRVSVSNPVMLLDEIDKTGSDVRGDPASALLEVLDPEQNKAFNDQQDGNH

SEQ ID NO: 48054 - protein, 68 aa, Zea Mays
MGGSCGYFHRDNSILYIGHPRSPGGAQTSVDGFFLHRVRPLEMESMLINVEGKLVQRSDVQQHGTGAM

SEQ ID NO: 48055 - protein, 662 aa, Zea Mays
MIVKSRGVKRTCGGMKEMSGMGTEKTSGLGAHIACECFVPWMGLSSRLELNRKSTQSFTDWYELITPGCVVPSAMIYCTHCADYCPSIKDPDKGYICCGTCGKVLDQEVYTDEPTFVKDNTGQSRLAGSILASIESGYSISHQRTLDKGRDEIRQIVNNLHVSGGETVVSKAYRFYELAVDRNFTRGRRTSHVAAACLYIACRQSKKAYLLIDFSDYLQISVYVLGAVFLQLCQVLLLADHPVVQKLVDPSLFIHRFTKCLLGRRDNAVSDTAFSREVSDTALRIVASMKRDWMQTGRKPSGLCGAALYIAALSHGCNYTKADIVSVVHVCEATLTKRLIEFENTDSGSLTIEEFLATADEYNEASVSKYSPKSGEILCKHKGKDFEHFAHGLCEKCFNKFTKLSGGLEGGANPPAFQRAENKRLEAAKRAEEAAAVKEAALEESLCDTQNSEIESTTTPKKALSGDKSSTIGSGGLINDSVPPKDPEEGGENCEGNADPESLSDIDDVEVDWYLHNEEETQYKKIIWEEMNKEYLEEQAAKEALAAELAARGIVVEEGKKKRKRNEDTKSSTPADTPAEATYNMLKRKGLGSKINEGAVGELYKTKDEVESASRKEEMEFDALFGPDNADGETVDDGGYGYGGCGDGGAEAYNGIDDDFDF

SEQ ID NO: 48056 - protein, 183 aa, Zea Mays
MSESELAVIKPEALKTYIWLQCFDGSIQQVEEEVAMFCPMICREIVKNGTGSSKNHAIALPERVNPASLSLILDYCRFHQVTGRSNKERKSFDEKFVRIETERLCELTSAADSLQLKPLVDLTSRALARIIEGKTPEEIRDIFHLPDDLTEDSPIEPVVREEAERAPGAPEAEGCTSTKGGKR

SEQ ID NO: 48057 - protein, 66 aa, Zea Mays
MSTLGEFSYDLDKSNAQTFQLERTAQSRVVNMVQLDISSNHGNLELTCIYRFRVHGRKPVSPSTGG

SEQ ID NO: 48058 - protein, 224 aa, Zea Mays
MACTITLKTATNSTRSWQVRGTAYKWHRYIIGVGWKSFCQDNRLKAGDLCTFNIIETTLWHVTITRSALAADTFNKQKKPPCSSSRDKKGSSSREGAKRPKPSMAHFSKVQVPPSYARRCAYDVGPPPWIRKQMNASTIRNRLCLAPAFCNQIELRRRCEIVLKTSINSNHSWRVGGLSQKKGSYIIGPGWKKFCTENRVKVGDVCTFNVIETQLWHVVITRRC

SEQ ID NO: 48059 - protein, 205 aa, Zea Mays
MEELSNKALAPSLLSLCLDAVADRLISDNAAAGGGVGRTGSSGGCSGGGGLAGFSEDDGGEADEDRLHPQELAEGLPWELLHRLASRLPPVVLESLHHAAHARYCSAETTSGLGVQDGERRGVKRSRCEDFNSTWQLLFKLRWPLGGNTGHNNLVTVDWQQKYWEKHLQECLNEAAEHAFLPFFCGSIGELSISEGPFDWPSVPG

SEQ ID NO: 48060 - protein, 376 aa, Zea Mays
MCTATDLAVLCGTNGEVCYAKYGSFPTKGKYCHEMALRILLASIESHANRYKRYIVPVLSVFMDFYIRVFVRVFTSASEIKNTPLKLSYIYQCVGCDSFHLQCLARTVQKKNNGVKHAPAIGPVVPQECSDCGKKFNVGGPIWSAPIHDQDWVLSTLTGVKSMKDRYPAYDKITSVLNTMSEELHDVPLFFSLHNIAGTVKCTSPSLVMFRSAVLNAGYRISSTHVNPLGIKSDAPWDVIWDIMRCWVKNHPIKEQPRDSPGTVILSKSPKLEANFSRAVAALSKAQTNKIKRFLPNPERHWGPKVRAGRKITSKHVSLLGPDAIKGAVNGGDCQKEGNGAEPDSTASEPEGIKDVEDEPSNKRQKTSDGEPASEP

SEQ ID NO: 48061 - protein, 564 aa, Zea Mays
MSIAVLRTFVAKRKEEHEALVDKRNTSHKKNKQSETSSQNGEDASTGQQDEMDVVCEKELNKAEDQIDDLSKEATEPSWKVTRELKPPLVLEALAATGLRSLRYAREVEGLGKVVALDNDKASIEDCKRNIKFNGASATSKVEAYLVDARIHMLTHPKEFDVVDLDPYGSPSIFLDSAVQAVADGGLLMCTATDLAVLCGTNGEVCYAKYGSFPTKGKYCHEMALRILLASIESHANRYKRYIVPVLSVFMDFYIRVFVRVFTSASEIKNTPLKLSYIYQCVGCDSFHLQCLARTVQKKNNGVKHAPAIGPVVPQECSDCGKKFNVGGPIWSAPIHDQDWVLSTLTGVKSMKDRYPAYDKITSVLNTMSEELHDVPLFFSLHNIAGTVKCTSPSLVMFRSAVLNAGYRISSTHVNPLGIKSDAPWDVIWDIMRCWVKNHPIKEQPRDSPGTVILSKSPKLEANFSRAVAALSKAQTNKIKRFLPNPERHWGPKVRAGRKITSKHVSLLGPDAIKGAVNGGDCQKEGNGAEPDSTASEPEGIKDVEDEPSNKRQKTSDGEPASEP

SEQ ID NO: 48062 - protein, 735 aa, Zea Mays
MGLLSNSSTLRFVPSLVVDAKVIHLDYNNIRIFLSLKDVKVMVETTLGKEELKEAVLMCTNRKAAIKKIDTKASQEFLNEHKRLCVEQRSLATLRVLTQFREGARAPNPPGPMASSEIEVVEDATPAATSGGAGRAVAEVARQEGEGEALKDDVYTGAAYGDLEKLHRLVEREGRSVTVQDALGYHALQWAALNNRVATAQYILEHGANVNAIDHTGQTALHWSAVRGHVQVAELLLKEGAKVDATDLYGYQTTHVAAQYGQTTFLCHIVAKWNADHDVPDNDGRSPLHWAAYKGFADTMRLLLFLGAYSTRQDKEGCTPLHWAAIRGNLESCTVLVQAGKKEDLMVQDNTGLTPAQLAADKNHRQVAFFLGNARSIHERGCVGNSYFVKLSKIGLAPLLWCIIIALMVVYIHSIILEDYNTKMTVIFGLFAWLGVFLASVGLVMFYRCSRKDPGYINKNIRDSQNQRDDEPLLKMGLDSPELLDGNWSRLCITCKIVRPVRSKHCSTCDRCVEQFDHHCPWVSNCIGKRNKWDFFMFLILEVSAMIITGVMAIIRSVGDPASPASFGGWLGYTAINHSWVVSFVIMDLLLFLGVITLTVIQASQISRNITTNEMANTIRYSYLRGPSGRFRNPYDHGLRENCSDFLLKGYNEDIESTVQTLQSDEEMGPIQMSSPVSQNGESIPPHVNGTDHGSTISHANSKSHRQSPSNCLGLGLGTGHNNPSSRYARSLLPL

SEQ ID NO: 48063 - protein, 394 aa, Zea Mays
MWLPHASDLRAFLAAAAVAHLSSSRASRASPCATPPPPRFRAFASSRASPPPSPSQTGSIASAAAAACEHVAEKPATCTADELHYAPVPGTEWRLALWRYLPPPEAPKRNHPLMLLSGVATNAIGFDLSPGASFARHMSMQGFDTWIVEVRGAGLSTRESELAATNTKSDITPDPNFDESSTTKASIAVPAENMSSSQPQISEVPVITDKNMVGTSISEEPQLVTKLSNALAQLGETFSGYVKDSRLKNIADSFFDRVSELAPAASVASLEEVSQRILGLLELPQTSVISDQISNLSQRLVKILGENQRSVSPKLFGWQERLSATIEDLQKQLELIISYDWDFDHYLEEDVPAAVYGLHKKTECTKGWEIACYWSFHGRNLIVCNGFKVWIQRG

SEQ ID NO: 48064 - protein, 162 aa, Zea Mays
MAMQNLQPQLKAIQQRYAGNQERIQLETARLYRQAGVNPLAGCFPTLATIPVWIGLYQALSNVANEGLLTEGFFWIPSLGGPTTIAARQSGAGISWLFPFVDGHPPLGWYDTICYLVLPVLLVASQYVSMEIMKPPQVHKQCPQHSTAGLVAENGRSQACSE

SEQ ID NO: 48065 - protein, 168 aa, Zea Mays
MEIMKPPQSDDPSQKNTLLVLKFLPFMIGYFSLSVPSGLSIYWFTNNVLSTAQQVWLRKMGGAKPVVSEGDRRIITAGRAKRSNAQPAGERFRQLKEEESMRKVNKALAAGDSNASSSTYDMEDEESDDETTEEGGPVEEASSTGSDKKPPSYSGKKGKRSKRKRMVQ

SEQ ID NO: 48066 - protein, 473 aa, Zea Mays
MSDPRGHAAGPDRDGDDPLAEDANSEEAWQTPEKEPVAVSKEAAARGGDTTPDAEPESDDGEGGVGSPDQMEPNADGERAPPVAAAEDPEGIVGSAKVETNGEDAISLDADGEEEDDDDDGDEEEEEEDDDDDDSTPDASPRAEVKVEGESSTGMTQSGAGHRVEVEPDPFLDGDDSGTEEEQGAFMAELERFHREHSLEFKPPKFYGKGLNCLKLWRQVAHLGGHEQVTVCKLWRQVGETFRPPKTCTTVSWSFRIFYEKALLEYEKHKVRTGQLQIPPPGLPQPSGADREVVVNQSSSARVRRDAAARAMQGWHAHRLLTNGTYGDNILKDKDTMPLPNRDKNLSFGVLKRKKASSPEYALKSSRSKTNKSQEDSMVVDVGEPADWVKINVRQTKDCFEVYALVPGLLREEVHVQSDPAGRLVITGDPEQPDNPWGITPFKKVVNLPSRIDPHQTSAVVTLHGFMSILLRK

SEQ ID NO: 48067 - protein, 461 aa, Zea Mays
MSDPRGHAAGPDRDGDDPLAEDANSEEAWQTPEKEPVAVSKEAAARGGDTTPDAEPESDDGEGGVGSPDQMEPNADGERAPPVAAAEDPEGIVGSAKVETNGEDAISLDADGEEEDDDDDGDEEEEEEDDDDDDSTPDASPRAEVKVEGESSTGMTQSGAGHRVEVEPDPFLDGDDSGTEEEQGAFMAELERFHREHSLEFKPPKFYGKGLNCLKLWRQVAHLGGHEQVTVCKLWRQVGETFRPPKTCTTVSWSFRIFYEKALLEYEKHKVRTGQLQIPPPGLPQPSGADREVVVNQSSSARVRRDAAARAMQGWHAHRLLTNGTYGDNILKDKDTMPLPNRDKNLSFGVLKRKKASSPEYALKSSRSKTNKSQEDSMVVDVGEPADWVKINVRQTVHVQSDPAGRLVITGDPEQPDNPWGITPFKKVVNLPSRIDPHQTSAVVTLHGQLFVRAPFGHPDM

SEQ ID NO: 48068 - protein, 97 aa, Zea Mays
MLQCHGYQVKKNLVTADTSSTDSITLQLRLRRQKMNLCLVIFSFYLLTFKNLLLPRRPRNLVTRMRLIFYVTLKSTRIEPSLCSTNHLECQYKVVLA

SEQ ID NO: 48069 - protein, 337 aa, Zea Mays
MLQCHGYQVKKNLVTADTSSTDSITLQLRLRRVSAKDELVPGDILFLPVNIQESSVTEKTKKFGNKNEIDFLRDLEIYKDRAIIVLNKPPGMPVQVHRLDRDCSGVLVLGRTQFSASLMHAIFREKTADALGDGTQQVLQRKYVALVIGRPRHPKGLLSAPLAKVVLQDGRSERLTVCAGSNTASVQDALTEYRVIESFPQGYTWLELFPRTGRKHQLRVHCAEVLGTPIVGDYKYGRQAHQNWMPLPMPQTIDKEMLKKRKLPFGLTLGGGSVAEQQPQLHLHCKQMILPDISAAMQQLRSSDADHDFSDLEKLSFVAPLPLHMQLSWKILLSVGK

SEQ ID NO: 48070 - protein, 117 aa, Zea Mays
MANLSSSILLLLSFTLWLPDLFSLSLVSHISSPSPSSRPDLDGVPPSPTLFFSRPRHPFLRCSHCKPRATHTAVVHVDQIVHSIAFSSARVCSLPARSSQRRSVQATLQIVTARQQP

SEQ ID NO: 48071 - protein, 126 aa, Zea Mays
MFVAARATLPRLPHHPSLLVLPAVAGDRDHGTHVVVLALLAMLLLQGVILMSTVEGLVWIMQEAPQVPHQEDQANWLEGSYQKCSGGLLISLESGNSLTFQLDKFLWRFEPLPIPFHGLHLLPERV

SEQ ID NO: 48072 - protein, 155 aa, Zea Mays
MFVAARATLPRLPHHPSLLVLPAVAGDRDHGTHVVVLALLAMLLLQGVILMSTVEGLVWIMQEAPQVPHQEDQANWLEGSYQKCSGGLLISLESGNSLTFQLDKRGYKSPEDYPGTWNLMSQASCALDHLCYPIMFFIIIYSCIGLILMGPNRSP

SEQ ID NO: 48073 - protein, 1153 aa, Zea Mays
MPLTPRQTKHLLNYLSLAPYFAILNMLDSLLCRNQYDSQVRHSEGKNLPVENQVLSNECLGALFSRPIYGEHSRTILSPEGGADMSPSQEPQKHSLRSSTDESTRATKEVILEHPKKLFSESHTNCIHATALNENFGVQTPSQVASKKIFPGLAHGADTPLTGYGSEQTLLQHSSKKFSLVSANGKYTRAAVTPFEQNSNNTRAEELSKMRSGSSDMLYLKPTNLSAELETNGTPLKNHSKNSSLLMDGKYNITSAALFPELDSSPLKPETPAMQAAIPRLKRVQEDQGVDANNQCPPLWAMNKKMKSAHCSIEKKDHDEMAGSARSKFEWLNSFAIRDANKRRPNDPLYDKSTLFIPPDALRKMSTSQKQYWNIKCKYMDVVLFFKVGKFYELYELDAEIGQKELDWKMTVSGVGKCRQVGISESGIDDAVDKLIARGYKVGRIEQMESANQAKARGVHSVTLASSGFQVFGFAFLDYAALKIWVGSVQDDDSSAALGALLMQVSPRELIYETSGISKETQRTIRKYASAGSVKMQLTPLSGIDFSDAAQIRNLIHSKGFFNASTESWLSALDCTMNQDVVICALGGLIGHLTRLMLHDALKNGEVLPYHVYKTCLRMDGQTLVNLEIFSNNFNGGSSGTLYKHLNHCVTASGKRMLRRWICHPLKDIDAINKRLDVVEGFIQNCGLGPTTLGYLQKIPDLERLLGQVRSTVGLSSLLQLPFIGEKIIKKRIKTFIMLINGLRNGIDLLNDLQRADHGILALYKIVDIPSLSYLPELIHKFEERMQNEFPCGQVSDVNANGANDLAALMDVFIGKASEWSLVINAVSTIDVLRSFAAMTLSSFGAMCRPQVLLKDDVPVLRMKGLWHPYAFAGNANSLVPNDLTLGQDLSGLNRFALLLTGPNMGGKSTIMRATCLAVVLAQLGCYVPCTSCELTLADSIFTRLGATDRIMTGESTFLVECTETASVLQKATVDSLVLLDELGRGTSTFDGYAIAYAVFRHLVERVRCRQLFATHYHSLTKEFASHPHVSLQHMACMFKPRSDGNGQKELTFLYRLTSGACPESYGLQVAAMAGIPKSIVEKASVAGQVMRAKIAGNFKSSEQRAEFSTLHEEWLRAALAVSAMDGQPDDDDVMDTLFCIQQELKSHFRKAR

SEQ ID NO: 48074 - protein, 653 aa, Zea Mays
MPLTPRQTKHLLNYLSLAPYFAILNMLDSLLCRNQYDSQVRHSEGKNLPVENQVLSNECLGALFSRPIYGEHSRTILSPEGGADMSPSQEPQKHSLRSSTDESTRATKEVILEHPKKLFSESHTNCIHATALNENFGVQTPSQVASKKIFPGLAHGADTPLTGYGSEQTLLQHSSKKFSLVSANGKYTRAAVTPFEQNSNNTRAEELSKMRSGSSDMLYLKPTNLSAELETNGTPLKNHSKNSSLLMDGKYNITSAALFPELDSSPLKPETPAMQAAIPRLKRVQEDQGVDANNQCPPLWAMNKKMKSAHCSIEKKDHDEMAGSARSKFEWLNSFAIRDANKRRPNDPLYDKSTLFIPPDALRKMSTSQKQYWNIKCKYMDVVLFFKVGKFYELYELDAEIGQKELDWKMTVSGVGKCRQVGISESGIDDAVDKLIARGYKVGRIEQMESANQAKARGVHSVIERKLVHVSTPSTAVDNIGTDAVHLLALKEVTLASSGFQVFGFAFLDYAALKIWVGSVQDDDSSAALGALLMQVSPRELIYETSGISKETQRTIRKYASAGSVKMQLTPLSGIDFSDAAQIRNLIHSKGFFNASTESWLSALDCTMNQDVVICALGGLIGHLTRLMDGWPDSCEPRDFQQQFQWWFIWYFI

SEQ ID NO: 48075 - protein, 264 aa, Zea Mays
MCCSLIRKSSSQNAGDLTSLLRWPTAPTGMEMPVVEVRKHGLWLLAKNVKQYIHRILVEADFSAGTGDDLWAAVGEAGKNLYAKGEFKESQVADLDVYLLKKVGLFPDVIERKTLRHLEKGDNVSALITGEFYTRDQFPGFGRPFVFNAEIFKRVGRTSEAKDSARVALKSPWWTLGCSYEEAAELAGWEDEQLEFIREKVTEEGKREDLKRGKAPEQVILDEAAFLMDLASVDGNWDEVVDRIAECYREAGLHDIANFIAYRE

SEQ ID NO: 48076 - protein, 333 aa, Zea Mays
MKPPVSRAAFASVLIGPRTLGASLVAARCASSSAAAAVTAYDHASFVKEIAATDPPEHLNSLLNVLQARGEKIVSPGAKRGLIPCVVPLSESPAGDLTSLLRWPTAPTGYTKYTAIFISMYIHRILVEADFSAGTGDDLWAAVGEAGKNLYAKGEFKESQVADLDVYLLKKVGLFPDVIERKTLRHLEKGDNVSALITGEFYTRDQFPGFGRPFVFNAEIFKRVGRTSEAKDSARVALKSPWWTLGCSYEEAAELAGWEDEQLEFIREKVTEEGKREDLKRGKAPEQVILDEAAFLMDLASVDGNWDEVVDRIAECYREAGLHDIANFIAYRE

SEQ ID NO: 48077 - protein, 235 aa, Zea Mays
MPCLLFLLAPPPRPCLADSVSRSPLPNKYRFFLPQTRRRPSPRLGDGVRMAEMTRVWSGGEPLEVGVSMESDPIVGGEAPSRSRWEASRWAPVEAALNRMSKWLVAGCFAFAAIWKRDAEIMWVLLGAVGNSLLSLVLKKMLNHERPAPALRSDPGMPSSHAQSIFYAATVLALSFLATCVSGPSYTKPGHGGSCCRICRRCSLVCALALACAGGLCFFCACQSCCHPWIISILC

SEQ ID NO: 48078 - protein, 640 aa, Zea Mays
MIQNLTSPRINKCSPSQSPPPVSVPHPPPPPSRRIQWSPRSSSLPRARSSPSIRITSPPLVVATRPSAGSPLRRRPCHRSDAAAAGWVGRCRAPRARRSATDSAARTGLPGLAAGVFAGGPTARRRARAVAPYVAPVGAVLMLSFVIWKVVQNMIPGKKKDHGSGKHAPSGIMWSFAAGSNLATSTLSAEKESRKNLNKFYKELRTLKTVNMAGRQFGDEGLFFLAESLAYDKSAEEVDFSGNGITAVGIEAFDGVLQINTTLKTLNLSGNDIGDEGAKCLSDILVENVGIQKLLLNSINIGDEGAKALSNMLKKNKSIRILQFSNNAIEYSGFASIAEALLENNTIRSLYLNGNYGGPLGACSLAQGILGNKSLREIHLHGNGIGNEGIRELMSALSAHKGKITVVDIGNNNISPEGLHPVAEFLKRTKSLQWFSLYMNDISDEGAEKVAEALKDNKTISTIDLGGNNIHSKAVSAVAETLKDNAVLTTLDLSYNPIGSDGVKALCDVLKFHGKIQTLKLGWCQIGMEGAECIADCLKYNTTLSTLDLRANGLGNDGAICLARSFKIINESLTSLDLGFNEIRDDGAFALAQALKANEDLAVTSLNLANNFFTKFGQVALSEARDHVYEMTEREIDIYF

SEQ ID NO: 48079 - protein, 603 aa, Zea Mays
MEHSSAEDSDISDSDIAEHKEEICAQLRAGKLNVKRGEAFRCPFCPGKKRQDYNLKDLLQHATGIGAASKRSAKVKASHLGLAMFLEKDIASTLEQPLQIVPYKPKTPKDEEIFVWPWMGIVVNLQCEFKGKECSRESEERLTAQFSRFRPLQATTLRDGKNQQFCAIVKFAKDWSGFKDAMAFENHFVLEQYSKPDWKKRNCRKDDLYGWLAKTDDYNSPEPIGEYLRKNGNLRSVGDLEREGLKETGERVAHYARQIDATNKHMSELELKNNQNAMKLDRMLEENDRLVEEHNENCIKNWKPRKKEIGRRHEELEKLVMNSTNREKLEAAKEEIAKENRLLDLATLKKKEEDEKFLKLVKEQEQEKENVRKMLYDLEMQLASKQKLELEREQLRGNLEVWKHMGKEDAKSKEMLDKLHEALKEKDEEMDHIDSINQTLIIKQRRTNDELEEAKKELTTDLLNMSSARSIVGVKKMGELDKKAFIVSCKEKTADELSLSILCSKWEDEIRQPEWHPFKVIDVGGQAKEIIREDDEKLQALKAELGVQAHDVVVKALLEMNEYNPSGRYPIPELWNFKEDRRAPMGEAVAYIVKQWKANKRKH

SEQ ID NO: 48080 - protein, 253 aa, Zea Mays
MPQIQNTMRQNCTLLAVLCGEFAEKRQTPASLAPDTKRLRLSYPFPELASSGRLEVHTLINPTLEQFREAQQAVHPVFLYLQGQQQENEEEIGTLVWGDTDLSDPQMFVSLITPPFPTMVYLEVPTGEKLAQSLHSKFSVPGYSSCSHTWDAFQLAHASFRLYCVRNNHVQSVKLGPCLLGDAPKTNVIPAGDEVNEEQGCSEGFPDIRIYDEDVSMKFLLCGVPCTLDACLLGALEDGLNALLNIEELRQGS

SEQ ID NO: 48081 - protein, 749 aa, Zea Mays
MPQIQNTMRQNCTLLAVLCGEFAEKRQTPASLAPDTKRLRLSYPFPELASSGRLEVHTLINPTLEQFREAQQAVHPVFLYLQGQQQENEEEIGTLVWGDTDLSDPQMFVSLITPPFPTMVYLEVPTGEKLAQSLHSKGIPYVVYWRNLFSSYTASHFRHALMSVIQSSCSHTWDAFQLAHASFRLYCVRNNHVQSVKLGPCLLGDAPKTNVIPAGDEVNEEQGCSEGFPDIRIYDEDVSMKFLLCGVPCTLDACLLGALEDGLNALLNIEIRASKLQNRASAHPPLQAEDLPHGVVTMRCDITTCSSAHVSFLVSCSAQTCFDDQLLGSRIKNEIIEKRQLVRALLNNEDNKPSSYEPLPSMCVACGASTFEVWITMPKWAAQVLKHLAPEISYRSLVALGIAWVNGTPVSSFDRQDADRLLFFCSNQCGDQAIQNGSYAHVSSWSAPLTKDRTTGSLESKQMSFGAKGVVGDNTISLSSLKPRLKPATMRPLPHSRKQQMHPFMGFPQSIIHDASQVKPSLPAPPVKHNAVPVTAVTPRKSSSGSPSSWSRVQLPIPLNPLPIKKHECNRLPIHSCSEEDFLKDVMQFLLQRGHIRLVPQGGLAEFPDAVLNSKRLDLYNLYKEVVYRGGFYVGNGINWKGQIFSKMHNHTVTNKMTGVGNTLKRHYETYLLEYELAHDDIDGECCLICHSGALGDWVNCGLCGEWAHLGCDRRKGLSTFKDYSKADGMEYICPQCSLAKYKPPLPAP

SEQ ID NO: 48082 - protein, 585 aa, Zea Mays
MVFQKRSSSELEASGGGQVAEMPRVPKSARGKRSVRKKEAQNPPQMSAFDLLATVAGKLLDEGVGSLGNMSAGAPALTACAKDVRVKKEQCDEEMKQFKHEVTDQDSCNESAILPHIVFQRAVNNARNEDPKAKSEAQDKESSMISCTKAELGCNFGVIADRWSPESVESGAFTGDAVASLMPPAPAGFHKNAPEMYNLLDSMDVDVKPPPLVSSDSTGEMPLYGDKVHRSTSLPRVSKGVGFFAVDRDDDDDKSSGCTHPSTTTNKDFRSNCTAEYSRRTQRSTFKRRKLFDRHSVLASEFGTAHGKGNTKKVTGRDSHAVSLEANKGTSSTPFQKSRGSNDCHVKLKIKSFKVPELLVEIPESATVGSLKKTVLEAVTAILGGGLRVGVLHHGKKVRDDNKTLIQAGIGQEDMLDNLGFSLEPNCTQNPQVQAPEDISFLETIDTAEPLARIAPADSSSKHGEVDLSQEFALTPLAMNYQGSDHDSVHSPGGVSSPDKVSTNSRALVPVPAADPNAGAIVPANKSKRSPEQGQRRIRRPFSVAEVEALVLAVEKLGTGRWRDVKLRAFDNAKHRTYVDLKAMD

SEQ ID NO: 48083 - protein, 310 aa, Zea Mays
MCGGAILANLREPAPRRLTERDIWQQKKKLKRGGGGGRRSFAAEDDEDFEADFEVFEADSSDSDLELREGTDDDVVEIKPFTAKRTFSSDGLSTMTSAVARSAKRKRKNLYRGIRQRPWGKWAAEIRDPQKGVRVWLGTFNSPEEAARAYDAEARRIRGKKAKVNFPDAPAVGQKHRSGSASAKASKSSFGQKPIVKGSNSFGCSDLGWENDTKTPDITSIAPISTIAEGDESAFVDSNSNSSFVLPALENSAVDLTDGLTDLESYMRFLLDGGPSDSVDSLLNLDGSQDVGSDMDLWSFDDMPIVGDFF

SEQ ID NO: 48084 - protein, 975 aa, Zea Mays
MQLFDCLLTEVHERCKKGLSLAKRLNSTLAFFCYDLLSIIEPRQVFELVSLYMDKFAGVCQSVLHDCKLTFLQIICDHDLFVEMPGRDPSDRNYLSSVLIQEIFLTLDHDDLSQRAKAARILVVLICKHEFDARYQKSEDKLYIAQLYFPLIGQILDEMPVFYNLNAIEKREVLVVILQIVRNLDDATLIKAWQQSIARTRLFFKLLEECIIHFEHNKTGDNMLLGASSRSPDVEHPASPKYSERLSPSVNTYLSEASRHEIRGTPENGYMWNRVSPQLSSPNQPYSLREALAQAQSSRIGSTARALRESLHPVLRQKMELWEENLSTAVSLEVLGITEKFSVAAGARSITTDYAKLDCVTSILMGLLSRNQSLAFWKAFLPVVYNIFNVHGATLMARENDRFLKQIAFHLLRLAVFRNDSIRKRAVVGLQILVRNSFNYFKNTTRLRVMLTITLSELMSDVQVTQMKFDGSLEESGEARRLRKSLEEMADVRSKDLLKDCGLPVTALEAAPEGSSDNRWSWVEVKHLSKCLVQALDAGLEHALLEMQSWAEAAQCAVAVAGVIMQALVGRNDAVWSKEHVASLRKICPIVNTDVSAEASAAEVEGYGASKLTVDSAVKYLQLANKLFTQAELYHFCASIQELIIPVYKSRRAYGQLAKCHTSLTNIYESILEQEASPIPFIDATYYRVGFYGERFGKLNKKEYVFREPRDVRLGDIMEKLSHIYEAKIDGSHTLHIIPDSRQVNADELQPGFCYLQITAVDPVMEDEDLGSRRERIFSLSTGTVRARVFDRFLFDTPFTKNGKTQGGLEDQWKRRTVLQTEGSFPALVNRLPVIKSESLEFSPVENAIGMIETRTAALRNELEEPRSSEGDQLPRLQSLQRILQGSVAVQVNSGVLSVCTAFLSGEPATRLRSQELQQLIAALLEFMAVCKRAIRVHFRLIGEEDQEFHTQLVNGFQSLTAELSHYIPAILSEL

SEQ ID NO: 48085 - protein, 501 aa, Zea Mays
MAPPSMCLAAKGVLPFSALISSGVTQRPVSVTASLEHKTSDARRKFLKLALGNIGVGLPTLLGVKKALADEQGISSSRMSYSRFLEYLDKGRVKKVDLFENGTIAIVEAISPELGNRVQRVRVQLPGLSQELLQKLREKNIDFAAHSNQEDSGSLLFNLIGNLAFPLILIGGLFLLSRRAQGGLGGPNGPGFPLGFGQSRAKFQMEPNTGVTFDDVAGVDEAKQDFMEVVEFLKKPERFTAVGARIPKGVLLVGPPGTGKTLLAKAIAGEAGVPFFSISGSEFVEMFVGVGASRVRDLFKKAKENAPCIVFVDEIDAVGRQRGTGIGGGNDEREQTLNQLLTEMDGFEGNTGIIVIAATNRADILDSALLRPGRFDRQVSVDVPDVRGRTEILKVHGGNKKFDSDVSLDVIAMRTPGFSGADLANLLNEAAILAGRRGRTAISSKEIDDSIDRIVAGMEGTVMTDGKSKSLVAYHEVGHAICGTLTPGHDPVQKNCWRPWW

SEQ ID NO: 48086 - protein, 477 aa, Zea Mays
MSRLSFRPRPLDIHKKLPILKSVREFEDEEPGIAPLSSARAGVLLRHSGADFTASGANNATEGEGNQALSKKNAQEIPTPQFDGVDTYERDYTRTFAQPTSYIRGRGARAEIGEFVEYDLDNEDEDWLEEFNSERKNINPEKLEALLFKLEVLDHRARERAGAITPTFIGPVPVLLQLDAAMEALQYLSVRNAVFQAVYNYWKSKRERWQKPILRRLQPPPPVNDTNPYNVFRPREKAHRLHTRRMQRRENNIQSFEKLRLVRRNLEQAKALMDALIKREETKREAMECQVNLQRVQMKYKHEAQLVEDGTTLSGFQQTSSRFESSDDDVDSDDTATEQTYIRPAVFHPRFSANKLSVIPPLRIKRERELKRRPQQNGCVFKRDPEEPVFLFTRPLDPEKLVAAGIKPPPDPPIENGATSPPFRCRGRIGRGGRIIFDRWNPLLRTPIDQETYYVPYGHRPPSPEGAKLALGESIVS

SEQ ID NO: 48087 - protein, 389 aa, Zea Mays
MGSTLSSLPSSPPKASSTSLTSMSSGGSGSMFGLPSLRWKVAPSKLEALLFKLEVLDHRARERAGAITPTFIGPVPVLLQLDAAMEALQYLSVRNAVFQAVYNYWKSKRERWQKPILRRLQPPPPVNDTNPYNVFRPREKAHRLHTRRMQRRENNIQSFEKLRLVRRNLEQAKALMDALIKREETKREAMECQVNLQRVQMKYKHEAQLVEDGTTLSGFQQTSSRFESSDDDVDSDDTATEQTYIRPAVFHPRFSANKLSVIPPLRIKRERELKRRPQQNGCVFKRVSSHHQILLLRMVPHHHHFGVEVGLDEAAASSLIDGILFSGHQLTRRLIMCHTVTGPPHLKVEAVFHMHIVLNGTGTAMEFVKPLSNCFSIGAKLALGESIVS

SEQ ID NO: 48088 - protein, 165 aa, Zea Mays
MIALQLMRTQFPKLDKVLAQPFILQSQLYSSVKDRTQVDRDLESFKKDKVLRIFKLSSGQDDHAIMFMDDYLKQVSFAIKRSGGKDQDGSEVFEWFERYVVPSKLDVSITQLELCSLLSQGGDVTDKHITLLMNAGLLTRQLIDPNIYWFSIPRIGPILKGLSQE

SEQ ID NO: 48089 - protein, 212 aa, Zea Mays
MAIISDFKEDEAPQQPAAVGPGVEETLVAALERTGGALPFLQAAIDVAHRRSGLFRDPSAVSKVTAMAAAVRAQVETEERAAREVKRKAEEAERKAAAEAQKADMEAATATAEEKLEKDRMDADKAEEGNVRQPNAGNGLDLEKYSWTQQLPEVNITIPVPQGTKSRFVVVDIKKNHLKVVLKGQPPIIDRMEKLFPYCLQSTTKWSGGSLL

SEQ ID NO: 48090 - protein, 179 aa, Zea Mays
MGVNGHHEPRRGCNGTVCNGSVRSLDHFGDVDPWTAWAYKPRTISLLLMGTCFLIWASGALDPERSSSADRVSSVKRGVFAMIAVFLAYSFLQAPSTVLIRPHPAIWRLVHGMAVVYLVALTFLLFQTRDDARQFMKYLHPDLGVELPERSYGTDCRIYVPDHPKSRFNNVYFFLGDNF

SEQ ID NO: 48091 - protein, 231 aa, Zea Mays
MIRNQPLLWVLSIGFELMELTFRHMLPNFNECWWDSIVLDILICNWFGIWTGMRTVRYFDGRTYEWVGLSRQPNIISKVKRMLGQFTPAQWDKDEWHPTRGPWRFIQVLSLCVVFMAVELNTFFLKFCLWIPPRNPLIVYRLVLWWLIAIPTIREYNTYLQDSKPFKKVGSFCWLSLAICIVELLICIKFGHGLFPKSMPSWLITFWSAVALLLVLFVWTWKYRTMKRKMI

SEQ ID NO: 48092 - protein, 179 aa, Zea Mays
MYGLVVALRREVVGWFHFHPGCSVDATVIHERIRKCSCGLHLGPDCDPLSGLGLRAGSFAVVYTWKNGAPSLASIAAAPSVHARTAHLYICTAPCPARPPSPSDTREPNLLRSQPPLPLARVTLYHQARSVDPLLGVREAWQQLASRRPWRRWWRRRIDWQAVDRGIAYLLMVATYALH

SEQ ID NO: 48093 - protein, 107 aa, Zea Mays
MARGARFLLVLALLAALLAVVLQLYRHRKPRLWMVEELSVYNGTNEELPILLAILGSVFDVTKGRSHYGPGGGYHHFAGRDASRAFVSGNFTGDGLTDSLQGLSSSE

SEQ ID NO: 48094 - protein, 336 aa, Zea Mays
MASVEGKRETVLVTGASGFIGSTLVGLLLDRGYNVHASVLNPDDKAETEHLVALGAGAGEGRLRVFPGDLLDGAALMAAARGCSGVFHLATPCTVYPVSDPQGQMVVPAVEGTLNVLRAAKEARTVRRVVVTSSSSAIIPSPAWPAGEPRDERCWADVDYCKKNEVWYPVSKTLAEKAAWRFAEENGVDVVVVNPVTAMGPMIPPTINCSMIVLLRLLQGCTEEYRDIWMGAVHVHDAAMAHILVFESPAASGRHICAQSISHWSDFAAKVAELYPEYKVPNCVRCRFPKDTQPGLVRQGAEEGSKKLVALGLHFSPLEKIIRDAVEALKSRGYIS

SEQ ID NO: 48095 - protein, 267 aa, Zea Mays
MYHRVCVLLFLIIHSEDKIFKYQQICHRDLKLENVLLDGSPAPRLKICDFGYSKSSVLHSRPKSAVGTPAYIAPEVLSRREYDGKLADVWSCGVTLYVMLVGAYPFEDPDDPKNIRNTIQQIMQVQYKIPDHVHISTECQQLIARIFVANPMRRITMKEIKSHPWFLKNLPRELTETAQGMYYRRDNRVPSYSDQTSEEIMKIVQDARTMPKSSRSGYGWSSEYSDEEEEKEEEHRPEEHEEEEDEYDRRVKEVHASGELRMDALHI

SEQ ID NO: 48096 - protein, 184 aa, Zea Mays
MQLADVWSCGVTLYVMLVGAYPFEDPDDPKNIRNTIQQIMQVQYKIPDHVHISTECQQLIARIFVANPMRRITMKEIKSHPWFLKNLPRELTETAQGMYYRRDNRVPSYSDQTSEEIMKIVQDARTMPKSSRSGYGWSSEYSDEEEEKEEEHRPEEHEEEEDEYDRRVKEVHASGELRMDALHI

SEQ ID NO: 48097 - protein, 441 aa, Zea Mays
MGKTRGMGAGRKLKTHRRNQRWADKAYKKSHLGNEWKKPFAGSSHAKGIVLEKIGIEAKQPNSAIRKCARVQLVKNGKKIAAFVPNDGCLNYIEENDEVLIAGFGRKGHAVGDIPGVRFKVVKRTTFFYPVANPGELAKQCKSGNRDLIAERQNRRLGPVPYRIPIIARSAAYPAAPARSTPPAPTSARRMDMAPASVYFNPRSVEEIFKDFSGRRAGLVRALTSDVDDFCRLCDPDKENLCLYGLPNGSWEVSPPAEEVPPELPEPALGINFARDGMQRRDWLTLVAVHSDSWLISVAFFYGARLNGNDRKRLFSMMSDLPSVLEAFADRKHGRDRSGVDSSGKSRHSSKRGKDGHAKSFRAAAPAAKEYDEDDDEEDEEEHTETFCGSCGGLYNASEFWIGCDICERWFHGKCVRITPAKADHIKHYKCPDCSSKKMRQ

SEQ ID NO: 48098 - protein, 107 aa, Zea Mays
MSTPARKRLMRDFKRLMQDPPAGISGAPQDNNIMLWNAVIFGPDDTPWDGDILQNQWSPIYDVAAILTSIQCIACYDVSFFFREINGGRRDECPYLKVFPQMLAKSQ

SEQ ID NO: 48099 - protein, 183 aa, Zea Mays
MRASSSGARACCADSAAAAATTSNCSSGLTTEDAAADHALPPPPFAQFFTYPQYVWCHSAARDPAEEEDGRRSGVADVEVTLVETHASVRVMTARRPGQLLSLVTGLQALRLAVLHLSVVTALDALVLYTTSVKVHNCTKKVEEGCGLATADDIAAAVHHVLCIIDAEATEQQLLAAAGPQPQ

SEQ ID NO: 48100 - protein, 168 aa, Zea Mays
MGMALPLPPASQGLLRSRRMSFLASPPLSLKAAGGISIPCPWRLDGRRPRAAPASVPRLASVRSVVLDIEGTTSPISFVTDVLFPYARDNVRTHLDATYSTRETKDDIALLRAQVEQDLAEGVPGAVPVPPDGAGKDRVVDALVANVEAMIAADRKITSLKQLQALRC

SEQ ID NO: 48101 - protein, 288 aa, Zea Mays
MSFLASPPLSLKAAGGISIPCPWRLDGRRPRAAPASVPRLASVRSVVLDIEGTTSPISFVTDVLFPYARDNVRTHLDATYSTRETKDDIALLRAQVEQDLAEGVPGAVPVPPDGAGKDRVVDALVANVEAMIAADRKITSLKQLQGHIWRTGFECQEIKGVVFDDVPPALERWHASGIKTYIYSSGSREAQRLIFGNTTYGDLRRHLCGFFDATIGTKRDARSYYEIWQTVGVDRPSQILFLTDVCQEATAAQAAGLEVLISIRPGNAPLPAENHGFGTVESFAEILT

SEQ ID NO: 48102 - protein, 247 aa, Zea Mays
MGMALPLPPASQGLLRSRRMSFLASPPLSLKAAGGISIPCPWRLDGRRPRAAPASVPRLASVRSVVLDIEGTTSPISFVTDVLFPYARDNVRTHLDATYSTRETKDDIALLRAQVEQDLAEGVPGAVPVPPDGAGKDRVVDALVANVEAMIAADRKITSLKQLQGHIWRTGFECQEIKGVVFDDVPPALERWHASGIKTYIYSSGSREAQRLIFGNTTYGDLRRHLCGFFDATIGYAVHLVSHLSAH

SEQ ID NO: 48103 - protein, 249 aa, Zea Mays
MGMALPLPPASQGLLRSRRMSFLASPPLSLKAAGGISIPCPWRLDGRRPRAAPASVPRLASVRSVVLDIEGTTSPISFVTDVLFPYARDNVRTHLDATYSTRETKDDIALLRAQVEQDLAEGVPGAVPVPPDGAGKDRVVDALVANVEAMIAADRKITSLKQLQGHIWRTGFECQEIKGVVFDDVPPALERWHASGIKSQTYIYSSGSREAQRLIFGNTTYGDLRRHLCGFFDATIGYAVHLVSHLSAH

SEQ ID NO: 48104 - protein, 518 aa, Zea Mays
MAIYTPLITCVVVLYIWCAATNPGDPGIFDSTKNLKLDKNEKHSYVNSDQGINHGGRPLSETFGTADNSEKLSSMLERNDSPSWPRFSGIISLVLKNSKHCRVCDKCVDGFDHHCRWLNNCIGKRNYKGFFVLMASAVILLVMQWLSGGLVLILCIVKRGEFSRQVVTKLGSSFSTVAFVIVVATCTILAMVATVPLAQLLCFHVLLVKKGISTYDYIIALREHEEQQEVPGHQSPQMSIVSSVTGFSTASSFGPLHRGSWCTPPRLFLEDQFDAIPPEIGISRNSGSKKTKEEEGARRKAGAVKISPWTLARLNAEEVSKAAAEARKKSKILKPVGKHGAPENSSKPDHLPSYKRRLDRRGFPAELSLDPLATLSASGTESNYSDAATEICGSLAPLQLEARSAFQPSTAASTRNVASSPESSFDSPNLHPFRTSSATADEMQGAMMHTAHRGIEFKRSSSDGYEASGGEDSDRIPSRIVHRSSNWASVFLHSGQGDPPADLLTTSAEGFVANDSGS

SEQ ID NO: 48105 - protein, 795 aa, Zea Mays
MAGAQEILGNPLQFASDQLLSQPSENALKAMLFLEFLSLLSPEKLSSTYGCIHANYFGLGIPQELSVSLATYLESHQLLLGSNFYARRHLADNSIGDAPSMAPDFAPSMSSGDDVKLPQSVTETPYAPSSSYNNENPNRPHHSKPAQKHRGVPPISLLEKHKDYVRLVLIVVLPTAAFSFIAAFLIFYCCGCNKNKVSVGEQRDDHPLLHMQLANVPGSSPDARVSASHLNKDNRSHSGVSMSRCFSCCFKRSTDATPSSEVIGGTPENNVTSDAPKPMSPPAPPPLPPPIKKAPPPPPGPPRGSKARLAQLSPVESSRSEGSSASEQTSESSEAEVNAPRTKLRPFYWDKVLANPDQSMAWHDIKFGSFHVNEDMIEELFGYSGGSRNNLKDKELPSADPASQHISLLNVKKSCNLAVVLKAMNIRVQDIHDALIEGNELPRVLLETILRMKPTDEEEQNLRLYNGDFSQLGLAEQVMKALIDTPFAFKRVDMLLFMSSLQEDASSLRDSFHQLEAACGELKHRLFLKLLEAVLKTGNRLNDGTFRGGANAFKLDTLLKLSDVKGADGKTTLLHFVVQEIVRSEGVREARLAMENGRSPAHSASDDTSNGSLEEDGDHYSNRGLSIVSGLSSEMDNVKRVAALDAEPLFATVVTLRQELLKSREFLNEIATVEETSGFRRSLESFVEHADNETGFLLKEEKRLRSLVKKTIRYFHGNDSKDDGFRLFVVVRDFLVMLDKACKEVGASQKGTNKSRSSGSGSGNGNGNPTFPSILQEQQFPAVIDGHSDSSHTSN

SEQ ID NO: 48106 - protein, 669 aa, Zea Mays
MQKGQPDILEINRLRRQLLFHSYLWDKRLVFGARSDRCRHEKTHSIDSVAEQNVILKPQSECSGNRSANKDAKYVECLQESIYGGNHTGVDVGTVNSNHVHQMATGELDSLQRDIKAPLYSSVSVNGESIPLEPDLVARRTLSEGQFPSVLDVTNALEAKWTGKDDPVSSKVTMPESTASSEDSEEHMGDNTPSYASILLSKLGDSAADHSNWIEMPFLLFYRSLNKQWNRSNRFDALNEYSPEYVPFLREVERHIGPKFFFPIGISDTVVGVYDDEPTSIISYALASHEYHLQMSDELEREMTDTSLPLCDSRSVSLTELDECTSELLRSVVSTEDIILSMSGRKNPLASDSLVPRKVSHIKVNFGDEGPLGQVKYTVICYYAKQFDALRRLCCPSERDFVRSLSRCKKWGAQGGKSNVFFAKTMDDRFIIKQVTKTELESFMKFAPDYFKYVSESICTGSPTCIAKILGIYQVKSLKGGKEMRMDVLLMENLLFERDVTTLYDLKGSARSRYNPDSNGSDKVLLDQNLIEAMPTSPIFVGNKAKRLLERAVWNDTSFLASIDVMDYSLLVGVDEKRHELVMGIIDFIRQYTWDKHLETWVKASGILGGPKNVSPTVISPKQYKKRFRKAMSAYFLVVPDQWSPPVVIPSKQAESGQDRDEQVVLTEL

SEQ ID NO: 48107 - protein, 689 aa, Zea Mays
MEDFARAVEDGLKLSKRLVLPGGVPPPRPPAGMERTVSAASASGPDPRLLPTAPMAYALVTDPAAVDTPDVPSYQPYVYGDLDPPALIPLQMKEVDLAVDCALDAAHVTLRARWWLHCITRSRDSDVRLVVPLGEQGSILGAEVTVGRRSYNTQVIEVEDHTLEKHAKIESGGLLQPHLFFLTIPQVEGGADICATFQWSQKLLYDSGRFSVDIPFRFPYFVNPLPKVFMKKEKIQLTVHSGFSKEILLQGTSHPLKEKSRQGDKLFFHHEAIVENWSIKDFNFSYNVYSGDLSGGVLVQPATLCDYDDRDMFCIFLLPGSGNRKVFGKAVVFIVDTSGSMQGKPLENVKHAVSTALSELVEGDYFNIITFNDELHSFSSCLEQVNDKAIASATEWMNANFVAEGGTDIMHPLSEAMALLSSVHDTLPQIYLITDGSVDDEHNICRTTKTDLSNRGSRSPRISTFGLGSYCNHYFLRMLASIGKGHYDAALGTASIENQILKWFRRASSTIVANISIDALTHLDEFEVDSEYIPDLSANSPLCVSGKYKGKFPDTIKAKGYLADMKEISVELKVQQLKEIPLDKVLVIQQIDFMTSKAWMSADKQVERKVIKLSTQNGVPSEYTDMIFLQTNLDKVEGTQKVGLTCYSSRIFTIFWCRGFHEITSDHLCSFSKYKSVKKGGLFIYGGNN

SEQ ID NO: 48108 - protein, 231 aa, Zea Mays
MLGHHGFPYRDVTVRVESAWSSINLYDLLIVMFDVNRHLNLPDSRVIKLIKRLGTEVNPNQRRILCMNKVDLVEDKKDLLKVAKEFEDLPGYERYFMVSGLKGKGVKDLVQYLMEQAVRRPWDEEPTVMTEEVMKTITLEVVREKMLHHIHQEIPYVIEHRLMGWKELKDGSLRVEQHFIAPKQSQRQILVGKNGSKIGRIGIEANEELRSIFKRDVHLILQVRVAKKRSA

SEQ ID NO: 48109 - protein, 146 aa, Zea Mays
MLIANVGDSRAVVCEMGSANQLTVDHEPDTTEERQRIEKHGGFVTTFPGDVPRVNGQLAVARAFGDQSLKAHLSSKPDTRHVPIDSSIEFVILASDGLWKVMKNQEAVDLVKSIKDPKAAAKRLTTEALARKSKDDISCIVIRFRC

SEQ ID NO: 48110 - protein, 176 aa, Zea Mays
MNYAAAATNAPAAAPAAAPASGTEHAHYPYYAGYSYPYGAYHQPAPPTYSSAVAAASSSYYYPVPAAASSTAAQYDPYSGYQHYSHPEGGGSAGAGLVGCYSTVGEALQQAAVASTTQAALEATTKEAGKQFGFDPQSYAQQLPEPPMELHNQLQPQACTMPSGMLILGILCRNMS

SEQ ID NO: 48111 - protein, 110 aa, Zea Mays
MARNPGRTVFIGNLDEKVSERVLYEILIQAGHVVGLHVPSNKESNSRKGYAFAEYETEDIAQYAVRLFSGLVRINGKTLKFVVGFHFYLGTLVVYNILPTSITCVYTTCL

SEQ ID NO: 48112 - protein, 116 aa, Zea Mays
MASLLCPASSCPSASLRRTAASPAAPSFASSRHYGAPLTFRVASQPPQALAAAPYGYGSDLLRPIDTQTIIIAAAVVSAVSLSLVLGLKGDPVPCDRGHEVCVLQRWQNEGGKWSR

SEQ ID NO: 48113 - protein, 101 aa, Zea Mays
MTHGLAVGFGSLRCGPSVSSSSATIHRTLVAPPRRSLRICSSTFPPPPAPAIEGRDVSLSVTTRRGRVLPVLKGCSLLVPPGQLWMLLGPNGCGKSTLLKA

SEQ ID NO: 48114 - protein, 1788 aa, Zea Mays
MLLPEIKVAVAAVFSVRSLPSVNMKDEKNHTDILRWLQSWFGFQKGNVANQREHLILLLANMHARLNPKSSSAQMLDDRAVDELLAKTFENYLTWCKFLGRRSNIWLPSVKQEIQQHKLLYIALYLLIWGEASNLRLMPECLCYIFHHMSYELYGVLSGAVSLITGEKVRPAYGGDDESFLNNVVKPIYNVIFQESQKNKNGASDHSTWRNYDDLNEFFWSADCFKLGWPMRLNNDFFFTSSATKDSQVLCGSRLSKVPHGLENCASCVPLVSLHTSQQNEQLNSQLPPESSSTENYLNSEAAEQRQQQAMSSSSQQRWLGKTNFVEVRSFWHLFRSFDRMWTLLVLGLQVLIIMAWHGLESPTQLLDPIIFEDILSIFITNAVLRVIQVILDIAFSWRTKGTMRVDQILRFTIKLSLVVAWAIILPVFYANSQNYKACSTKRSKTFLGMFCLSKYMVVVALYLASNVVGMALFFVPAVTNYIETSTWRICNVLSWWCQPQLYVGRGMQEGLVSILKYTTFWTILLSCKFLFSYYFEIKPLVGPTKEIMKINVNRYEWHEFFPQVKSNAGAILAVWAPIILVYFMDTQIWYSVFCTIFGGMCGIIHHLGEIRTMGMVRSRFYSLPEAFSMSLCPPATPIQRKGMFFSFLEKRIFKKLGKDERYYPRKFALVWNNIISSFRSEDLISNREMELMTMPMTPMHNSGSICWPLFLLAKKFSEAVDMAANFTGKSAQLFWMIKKDHYMFCSINEFYELTKNIFRFLIIGETERRVVAAIFDEIDKSIQNSSLVIDFRMNHLPSLFQKFDQLAELLFINEQKHRHEVTILLQDIVDIVVQDMIVDPQSILNVVNSSKRLISDDDGAFSYYEPELFASVSSRTSIRYPYFDQQKEQVKRFYLLLSTKEKAAEIPSNLEARRRISFFATSLFMHMPAAPKVRSMLSFSVITPYFMEEVKFSDEELHSNQDEASTLSYMQKIYPDQWKNFLERVDTKVTNDEIRYWASYRGQTLSRTVRGMMYYRKALKLQALLDMTNDQDLYEALLAIEQGKNKRNIHQALAAELEALADMKFSYVISCQKFGEQKIKGDPHAQDIIDLMMRCPALRVAYIEEKEVIVNNCSHMVEGKEVIVNNCPHKVYSSVLIKAENNLDQEIYRIKLPGPPIIGEGKPENQNHAIIFTRGDALQTIDMNQDNYLEEAYKMRNVLQEFVRHPRDKAPTILGLREHIFTGSVSSLAGFMSYQETSFVTIGQRFLAEPLRVRFHYGHPDIFDRIFHLTRGGISKASKTINLSEDVFAGYNSILRRGNIIYSEYIQVGKGRDVGLNQISKFEAKVANGNSEQTISRDIHRLGRRFDFFRMLSCYFTTVGFYFNSLISVVGVYVFLYGQLYLVLSGLQRALLLEAQTQNIKSLETALASQSFLQLGLLTGLPMVMELGLEKGFRAALSDFILMQLQLASVFFTFSLGTKAHYYGRTILHGGAKYRPTGRKFVVFHASFTENYQLYSRSHFVKGFELIFLLIVYHIFRRSYVSNVVHVMITYSTWFMAVAWLFTPFLFNPAGFAWQKIVDDWADWNRWMKNQGGIGVQPEKSWESWWNSENAHLRYSVLSSRILEVLLSLRFFIYQYGLVYHLNISQDNKNFLVYLLSWVVIIAIIGFVKLVNCASRRLSTKHQLVFRLIKLLTFLSVVTSLVLLYCLCRLSIMDLIICCLAFIPTGWGLLLIVQVLRPKIEYYAVWEPIQVIAHAYDYGMGSLLFFPIAVLAWMPVISAIQTRVLFNRAFSRQLQIQPFIAGKTKRR

SEQ ID NO: 48115 - protein, 328 aa, Zea Mays
MAVASRLAVARVSPDGARPAAAAAAGGRGRSGLAAVRLPSTAGWVRRRGRGGAVAASPPTEEAVQMTEPLTKEDLVAYLVSGCKPKENWRIGTEHEKFGFEVDTLRPIKYDQIRDILNGLAERFDWDKIMEENNVIGLKQGKQSISLEPGGQFELSGAPLETLHQTCAEVNSHLYQVKAVGEEMGIGFLGLGFQPKWALSDIPIMPKGRYEIMRNYMPKVGTLGLDMMFRTCTVQVNLDFSSEQDMIRKFRAGLALQPIATAIFANSPFKEGKPNGFLSLRSHIWTDTDNNRAGMLPFVFDDSFGILCKESFHRLLGSCPLLTIGRTI

SEQ ID NO: 48116 - protein, 349 aa, Zea Mays
MAVASRLAVARVSPDGARPAAAAAAGGRGRSGLAAVRLPSTAGWVRRRGRGGAVAASPPTEEAVQMTEPLTKEDLVAYLVSGCKPKENWRIGTEHEKFGFEVDTLRPIKYDQIRDILNGLAERFDWDKIMEENNVIGLKQGKQSISLEPGGQFELSGAPLETLHQTCAEVNSHLYQVKAVGEEMGIGFLGLGFQPKWALSDIPIMPKGRYEIMRNYMPKVGTLGLDMMFRTCTVQVNLDFSSEQDMIRKFRAGLALQPIATAIFANSPFKEGKPNGFLSLRSHIWTDTDNNRAGMLPFVFDDSFGFEQYVDYALEVPMYFVYRNKKILCKESFHRLLGSCPLLTIGRTI

SEQ ID NO: 48117 - protein, 597 aa, Zea Mays
MQEANNQNVPQLSPKGCCGGLHFGDVLKLNVETMAWSLVATTGQCPGTRDSHGAALVGHRMLVFGGTNGGRKVNDLHVLDLRTGEWTRPQCKGAPPPSPRESHTVTVVGGDRLVVFGGSGEGEGNYLCDVHVLDVPTMTWSSPEVRGGHAPAPRDSHSAVAVGRRLFVFGGDCGDRYHGDVDVLDVDTMAWSMFPVKGASPGVRAGHAAMSVGSKVYIIGGVGDKHYYSDVWVLDVTNRSWSQLEVCGQRPQGRFSHTAVAMNTDIAIYGGCGEDERPLNELLILQLGSEHPNGRYNISMCKVLSNHWSQEKRKFLRSEARDASVSNGEMAQKPREAETEQRNPFLRGLENGRVKRRRTGEARPKEAESEQEEHSLSLSQHSSPSQSDQEQTGAHKLPASANTSPSALQPFARLNGNGAQLRAAGPGGVSSRPLKADQLLRTIAPQHRREVQFLSSDHQPQPRGPPGPPHLIGAEVHGTVDGAFDSGYLVTAVVNGQLFRGVLFAPGPGVTAPRPAVHHQILTSSAVPPQQRPLLAHAIPVHARPVPLPQATGFVLPDCAHHARQGFPAKAVKSEPERGSSDLHDVVLTLGGPGGGK

SEQ ID NO: 48118 - protein, 95 aa, Zea Mays
MEDIEDVLGPVGLSVGGAPPVLRLLLASVAASSSAGRPGLRMRGLSSRPGSPARRRFTSRLSGAHITRVTVNTCQVSSLHLDMQSLKSPKEQICG

SEQ ID NO: 48119 - protein, 368 aa, Zea Mays
MRAPAPALGATHPLGHGGSPGRRSRRSCGRRRRTIATQPTSRRHAATHFGTSSIKLLGQSLYYLLTTGSGQQTLGEEYCDISQVATLHGLPPTPARRILFILYQTTVPYLAERISSRIVARSIVLNESQFDDHPESDNSSSDIAQSTTNSDIPSRSLSVSALSGFRGRVHALWQWVLQKWPSMLPYAQDFIQLAIRTNLMFFYFEGLYYHLPKRAAGIRYVFIGKPMNQRPRYQILGIFLLIQLCILGAERLRRSNISSIASSINQISSGGYPSTTGRGIPVLNEDGNIISDIRSGKAADIASHSETSNGKSKCTLCLSIRQNPTATTCGHVFCWNCIMEWCNEKPECPLCRTPITHSSLICIYHSDF

SEQ ID NO: 48120 - protein, 208 aa, Zea Mays
MEGTTQPTAGAREKLLPTSAAASLPPYLDPHPADSSSYAVLLVPVRRRLRRGGRCIAPCLTALLLALAGFLLWPADPDISLARFHLGHVSVVARPAVAVTISAALKVRVRNPDLFALDYTRLDVAIGYRGKPLGLVTSGGGRVQARAVSYVDANLQLDGIRVVEDAIYLLKDLARGSVPFDALAEVEGHLHFFFLSIPVKVHTMSNAL

SEQ ID NO: 48121 - protein, 199 aa, Zea Mays
MPSSRARASSGTAAAAMDPWIAQPSLSLDLKVGLPTPAKVVLVEETNNFLAVSRTKDREVEALEAELRRVGDENKRLSEMLRALLANYTELQGQVNDMVVVAAAANRQSSTSEGGSAASPSRKRIRSDSLDTAPHHQQNTRKPSPSPPFAAHDQMECTSAAATAAAAFHHEPGSRVREECKSKVSRRYVHADPSDLSLR

SEQ ID NO: 48122 - protein, 169 aa, Zea Mays
MALARLGRSLAGRLHRSIYRPPAPTDYHASVSRPFAPTHTGVCVRGFASLTYNASSMIGHNLEGPLPVHIVKVLDLVVHMNHARPMSTAAASKVPVGARKVGLKVAMMSPGFVYEPYSPRERIPFWKRWFTLSGWRRTKEDIILEQFSSGLRSKCSLPLILGSTMLHHC

SEQ ID NO: 48123 - protein, 452 aa, Zea Mays
MDTSWIMNGLGFAEKIRSATRSLTLRFGELFARPRARCTNCDCDIDVSDVSLVWPALPAGVKFDPTDLELLQHLQGKSSLPNSVSHSLIDEFIPTIQEKEGICYTHPKNLPGMKMDGSCLHFFNRVRNAYDTGNRKRRRIVVATVGDDVSDGGGVAASGNSRWHKTGSSKPVFDEDGVRQGWKKILVLYRAPKKVGGKPESENWVMHQYHLGAREDETDGEFAVCKVFYQSPLRKNGRPAKTDAAAAAAAESDASVGKINPRTPMTTDPPRPRRLNSSPCNTEQYTPIQEDQGEEEEEEECGTSKMKAEPSECSACYAEASPTIPTSDEPMQATDDALDAGLDTPLPVDGPSMDLFHGLPDLDNAHPFTGLGTWISLDVSYLVCSLVAIDGRHGHERRAHGFVSSSAGHPRTTGWPRGLAGRIPLMRREEGSELAAAVEGASSVVNRRLVAL

SEQ ID NO: 48124 - protein, 420 aa, Zea Mays
MQELYNSLTASNELVRVLANVLGPAGALNPTAASVLAALRSELDAARQLVKQQRRRGVDGEERLLRRQLAEEVRAWKCRHREKAAAAARLVASELDGERRARRRAERVGTKLAEALAGAEASLRAATRELGLERAARARLEKVCDELASRDVGGGTEAEAEDDDGLRREAAATALEELEREREMLQVADELREERVRMKLAEARLHFEEKNAAVDRLRQELEAFLGNERREQTPAHHEMAKEEEEEDHQLQIVLASEFGVHGIDPLVTEKSGQEENAEAGDDDDDSEGSDIELNMDGNSWSYTTTSRSRDTTAKNATSAHGSLSDRATECGADAGAFDRRSEATRDAPEQDWAADGCSDGGTTGRDEDEDAERYEAIKNLREQMLTGHAFLFLSKGEADDDSDRRRRGFASHFEEDGDLW

SEQ ID NO: 48125 - protein, 2237 aa, Zea Mays
MATPSYAAVKCLNTSSSSRKRFSFKSFSQRVEEIDIDVYRSLHTLKAEPSSGSSFFLDAIVEWRELNTAEDFISFYEEMIPLVQTLPQIVLHRDKLFSALLQRVNMSARLSLEPILMLIAAFSRDILEDFLPFLGRHASALLSLLNDGGDRDPEILEQVFTSWSYIMMYLQKYLVKDTVQILRITAALRYFPKDYVREFMAESVSFLLRNAPNNQLTQGLLKVLLEAAKQPSPARIDGVVSLLWHVMKGTSTKLHSKAGQVLKFLLSKSIVSTLRDKFPDDKVKMIKLVELLVSRYVFPGSNITGSSSIEVLGSILDFMLSVLDVPTILGNLSIISPFYAPVFKLKNPRVIVFIKKLLVKGPQVAQHFESQILSAMDNFIVSSPEDVIFILLNFFKGSKKQIFLCSTDGNHLDSVEKTCKFFESKFSLWIELLDDTAGTGNRSSNQLVFLNGINSKDLHAGNMNGLPMTTWRGLLGAALSSYHKLLLVNTSRNSEFSFFLSLAKSHSTCPQVLSAVAEYLDSLQGVSSMEVTKEFDPQNLLELFSIFAFNLSSPTKDVRILTLRILSYFVKMDQRLITDEERPHKRQRTEVSGEEAVAKYANVVDILLIIESMPISVSTSRKIAIFISRIQMSLSSKMVHDDYIPPLLHGIIGILYNRFSDLWPQTLDCLAVLIRKHKELVWGQFVPFIAIHQSKGLTVKNQEKLEAATQPQSIFDCFNLYLAMDFDCTPAVTVATLLLQSLQRIPDVAESRSRQLIPLFLNFMGYDDSSIFSADSYMPEKCKGKQWKAILKEWLNLLRLMHNARSLYQGNFLQEVLTKRVLDDSDPEIQAKALDCLLNWKDEFLIPYSQNLKNLIDVKTLREELTTWAVSHDSLSILKDHRSRVVPLVIRVLAPKVRKLKLLGSRKHTGASHRKAILRFLLQFDSNELELFFSLLLRSLIPGSLQLKMFGSQPDNLLGSFSDIVGTSTEICVENFTWKKANGFIHLVEEIFGTFDMPHISPFLNVLLIIVARLLESCMRNLRNESDGKYPCNQTNDHGNGCSINSEVGNSVNVDECFKEMHLEGHMEQPHSITQTSVSIKQLKDLRSSCIRVVSSALSHYESHEFGENFWGVFFSSVKPLIDCFTQEASSSEKPSSLFACFMAMSRSPKLAPLLGSNNLVPAIFSILTVKTASGSITTYALEFIENLLRLDIDLQQQDEHLVKKVLLQHMDVLIHSLHDFVNHRKELNRRSGTWLGQRELRLFKLLLNYITDPSAADNFIDLILPFFSKKDLNSDDCLEALCVVRGIIQNLRCKVSEKVLNALNPLLAIVGLELRLCICDIYAGLSLNDPSMLFLAGLIGDLNAVSASELGELDYDTRLNTYDKVRPQLFLGLTEEHVGAILSHCVYDMSSEELILRQSASRALQSFLDFSASVMNNDVSKYSIDDKFRENNTRSICTMGCIQKILEKTYLHNMGVAMTKDVSIQKEWIILLREMVSNFNHLASLSSFRPLCKVDIEEDFFHNITHLQAGKRSKALLLFRQGIKENNFSEDITMKVFVPLFFNMFSDDITMKVFVPLFFNMFSDVKAGKGEQVRDICLDTLSAVAAKVQWEHYRTILKRCFRELNLRPDKQKIILRLICSILDAFHFMKPANDASGNSDALSEDIDSSLTFSLVTVSSDKQQYMQKVVFPQVQKLLGSDPEKVNVNINLVALKILKLLPVDYFESQLSSIIHRICNFLKNRLESIRDEARSALAASVKELGIGYLQFVVKILRAILKRGFELHVLGYTLHYLLSKNITADMYGRLDYCLEDLLAVVDSDLLGDVAEQKEVEKLASKMKETKKRMSFETLKLIAQSITFKTDLLKKIISPVSLHLQKQLTPKLKTRLEMMLHNIALGIECNSSTETSNLFIFVYCLIEDTITGSRSECKENTQSSPDQDSTVRKTFLGLGESGSQNSYILTKFALDLLRNRLKSIKLDKEDEQLVKMLDPFVDLLRKCMSSKHASVLSATFRCFALLVKLPLPSLRDNAITIKNVLMEILQRAGNSNGHLVTSCFKLLADLLRGFRISLSDNELQMLVHTPMFVDLQTNPSPVALSLLKTIVRLKLVSHEIYDIVVKIGELMVTTLTESIQQQCIQIMLQFFLNYPLSEKRLQQHIDFFLANLSYEHPSGREAVLEMLHDILTRFPQRIIDEQGQTFFLHLVVALANEQHQNVSSMILRAIQKLLGRIGGQGKSYIYEYSLSWYTAVDWVGGCNLLL

SEQ ID NO: 48126 - protein, 990 aa, Zea Mays
MAMSRSPKLAPLLGSNNLVPAIFSILTVKTASGSITTYALEFIENLLRLDIDLQQQDEHLVKKVLLQHMDVLIHSLHDFVNHRKELNRRSGTWLGQRELRLFKLLLNYITDPSAADNFIDLILPFFSKKDLNSDDCLEALCVVRGIIQNLRCKVSEKVLNALNPLLAIVGLELRLCICDIYAGLSLNDPSMLFLAGLIGDLNAVSASELGELDYDTRLNTYDKVRPQLFLGLTEEHVGAILSHCVYDMSSEELILRQSASRALQSFLDFSASVMNNDVSKYSIDDKFRENNTRSICTMGCIQKILEKTYLHNMGVAMTKDVSIQKEWIILLREMVSNFNHLASLSSFRPLCKVDIEEDFFHNITHLQAGKRSKALLLFRQGIKENNFSEDITMKVFVPLFFNMFSDVKAGKGEQVRDICLDTLSAVAAKVQWEHYRTILKRCFRELNLRPDKQKIILRLICSILDAFHFMKPANDASGNSDALSEDIDSSLTFSLVTVSSDKQQYMQKVVFPQVQKLLGSDPEKVNVNINLVALKILKLLPVDYFESQLSSIIHRICNFLKNRLESIRDEARSALAASVKELGIGYLQFVVKILRAILKRGFELHVLGYTLHYLLSKNITADMYGRLDYCLEDLLAVVDSDLLGDVAEQKEVEKLASKMKETKKRMSFETLKLIAQSITFKTDLLKKIISPVSLHLQKQLTPKLKTRLEMMLHNIALGIECNSSTETSNLFIFVYCLIEDTITGSRSECKENTQSSPDQDSTVRKTFLGLGESGSQNSYILTKFALDLLRNRLKSIKLDKEDEQLVKMLDPFVDLLRKCMSSKHASVLSATFRCFALLVKLPLPSLRDNAITIKNVLMEILQRAGNSNGHLVTSCFKLLADLLRGFRISLSDNELQMLVHTPMFVDLQTNPSPVALSLLKTIVRLKLVSHEIYDIVVKIGELMVTTLTESIQQQCIQIMLQFFLNYPLSEKRLQQHIDFFLANLRYDEYP

SEQ ID NO: 48127 - protein, 1910 aa, Zea Mays
MATPSYAAVKCLNTSSSSRKRFSFKSFSQRVEEIDIDVYRSLHTLKAEPSSGSSFFLDAIVEWRELNTAEDFISFYEEMIPLVQTLPQIVLHRDKLFSALLQRVNMSARLSLEPILMLIAAFSRDILEDFLPFLGRHASALLSLLNDGGDRDPEILEQVFTSWSYIMMYLQKYLVKDTVQILRITAALRYFPKDYVREFMAESVSFLLRNAPNNQLTQGLLKVLLEAAKQPSPARIDGVVSLLWHVMKGTSTKLHSKAGQVLKFLLSKSIVSTLRDKFPDDKVKMIKLVEDVPTILGNLSIISPFYAPVFKLKNPRVIVFIKKLLVKGPQVAQHFESQILRVSSMEVTKEFDPQNLLELFSIFAFNLSSPTKDVRILTLRILSYFVKMDQRLITDEERPHKRQRTEVSGEEAVAKYANVVDILLIIESMPISVSTSRKIAIFISRIQMSLSSKMVHDDYIPPLLHGIIGILYNRFSDLWPQTLDCLAVLIRKHKELVWGQFVPFIAIHQSKGLTVKNQEKLEAATQPQSIFDCFNLYLAMDFDCTPAVTVATLLLQSLQRIPDVAESRSRQLIPLFLNFMGYDDSSIFSADSYMPEKCKGKQWKAILKEWLNLLRLMHNARSLYQGNFLQEVLTKRVLDDSDPEIQAKALDCLLNWKDEFLIPYSQNLKNLIDVKTLREELTTWAVSHDSLSILKDHRSRVVPLVIRVLAPKVRKLKLLGSRKSLIPGSLQLKMFGSQPDNLLGSFSDIVGTSTEICVENFTWKKANGFIHLVEEIFGTFDMPHISPFLNVLLIIVARLLESCMRNLRNESDGKYPCNQTNDHGNGCSINSEVGNSVNVDECFKEMHLEGHMETSVSIKQLKDLRSSCIRVVSSALSHYESHEFGENFWGVFFSSVKPLIDCFTQEASSSEKPSSLFACFMAMSRSPKLAPLLGSNNLVPAIFSILTVKTASGSITTYALEFIENLLRLDIDLQQQDEHLVKKVLLQHMDVLIHSLHDFVNHRKELNRRSGTWLGQRELRLFKLLLNYITDPSAADNFIDLILPFFSKKDLNSDDCLEALCVVRGIIQNLRCKVSEKVLNALNPLLAIVGLELRLCICDIYAGLSLNDPSMLFLAGLIGDLNAVSASELGELDYDTRLNTYDKVRPQLFLGLTEEHVGAILSHCVYDMSSEELILRQSASRALQSFLDFSASVMNNDVSKYSIDDKFRENNTRSICTMGCIQKILEKTYLHNMGVAMTKDVSIQKEWIILLREMVSNFNHLASLSSFRPLCKVDIEEDFFHNITHLQAGKRSKALLLFRQGIKENNFSEDITMKVFVPLFFNMFSDVKAGKGEQVRDICLDTLSAVAAKVQWEHYRTILKRCFRELNLRPDKQKIILRLICSILDAFHFMKPANDASGNSDALSEDIDSSLTFSLVTVSSDKQQYMQKVVFPQVQKLLGSDPEKVNVNINLVALKILKLLPVDYFESQLSSIIHRICNFLKNRLESIRDEARSALAASVKELGIGYLQFVVKILRAILKRGFELHVLGYTLHYLLSKNITADMYGRLDYCLEDLLAVVDSDLLGDVAEQKEVEKLASKMKETKKRMSFETLKLIAQSITFKTDLLKKIISPVSLHLQKQLTPKLKTRLEMMLHNIALGIECNSSTETSNLFIFVYCLIEDTITGSRSECKENTQSSPDQDSTVRKTFLGLGESGSQNSYILTKFALDLLRNRLKSIKLDKEDEQLVKMLDPFVDLLRKCMSSKHASVLSATFRCFALLVKLPLPSLRDNAITIKNVLMEILQRAGNSNGHLVTSCFKLLADLLRGFRISLSDNELQMLVHTPMFVDLQTNPSPVALSLLKTIVRLKLVSHEIYDIVVKIGELMVTTLTESIQQQCIQIMLQFFLNYPLSEKRLQQHIDFFLANLRYDEYP

SEQ ID NO: 48128 - protein, 219 aa, Zea Mays
MKVVERVQKKTGRKVELLSPMPPPKEEKKEEEKKEEPEPPKTEKKEEATVLAVVLKVHMHCEACTQVIKKRILKMKGVQSVEADLKASQVTVKGVFEEAKLSDYVYRRTGKHAAIVKSEPVAAENVDDGNAKDDKKAAEGGEEKKDDGKEEKKDEDKKEADNQKDDGNAGDEGKDKDPGAVANMYMHYPRSNHLSEYGYAYQYPPQLFSDENPNACSLM

SEQ ID NO: 48129 - protein, 302 aa, Zea Mays
MDPSYHGGGAAGGSADDHGQILWDWTEQHCEPNDSSHDATKFVWDCLNQDDNELLGLLGNQTPLRYCRDFFADLDDITCKETLDLEESRESKRRRTLEYPLESSQSEVGTHETGSPFVTPEVAEISLLCTDKPQSLNCGMHHTLNNLDEAPYQQEDILLEHCSYGTAVYLEPDQTPCSQQSIACTNDQAGISGTSEIAPMTESFIMQETRKLSTLKVSNGASSSLVTKDNLTTSVAYPFTLIKPSWQEGDVTLQDINRRIRPPKKAPEILGTSAFSGKPVINKTRIRTEGGKGSITILRTKG

SEQ ID NO: 48130 - protein, 103 aa, Zea Mays
MEGSTATEGHVVGIPVSTRAYGIEEPDFSVEETTPDRGEFPSSFQYYSHGAERNQESRSMSLIKLSFTFQMLPVRRRPPPIGRRAINKPLGRETRSSGASKNM

SEQ ID NO: 48131 - protein, 165 aa, Zea Mays
MDSTLFIIGVIGNIISVLVFISPIKTFWRIVRGGTTEEFEPAPYVLTLLNALLWLYYGLTKPDGFLVATVNGFGAVMEAIYVVLFIVYAANHATRVKTAKLAAALDIGGFGVVFAATTFAISEFELRIMVIGMICACLNVLMYGSPLASMLGVAVWGTCKQPYSF

SEQ ID NO: 48132 - protein, 213 aa, Zea Mays
MIAAVNRVPAGWGEDEMSVLPRHTKVVVTGNNRTKSVLVGLHGVVKKAVGLGGWHWLVLTNGIEVKLQRNALSVIEPPTGNEDDDKFDCENLRWNSSDLVSDDAQSPKPQRSRSRQHRGFHRKSFSRSMSCDSQSKTSVSSSSRAHTKVDLSKLELTALLRYWRHFNLDACPNPSREQLVDAVQRHFTAQQLDELQVIVSFVQAESHGKTLLQ

SEQ ID NO: 48133 - protein, 222 aa, Zea Mays
MIAAVNRVPAGWGEDEMSVLPRHTKVVVTGNNRTKSVLVGLHGVVKKAVGLGGWHWLVLTNGIEVKLQRNALSVIEPPTGNEDDDKFDCENLRWNSSDLVSDDAQSPKPQRSRSRQHRGFHRKSFSRSMSCDSQSKTSVSSSSRAHTKVDLSKLELTALLRYWRHFNLDACPNPSREQLVDAVQRHFTAQQLDELQVIVSFVQAAKRLSLMAKPFCNSSREL

SEQ ID NO: 48134 - protein, 75 aa, Zea Mays
MCFTLEFKTKLENMFFQRVKIRFHRLSFPQHFHFTFGRTVASVSSQYGKYDRIALPIMSSPKTVSSSLPIVYQNH

SEQ ID NO: 48135 - protein, 395 aa, Zea Mays
MAIAANDALWPSESFGFSFLIWCKQAKDSTWGIGGFIIDDPASELGPIREVFACPVLFSMWHIRRTWLKNVIKKCSNVEVQREIFILLGKTICNIWSEKNPMDALGQLFQDFVDQTAFIKYFKSFWVPKLEMWIDSIRNLPLASQESCGAIEGYHLKLKVKAYDDVQLDALQRVDWLVHKLTTELHSSYWINLFADESGSFPEVKADYIASTSWQRALQIPDDAVTFDDKDPLVARVVSQKETSQTRTVWSPGSEFSLCNCSWSMQGNLCKHVLKVNMVCGARKDFQPSLSFQSFQHVLLDLWQKPLDDSFSLDLSVARVMQMQEKIKHVAELATSSGIAQVAGKLPMQWTKKRGRRVGVKPTSALLLPRSKGSLQKDLTPKNSRKRKRLSRFKG

SEQ ID NO: 48136 - protein, 67 aa, Zea Mays
MVPIHVFMELLLVICVVDLSSCCSLQSCPRSRTIQVINPYDRGHEGSSSPLPLLPPSACPARCCSIP

SEQ ID NO: 48137 - protein, 360 aa, Zea Mays
MDFVGTVTKVHPSLDDSVGVQSKSISGETISKLSKMVIVLEEEKSKRFAKQPFRHVTCIMSSTLDDVIVPGALALDVIQQAELEVERLDQLKASRMKDIAFKKQTELEDIYARAHVAVDSSAARDRIMSIIESSSFEPSELLADMENQILKANEESLSRKDILERVDRWMSACEEESWLEDYSRDDNRYSATRGAHLNLKRAEKARVLVNKIPAIVDTLLAKTRAWEQEHGVAFTYDGVPLLAMLDEYKILRQEKEDEKRRMRDQKKMNEQLAAEQEKLFGSKPSPARPQSSSRKVAGARTNGGGTPARRLSALQSGGRTASRDGRRDASRPVAPVNYVAIAKEDVASQASSNHTGPSTP

SEQ ID NO: 48138 - protein, 382 aa, Zea Mays
MDFVGTVTKVHPSLDDSVGVQSKSISGETISKLSKMVIVLEEEKSKRFAKIQALASQLSDLWNLMDSPVEEQQPFRHVTCIMSSTLDDVIVPGALALDVIQQAELEVERLDQLKASRMKDIAFKKQTELEDIYARAHVAVDSSAARDRIMSIIESSSFEPSELLADMENQILKANEESLSRKDILERVDRWMSACEEESWLEDYSRDDNRYSATRGAHLNLKRAEKARVLVNKIPAIVDTLLAKTRAWEQEHGVAFTYDGVPLLAMLDEYKILRQEKEDEKRRMRDQKKMNEQLAAEQEKLFGSKPSPARPQSSSRKVAGARTNGGGTPARRLSALQSGGRTASRDGRRDASRPVAPVNYVAIAKEDVASQASSNHTGPSTP

SEQ ID NO: 48139 - protein, 262 aa, Zea Mays
MGAVTSTVAARFAFFPPSPPSYGFEQPAPLPAPATPEPPAPATSKPPPPAPATPKPPPAGEEKGGGAVVELTGVPRRVNVEARRLRTKRGTEVVAMHVRQAGAKLTLLYSHGNAADLGQMYELFVELSAHLNVNLMGYDYSGYGQSTGKPSEQNTYSDIEAVYRCLIETYGASEDNIILYGQSVGSGPTLDLASRLTRLRAVVLHSPILSGLRVMYPVKHTYWFDIYKNIDKIPLVRCPVLVIHQMRLLTVPMGGHCGNLLK

SEQ ID NO: 48140 - protein, 113 aa, Zea Mays
MASVLEKIDEMLLLAVYNKVCTSLGASRRRWAPKPFVARSFKPPTTYSKPTPPRAMIGPVSSLSEPSPGPPSPSSSPSPAASSRFRRGLLDGTKWRMKQPGLFREGRMVVIVT

SEQ ID NO: 48141 - protein, 135 aa, Zea Mays
MWHSFFSMHRIASRSGLLGRRCYSYAMKGGTSIAGVGDIIAVASGKGGVGKSTTAVNIAVALAKEFKLQVGLLDADIYGPSIPTMMNLHAKPEVNEDMKMIPVENHGVRCMSIGFLVDNDAPIVWRGNVTIESYK

SEQ ID NO: 48142 - protein, 266 aa, Zea Mays
MWHSFFSMHRIASRSGLLGRRCYSYAMKGGTSIAGVGDIIAVASGKGGVGKSTTAVNIAVALAKEFKLQVGLLDADIYGPSIPTMMNLHAKPEVNEDMKMIPVENHGVRCMSIGFLVDNDAPIVWRGPMVMSALEKMTRGVAWGDLDILVVDMPPGTGDAQLSMSQRLRLSGALIVSTPQDIALIDARRGANMFRKVQVPILGLVENMSCFKCPKCGEKSYIFGEGGAQRTAEEMDMKLLGDVSESCDCNWHQFLSYDEYARMFYI

SEQ ID NO: 48143 - protein, 176 aa, Zea Mays
MFFLARYCKLLEENSFRGRTADFFYMLLFGATVLTGIVLIGGMIPYISETFARILFLSNSLTFMMVYVWSKHNPFIHMSFLGLFTFTAAYLPWVLLGFSILVGSSTWVDLLGMIAGHVYYFLEDVYPRMTGRRPLKTPSFIKALFADDNVVVAQPPNAGIGAGARFGAIGVDPQAQ

SEQ ID NO: 48144 - protein, 285 aa, Zea Mays
MSHRQPAPMPDTLSDAFAAAVLLSSTDKPDTLPPGRLSPVSPLPHSSSKHGHQHPHPTPSSSSGSSGSVSRSLLAPASSLASRRSHSGEIPLPSDAPPRGTARPGHRRTGSGPLIFTSGACSSSATSPLTNALPAGNICPSGRLAKPLPSSCSAATPPPPPRASRHDVLGSGTANYGHGSIVRSRAATDDDAVLRRAMSAADPEELKRAGNDQYRKGCFEEALRLYDRALALCPDNAACRGNRAAALIGLHRLGEAVKECEEALRIDPSYGRAHHRLASLHIRTH

SEQ ID NO: 48145 - protein, 95 aa, Zea Mays
MNVRRWTACFAKQTFSACLMVQKSHRPEGIKSSFVVNNLFPCFLFGILAGSCVNPLLFSLSIVPLFYFGFDGQYLSQLMCTKLRLMLPVIELYGM

SEQ ID NO: 48146 - protein, 205 aa, Zea Mays
MFAQSSWFLANLENIEVIKLISQVIKDFASGEIKQASTLFDCDITLDDYLLKSYYKTASLIAASTKSASIFSGVSTTICEKMYAYGRNLGLSFQVVDDILDFTQSAEQLGKPAASDLAKGNLTAPVIFALQSEPELREIIDSEFSDTDSLATAIELVHRSGGIRRAHELAREKGDLAIQNLQCLPRSDFRSALEKMVEYNLERIE

SEQ ID NO: 48147 - protein, 244 aa, Zea Mays
MDNGGQGLNWVKLDDEERDDLVAFLSAPAEFYSEMKSTDISDRVLSRQKNVPVGRNDQSDPPLIIKDIYEVARTEISTVKSDVCGLAEELHGLRRNLSSGNDHWKIDIGNKMDDDRKLSTGVQAASQTTPSSSIRRSAESITRVRWFWNSLWKSKRDEQRPLRYDMSYNLDLRVVSLLTQRFNGLAERSRNYLTSWKENSRTSGRTGGLHIQGQQQNIQFGRSIRITLLLVLSIFLIVPFLASA

SEQ ID NO: 48148 - protein, 148 aa, Zea Mays
MEESNVQPVKSPVTICGDIHGQFHDLVELFRIGGKCPDTNYLFMGDYVDRGYYSVETVTLLVALKVRYPHRITILRGNHESRQITQVYGFYDECLRKYGNANVWKTFTDLFDYFPLTALVCTLKTGTTFFQLYLEHLFYASSSQYAES

SEQ ID NO: 48149 - protein, 132 aa, Zea Mays
MPPPSASASRLATHWIADALADDESLDFSVLKGWKLRRIGEGFASTFKSRHPGIYMYQEIYTTRNFFPVEFQRRLSPAPCSPVSPRRLSPASRSSAPSRCIVAGARSQLPTGLQAPPNPLRPAPHPTIPVMV

SEQ ID NO: 48150 - protein, 121 aa, Zea Mays
MPPPSASASRLATHWIADALADDESLDFSVLKGWKLRRIGEGFASTFKSRHPGIYMYQEIYTTRNFFPVAWKFWRIGGFAFHLSVKTSRKIYVQRNLHYQKLLSSWHPRIPCVQHLIQPSR

SEQ ID NO: 48151 - protein, 105 aa, Zea Mays
MPPPSASASRLATHWIADALADDESLDFSVLKGWKLRRIGEGFASTFKSRHPGIYMYQEIYTTRNFFPVAWKFWRIGGFAFHLSVKTSRKIYVQRNLHYQKLLSS

SEQ ID NO: 48152 - protein, 194 aa, Zea Mays
MRCLRHAAAKCGKRCPKCRQFISSSKSCTINTVLWNTIQLLFPSEVEARKGSSSSPSPCDKDDVRANRFSQGGPGMRTRSRSSGSGFISSEGRTRSSFIEPGASANFIVSTYGSARSSNSRRGFVPASQLLLTRLEQSEDAAALAYRLQQEEFVNAFEEPEQERQPRDAVSTARDTLRAMASRAIRLRARGWPV

SEQ ID NO: 48153 - protein, 191 aa, Zea Mays
MLIILILLPTRISLALLDWRNSTMPLGLWRSVESCVQTWFPVRALPDRRLRELQIRSHHLQPHLRHHLPRLFQLLRQPHPFLRRLLGHGRRELRLDHQLLLHRIHSFNLLRQPIQLVHHPIPLLLLLVVHGVQDKLGLHRWLRHRRRGDYPRRGQRALIPDVMPVAASDDRRGCERQEIYRRQRDNVEVCV

SEQ ID NO: 48154 - protein, 221 aa, Zea Mays
MEKGASEASPPCARCGKPAQLQCPKCVELKLPRENAAFCTQDCFRAAWSSHKSVHPKPGAPASQQSPEGWKYCLRKGRERALQLPRFDWTGPLRPHPISKMRVVPDEIEKPDWALDGIPKIEPDSDLQKRVEIKTPDLIERMRVTCRIAREVLDAAARVIKPGITTDEIDRVVHEETIARELPFLILRWIPISIELLFLPQVMLHVCQRSHLPWNSRCQET

SEQ ID NO: 48155 - protein, 275 aa, Zea Mays
MDKFLVPAPPHCGEEPAPPPRRHRWRRIIAELDGRIDSRFQHRDSRLLLDSFTEVDRIISASTINFHPVREGVSAIEFDRKGIYIASVTLSGCLTVHDFETLYCSKYGPPCSMPDESSNYVLHISNRIPLNAVRWNPGNQDEIACTSNQSDNVFLFDIGYVSSTPTEVLHKGKSKFPSLYSESCKSLTDITFTSDDKSRIFASGLDGAVYMWDRRSSKTHCLELVASPEAQFNTVKLTVDNRTVFGATKNGTIHVGISVEGGHQLLFKATTRFSN

SEQ ID NO: 48156 - protein, 468 aa, Zea Mays
MESFLLEASATVIPGSRGNSFTRIMSDFVRSRYDKQEDFQVLLSKKDPGEQPQHKDYLWMAHWTKASSAAEPRNNDSNPLEDTNNGTTTKDSETLPYEFMKSTVAERLMVGVRHGSASMQHVRQFKSSMRGMPRLSNELGPKNSEQVDESFEKSLKNDAMNLRTRQVVSETYSIHKLSELPLDFQNLGSSDDPSPDWSHFPMFEINQKIDSIVNRKRRSPPLDLNVSASHVMALSSQEYMMHSHQTADENMDTCKPAEGFASRVEDHAGFNSDPPGPKLKGQLLDTMSCSCSKDDNNSADCPIDEQHTSHYFANSKHELPSVSNKKKFKFAGNNHNRIVASASHDLKTKRSAVHKQQSAAEAVFCAPVLDSEFQNEPITISNIDKKDGENFHDMYKCLGKAVSCPLLPYEHRHLNTQRTESAENLKVCTLPDHQTANKLTEKSHGELLTYGPKSKEMYTGSCNQRRKI

SEQ ID NO: 48157 - protein, 409 aa, Zea Mays
MAHWTKASSAAEPRNNDSNPLEDTNNGTTTKDSETLPYEFMKSTVAERLMVGVRHGSASMQHVRQFKSSMRGMPRLSNELGPKNSEQVDESFEKSLKNDAMNLRTRQVVSETYSIHKLSELPLDFQNLGSSDDPSPDWSHFPMFEINQKIDSIVNRKRRSPPLDLNVSASHVMALSSQEYMMHSHQTADENMDTCKPAEGFASRVEDHAGFNSDPPGPKLKGQLLDTMSCSCSKDDNNSADCPIDEQHTSHYFANSKHELPSVSNKKKFKFAGNNHNRIVASASHDLKTKRSAVHKQQSAAEAVFCAPVLDSEFQNEPITISNIDKKDGENFHDMYKCLGKAVSCPLLPYEHRHLNTQRTESAENLKVCTLPDHQTANKLTEKSHGELLTYGPKSKEMYTGSCNQRRKI

SEQ ID NO: 48158 - protein, 484 aa, Zea Mays
MSDFVRSRYDKQEDFQVLLSKKDPGEQPQHKDYLWMAHWTKASSAAEPRNNDSNPLEDTNNGTTTKDSETLPYEFMKSTVAERLMVGVRHGSASMQHVRQFKSSMRGMPRLSNELGPKNSEQVDESFEKSLKNDAMNLRTRQVVSETYSIHKLSELPLDFQNLGSSDDPSPDWSHFPMFEINQKIDSIVNRKRRSPPLDLNVSASHVMALSSQEYMMHSHQTADENMDTCKPAEGFASRVEDHAGFNSDPPGPKLKGQLLDTMSCSCSKDDNNSADCPIDEQHTSHYFANSKHELPSVSNKKKFKFAGNNHNRIVASASHDLKTKRSAVHKQQSAAEAVFCAPVLDKNLKVCTLPDHQTANKLTEKSHGELLTYGPKSKEMYTGSCNQRRSYFFEKLTIPSKSQSTYPKNSASSGKSSDFGVCMYGTNIGSQLFRAQNQSSAKTETLHSDTLIGSKSPAGIASLSAQKVSVYHNLQQSYLLSCA

SEQ ID NO: 48159 - protein, 572 aa, Zea Mays
MEASAGLVAGSHNRNELVVIRRDGEPGPKPMDQRNGQVCQICGDDVGRNPDGEPFVACNECAFPICRDCYEYERREGTQNCPQCKTRFKRLKGCARVPGDEEEDGVDDLENEFNWSDKHDSQYLAESMLHAHMSYGRGADLDGVPQPFHPIPNVPLLTNGQMVDDIPPDQHALVPSFVGGGGKRIHPLPYADPNLPVQPRSMDPSKDLAAYGYGSVAWKERMESWKQKQERMHQTRNDGGGDDGDDADLPLMDEARQPLSRKIPLPSSQINPYRMIIIIRLVVLCFFFHYRVMHPVPDAFALWLISVICEIWFAMSWILDQFPKWFPIERETYLDRLSLRFDKEGHPSQLAPVDFFVSTVDPLKEPPLVTANTVLSILSVDYPVDKVSCYVSDDGAAMLTFEALSETSEFAKKWVPFCKRYSLEPRAPEWYFQQKIDYLKDKVAPNFVRERRAMKREYEEFKVRINALVAKAQKVPEEGWTMQDGTPWPGNNVRDHPGMIQVFLGQSGGHDVEGNELPRLVYVSREKRPGYNHHKKAGAMNALVRVSAVLTNAPYLLNLDCDHYINNISSKI

SEQ ID NO: 48160 - protein, 463 aa, Zea Mays
MASAVERRREEHARRSRSPARGRERRGTPPRRRSSPERRKGSPARARSPAAKSSASHRDRERSPPREKVKERVRSPESPAKVSLLHKGRERSSPREKAKDQRVRSPKRKQEQSRSPSPARRHFSRSPSPRSKRTRGAQGEREAVQFTGSDRRKASHREEQDTLRHREHDEGRDASRDRKVDREAVHVTNGDRRKPSHGEERDSWGKHREHDEGRVASIDRKSDREDTRGTAKDKKYVRDDEKDHSRERGAGRDDKYGASKVALPVWDDDRHGRPNRGDWKSASSREQRLDSGDRRDSTRVKPTDHDGSNGGSGRSFRHGRSMSPEEHRHRGRHESHPSSRVSRSAAHIEDINSRGGEASRNGDPDALATMNATAEALEAKEKQKPSFELSGKLAEETNRVAGVNLLYSEPPEARKSEIRWRLYVFKDGEPLNEKGKLQMSPQIIPPAASNMQFFNTDLWRRSN

SEQ ID NO: 48161 - protein, 543 aa, Zea Mays
MASAVERRREEHARRSRSPARGRERRGTPPRRRSSPERRKGSPARARSPAAKSSASHRDRERSPPREKVKERVRSPESPAKVSLLHKGRERSSPREKAKDQRVRSPKRKQEQSRSPSPARRHFSRSPSPRSKRTRGAQGEREAVQFTGSDRRKASHREEQDTLRHREHDEGRDASRDRKVDREAVHVTNGDRRKPSHGEERDSWGKHREHDEGRVASIDRKSDREDTRGTAKDKKYVRDDEKDHSRERGAGRDDKYGASKVALPVWDDDRHGRPNRGDWKSASSREQRLDSGDRRDSTRVKPTDHDGSNGGSGRSFRHGRSMSPEEHRHRGRHESHPSSRVSRSAAHIEDINSRGGEASRNGDPDALATMNATAEALEAKEKQKPSFELSGKLAEETNRVAGVNLLYSEPPEARKSEIRWRLYVFKDGEPLNEPLYVHRMTCYLFGRERKVADVPTDHPSCSKQHAVLQYSSLFFRLVEKEQLDGMMTKKIRPYLMDLDSTNGTFINGNRIEPRRYYELFEKDTIKFGNSSREYVLLHENSTE

SEQ ID NO: 48162 - protein, 1215 aa, Zea Mays
MAPRLDDRSPTPTNDELDNRSDCSDGMFNKGVHSSSENHLGGTYQDESGNMETGFSASGSHRSSNSGDSTADRTNFSPRVNSNGGLFVGRQDSASSYASYVSAGGGDDGLRSNNSSFSSRTSGPNLLQGSTPKTFSNDLSQLSMGASDSSKDFLEAAEETIEELRDEAKMWERHSRKLKADLEMLKKECSEKSKQHAELAVELSAAQAERDSYRHEIEELKSSLQDVNTRQTITGTPKRSDWIDLQKELEGEVKFLKESNTDLTIQLNRTQESNIELLSILQELEETIEEQRVEISKISKVKQTAYPENGLLVKKDREWAKKLSMKEDEITIPREKSDRALNIGNADGAASNAIYLDLEKENEILRAKIQELEKDCSELTDENLELIYKLKENGLTKGQVPHIANNNELQFKKLTSRIHQLEEDLRNKEMLRDDSFSESSMSNADEIQRKCADLELKVLNFRSQTCELEEKFRKCQEELEQRNLELSALRRKINGLHSNELEVCESGATWKYQARIADLEDTEPETDTLKARFELQLQENDDLRRSKVEMQNFISEFQAEKSQLEERLSASLKESSITSKCLDEVRKDILVLSSSIDSHVSTNKLLERNLVELESCKAELELHVSELEQENIELSERISGLETQLTYVTNEKESSELQLHDSRSLIINLKDKVECQQSEMETQRLQFKQKQQESQRRLCEAQDDSEVLRRSNCKLQSTVESLIEECSSLQNLIADLKRQKLELHGHLTQKEQELDESKKKNFEFSKTVEFLEAKLLSLQKDISSKEQSLLSELENIFQEHMEQEERINRAHFMLNKIEKEKTLEVENLEREVVSLAAQVSSTHEERESATLNAIQEVSVLRADNAKLEANLQDVSEQLRCYESQLEDLRKESKSKIKGLVDSLNASKQSEEMLTSDAEHMKKLMEAAKSNEDALRKTSNELELKLKSSDYVKQQMLEEISGLKLQVQKIMNLQDEVSKLQSSLDEAKFEKGKLEEFVRSVTEECQELKAQKAMLTDKVSYMQETLRNGEEENRNRIAMHAKLMRLESDLTALEASHVHEAELKNELSRIKRSNSEYQRKIQSLGQENEDLTRRVQIMEKGFERMSHAKENLGKQEIGGDNQEAIQSTIQLLEIKLAEALEENKIYRAQQKSSMSEGQPAGGDGKEGNTDRILQLEGELRDMKERLLNMSLQYAEVEAQRERLVMELKAIKKGRWF

SEQ ID NO: 48163 - protein, 60 aa, Zea Mays
MKHQPSCWKTNNQHLLNLWLSIGLIPREIQHDLPLLQDMIKDMIILIKISKDSRVLKLNL

SEQ ID NO: 48164 - protein, 230 aa, Zea Mays
MRLSGEAPVDTKGCEKAGSLLPPKERRFAVLISTMMSSQTKDEVTHAAVERLSENGLLDPDAIVRTDETTLANLIKPVGFYQRKAQFIKEASKICLERFGGDIPDSLNELLALRGVGPKMAHLVMSIAWKNTQGICVDTHVHRISNRLGWVFREGTRQKTTTPEQTRISLEKWLPKDEWEPINPLLVGFGQTICTPLRPKCDKCGINNICPSAFKESSSPIPKQKKTRSP

SEQ ID NO: 48165 - protein, 164 aa, Zea Mays
MFDIVQWESDQLVESSYIRELGDDLSIIHLKFGDASSSTRRPARRRDLVVYERRQAMDDGTLVVAVASLPKEIAAGLLPPPAATGKGGGGSVVGRSLLLQSGWVVERLDGDAGSCVVTYVVQLDPAAGWLPRCIVSRLNSKLVMIIAKLRRIAQATVPAAAAEV

SEQ ID NO: 48166 - protein, 171 aa, Zea Mays
MEVHPKNISGRFYSKKVRTELLQHYGRNRKFYLKRKRFDNYRSEMARSLFCLCPLGWAPWSPRLVESVLLGCIPVIIADNIRMPFPSVLQWPEISLQVAEKDVANLEVVLDHVVATNLSVIQKNLWDPVKRKALVFNRPMEVGDATWQVLRELEVLLDQSQRRRYGGSWRA

SEQ ID NO: 48167 - protein, 274 aa, Zea Mays
MSDDYASLLLFLLNDVLPVRTCCCQGTFIRWLLILLRAQSAADLAWEIAVLEEQVVRKELHLLSLYRAAFDQYLGVSPRASAQEPRHERSSRRATAADDEGALRLRSIKESASYSLPTLSDSKRVELSRCSSGRSSLANFLSASIAEYVPKISCKLSEDILRCVSAVYCKLASRPLSQEEEEARSETPPFTPSLSVSSASSSFSLKKQHPVRGWSPRCYYNADATATPDAYASSGGSSGRYSGVMVFPGIHVDEEKFEYACKMLDTIRWYFVTQ

SEQ ID NO: 48168 - protein, 287 aa, Zea Mays
MPLALAQLQDLRDRISDRLRPWSRSAQFWVRAADIYTSYKVCQLRAGFVKDEDEREAMWEQQHELGAQKMYSLCSELGGLFLKAAQILGKPDLAPMAWVKRLVTLCDKAPATPFDVVRDVVEKQFMKNFDDIFEFFDVEPVGSASIAQVHRARLKLSNTDVAVKVQHPGAEHLMMVDIRNMQAMALFLQKYDINFDLFSATKEMEKQICYEFDFVREASAMERIREFLRITNKKPPVMVPRVIPGMVTREVLVMEFIKGTPIMNLGNEMARRGIDPSGKIAAMAKQE

SEQ ID NO: 48169 - protein, 973 aa, Zea Mays
MASNMQSSGLPQPPRPPMMGSSAQPQNLGPPMPMQFRPVMPSQHPPQFMPPAAQQFRPVGEPMAGANVGMPGQMPHFPQPGQHLPHSNQVPPVSQGVPMVYQPARPMSSAPMQQQQQTAYAGGHLPTMGAPMQPLTYTYQPTSIPPVAQPWSTGPGQSVHHVPPLVPSGHQPVSAPTTLPPVNLSEPSSSDWQEHTAAEGKKYYYNKKTRQSSWEKPVELMTPLERADASTEWKEFTTPEGRKYYFNKVTKQSKWTIPDELKVARELAENASNQQPDRESGIATSALVRSAAFEPSTAPANQSSSAVGIIASSAHDGSSNSVLSGPPLPHNVENTSSSIVGMQNGGSSTAVVPVAASTEVPLVATDAGSSRNNDENSSLTTGADAEDGTSAEDLVEKTSEEEPVVYATKMEAKNAFKSLLESVNVESDWTWDQTMRVIINDKRYGALKTLGERKQAFNEYLNQRKKFEAEEKRIKQRKARDDFLAMLEESKELTSSTRWSKAILMFEDDERFKAVERPREREDLFENYLVELHKKEKAKAAEEHKRYVAEYRAFLESCDFIKASTQWRKVQERLEDDERYSRLEKFDRLDIFQEYIRHLEKEEEEQKRVQKDQVRRQERKNRDGFRKMLEEHVADGTLNARTRWRDYCAQIKDSQSYLAVASNTSGSTPKELFDDVIEELGKQYQEDKIQIKEVVKSGKIPMTTSWTLEEFQTATLEDDALKGISTINIKLVYDDQLERLKEKEQKDAKKRQRLGENFSDLLYSIKEISASSTWDDSKQLFEDSQEFRALDSETYARELFEECVVHLKERLKEKERLREEEKAKREKEREEKEKKKEKERKEKERKEKERDHREEREKEKGKDRSRRDEMEFDGADLNTHGAKDKKRDKDKEKKHKRRHHDTDDVSSERDDKDDAKKSRRHSSDRKKSRKHAHGSDSDSENRHKRHKKDRDSSRRNGAHELEDGELGEDGEIY

SEQ ID NO: 48170 - protein, 952 aa, Zea Mays
MPSQHPPQFMPPAAQQFRPVGEPMAGANVGMPGQMPHFPQPGQHLPHSNQVPPVSQGVPMVYQPARPMSSAPMQQQQQTAYAGGHLPTMGAPMQPLTYTYQPTSIPPVAQPWSTGPGQSVHHVPPLVPSGHQPVSAPTTLPPVNLSEPSSSDWQEHTAAEGKKYYYNKKTRQSSWEKPVELMTPLERADASTEWKEFTTPEGRKYYFNKVTKQSKWTIPDELKVARELAENASNQQPDRESGIATSALVRSAAFEPSTAPANQSSSAVGIIASSAHDGSSNSVLSGPPLPHNVENTSSSIVGMQNGGSSTAVVPVAASTEVPLVATDAGSSRNNDENSSLTTGADAEDGTSAEDLVEAKKTMPVAGKINVTPVEEKTSEEEPVVYATKMEAKNAFKSLLESVNVESDWTWDQTMRVIINDKRYGALKTLGERKQAFNEYLNQRKKFEAEEKRIKQRKARDDFLAMLEESKELTSSTRWSKAILMFEDDERFKAVERPREREDLFENYLVELHKKEKAKAAEEHKRYVAEYRAFLESCDFIKASTQWRKVQERLEDDERYSRLEKFDRLDIFQEYIRHLEKEEEEQKRVQKDQVRRQERKNRDGFRKMLEEHVADGTLNARTRWRDYCAQIKDSQSYLAVASNTSGSTPKELFDDVIEELGKQYQEDKIQIKEVVKSGKIPMTTSWTLEEFQTATLEDDALKGISTINIKLVYDDQLERLKEKEQKDAKKRQRLGENFSDLLYSIKEISASSTWDDSKQLFEDSQEFRALDSETYARELFEECVVHLKERLKEKERLREEEKAKREKEREEKEKKKEKERKEKERKEKERDHREEREKEKGKDRSRRDEMEFDGADLNTHGAKDKKRDKDKEKKHKRRHHDTDDVSSERDDKDDAKKSRRHSSDRKKSRKHAHGSDSDSENRHKRHKKDRDSSRRNGAHELEDGELGEDGEIY

SEQ ID NO: 48171 - protein, 237 aa, Zea Mays
MASTSSAGDVGDSDAKSRVEDIWKKMNSGFPNKMPKPAMTKLSTTEKQKKNKPTNNWMTVLGLSPSKAHSVDQGSKNGLQQTQHEMSEDAKKLAAKALAAAKNAAAVASGRGKVEITEVRDFAGKDIEIKKLVDANSKEAIEKARAGGAAPSAVDNILEQIRKKQKLSVLDKTKKDWGEYKEENRGLGEELDAYKKSSNQYLDKQSFLQRTDYREFERERDARLSMMAKRRTDTRED

SEQ ID NO: 48172 - protein, 159 aa, Zea Mays
MSSSSSFPTSRFPFAAGARAPGSRRGAGGGGSSVRPWGSTGGTSVSSSGKRIQKELLDLNASDCSAGPKGDNLYHWLSTIFGPQGSPYERGIFFLDIVFPRDYPFKPPMVTFKTRIYHCNIDSTGKVHLDILKDGWSPAFTISKVLLAIKDIINNPDPC

SEQ ID NO: 48173 - protein, 195 aa, Zea Mays
MSKRTFSPFTARHRLQDSSRHRLQPPSSPSPQKRLELKRGSSASSPKALAALFRLLASRPRATTCRQTLSPSLHPKTREAMVDAWWPLLGAAIPALVAGQFVRIKRRRDEEQRLKAARGREKSSDEVFVCERVCTSKRMLKKVGAFSKDPIPETCVTVCGVSELDACADACARTVCVNQHQVPNWNDVCLKRVVV

SEQ ID NO: 48174 - protein, 202 aa, Zea Mays
MAMGATVRAAAADAVVTFLWVLCASALGASTAAVTSYLGVQEGAGHYALLVTTSLLSVLLFTFDLLCGALGGASFNPTDFAASYAAGLDSPSLFSVALRFPAQAAGAVGGALAISELMPAQYKHTLAGPSLKVDPHTGALAEGVLTFVITLTVLWVIVKGPRNVILKTLLLSTSIVSVILAGAEYTGPSMNPANEKRGTRGR

SEQ ID NO: 48175 - protein, 176 aa, Zea Mays
MIVPPSLIQKMYRVLTLGGQGRGAGEDAPPDSRAGEVPPESPRRATGALGKEKGEFGNYVSLRGIKGLAFTCLGSMSKWEPVTFQESLSFVKKVKARDYMLYISLLDVLNRNDQIPLQAYSELSLLFQHHEDLLAELSKFRPLPCPNNVYTHGSIWMIIFLMPFLLLSLVLALRSH

SEQ ID NO: 48176 - protein, 116 aa, Zea Mays
MATSDGRSTPPRRLRTHGEKCGIDLEPKDFPNTPSSIGVTSASSSATTRHLRPTSRHPILHQCGSSTPSSIGAAASNSSTMTRHLRPTTPYYKWCQSISDKWSNLFVSVSSILFLP

SEQ ID NO: 48177 - protein, 83 aa, Zea Mays
MEAEYDDYSATNASTAAFCRSAALVLMALLLLRHALTLTDEDDDDTSAMFSLFLLRAAGFLLPFYIMAWAISILQRRRQRQLL

SEQ ID NO: 48178 - protein, 212 aa, Zea Mays
MVAYEFDKVPSTSCYPIQSIRNRVCSMAPFEEDFVRQSLLPLVVPINTETLKMLNDDQRKVVLTILEDDSDENSTQLVKILRSAANANRDLVFGYVGIKQWDGFVETFDVSKSSQLPKLLVWDRDEEYELVDGSERLEEGDQASQISQFLEGYRAGRTTKKKITGPSFMGFLNSLVSLNSLYILIFVIALLFVMVYFAGQDDTPQPRRIHEE

SEQ ID NO: 48179 - protein, 107 aa, Zea Mays
MMGLSPNKDQDIGLLWGPDITQQFLRTNNLKRRTGELIMWRPGSVMVVYRGSIYKRPLKSQALNGASSSVKGEFGALFIPNASNAVENDIQGIYLSAKHATVSLLNV

SEQ ID NO: 48180 - protein, 471 aa, Zea Mays
MMKSLLPQSQLRRSAAAAARSSAGGAAGADGAMSDGGGAGPRAPASSTFWFLLHALCCLISLFLGFRFSRLLFFLLFSTTALYRSSTSSSSAAVLRATTTTTTTTTTTTTTTNTFTLSFAAANTPPSTPANRTALDVADKGAASGNPQSHVVVGRHGIRIRPWPHPDPVEVMRAHRIMERVQEEQRRWYGVKEPRQVLAVTPTYSRAFQALHLTGLLHSLRNVPYPLTWIVVEAGGTTNATASMLARSGLTFVHIPFPDRMPHDWADRHATENRMRLHALRVIRERKMDGVVVFTDDSNVHSMELFDEVQKVQWMGAVSVGILAHTGTADQLRLSEEDKQNMPLPVQGPACNSSGHLIGWHTFNSLPFSGKTATVVGEAAPVLPRGLEWAGFVLNSRMLWKEADGKPDWVKDLDAVGENGEEIENPLTLLNDPSSVEPLGNCGKKVLLWWLRVEARADSKFPEGPQEPTGL

SEQ ID NO: 48181 - protein, 221 aa, Zea Mays
MCIEDSSISVSHDAISLKSGWDKQGIAFGRPTSDIHISRLDLQSSLGAALAFGSEMSGGISDIHADRLLIHSSSRGVFFKTAPGRGGYIRDTVISDVQMEDVDVAIAFTGDWPSHPDDQFDPAALPVVSHITLKNMTGTRISVAGVLSGIAGDPFTDICLSNINFSLADSASPTSHWSCSNVSGYSELVFPEPCLDLQTQSSDASVCSTLPSFHAAAIAAA

SEQ ID NO: 48182 - protein, 150 aa, Zea Mays
METKRVAIIGAGVSGLAACKHLLERGCRPVVFEAGTVVGGVWARVPDSTALHTPRPMYQYSDFPWPDTVTEVFPDHRQVMSYLDAYARHFGVLDCVRFGRRVLGMEYHGVAEDDVAAWEEWGGNGQAFGCAGAGEWRLKVADAEGRIEVR

SEQ ID NO: 48183 - protein, 745 aa, Zea Mays
MAGSDLEPLRASAAALPSSSDPDSPAVTPRRSRVRDLLRNLDRRLSNRSRGGADAGHGGGEAGASPRRPEEDSDELGDGAPPEWALLLVGCLLGLATGICVAVFNRGVHVIHEWAWAGTPTEGAAWLRLQRLADTWHRILLIPVTGGVVVGMMHGLLEIFEQIKQSLSSQREGIDFMAAIFPTIKAIQAAITLGTGCSLGPEGPSVDIGKSCANGCAEMMENNRERRIALVAAGSAAGIASGFNAAVAGCFFAIETVLRPLRAENSPPFTTAMIILASVISSTVSNVLLGEKAAFIVPTYELKSAAELPLYLILGMLCGVVSVAFRQLVVWFTKTFDLIKKKFGLPAVVCPALGGLGAGLIALRYPGILYWGFTNVDEILHTGKSASAPGIWLLAQLAAAKVVATALCKGSGLVGGLYAPSLMIGAAVGAVFGGSAAELINSAIPGNTAVAHPQAYALVGMAATLASVCSVPLTSVLLLFELTKDYRILLPLMGAVGLAIWVPSVVNQSGSKDTFEATSPRHGYSSLLPPTDRNETDWRRQDGDDVELTILDVDPYHYGSNNEEMLLDDLKVSQAMTKHYVKVTPTFTIEETTRLMQEKQQSCVVVVDNEDFLEGIVTLGDLRRKGFVPSENSDSTQANSSTVDANSSLVSSCLTRGFQFHGNERGLVTCFPDTDLSTAKVLMEVKGIKQLPVVKRGAGRRNDGRRKVLGLLHYDSIGWCLREELERWKAIYQRENFQQTAVNGH

SEQ ID NO: 48184 - protein, 378 aa, Zea Mays
MEDDEYEEGMEMGYGGHHQHGGGHAGYGAEEDDEVGYGGGGGEEMDEDADGDAEQQEDITQDDAWAVISAYFEEKGLVRQQLDSFDEFIQNTMQEIVDESADIEIRPESQHNPGRQAEFAETLHRISFGQIYLSKPMMTEADGETATLFPKSARLRNLTYSAPLYVDVSYRVMKKGHDCEEVTETAEYPKVFIGKVPIMLRSSYCTLYQQSEKDLTELGECPYDQGGYFIINGSEKVLIAQEKMSTNHVYVFKKRQPNKFAYVAEVRSMAENQNRPASGMFVRMLSRAGAKGGSSGQYIRATLPYIRADIPIIIVFRALGFVADKDILEHICYDFSDTQMMELLRPSLEEAFVIQNQQICKRNTSKGNVASCWCWGIL

SEQ ID NO: 48185 - protein, 578 aa, Zea Mays
MTVRKLQRLQSIQKCLLGSYCTLYQQSEKDLTELGECPYDQGGYFIINGSEKVLIAQEKMSTNHVYVFKKRQPNKFAYVAEVRSMAENQNRPASGMFVRMLSRAGAKGGSSGQYIRATLPYIRADIPIIIVFRALGFVADKDILEHICYDFSDTQMMELLRPSLEEAFVIQNQQVALDYIGKRGATVGVTREKRIKYAKEILQKEMLPHVGVGEFCETKKAYYFGYIIHRLLMCALSRRAEDDRDHYGNKRLDLAGPLLGGLFRMLFRKLTRDVRSYVQKCVDNGKEVNLQFAIKAKTVTSGLKYSLATGNWGQANQAGTRAGVSQVLNRLTYASTLSHLRRLNSPIGREGKLAKPRQLHNSHWGMMCPAETPEGQACGLVKNLALMVYITVGSAANPILEFLEEWGTENFEEISPAVIPQAAKIFVNGCWVGIHRNPDLLVKTLRRLRRQIDVNTEVGVVRDIRLKELRLYTDYGRCSRPLFIVEGQRLLIKKAHIRALQQRETPDEGWHELVSKGYIEYIDTEEEETTMISMTINDLQNARHNPEEAYSETYTHCEIHPSLILGVCASIIPFPDHN

SEQ ID NO: 48186 - protein, 608 aa, Zea Mays
MSLSPLDSSSPPAAAAAAATEVPLAPGFRFHPTDEELVSYYLRRRVLGRRLRVDAIAEIDLYRLEPWDLPSLSRIRSRDAQWYFFARLDRKVAGAGAGGRGGPGNRTNRATPRGYWKTTGKDREVHHRGKPVGMKKTLVFHAGRAPKGERTNWVMHEYRLLDADGPQDLHVVCRIFQKHGSGPQNGAQYGAPYMEEEWEEDDDAIENGSTHDASGQIAATTCAVDEESNEDDENAYCETNRPARVEPSHLPSVHEMLNPPEMAPLQGQDSKETSDGSCSDVAISLEEILQEPLSNISVENMHRLEGQNATDDNISVDNLLSAYPTKDNGYVGQYNTMNGSAPADEAHARWPLRTYSNQNYVNGPLADEFFDTGNDTNGVAYSRQQQADGFPAPRQVDEKNDFKYDILGSGQGLDYPLADMPLNFAQKSDKEDKFTFEGISEVPEANPQYGASSSGSHEDLYTDTEFLGVPTDDTADKTYGNRLASMLGSIPAPPAMASEFPPSTGKSAGMLSAVSSSSIRFTAGIIQLDGLTFSSGSGQWPLQKNGDLSLLVSFAVEGDVASKLPVGLGRATRISTVPMVLRSGFYLFFMSAMILLFSYKVGSCIYSR

SEQ ID NO: 48187 - protein, 479 aa, Zea Mays
MDLSRPASSDLSLGLHSHAHAHARVHAAAAPLRLFDDAKPERLVAGEADAERDDGDGGDQHFSLLGHSLCVKRPRRAVNGGGGGGGETSSCSSTSPALRPAKRQAAGEDSGADLETRRAAVRSWGNQSLAEADPDVHSLMEQELARQVRGIELIASENFVCRAVLDALGSHLTNKYSEGAPGARYYGGNQHIDAIERLCHERALTAFGLDPACWGVNVQPYSCTSANLAVYTGLLQPKDRIMGLEPPSGGHVSHGYYTPSGKKVSGASIFFESMSYKVNPQTGYIDYDKLEERAMDFHPKILICGGSSYPREWDFARMRLVADKCGAVLLCDMAHISGLVAAKECRSPFDYCDVVTSTTHKNLRGPRGGIIFFRKGKNLRKRAGSFSQGDENEYDFEDRINFGVFPSMQGGPHNNHIAALAITLKQVATPEYKAYIQQVKKNAQALASALLRRKCRLVTGGTDNHLILWDLRTLGLTDL

SEQ ID NO: 48188 - protein, 156 aa, Zea Mays
MGQAFRKLFDSFFGTSEMRVVMLGLDAAGKTTILYKLHIGEVLSTVPTIGFNVEKVQYKNVMFTVWDVGGQEKLRPLWRHYFNNTDGLIYVVDSLDRERIGKAKAEFQAIIKDPLMLNSVILVLANKQDMFLLKNTMKINLHLTALQPVSVLPVFG

SEQ ID NO: 48189 - protein, 214 aa, Zea Mays
MAQAPARAASAVRLFDAHCHLQDPRIAAVAPALIRAAGASGVARFAVNGTSEKDWHLVKQMAEDHPAVVPCFGLHPWWVPERSPDWMNLLRRFFAETPEAAVGEIGLDKGSHGKTINFGEQVEVFQRQLELAKELERPVSVHCVRAFGDLLEVLKQTGPFPAGVLLHSYMGSAEMVSALANLGCYFSLSGFLTGMKSTKAKHMLKSDSFRDRCT

SEQ ID NO: 48190 - protein, 1355 aa, Zea Mays
MEALNELCDLVAAHPDLLLADKLAWLSSRCAAAPGAAAPQRASRAHLHSLLALARLLPAGGAGAGAEGDAAPPAPLLFFLASHAFLSPAFWPQSFAPAPFLARLLPLLAAAPSSPALSSALSAALLAALDVADPTSAPLARAFLSAAAAAAPLPLLPADAAPIAARLLLEFLGSEEEPIRAKGKGEDTLGEENGGAKEVVRRFEEEEVDELERKEVAFRLTVHMLGGEGGLETEQIGKVRNAAARQVRSLTDFLKIRKRDWREQGTQLRARINTKLMCCQAAVGVLVRSVSTMDTDIKSSKDMLQQTLAWFIEATKSCILSSWRKLKICEELFCTLLNGISQITVSRGGQLLPVLLIPLKPLVVSTCSQADMAGSSPGALFEAVVKLSCEIIEFGWTKDRALVDTFVMRLAAYVRERNDYEEEDGKGKEAVPVIRLNVIRLLAELCVCLKKWEVVDMILPLFIEHLEEGDASSPSSLRLRLLDAISRVACLGFEKSYRESIVLMTRSYLDKVKALGASENNTVPSEATTERTETLPAGFLLVASNLTSTKLRSDYRHRLLSLCSDVGLVAESKSGRSGADLMGPLLPAVADICSDFDPVSTVEPSLLKLFRNLWFYVVLFGLAPPIQNNEAPTKPVSTSLGTAESSSAIALQAVAGPYMWNSQWSVAVQRIAQGTPPLVVSSVKWLEDELELNTLHNPGSRGGNGNENSAVGQRAALSAALGGRVEVAAMNTISGVKATYLLAVAFLEILRFSCNGGILSATSTLNRSNSAFSCVFEYLLTPNLTPAVTQCLTAVAHRAFETVLSWLDDRISDIGEGADVRESVLSVHACFLIKSMSQRDEHVRDVSVKLLTQLKEKFPQVLWNSSCLDLLLISVHNELTSGPVSDPAWVATVRSLYQKIAREWLTSALSYAPCTTQGLIQENFCKPSGVQRTQHTADVVSLLSEIRICSGKNDWNGIRTANVPAVMDSAAAASGAKKEAPDFTLEVLSTAVVSATVKCNHAGEIAGMRRLFSTMGGINMGMSPPGTQSLHPHQSFDEVFVSKFVSLLQNFVVAAEKQPIDNSQFRETCSQATALLLDHMVSDSRANLEGFSQLIRLLCWCPAYISTPDAMETGIYIWTWLVSAAPSLGPLVLAELVDAWLWTIDTKRGLFASDMNYCGPDAKLRPHLIAGEPEAPPEKDPVEAIIAHRLWLGFFIDRFEVVRHDSIEQLLLLGRMLQGTMKSPAHFSHHPAATGTFFTAMLLGLKFCSCQSQSNLQKCNMGLQLLEDRVYRAALGWFSYAPEWYESPNKTYAQREAQSVSVFVHFLQNERTSGPVDSVSKLQGREGEPSMITFILFGAVLTTTQMQGKSVNSYF

SEQ ID NO: 48191 - protein, 75 aa, Zea Mays
MSGRTTTNPLTRAQAPKPRSGQVQLSMELRFFLMYRGTRRRRLPPVESPGSPFRLSLGYIWSSKSAVILLLRSLV

SEQ ID NO: 48192 - protein, 101 aa, Zea Mays
MPLTGWNPLAPVLQTVAAFSRHILIAPDAGLDDHRLRPLLALSLSPPSPAPPQPEVRKEKKDAKEAPLTKEEVGRATWMLLHTIAASLTNLRGNKDGMQRS

SEQ ID NO: 48193 - protein, 75 aa, Zea Mays
MLKVRTPFSKLFCKLLKLILAKSLSLIPKSSISLRVFFLSQVRLAKVHSVLRVSEPMMLQVIRSILGVPVARRCF

SEQ ID NO: 48194 - protein, 204 aa, Zea Mays
MSETGHTVQVTNLSSRVSESDLYEFFSFSGPIEHVELIRSGEYGATAYVTFKERFALETAVLLSGATIVDQPVCITYWGQPEETFNFWDRPTWEVEEEIEYTSYQSCQYNTTPQEALTVAQDIVKTMLAKGVSAGVGAMRSVDETYRVTETTKTVATATGRTAAKVVNGIVTSSYFSAGAMMLSDALTRAAKAAADLAAHGRQS

SEQ ID NO: 48195 - protein, 586 aa, Zea Mays
MVMVMEVTQLQLLLETMGSQCECMVTNLARQVVWPHVLAVYKVLYRLFGGYIADVVAAIDQAVQDGVDILNLSVGPNSPPTATRTTFLNPFDAALLSAVKAGVFVAQAAGNGGPFPKTLVSFSPWITTVAAGVDDRRYKNHLTLGNGKLLSGLGVSPATHGNMSFSLISAADALLGSSATKYSALDCQRPELLNKRKVQGRILLCGYSFNYISGTASIKKVSQTARNLGAAGFVVAVENNYPGTKFDPVPFSIPGILITDVSKTEDLIDYYNSSTIRDWAGRATAFKATAGIADGLAPTLYNSAPQVALFSSRGPDVKDFSFQDADVLKPDILAPGNLIWAAWAPNGTDESNYAGEGFAMVSGTSMAAPHIAGIAALIKQKNPKWSPSAIKSAMMTTANTLDKGSRPLRAQQYTASEMMTLSRATPFDCGSGAVNPKAALDPGLVLDATHEEYIAFLCSIPDVNQSEVSNIAGSACNSSSKGRQRPFDLNLPSIAISQLRGTVTVTRTVTSVSEETETYTIMTRMPPEVALEVTPPAVTVLPGASRELAVTLTARSVTGTYSFGEIAMKGDRGHLVRIPVVAMGFK

SEQ ID NO: 48196 - protein, 100 aa, Zea Mays
MTPVAGCCSEASKRARGFASTYRACASKWLGARRCQERSCEGQRIMALELVDAQGVRRRALKSTEALASFLHTPKFVVVPLQRGSTSLRSRCRSRTGTAG

SEQ ID NO: 48197 - protein, 1881 aa, Zea Mays
MKTESSPAGDSEEPLVHFKWRYMVRLIQWHLTEELLVPSVLIEWLSNQLQERDSDDVLELLLPIILGLVDTITLSQTYVRMFVELLVRRLNVDRPKRFSVSSVIAELLRYMVLAVPDTFVSLDCFPFPSFVVPDVYGRGALLKITSGGGILCSKRRDAYRYLSCGYAVSSIQKRAHDLAAVANPSLQARGAAKVVQALDKALVTGNLSVAYFSLFNDLSDALMEERWIKEVNPCLQSSLMWIGTVELSLICSIFFLCEWATCDYRDCRASPSQNVKFTGRRDLSQIHMAVSILKNKMDEMNNLSRPKSSTRITLNKVAKGSLNDACLTAAAVDDSSGLRSNAKNVDEKKDTNDIFESPGPLHDIIVCWLDQHEVSNVAGFTRVDVLIAELIRNGIFFPQVYVRQLIISGITDKNDTMLDVERKRRHHRTLKQLPGSSLFDVLEETRTAEEQQLYEMMSTYSSERRLVLSELSCGHSFYASGRGEYTSSSCIRKQSDLPVASEGDKHGRVLEQVEDVKALLSSLLGFTYPPLVESKLCEIKTSFQESVTSTLTQVETGEAKSGCEDCMRSKGQKLDDSATPFQGFPLIQSGEEDIWWVKKGTKLQESFNVEPVQKSVKQTSRGRAKVVRKTQSLAQLAAARIEGSQGASTSHVCESKMSCPHHEPNNDGDNVKDFDHTRAANVTAIGKSLKRLRLLERRSVSSWLLKSIRQLVDGNGMTASKATNSISILPLQPDDKTASKWRLGDEELLSVLYVLDTCCDSVSGVKFLIWLLVKIRGVGSSGQPGRTYMLMRNRDHQVCQVNEALVFSSLLRYENILLATDILPDVLSALVNRNSMSATTRHPGSTAFAYVRYFLKKYRDVASVAKWEKNFRTTCDQRLLAELDNGRSIDGDLVSSSGILAGEEIDEQVRQKLNGRSSRLVQNMKEIVQRQADGIQRSLKEKKVLAGAAPRNPLTFEKEDSYQIAHDIVLGLVECIRQNGGANPDGDLSIVASAVSAIVVNAGHMIAKHLDFAGGNYQGVNSVATSLNFVRHTLLIHINSLCLLKETLGDRFSRAFEIALAVETSAAVTAAFAPPKMHRNQFQPSPEAHDAYGNHTSELSNSGKGFVGRTAKVSAAISALVVGAVVHGAVSLERMVATLKIKDGLDIMQLLRGLKSNTNGVSHPTGGFRIENSTEVSVHWFRILLGNCRTVYDGLIADILGDPYIIALSRLQRMLPLTVIFPPAYSIFAMVLWRRYIFNCEDPQLYQSFSNAINDITRHQPFREIYFRNTHRLYNLLASDVGDSKFAAMLESHSPDRNSKILPFIPLRARLFLDAIIDCNTPTIQGDGASEPCDPKDNELKLSERLMQLLDTLQPAKFHWQWVEMRLLLDEQALMEKVAAGKTTLESLRSLSPKAEGFALSDSEKGFTEVILSRLLARPDAAPLYSELVHLLGKLQESLVMDVKWILQGQDAILGRRSTRQQLVHIAQRKGLSTKAQVWKPWGWSSLLSDAIPNKTAKRKLEVTSIEEGEVVDDTVDAKRTTKTPPHSVDRSFEGIRSINKYLTEKALAELVLPCIDRSSADIRVSSGNEVPSNKSSGRRGIRGGSPNIGRRAPVGNDPSPPSASALRAALWLRLQFIIRLLPVIMADRSMRHTLASAILGLLATRMIYEDADLPLPPTNATALRRDVDSLLEPPLDVLLDRPGESLFEKLLCVLHALLGSYKPSWLKSRSASRSSIKSQRDFSAFDNEAAEGLQSALDHMELPETIRRRIQAAMPLLPPSRRPCMQCQPPQLSLAALSPLQSSTSGVGPQQKSSCVSWVPTNVSVRSKAALPSHDPETEVDPWSLLEDGTNCPPSTASGSNGSSGVTGDHANLKASSWLKGAVRVRRTELTYIGSVDDDS

SEQ ID NO: 48198 - protein, 353 aa, Zea Mays
MAAPSPKPPTPRGRCHHPPNATRRLHVATRCFPDPPPPPASMPPIPSPNPVLSLLSAVPDWADAIQERRVRDRRPLYDHATWRHHRSSRRHLRHLLTSLSSRAILSLAPPVSAFTAFAAAIATYNTLLPAYALTASSLPYELTAPALALLLVFRTEASYARFDEGRKAWMRVLASAADLAGMLMRHPFPNNLHTGGAPNPGPGGRQADDEPLRRALVNYVLAFPVALKVLGLDWIGLLCSTLLCGDLEGLLGEDDLSVVLASKHRPRCIIEFIAQSLQMLDLDEQKRSIMESAFASSSWGSLSLSHTLDLLQGSLFCGILHSQSYSGKNVNGLLFQLPLSVLHRYSALRKWVF

SEQ ID NO: 48199 - protein, 443 aa, Zea Mays
MGPRDGGAAGVVGDHAVHAASADRAARVRARRAVRPAPRPRRARAGPAPGALGGGAAAAHRAARLRHGVHGDGGQVPAEVRRVRVPALRAAAPVLLDLHLRLLPIPAVAAAQPRRHHRRVLRRRGHVALLLDHLVGRVRGARSGARGELRRVQGRHRHRHGGGLGVPGVQRAGAGGVRVRGARRGAGNPGHHPVHAHQAVPGAHVEGHRRRVPRHRRVLLPRGGRRVLGLRARRRRQRPRGAATPALARRRRQHDGRHPCRRKLSGICDADVRKHRDDYGHKVQAAARVAPPSSGPIGLRCIHTVRGGDLPVLRRPPRLLRRVWVHADLLLPPLRSVAEDQEAAEVQRVVVCQLGLHHRRSAADACVHHRRLTEHRPRRIDVPVLLLKPSHLHVPLHSHGSSKSSPSLVHAALPLHFVASLRVSGCGCSLPKCRGRCSKLYTR

SEQ ID NO: 48200 - protein, 419 aa, Zea Mays
MGKYEMGRTLGEGHFGKVRLARDAGTGRSFAIKILDRQRILAMKIDEQIKREIATLKLLKHPNVVRLYEVSASKTKIYMVLEYVNGGELFDKIALKGKLTEKEGRKLFQQLIDAVGYCHEKGVCHRDLKPENVLVDAKGNIKVSDFGLSALPQNQRKDGLLHTTCGSPNYIAPEVLLNKGYDGSVSDVWSCGVILYVMLTGSLPFDDQNMVVLYQKILKGNAHIPKWLSQGAQDLLRKILDPNPITRVDVDGIRAHDWFKQGYAPSAPFNDDEEDINVDEEDSLNMTENGIQDKIAINQINAFQLIGMSSCLDLSGFFEKEDASERKIRFASNYPPAYLFEKIESIVRKMGFQVHKSNGKVFEINESLYVVELKKSSGDCSLYRKLCETLSEDLGTCKSQQFLKQDSIRQEIGRHNSSF

SEQ ID NO: 48201 - protein, 360 aa, Zea Mays
MPLFDLLGGTIDRRSWDMQRKMSAGVDEVPDFVFLAHVVDVMQSLHVPFVMRTFASTPFSVQLFLLPMWPFAFLVMLAMWVWSKTFVISCYNLRGRLHQIWAVPRYGFQYFLPFAKDGINRQIELAILRADKMGVKVLSLAALNKNEALNGGGTLFVNKHPDLRVRVVHGNTLTAAVILNEIPKGTAEVFLTGATSKLGRAIALYLCKKRVRVMMMTLSTERFQKIQKEAPAEFQQYLVQVTKYRSAQHCRTWIVGKWLSPREQRWAPPGTHFHQFVVPPIIGFRRDCTYGKLAAMRLPKDVRGLGACEYSLERGVVHACHAGGVVHFLEGYTHHEVGAIDVDRIDVVWEAALKHGLRPA

SEQ ID NO: 48202 - protein, 337 aa, Zea Mays
MDIEECRTRLQDKVRLLHPKNAEGIVDYMIANTPLENIRSYLLTATDNVLMNLFEGANRLQNILNLSEENEPLFGLFTPFDQIGPQKQHQFSSRNHSQVLQAPLYPIGPSGAFQNPYSKLTGFRDHFQSLSILDGDTPSHYKCASINVGGYPSNGKVQTKTCRFYLSIRKCKYGENCHFSLVCGYPEINDMRQVDHLGSLQMLEMEIDLLLLQPSSQVPVDHLEKKFLEIYTKLLEIDGFHTEDQRNRKTGYGLTDLFMQLNATRETERRGRYYVVLVKDAPKYVTHGFQPAVPLAGSDFNKICVTFKSESIFTHTDVQNYFRLIKRLLLINEWHPK

SEQ ID NO: 48203 - protein, 267 aa, Zea Mays
MLGNKVAYIQNPSIDKTCTWILKVPRDMKHPIYVYYQLDKFYQNHRRYVKSRSDKQLRDPKEANSTQQYCKPEATTEHGSAVVPCGLVAWSLFNDTYSFARGNNRALRVHKRGISWRSEREHIFGKQVFPRNFQKGALIGGGTLDPRIPLSEQEDLIVWMRTAALPTFRKLYGRIEADLRAGELVTVTTQNNYNTYSFGGKKALVLSTAGVLGGRNGFLGRGYAVVGLACLLLALLLTMLCLVFPLKEEHLALQYPLLRPATVTMHA

SEQ ID NO: 48204 - protein, 611 aa, Zea Mays
MALKASSSDNRTRSTVSLCIVIGMCCFFYILGAWQKSGFGKGDSIALEVTKRTDCTVVPNLSFDTHHSKASGNSSSLVSPSKKFKPCPDLYTDYTPCQDQNRAMKFPRENMNYRERHCPAQKEKLHCLVPPPKGYVAPFPWPKSRDYVPFANCPYKSLTVEKAIQNWVQYEGNVFRFPGGGTQFPQGADKYIDQLASVVPIANGTVRTALDTGCGVASWGAYLLKRNVLAMSFAPRDSHEAQVQFALERGVPAVIGVLGTIKLPYPSRAFDMAHCSRCLIPWGANDGMYMMEVDRVLRPGGYWVLSGPPINWKVNYKGWQRTKKDLEAEQNRIEEIADLLCWEKVSEKGEMAIWRKRVNTESCPSRQEESAVQMCESTNPDDVWYKKMKACVTPLPDVKDENDVAGGAIKPFPARLNAVPPRIANGLVPGVSSQAFQKDNKMWKKHVKSYSSVNKYLLTGRYRNIMDMNAQYGGFAAAIESPKSWVMNVVPTIAKMPTLGAVYERGLIGIYHDWCEAFSTYPRTYDLIHASGLFTLCSMEDVLLEMDRILRPEGAVIIRDDVDVLTKVNSLALGMRWDTKMVDHEDGPLVREKILYAVKQYWVGGKQTAVA

SEQ ID NO: 48205 - protein, 365 aa, Zea Mays
MPGLTAPSDYAEEPPRHPALKINSKEPFNAEPHRSELVASYITPVDFFYKRNHGPIPKVEDLSRYTVSISGLVNKSIQLSMADIWSLPKYNVTATLQCAGNRRTAMSNVRKVRGVGWDISALGTATWGGAKLSDVLELVGIPKLSSVTSLGGKHVEFVSVDKCKVLNRDHGYPLRVVVPGVIGARSVKWLDSINVKEEECQGFFMQKDYKMFPPTVDWDNINWSTRRPQMDFPVQSAICTLEDVDVIKEGQARIAGYALSGGGRGIERVDVSADGGKTWVEARRYQKDNVAYVSDGPQSDKWAWVLFEATLDVPANPEIVVKAVDSAANVQPEKVEDIWNLRGILNTSWHRIKIQRSSCVERSKL

SEQ ID NO: 48206 - protein, 103 aa, Zea Mays
MSVSIYWTYVHVHAALHKICIGYIALLSDLLRSGVQRLPHLGYQMDYISKTEPFYVCMNSSSLADPYRTMLPTTTTLPSKQIVLFVHLRRKAHLTILGAHTRF

SEQ ID NO: 48207 - protein, 621 aa, Zea Mays
MGYNKATPRRNVLSALNNAEANGGTPSVPADGGGGGGAAEAAPVIEFSGREDVERLLAEKMKGKSKNDFKGRVDQMSDYIKKLRACIRWYMELEDGYLAEQEKLLGAMDSENTRHTELEAQLSTAIEELKATNLDLTRRCESLEESFNKEKSEKLIAVESYEKEKQERESAESSRDVLTVDLERVTHDAKRFSEQLKMVQDTNKRLQEYNTSLQQYNSNLQADASKSGETISKLQKEKSAMMETMATLRECNSSMGNQLESSRVSQQEAIRVKEELRKEVECLRVELKQVRDDRDHSAIQLNSLNIELGNYKEQIGKTSKECERFRTKVSELEETCSTQQEQIRTFQKQLAVATEKLKLADVTAIEAMTGYEEQKEKIKYLEERLAQAESQIVEGDELRKKLHNTILELKGNIRVFCRVRPLLRFEGDSNGPEGASISFPTSVESTGRSIDLINQGQKLSFSYDKVFDHGASQEDVFVEISQLVQSALDGYKVCIFAYGQTGSGKTYTMMGKPGNDQKGIIPRSLEQIFKTSRFLESQGWNYSMQASMLEIYNETIRDLLAPGRSNSFESSKQCTIKHDPHGNIVSDLTIIDVFGIADVTSLLEKASQSRTQAKMSKESLT

SEQ ID NO: 48208 - protein, 615 aa, Zea Mays
MGYNKATPRRNVLSALNNAEANGGTPSVPADGGGGGGAAEAAPVIEFSGREDVERLLAEKMKGKSKNDFKGRVDQMSDYIKKLRACIRWYMELEDGYLAEQEKLLGAMDSENTRHTELEAQLSTAIEELKATNLDLTRRCESLEESFNKEKSEKLIAVESYEKEKQERESAESSRDVLTVDLERVTHDAKRFSEQLKMVQDTNKRLQEYNTSLQQYNSNLQADASKSGETISKLQKEKSAMMETMATLRECNSSMGNQLESSRVSQQEAIRVKEELRKEVECLRVELKQVRDDRDHSAIQLNSLNIELGNYKEQIGKTSKECERFRTKVSELEETCSTQQEQIRTFQKQLAVATEKLKLADVTAIEAMTGYEEQKEKIKYLEERLAQAESQIVEGDELRKKLHNTILELKGNIRVFCRVRPLLRFEGDSNGPEGASISFPTSVESTGRSIDLINQGQKLSFSYDKVFDHGASQEDVFVEISQLVQSALDGYKVCIFAYGQTGSGKTYTMMGKPGNDQKGIIPRSLEQIFKTSRFLESQGWNYSMQASMLEIYNETIRDLLAPGRSNSFESSKQCTIKHDPHGNIVSDLTIIDVFGIADVTSLLEKASQSLWVRLR

SEQ ID NO: 48209 - protein, 104 aa, Zea Mays
MLSLLMSSSVSATSSPQSIENGDHDPSSRPAASSPPLQIQAGDLSSSPETTSSDNASYPFQLAQLPQSPLLAQVVVFLASTAADLLQRSWRRLCAHKIGCDASI

SEQ ID NO: 48210 - protein, 91 aa, Zea Mays
MASAAKTLARVGSSLFGRILASPSSSIPRAGLPLARLQPHVPPPAPAGVDAYEAETIARLSSLPGEISFPCGLPSLRFFIDDVNRPRVGAR

SEQ ID NO: 48211 - protein, 181 aa, Zea Mays
MVRKPVPSAAAAIRFFSSVQLSRMKVIAAYLLAVLGGNTSPTADDVKSILESVGAEADEEKLEFLLTELKDKDITEVIAAGRERLSSVPSGGGAIDMGAPAAVAGGGAAPAEEAKKEEKVEEKEESDEVSVSHLKQIWVSACSIKTPLPVYSFSREWSHNIRWFPQNKIVNSYYVLMLFCM

SEQ ID NO: 48212 - protein, 291 aa, Zea Mays
MTAVQYTCTSDPTATTIEASASHQCVTFFFLRKEARRHRTASPRVPYRTLAVLPLQHFSPHPSSIFPHPPSSRTLAVQPLPQVEAGRGRRRSCWWVWIRRRFESAMAAAKLTGNAVAAAMAGDTNLKPVVQVVDLRSIAVTGAPGSGPRFRAIISDGVATGHALFASQLCDLARSGVVRRGSVVQLLDYIVNNVGPTRNRKAIVILNMEVLVAECEIIGNPALPPESGDSSSNSLRADQFNGAPPNGSMAGSTLNKVIKPSDNAPVIQRSMTGPLGYQGSSNCQRRDPPVP

SEQ ID NO: 48213 - protein, 272 aa, Zea Mays
MAAAGPGLYSEIGKKARDLLYKDYHTDQKFTLTTYAANGAAITAASTRKDEAIFNEIQSQLKHNNVTVDVKATSESNVITTITVHELGTPGLKAILCVPFPYQKSAKYLHHHAGVAASVGLNANPVVNLSGVFGTKAIAVGADAAFDTSSGDLTKYNAGLSYTTPDFVAAATLNNKGDNIAASYYHSVSPTTAVGGELSHSFSTNGNTITFGTQHALDPLTTVKARFNNYGMASALIQHEWRPKSLVTISTEVDTKAIEKSSKVGLSLVLKP

SEQ ID NO: 48214 - protein, 324 aa, Zea Mays
MAPEARGEAAPVYRDALTPVEERVRDLLGRMTLREKAAQMAQIERTVATPRALTELGAGSVLNAGGSMPCEQASPADWAAMVDGFQRLAISSRLGVPILYGTDAVHGHNNVYGATVFPHNVGLGACRDGELARRIGEATALEVRATGIHWTFAPCVAVCRDPRWGRCYESYSEDPEIVRSLTTIVSGLQGQPSADHPHGYPFLASPRENVLACAKHFAGDGGTDKGVTEGNAICSYEDLEAIHMRPYPDCMAQGVATVMTSYSKWNGEPLHSSRYLLTDVLKGKLGFKGFLISDWEGIDRICEPRGSDYRYCIAQSVNAGMDMV

SEQ ID NO: 48215 - protein, 157 aa, Zea Mays
MSLTIACRNPSFYLISGHVDTLYILQFINHLVNQLAAHLFLKIACQLEEQIKISSAYSFLKAVELELQGYFSAFDGRLGRYNLIDQAASKMFEEGSVDDSDSYLHAVRDIHMCLGYSFDYQAGVIHSGFQFFCRFPSNVTRICVIIWFDRADNRAAR

SEQ ID NO: 48216 - protein, 95 aa, Zea Mays
MRFEQAIQSYAIHVLSLTYQKVPRHILAEAINIEGLALDKFLEYHAANSGWVIEKGGQSQVIVLPRNEFNHPQLKKNTADTVPFEHLTRIFPVLS

SEQ ID NO: 48217 - protein, 506 aa, Zea Mays
MAAHAVTPLTICCLRRGVPLNHSRRLLAVAAAAPESPAPTPAPSQLPLPPVPPRKGYFPKRGETVELTCEALAFKGKGVCKVAGSTFVLLCDGALPGERLIARVRRLRRGAFAEAAKLRTLEPHHDAIEAPCPLAADCGGCKTQSLAYAAQIRHKHHQVRDLLVNFGKFDPKRLESSEPDDILKPTVQCDEIFRYRNKMEFSFGTKRWVQKELKDKGEEVEVKQETNETDGYALGLHAPGFFDKVLHVQKCFLQSEPADKVLAVVQETWMDPAIGLTPYDVHKHVGFLKHLMIRTGRNISTGTPEVMVNFVTSCYKPDVLMPLVDKITKIPEVADVLYKLIEDSAGLKGDGSEIVLDLFCGTGTIGLTFARRAKHIYGYEVVPEAIEDARKNAKLNGINNATFVQGDLNKINESFGKEFPKPDIIISDPNRPGMHMKLIKWLLEVKAPRIVYVSCNPATCARDLDYLCHGVEEKDLRGFYELKSVIPVDMFPHTPHIECVCLLELR

SEQ ID NO: 48218 - protein, 270 aa, Zea Mays
MAAHAVTPLTICCLRRGVPLNHSRRLLAVAAAAPESPAPTPAPSQLPLPPVPPRKGYFPKRGETVELTCEALAFKGKGVCKVAGSTFVLLCDGALPGERLIARVRRLRRGAFAEAAKLRTLEPHHDAIEAPCPLAADCGGCKTQSLAYAAQIRHKHHQVRDLLVNFGKFDPKRLESSEPDDILKPTVQCDEIFRYRNKMEFSFGTKRWVQKELKDKGEEVEVKQETNETDGYALGLHAPGFFDKVLHVQKCFLQSEPADKLFKKPGWILP

SEQ ID NO: 48219 - protein, 381 aa, Zea Mays
MAGGQAPEASPGRYQRRRDEIDDDDCADVLGIDVRGPDADPFDIPAKRAPVERLRRWRQAALVLNASRRFRYTLDLKKEEEKEQIRRKIRAHAQVIRAALLFKEAGEKQTHETELPEILPRDFGIGEEQLTVMTRDHNYSALQEYGGVIGLANLLKTNLEKGIHGDEADLSCRANAFGPNRYPRKKGRSFWVFLWEACQDMTLVILIIAAVISLVLGIATEGTKEGWYDGTSIAFAVFLVIVVTAVSDYKQSLQFQHLNEEKQNIQVEVIRGGRRIQVSIFDIVVGDIVALKIGDQVSADGVVISGHSLAIDESSMTGESKIVMKDQKSPFLMAGSKVADGYGTMLVSDCILPPYSLLVFCFVLETTCFLKKKKLGSVYIV

SEQ ID NO: 48220 - protein, 351 aa, Zea Mays
MADGGAGAYREFKALAEAADRKFARARDLPLYGGGDHHSRKAFKAYTRLWRLQQERRRELVAAGLRRWEIGEVASRIGQLYYARYLRAAEPRSLVGAYVFYEAIYSRGYFGAAAAAVGTDGGGGGVSRHQALLIRYKELRFIARFLVVAMLMRRAEAVDHLAARLRALVEETKAAYPKTNFKEWKQVLQELGRFLKADGAYKGSRSLRYDNLFDSYPSNLVSIARFHSKRVLKLKEAVLTSYRRNEIKFTELTLDTFRMLQCLEWEPTGSYQIAAKELTENGTVSDQSGPSGLIDIQLSTEISDGSLPSNPQKAIIYHPTAAHLLAVLATICEELSQDSILLIYISASEFC

SEQ ID NO: 48221 - protein, 389 aa, Zea Mays
MELEAIGKRLRISSGSSSLAGDRLTSLPDCLIHHIMSFLKARQVVQTCVLSTRWRHLWRSVPCLDIDQDEFKAAGSNRITEKEQEDFEDFTDHLLIPNNISIALLDTLRLHVSDDEYYHRGASVRWIRHGIKYSAQNPGIMHKESNLAFWRLKKLHLSGVYLDGSFMKHVSSGCPYLEVLELKDCPCTFEEVTSHTLKNLILENCGCNELSGITSPTLKSLTIIASGYYHINRLVLKAPAVAYLLLDVNAYFVKRDVSFDEMSSLAKASIYLRDSVGSGLSKDQFKLLCSVSNVTTLVLSGFQTMHSPDLEKLTLGRCKFSKDPKKKKGKARLSKGCLNQFNVRCKNLKLTEIIYEDDDAKKVVELLWSMSGDLPKNYIKLTKVDPDHP

SEQ ID NO: 48222 - protein, 299 aa, Zea Mays
MEAAAVGDGAPAGRSHQGACRRPPPSSSTTCRTASASTSPARPSNGSSTPPPPPSRSSRSSTRPPSPPFPRRAARMPPAMISSSSRGASPRAAARRRRARGPSSRSRAPTAVGAPPRRTGWSPWPAPRRRPRPSPSCSPGWRRPAPLAPANIGSRGISSPTSPPAPAPTASALRTTGKARTGCRRRRTPFLAPPPPSLAMRLRSAWCRHSLSTSPSPSRCLTSRSVRTLRRRPRLAPGTTASVFPCPRVSWVPIGGPFSPIRSRTSQAIITSSSRGWTARSCLATPTPRRRCIPHPRTS

SEQ ID NO: 48223 - protein, 413 aa, Zea Mays
MIRDLNVAERTEDIGFYAGFVGASFMFGRCLTSTAWGIAADRIGRKPVVVFGISSVVVFNTLFGLSVNYWMAIATRFLLGALNGLLGPIKAYAIEVCRPEHEALALSLVSTAWGIGLIIGPALGGYLALPAENFPAIFSPDSVFGRFPYFLPCLCTSVFAAAVLVSCIWMPETLHRHKVHESTSQDVEKVQESGIRKKKSLFRNWPLMSSIIVYCIFSFHDMAYTEVFSLWAESDKKYGGLSLSSEDVGQVLAVTGASLLVYQLFLYPRINKVLGPIKSSRIAAILCIPILFAYPYMTYISEPGLSIILNIASAIKNNLAVTIITGTFILQNNAVPQDQRGAANGLSMTGMSFFKALAPAGAGIVFSWAQKRQHAFFFPGDQMVFFLLNVVELVGLILTFKPFLAVPERCDSR

SEQ ID NO: 48224 - protein, 84 aa, Zea Mays
MTLMKDLVPQDYHTKMIHVLVLKCKLMKEIWRYLDIRMLTNLLMSMQVWLMNFGCNEKRKWKSMRQATMKMKLDGNMLVTTKNQ

SEQ ID NO: 48225 - protein, 466 aa, Zea Mays
MEQSNFIMGLLIPGPECPGKDFDVFMEQLIEELLELWKGVTTWDALSGNNFELHAAVIWCIHDYPALSTLSGRVTKGYYACVHCDKNPCSKRIRNKICYVYHRRFLPKDHLWRRNKTFDGHSEQREKPEEFTIDELMQQLERVKDVRPGKHTKSKKRKREVEGQCWKRRSCLWDLPYWSSLKLRHNLDVMHIEKNICEYFLGTFLGIVGKTKDTINARLDLEDMGIRRHLHLKHNGDSYNFPHAPYTMNKTQKVAFCDFLRSVKFPDGYVSNLATCFSTDGCNLQALKTHDCHFLLQRILPAAIRGIMSKDIYEALAELGIFFQHICAKTLKLDVLQRMKVEIPIILCKLEKIFPPFFDVMLHLAIHLPDEAILRGPVQYGWMYPIERRLYTLKRFVRNMARPEGSIAEAYVANECLTACSRYFDDVDTRHNREGRNKERVDLSRGKFYVFQHGVELLGVPRITYL

SEQ ID NO: 48226 - protein, 482 aa, Zea Mays
MWQIFIIPYNFPPWECMEQSNFIMGLLIPGPECPGKDFDVFMEQLIEELLELWKGVTTWDALSGNNFELHAAVIWCIHDYPALSTLSGRVTKGYYACVHCDKNPCSKRIRNKICYVYHRRFLPKDHLWRRNKTFDGHSEQREKPEEFTIDELMQQLERVKDVRPGKHTKSKKRKREVEGQCWKRRSCLWDLPYWSSLKLRHNLDVMHIEKNICEYFLGTFLGIVGKTKDTINARLDLEDMGIRRHLHLKHNGDSYNFPHAPYTMNKTQKVAFCDFLRSVKFPDGYVSNLATCFSTDGCNLQALKTHDCHFLLQRILPAAIRGIMSKDIYEALAELGIFFQHICAKTLKLDVLQRMKVEIPIILCKLEKIFPPFFDVMLHLAIHLPDEAILRGPVQYGWMYPIERRLYTLKRFVRNMARPEGSIAEAYVANECLTACSRYFDDVDTRHNREGRNKERVDLSRGKFYVFQHGVELLGVPRITYL

SEQ ID NO: 48227 - protein, 210 aa, Zea Mays
MAAWAVPALAAAAWALRAAVWACLAASAMLVAEAAYMGLASLASAAAMLWRRPDARYRWEPMPGGCDVEAATGADFPMVLVQIPMYNEREVYKLSIDAACALTWPPDRIVIQVLDDSTDPIIKELVELECQDWATKKINIKYEVRNNRKGYKAGALKKGMEHIYAKQCEFVAIFDADFQPEPDFLLKTIPFLVHNPKIALVQARWEFGCS

SEQ ID NO: 48228 - protein, 381 aa, Zea Mays
MAMRAAARQAILSPPLGPRSPRPFLCGCSLSIAPRLEPCRAASSTTAPAAGKHLPPLFSVAPMMDWTDNHYRTLARLISRHAWLYTEMVVAETIVHQKDNLDRFLAFPEEQHPIVLQIGGSNLENLAKATELANDYSYDEINLNCGCPSGKVAGHGCFGARLMFDPEFVGDAMSTIAANCDVPVSVKCRIGVDDRDSYEELCEFVDKVISKSPTRHFIIHARKALLSGLSPAENRKIPPLKYEYYFALLRDFPEIKFTLNGGITNVSASMRQGAHGVMVGRAAYNNPWNMLGHVDGEIYGKQTRYISRRQILENYQAYGDSIIDQYGPSRPNVRQLVKNLATAYGNAKLTLHCVIARSATHPFCKKKNSAGEGKTTISVLY

SEQ ID NO: 48229 - protein, 375 aa, Zea Mays
MAMRAAARQAILSPPLGPRSPRPFLCGCSLSIAPRLEPCRAASSTTAPAAGKHLPPLFSVAPMMDWTDNHYRTLARLISRHAWLYTEMVVAETIVHQKDNLDRFLAFPEEQHPIVLQIGGSNLENLAKATELANDYSYDEINLNCGCPSGKVAGHGCFGARLMFDPEFVGDAMSTIAANCDVPVSVKCRIGVDDRDSYEELCEFVDKVISKSPTRHFIIHARKALLSGLSPAENRKIPPLKYEYYFALLRDFPEIKFTLNGGITNVSQVSASMRQGAHGVMVGRAAYNNPWNMLGHVDGEIYGKQTRYISRRQILENYQAYGDSIIDQYGPSRPNVRQLVKPLLNLFHSEPGNSLWKRKADSALRHCKECYTSFL

SEQ ID NO: 48230 - protein, 1574 aa, Zea Mays
MEETKDTLEYNNESSSKVQEICQVNAAREEFSSGPLLVTVAPSDEICTVQSVAVVIPGSESGDDANQSSDKSKQPQEHSVTQTVDDHLSETRSGKLDQSTCITGLVSDNCVVSEDKTLMSEGEGDFVGPKSPNGLSISFIVADREEQSPVSGEQRVSLEANANEPEEKNLANVTSTDLHTKSLQHDIDRIAKETDKDVLSLVFPIEEHEEKYGVSPIAVEKCVCREASACESARKPLTVIFSNNLHTKHLQHDCDVLIKETGEEVLAQENCNDQPVPAQTDQEIKLNDELADPDVLAQENCNDQPVPAQTDLEIKLHDELADPDHEEQSPVSGERRVSLEANANEPEEKNLANVISIDLHTKSLQHDNGRIAEETDKDVLSFVFPIEEHEEKYAVSPIAVEKSFRQEASAIESAGKPLTVIFSNDLHTKHLQHDCDVLIKETGEEVLAQENCNDQPVPAQTDLEIKLNDELADPDVLAQENCNDQPVPANEPEEKNLANVISTDLHTKTLQHDNDRIAEETDKDVSSLVFPIEEHEEKYAVSPIAVEKSVSREASACESAGKPLTVIFSNDLHTKHLQHDCDVLIKETGEVLAQENCNDQPVLAQTDLETKLNDELADLAMESGCSITERNEGLVAHNLDQEGFLEATPECKQECGLPEETVISSKETGSLLCADQSPIGLESLFSQESIVESVGHCALASATTHTENGFDDSKDCHNKSALENVHVPEPCSHNDTKGGIFKNVDCMHTSQRDDRMEGVPEANTDEEHVLSAFLLDANHLNVVINSEEVVCEGEDSKELLHSEDCKASSEKTDVNDGNVYGISDAVVRCALHAPADDNYEIFLGPNTDVPRQVYNDGCSDVKEDRFASKPWTIDIIEDASVKERSNLKDWQLDSKLEGTEIVESGLYFNKDIGNILHSGSIGEITPSGSGLSKDSSVDYRGEVLDGFSMEASLERSSTRGEQNGCRLDAIENPSITLATSGYKHEGALSEEAVYTKKNYAGTCLSNPRELIMELQSHFSKENINESDPHDSLVFPTAENSADEQLVKVHHGSNLSQLGLTDLLDGPIGCSNTDVLCQCDNHKNQSNEDKVEEVEAVSAAKYIESEVVLLPSQERSNLNNEQLNTKLESPNIMGSCLNCDNDVCNTSDNGSVFVIGKRTPSASGLPEDYPKDSDLQQPVLDSFSVVSSFQDNISGKKTVSGVAGSEILSLSLATPDYKHEDGFSEEAVCRTKNYTGTSSVDPRHLDMEGHSIYSEGGTEKSNLQDNLAFLSAESGKDEPIICHVEKLVDAHASSDTYQGPCQDLGRHEEQESCMSIPMQAKESGGVLRSSHTKGSVTAAQIDLAGDAHLIVSDNAAAKQVFSEEKEETKSISSSDIDILHEKSYSSGHDDHAACAAETQFYHPQKASISDGLHLGPSSLQVESLDALDSDILYVNTGVLEQHHKEGYYEPSVYQITSGICTMSEAEPFEVLETGKDVKTPSKLDEQLNPGLDGDEAEKHSLDCGTDTSPVMSKRTLSSPGSGPCQQYVNESTTSTQSTDNHPNDLPAPRSPEQSACFQNDNDSGSAFVKAAGEEV

SEQ ID NO: 48231 - protein, 1079 aa, Zea Mays
MKLNDELADPEVLAQENCNDQPVLAQTDLETKLNDELADLAMESGCSITERNEGLVAHNLDQEGFLEATPECKQECGLPEETVISSKETGSLLCADQSPIGLESLFSQESIVESVGHCALASATTHTENGFDDSKDCHNKSALENVHVPEPCSHNDTKGGIFKNVDCMHTSQRDDRMEGVPEANTDEEHVLSAFLLDANHLNVVINSEEVVCEGEDSKELLHSEDCKASSEKTDVNDGNVYGISDAVVRCALHAPADDNYEIFLGPNTDVPRQVYNDGCSDVKEDRFASKPWTIDIIEDASVKERSNLKDWQLDSKLEGTEIVESGLYFNKDIGNILHSGSIGEITPSGSGLSKDSSVDYRGEVLDGFSMEASLERSSTRGEQNGCRLDAIENPSITLATSGYKHEGALSEEAVYTKKNYAGTCLSNPRELIMELQSHFSKENINESDPHDSLVFPTAENSADEQLVKVHHGSNLSQLGLTDLLDGPIGCSNTDVLCQCDNHKNQSNEDKVEEVEAVSAAKYIESEVVLLPSQERSNLNNEQLNTKLESPNIMGSCLNCDNDVCNTSDNGSVFVIGKRTPSASGLPEDYPKDSDLQQPVLDSFSVVSSFQDNISGKKTVSGVAGSEILSLSLATPDYKHEDGFSEEAVCRTKNYTGTSSVDPRHLDMEGHSIYSEGGTEKSNLQDNLAFLSAESGKDEPIICHVEKLVDAHASSDTYQGPCQDLGRHEEQESCMSIPMQAKESGGVLRSSHTKGSVTAAQIDLAGDAHLIVSDNAAAKQVFSEEKEETKSISSSDIDILHEKSYSSGHDDHAACAAETQFYHPQKASISDGLHLGPSSLQVESLDALDSDILYVNTGVLEQHHKEGYYEPSVYQITSGICTMSEAEPFEVLETGKDVKTPSKLDEQLNPGLDGDEAEKHSLDCGTDTSPVMSKRTLSSPGSGPCQQYVNESTTSTQSTDNHPNDLPAPRSPEQSACFQNDNDSGSVGICQSSRRRGIDELCGKLQSFKVSSAVKGSYVAMGAPRPKPGDSTSRSAAALLRNIENTTAVKAGRPPVKPNADGKDSSRRALQPISGRPDSR

SEQ ID NO: 48232 - protein, 2344 aa, Zea Mays
MDLAGMKRRELQALCKRHGLPAGGTNADLVGRLDAVLSGPAVVEEEVAGVPARKGCLKQTGGGATEAKKVTFGAEVGKARRLRSRVIWSPVVAKTRGKSARADVGADVPVRRSRRNSFNPAEAEEAGEAVAVDRKPKRKNQENDEGVAVIAQARVTRRSNLEWSATVLPPAVEKKRGRQNAAESDVQKSALVEVTARTTRSRSIVPVVVPPTVVENKRRKTGDPQTTVELTMLSDVPRSDFPATRSLRNKIVHVNNSVVDETHTTRQLENKMRPSTRRHQQVASSPEDKGQKIPATSKSPLLRWSRRNYSEANSANSVNIKLAKDSSTAQPLAHHNSHSEDLEKQPAVKEPIKRSTRKSIALAALEKEKDVIEGKNPEAHVRRSTRKSVVQVKDTKSIVEETQYANSEDVAKQPATKGPARGLRRKSVITELHEKEKSLIAEKNMETDEAILTRKPVIPVKNIKAVGEGIQIGKGKDVDKQFVVKQPTRRSSRKSVLPDMLENNSGLLAPKMNAEMNVRRSTRKSVLPDMHNEKQDHHKMARNENLQSGKYQDGEKQQKVKDSIRQSRRSIATVLLEGQNNDEGKKFKNPTRRTTHKSHALNAVEEVSMDHIEVGEEGLKLRKRSRFLLEISSSANVSWKHQNAQISNEKDNTEGSQQASNCTTSKRRSSKKRRTTAPEEVMPFKVANDDIVIMEETKDTLEYNNESSSKVQEICQVNAAREEFSSGPLLVTVAPSDEICTVQSVAVVIPGSESGDDANQSSDKSKQPQEHSVTQTVDDHLSETRSGKLDQSTCITGLVSDNCVVSEDKTLMSEGEGDFVGPKSPNGLSISFIVADREEQSPVSGEQRVSLEANANEPEEKNLANVTSTDLHTKSLQHDIDRIAKETDKDVLSLVFPIEEHEEKYGVSPIAVEKCVCREASACESARKPLTVIFSNNLHTKHLQHDCDVLIKETGEEVLAQENCNDQPVPAQTDQEIKLNDELADPDVLAQENCNDQPVPAQTDLEIKLHDELADPDHEEQSPVSGERRVSLEANANEPEEKNLANVISIDLHTKSLQHDNGRIAEETDKDVLSFVFPIEEHEEKYAVSPIAVEKSFRQEASAIESAGKPLTVIFSNDLHTKHLQHDCDVLIKETGEEVLAQENCNDQPVPAQTDLEIKLNDELADPDVLAQENCNDQPVPANEPEEKNLANVISTDLHTKTLQHDNDRIAEETDKDVSSLVFPIEEHEEKYAVSPIAVEKSVSREASACESAGKPLTVIFSNDLHTKHLQHDCDVLIKETGEDVLAQENCNDQPVPAQTDLEMKLNDELADPEVLAQENCNDQPVLAQTDLETKLNDELADLAMESGCSITERNEGLVAHNLDQEGFLEATPECKQECGLPEETVISSKETGSLLCADQSPIGLESLFSQESIVESVGHCALASATTHTENGFDDSKDCHNKSALENVHVPEPCSHNDTKGGIFKNVDCMHTSQRDDRMEGVPEANTDEEHVLSAFLLDANHLNVVINSEEVVCEGEDSKELLHSEDCKASSEKTDVNDGNVYGISDAVVRCALHAPADDNYEIFLGPNTDVPRQVYNDGCSDVKEDRFASKPWTIDIIEDASVKERSNLKDWQLDSKLEGTEIVESGLYFNKDIGNILHSGSIGEITPSGSGLSKDSSVDYRGEVLDGFSMEASLERSSTRGEQNGCRLDAIENPSITLATSGYKHEGALSEEAVYTKKNYAGTCLSNPRELIMELQSHFSKENINESDPHDSLVFPTAENSADEQLVKVHHGSNLSQLGLTDLLDGPIGCSNTDVLCQCDNHKNQSNEDKVEEVEAVSAAKYIESEVVLLPSQERSNLNNEQLNTKLESPNIMGSCLNCDNDVCNTSDNGSVFVIGKRTPSASGLPEDYPKDSDLQQPVLDSFSVVSSFQDNISGKKTVSGVAGSEILSLSLATPDYKHEDGFSEEAVCRTKNYTGTSSVDPRHLDMEGHSIYSEGDTYQGPCQDLGRHEEQESCMSIPMQAKESGGVLRSSHTKGSVTAAQIDLAGDAHLIVSDNAAAKQVFSEEKEETKSISSSDIDILHEKSYSSGHDDHAACAAETQFYHPQKASISDGLHLGPSSLQVESLDALDSDILYVNTGVLEQHHKEGYYEPSVYQITSGICTMSEAEPFEVLETGKDVKTPSKLDEQLNPGLDGDEAEKHSLDCGTDTSPVMSKRTLSSPGSGPCQQYVNESTTSTQSTDNHPNDLPAPRSPEQSACFQNDNDSGSVGICQSSRRRGIDELCGKLQSFKVSSAVKGSYVAMGAPRPKPGDSTSRSAAALLRNIENTTAVKAGRPPVKPNADGKDSSRRALQPISGRPDSR

SEQ ID NO: 48233 - protein, 1214 aa, Zea Mays
MYSFPFSEVLAQENCNDQPVPAQTDLEIKLNDELADPDVLAQENCNDQPVPANEPEEKNLANVISTDLHTKTLQHDNDRIAEETDKDVSSLVFPIEEHEEKYAVSPIAVEKSVSREASACESAGKPLTVIFSNDLHTKHLQHDCDVLIKETGEDVLAQENCNDQPVPAQTDLEMKLNDELADPEVLAQENCNDQPVLAQTDLETKLNDELADLAMESGCSITERNEGLVAHNLDQEGFLEATPECKQECGLPEETVISSKETGSLLCADQSPIGLESLFSQESIVESVGHCALASATTHTENGFDDSKDCHNKSALENVHVPEPCSHNDTKGGIFKNVDCMHTSQRDDRMEGVPEANTDEEHVLSAFLLDANHLNVVINSEEVVCEGEDSKELLHSEDCKASSEKTDVNDGNVYGISDAVVRCALHAPADDNYEIFLGPNTDVPRQVYNDGCSDVKEDRFASKPWTIDIIEDASVKERSNLKDWQLDSKLEGTEIVESGLYFNKDIGNILHSGSIGEITPSGSGLSKDSSVDYRGEVLDGFSMEASLERSSTRGEQNGCRLDAIENPSITLATSGYKHEGALSEEAVYTKKNYAGTCLSNPRELIMELQSHFSKENINESDPHDSLVFPTAENSADEQLVKVHHGSNLSQLGLTDLLDGPIGCSNTDVLCQCDNHKNQSNEDKVEEVEAVSAAKYIESEVVLLPSQERSNLNNEQLNTKLESPNIMGSCLNCDNDVCNTSDNGSVFVIGKRTPSASGLPEDYPKDSDLQQPVLDSFSVVSSFQDNISGKKTVSGVAGSEILSLSLATPDYKHEDGFSEEAVCRTKNYTGTSSVDPRHLDMEGHSIYSEGDTYQGPCQDLGRHEEQESCMSIPMQAKESGGVLRSSHTKGSVTAAQIDLAGDAHLIVSDNAAAKQVFSEEKEETKSISSSDIDILHEKSYSSGHDDHAACAAETQFYHPQKASISDGLHLGPSSLQVESLDALDSDILYVNTGVLEQHHKEGYYEPSVYQITSGICTMSEAEPFEVLETGKDVKTPSKLDEQLNPGLDGDEAEKHSLDCGTDTSPVMSKRTLSSPGSGPCQQYVNESTTSTQSTDNHPNDLPAPRSPEQSACFQNDNDSGSVGICQSSRRRGIDELCGKLQSFKVSSAVKGSYVAMGAPRPKPGDSTSRSAAALLRNIENTTAVKAGRPPVKPNADGKDSSRRALQPISGRPDSR

SEQ ID NO: 48234 - protein, 215 aa, Zea Mays
MMRALEANPTNLEVLLALGVSHTNELEQGEALRYLYRWLQNHPKYGGLVPPQSTDSPYGPDVVRLFNDAAQMSPEDADVHVVLGVLYNLSREYDKAITSFKTAVQLKPQDYSLWNKLGATQANSIQSADAILAYQQALDLKPNYVRAWANMGISYANQGLYEDSIRYYVRAVTMNPKADNAWQYLRISLGNASRADMIAACDARNLDALQKEFPL

SEQ ID NO: 48235 - protein, 733 aa, Zea Mays
MALRHLVTGQNNCAPDGASSSNPLNALANAFLGQSSKAQSIKELPGSVSVPSTSGFSAPAPLSNIPGSENEFKQDQRPFVQGSDFIHGGPANDWIKSFRPPGVPELGGIEAHFPDFEQIYNNAGTTFQPPLDGPPQRVLSGVLHSFLTSGPAGVPFQPLPVPAALGLSESDKQCIRDRSCIMARHIFSDQPEEYIQAQVNTLLHSLDIDNRMRGPMHGQYPELQEYWNQSQSSMGPALMHNTADKWITEFGKQNNNPENWAKSFEQQYGPNGWASEFEQSQMAMGQMGGVNMANLAAMEQSRMLAQTLASNNDPKFQNSKFFQFVSKMSRGELIIEDNQVKEGLASQSSGWADEFQTQYKANANSWADQFAREELSQGADKWVSEFSSQHNQGALNESWVDEFSKLNVTDEWAEEFSGGGFGESSADPWVDEFQEHLSSFKQSSGASRGVYVYSENNPYVGHPNPMQEGQELFRKGLLSEAVLALEAEVLKNPDNAEGWRLLGITHAENDDDQQAIAAMMRALEANPTNLEVLLALGVSHTNELEQGEALRYLYRWLQNHPKYGGLVPPQSTDSPYGPDVVRLFNDAAQMSPEDADVHVVLGVLYNLSREYDKAITSFKTAVQLKPQDYSLWNKLGATQANSIQSADAILAYQQALDLKPNYVRAWANMGISYANQGLYEDSIRYYVRAVTMNPKADNAWQYLRISLGNASRADMIAACDARNLDALQKEFPL

SEQ ID NO: 48236 - protein, 725 aa, Zea Mays
MALRHLVTGQNNCAPDGASSSNPLNALANAFLGQSSKAQSIKELPGSVSVPSTSGFSAPAPLSNIPGSENEFKQDQRPFVQGSDFIHGGPANDWIKSFRPPGVPELGGIEAHFPDFEQIYNNAGTTFQPPLDGPPQRVLSGVLHSFLTSGPAGVPFQPLPVPAALGLSESDKQCIRDRSCIMARHIFSDQPEEYIQAQVNTLLHSLDIDNRMRGPMHGQYPELQEYWNQSQSSMGPALMHNTADKWITEFGKQNNNPENWAKSFEQQYGPNGWASEFEQHQSQMAMGQMGGVNMANLAAMEQSRMLAQTLASNNDPKFQMSRGELIIEDNQVKEGLASQSSGWADEFQTQYKANANSWADQFAREELSQGADKWVSEFSSQHNQGALNESWVDEFSKLNVTDEWAEEFSGGGFGESSADPWVDEFQEHLSSFKQSSGASRGVYVYSENNPYVGHPNPMQEGQELFRKGLLSEAVLALEAEVLKNPDNAEGWRLLGITHAENDDDQQAIAAMMRALEANPTNLEVLLALGVSHTNELEQGEALRYLYRWLQNHPKYGGLVPPQSTDSPYGPDVVRLFNDAAQMSPEDADVHVVLGVLYNLSREYDKAITSFKTAVQLKPQDYSLWNKLGATQANSIQSADAILAYQQALDLKPNYVRAWANMGISYANQGLYEDSIRYYVRAVTMNPKADNAWQYLRISLGNASRADMIAACDARNLDALQKEFPL

SEQ ID NO: 48237 - protein, 89 aa, Zea Mays
MYLPRPTKETRKRKMLRLLPLQHCHPQQVHLPRLQILLLHLRPNRFSHLYPKMSSGICTNGFWKRSGRSNHATPLRRRRSTRRKLFSRR

SEQ ID NO: 48238 - protein, 586 aa, Zea Mays
MPASSVSGGSGPGGVSPDAIIEWLQDEMGYPSAPPAPDQLRKICRGNMIPVWSFLLRRVRSERTVATARRNILVHGVAARRAREGGAMGAGAGDAAAREAEARERDLAAEEAERLRGIVRRQRKELRARIAEVAREEAERKRVLGERSNARHKQVMLQAYEQQCDEAHKIFAEYQRRLHQFVNQARDVRRSSIGVAGATGALVDMQLQSDRDDLYPSTIKSNRLPEDLLETAGERSIRKACETLAADMIETIRSSFPAFEGCGINSSCQLDAEKLGIDLVGEIPTYVKLVALDSLKNPFMLLQSIITYTSRMKTLIHRETDKIDIRADAELLRYKYENEQVIDAASTDASSPLPYQVYGNGKTGSQLSTRGTYDQLLERQKEHVQQFLATEDALNKAAEAKALSQKLLQRLYGTADMAGNKKLPTGNTTQNVTNSRHLELDVWAKEREVAGLKASLSTLTSEVQRLYKLCAEWKEAEDSLKKKWKKIEEFDARRSELEFIYSALQRANMDSSAFWEQQPLSARGYASTTIIPACHAVVDMSTNSRDLIERELAAFSQSLDNSLCRLPATPQFHQVQKAQILAWLQY

SEQ ID NO: 48239 - protein, 374 aa, Zea Mays
MFGGRLKSKVKCLRCYHESERYENIMDLTLEIHGWVESLQDALTQFTAPEDLDGDNMYKCGSCAAYVKARKQLSVHEVPNILTVVLKRFQSGKYGKINKCVTFPDMLDMVPFVTGSGDNPPLYFLYAVVVHVDTENASFSGHYISYVKDMQGTWLRIDDSEVQVVSVNQVMSEGAYMLFYMRSFPRPPRIYIEKGPTVPSAKRHTSKYSKGSKHEREQTELLLSANDPAYGVYDFRPDGEGYTQDQQAELRSRDFHRADDAFADSVSADFSEATSSEWSLFTSSDESSFTTESTRDSFSVVDYGDNAGLDPISSIFGPSYAPEHHPGPPGSFAACTRLSPSNPQTRYFSESTGFVSDYSSSGIVHRGRDPGEAY

SEQ ID NO: 48240 - protein, 498 aa, Zea Mays
MCELEQYASTLRESGGPLSPSRILSNLRNIGCRLGGGTQEDAHEFLRHLVMSMQAACLDGLGGEKHVEPSLQETTLIQQMFGGRLKSKVKCLRCYHESERYENIMDLTLEIHGWVESLQDALTQFTAPEDLDGDNMYKCGSCAAYVKARKQLSVHEVPNILTVVLKRFQSGKYGKINKCVTFPDMLDMVPFVTGSGDNPPLYFLYAVVVHVDTENASFSGHYISYVKDMQGTWLRIDDSEVRFTTRPTPVQVVSVNQVMSEGAYMLFYMRSFPRPPRIYIEKGPTVPSAKRHTSKYSKGSKHEREQTELLLSANDPAYGVYDFRPDGEGYTQDQQAELRSRDFHRADDAFADSVSADFSEATSSEWSLFTSSDESSFTTESTRDSFSVVDYGDNAGLDPISSIFGPSYAPEHHPGPPGSFAACTRLSPSNPQTRYFSESTGFVSDYSSSGIVHRGRDPGRAYTCSAEPLASAAAAHQHQRYALSGRDGLVQTSGFCQM

SEQ ID NO: 48241 - protein, 952 aa, Zea Mays
MLQPREADLPALFLVFIVLPVVAYFLLGRWHDAASKKARVSVLAQRAAEEAYREETMACPDIILPGSSLRTMPYFRPMPALRQEYHECATCHAPAKTRCSRCKAVRYCSGKCQIVHWRQGHKETCQKWLGSGSSSFGGSSTEATEQMPFLTNLNSPLPGGDIHLRDLNFDTLSEPSFPTTDGYNLDTDPFLADRSNMNKSNQGIHMSENGAVGVSFEKNNYNADDEIHSPENLSRNKVSNNYFGSDAISGNGDAIYPAKSNAQQPSSCAPDMRKQPKASITVYQPDIGVYLTSDMVSSCEGSYASASEPLQRSLSSGRTIGKANAVNKRPPYPSSKVVSAQKPQDRVSTSYQNDGHEKNPCNKNDQRSTPKCESSQSTSSNLQKFGASKVEVLKKPSKFLKTSLVGLINDNKRNKVLFPYEDLVKFFQYEARGISPRGLFNCGNSCYANAVLQCLMCTKPLMIYLLLRLHSKDCSSKKWCLMCELEQYASTLRESGGPLSPSRILSNLRNIGCRLGGGTQEDAHEFLRHLVMSMQAACLDGLGGEKHVEPSLQETTLIQQMFGGRLKSKVKCLRCYHESERYENIMDLTLEIHGWVESLQDALTQFTAPEDLDGDNMYKCGSCAAYVKARKQLSVHEVPNILTVVLKRFQSGKYGKINKCVTFPDMLDMVPFVTGSGDNPPLYFLYAVVVHVDTENASFSGHYISYVKDMQGTWLRIDDSEVQVVSVNQVMSEGAYMLFYMRSFPRPPRIYIEKGPTVPSAKRHTSKYSKGSKHEREQTELLLSANDPAYGVYDFRPDGEGYTQDQQAELRSRDFHRADDAFADSVSADFSEATSSEWSLFTSSDESSFTTESTRDSFSVVDYGDNAGLDPISSIFGPSYAPEHHPGPPGSFAACTRLSPSNPQTRYFSESTGFVSDYSSSGIVHRGRDPGRAYTCSAEPLASAAAAHQHQR

SEQ ID NO: 48242 - protein, 258 aa, Zea Mays
MASDPDVSGGEQAEPPDDVDDPDVDEVDPTGRYFRYKEVVGSGAFKTVYKGFDVVEGIEVAWAKVEITGRTMGSPKELQRLKTEIQLLRSLHHKHILKLYASWVDNKKRAVNIITELFTSGNLREYRTKHKKVDMKAMRRWAKQILTGLAYLHSQKPPIIHRDLKCDNIFINGNHGKVKIGDFGLAMVMQQRKTQSIQGTLEFMAPELFGENYNELVDIYSFGMCMLEMVTGECPYSECQGFVQIYKKISEVSDLSPR

SEQ ID NO: 48243 - protein, 498 aa, Zea Mays
MANDNQSIAPRAMILNRKYRTLVSSWIEPLQEEADVGFEIDYVARYIEEGGLTGERKRWVPRRGKTPLDPDEFGFAYSNPIETSFKQRCFEELKLYHRKLLITLRNEGPGILGDVSEEDVRRVIERLKKLVVGPKKNVVKPKAASKMVVSELKTELEAQGLPTDGTRQVLYQRVQKARRINRSRGVPLWVPPVEDEEEVDEDLDELISRIKPEDGNTEFWKRRFLGETRNYLCEEDSKEDGQDLDDELEDDDDNDDDEDDDESVKEAEEDEIDDEEVVEQTENQVGDDTKDKPAKEPNHHLQMIGVQLLKDIERTPVSSKKLKRMPEIDDDEDWFPEDPIEAFKVMREERMFDVSDMYTTADAWGWTWEREIKNKMPRKWSQEWEVELAIKIMHKVIELGGTPTIGDCAIILRAAMRAPLPSAFIPILQTTHSLGYKFGSPLYDEVVLLCLDLEEIDAAIAVVAEMETCGVKVPDETLDKVLASKRSGNSALPPPTEE

SEQ ID NO: 48244 - protein, 473 aa, Zea Mays
MQTSETTGTASPPAVEPEAEDKVEEGARANEEAAAKVGGDDEDDWESEHEGRRGRRQRCRRGGAAGDSAVAMVKRELLTRCLTCPLCDHLLRQATTISECLHTFCRKCIYKKLNDEDLDHCPVCKIDLGCTPVEKLRADHNIQDVRSKFFPFKRKKVNAEEAESPIMLPVKVKERSISSLVVNTPRVTPAALTGRRTRAVTRKAAALRGLGPIIVDPLKKDNDNPNKQTDNSSLLDSLNKIPQTRRQLLSNGDTTSHLSVKDKAGDNKDLDKSEFWKPLNCLVEAASKTKPLTSAPRPALKGDKPRKSPSSDSEHSSRTKTREPLQKSKAEVDKSDPGPIVMLRKRGRPGRKRKNPLPETNADSTATAIQARKALSPIWFSLIASFDQKGVPPLPQIPAHYLRIKDGSIPASSIQKYIVQKLSLLSESEEILNESAEKSILLMLTHKKLQAVESTWQDLEIEKAASSELADIV

SEQ ID NO: 48245 - protein, 163 aa, Zea Mays
MPRATEAASQFTPGPGRPVAMNSRSSSGGVRSESSLSLGERLCAVFFPVIAIAEAVFFAFTDCLADLCTDSGSSHSRRFGAGASSSAARNSRSNHCQPHHRPFLRRATAGGWTSPNLRQLARLADESRCCKKNRSKPTPPFALPWFLRLHLAMPFHLTLFRLN

SEQ ID NO: 48246 - protein, 161 aa, Zea Mays
MVLHQEELQLALFKTPSGENLFLDRVFYLFDEKKNGVIEFDEFIHSLSVFHPLAPIEDKIDFAFRLYDLRQTGFIEREEVKQMVIAILMESDLKLSDDLLEAIIDKTFEDADADKDGKINKEEWKEFALRHPNLLKNMTLPYLRDITTVFPSFVFNTAVED

SEQ ID NO: 48247 - protein, 232 aa, Zea Mays
MAMENTAPCGDFGKIVADLESENLVANVSAVNQASALIAGGKIPEPQLLCRLIAGLASNLEKPDHDSAIKRCVSFTLKAIRVAVIKNRMNMDSSARGEALHAIWCCFMDQGLRRIQRDSNMVRLWTVQDQLSAVKIICTFFRLSPVNISDTRCVTAFASLMLSPYSTVVCACADALLSLPPVVPGFSFAIARAYCHMLATVSPQSPLEVSSMVAMLGRLKQVSTTMVHHPGV

SEQ ID NO: 48248 - protein, 107 aa, Zea Mays
MIQMQFTWLWWHNISYMEMLLLLLPLLNSSSVKKFLLPFSKDKSGGSSGDEADCPICRSSPSIPFIALPCQHRYCYYCLRTRCSATTSYRCTRCDGAVVAIQRLGSG

SEQ ID NO: 48249 - protein, 418 aa, Zea Mays
MSTYFTGSYFSSWPINSASESYSLADGSAESYGEGSMPPSTYFMTARSDHNLNFSVHEQDSTMLPNEQLTYAGAGQIDLLPAETLSRDKLPENLLELQGLQNISNLQSNLVAPGVFQHNLTPGVFHPQLNTPGLSELPHALSSSIDSNGSEVSAFLADLNAVSSAPTLCSTFQNASSFMEPVNLEAFSIQGAQSDCVLNRTSHPNGNISDSKEFISGSLPSFASVQETNLAASGFKTQKQEQNAVCNIPTFTARNQMSVAAMQGALVPQKIPSRINDNKSEGPVSHPSDVQTQPNSAVNGVGVKPRVRARRGQATDPHSIAERLRREKISDRMKNLQDLVPNSNKGYHGQPLPQGLLDALDSEDSFVFEEEVVKLMETSITSAMQYLQSKGLCLMPVALASAISTQKGVSAAAVPPER

SEQ ID NO: 48250 - protein, 462 aa, Zea Mays
MDFSAGSYFSSWPINSASESYSLADGSAESYGEGSMPPSTYFMTARSDHNLNFSVHEQDSTMLPNEQLTYAGAGQIDLLPAETLSRDKLPENLLELQGLQNISNLQSNLVAPGVFQHNLTPGVFHPQLNTPGLSELPHALSSSIDSNGSEVSAFLADLNAVSSAPTLCSTFQNASSFMEPVNLEAFSIQGAQSDCVLNRTSHPNGNISDSKEFISGSLPSFASVQETNLAASGFKTQKQEQNAVCNIPTFTARNQMSVAAMQGALVPQKIPSRINDNKSEGPVSHPSDVQTQPNSAVNGVGVKPRVRARRGQATDPHSIAERLRREKISDRMKNLQDLVPNSNKADKASMLDEIIDYVKFLQLQVKVLSMSRVGAPGAVLPLLTESKTEGYHGQPLPQGLLDALDSEDSFVFEEEVVKLMETSITSAMQYLQSKGLCLMPVALASAISTQKGVSAAAVPPER

SEQ ID NO: 48251 - protein, 340 aa, Zea Mays
MAMMSRTRDLLMEGFEGLVRDGSFKWGLPRRGDTAMDDGGDDDGSLSVQRSSIAGLSFKANAVVARCSRILGVSTNDLQNNFDKQASDSIKQPKSYARNFLEYCCFLALAQISQVTGYLADKSFRRLSFDMMLAWEVPYSSSQLTVKAEVDSTVSSEAFTRIAPAIPTIADVVTCANLFDVLSCSSGGRLSFSVYEKYLSELDRAVKKMKTQSESSLLSNFRSQRGERILEVDGTLTTQPVLEHVGISTWPGRLILTDHALYFEALRVVTYDKPKVYELAEDLKQVVKPELTGPWGSRLFDKAVMYKSTTLTCDHRISGVSWPFSPRLLAGHYIRSTLCP

SEQ ID NO: 48252 - protein, 160 aa, Zea Mays
MCGFLVGAVFHQMLRTLPICTDLGQNRGATQELIDALPTYKFKPKRVKNWGIDHASSSEHLDEGGILGPGTKKERVVSAEDAVCCICLTKYGDDDELRELPCTHFFHVQCVDKWLKINAVCPLCKTEIGGVVRSFFGLPFGRRRVDRIAARGVASSRFSV

SEQ ID NO: 48253 - protein, 345 aa, Zea Mays
MQIREGPARRQAPSAAGALRSPMSAMMLAMFATMASFYVAGRLWQDAQNRLHLIKELDRRTGQGQSAISVDDTLKVVACRQQGKRLASLEMELAAAKHKGFVGKYTPETNGTHSGKKPLIVIGIMSSFGRKNYRDAVRKSWLPTGSMLKKLEEEKGIVVRFVVGRSANRGDTFDREIDDENRSTKDFLILDDHIESDEELPKKTKSFFANAAETFNAAFYAKVNDDIYINVDTLSAMLETHWDRPRVYIGCMKSGEVFSDLTHKWYESDWWKFGDGKSYFRHASGEMFVISRAIAQFISINKSALRTYAHDDVSVGSWMIGLAVNHVNEAKLCCSSWPSGLIRNG

SEQ ID NO: 48254 - protein, 70 aa, Zea Mays
MAALPRSPNSARLPLSLRDARWIGESMAAWQGGLSQRFLKVVSYYGLTTLPYKLVCKLVGANLRRFVCCH

SEQ ID NO: 48255 - protein, 533 aa, Zea Mays
MTGVVAGAGGGNKAAGATLRLHHYLVMAGVAAAFVLACLRYAPDPAGYGFLAVAPRPVEADAGARRDTTPPPRPSSSSSSVVIFNFGDSNSDTGGMAAVNGMNINLPEGRTFFRRPTGRLSDGRLVIDFICESLHTPFLSPYLKALGADFSNGVNFAIGGSTATPGGSPFSLDVQLHQWLYFRARSMEMINLEASHRSRRIPKGHLHHRHRAERRVCLHAPALRPSACQDPWICCSDQVHHRDAVLARGPQVLDPRHGRAGLPAAEAGHPAGRRRRRPAGRPRLPQDLQQRRQALQRAARRRLRPAPAPDGGRGARLRRHVRRQVRPGGQPHDARDRETSHGVLRLRRAAVQLQPLQGVHVGGDAAVRRGHALHQLGRRALHGGRQRHRRRQGAHRRLLHAQGHHRQTRQLHAAQRRLAGWPIDRSIVVVVILINILQAAGFIDPYPIVRRNLRLAHCRSVMWAKRCMTIDYSCPTRQELVHRPRHDRASLDEQIPWHRVTQLISSLTNTSSRTSKRKRGLELGTTEWFCGGR

SEQ ID NO: 48256 - protein, 973 aa, Zea Mays
MHRAFEEISDEEWSNHTFEPSRVLKRPNQRPSQPPPSIDSFIYNPKACSAAGTSTATVVLSDDDSDFDLGADGGSRRAAKSQRVLKRPHNGAPSRPSLPVKSSRRNPQPSNAAAAFGFSDSEDDDFDLPTSPLRTSSLRRKGKNQRPLKAPQLKPHLRAPPPPNSSSHNPKRSKFASDVKLSNSEDDDFDLTKTLSLNSSTNRQHIQKRPQHKPRLQHRQSFGSSCGNQKHSKAVATTRLSDSDDDDFNITDNDFDLPASHSRISRPRRTTSCRRLTSFAIDISEEDEEDLADDDFDYQDPRPPQQRSSGRRFVVGDDDDSDVPVALEEEDGVNWSELEKEDVDEDYNGVRSVHVEEPEGDVVGMALHKCSRISSDLRKELFGSSAQNCESYCEIDASTCGIVTQEDVNAACTREKSGFEPVLKPYQLVGVNFLLLLHRKSIGGAILADEMGLGKTVQAVTYLNLLQHLYNDPGPHLIVCPASVLENWERELRKWCPSFSIIMFHGAARTTYSKELSSLGKAGCPAPFNVLLVGYSLFERRSAQQKDDRRALKRWRWSCVLMDEAHVLKDKGSFRWRNLMAVAQHARQRLMLTGTPLQNDLHELWSLLEFMMPDIFATGDVDLKKLLNAEDRELISQIKSILGPFILRRLKSDVMQQLVPKIQHVKFVVMGTEQSEAYKNAINEYRAACQARSAKSSDGISNNVAGLIPKRQISNYFTQFRKIANHPLLIRCIYGDKDVDRIARLLYPKGAFGFECSLERAIQELKNYSDFNIHQLLLSYGDVGTKGALKDEHVFASAKCQALGELLPSLANDGHRVLIFSQWTTMLDILEWALEIIGVTYRRLDGGTAVTERQTIVDTFNNDLSIFACLLSTRAGGQGLNLVGADTVIIHDMDFNPQMDRQAEDRCHRIGQQKPVTIYRLVTKDSVDENIYEIARRKLVLDAAILHSGAELDNSTDVPEKTMGEILASLLLV

SEQ ID NO: 48257 - protein, 434 aa, Zea Mays
MNPYFLGFILPFVASLLLTKRKSEKKRGVPVNVGGEPGCAIRNHRFERPVKTRWEGISTLAELFEQSCKQFASTPLFGTRKLIAREMVVAADGRSFEKLHLGNYEWRSYADAFKTVCNFASGLLRIGHLKDERVAIFADTRAEWQIALQACFRQNIAVVTIYASLGEGALCHSLNETEVTTVVCGRKEFKKLIDISGQLDTVKHVIYIDEEGISVEVSLAENCTSWTVKSFEEVESIGLQRPVEANLPLPSDTAVIMYTSGSTGMPKGVMMSHQNVLAVVSAVMTIVPGLGKKDVYLAYLPLAHILELAAEAIITGVGASIGYGSPLTLTDTSNKIKKGTQGDASVLKPTLMTAVPAILDRVRDGVRKNVDAKGGLAKRLFDIAYSRRLAAVNGSWLGAWGLEKLLWDMLVFRKSMMKHLLVALVPLCLVHTLS

SEQ ID NO: 48258 - protein, 696 aa, Zea Mays
MNPYFLGFILPFVASLLLTKRKSEKKRGVPVNVGGEPGCAIRNHRFERPVKTRWEGISTLAELFEQSCKQFASTPLFGTRKLIAREMVVAADGRSFEKLHLGNYEWRSYADAFKTVCNFASGLLRIGHLKDERVAIFADTRAEWQIALQACFRQNIAVVTIYASLGEGALCHSLNETEVTTVVCGRKEFKKLIDISGQLDTVKHVIYIDEEGISVEVSLAENCTSWTVKSFEEVESIGLQRPVEANLPLPSDTAVIMYTSGSTGMPKGVMMSHQNVLAVVSAVMTIVPGLGKKDVYLAYLPLAHILELAAEAIITGVGASIGYGSPLTLTDTSNKIKKGTQGDASVLKPTLMTAVPAILDRVRDGVRKNVDAKGGLAKRLFDIAYSRRLAAVNGSWLGAWGLEKLLWDMLVFRKVRAILGGRIRFILAGGAPLSGETQRFINICLGAPISQGYGLTETCAGGTFSEYDETSVGRVGPPLPCSYIKLIDWAEGGYLTTDSPMPRGEIVIGGPNVTKGYFKNEAKTNEVYKVDERGMRWFYSGDIGRLHPDGCLEIIDRKKDIVKLQHGEYVSLGKVEATLSVCSYVDQIMIHADPFHSYCVALVVTAQSELKSWASKQGMTYSDFSDLCHKQGTVKEVLQSLAGKQARLEKFEIPAKIKLIPEPWTPESGLVTAALKLKREVIKKAYEMDLAQLYSQ

SEQ ID NO: 48259 - protein, 878 aa, Zea Mays
MSHGVPAPMLEELAREATLADVSILVDGNDAELHVHGNGAEVHDNGTELHGNGAVLKRVEMPQDLGAISAKEVPLHEGKEVILVDDNDSGQEDDAEGKVDENTPRVGLRFKTYDDALKYYKQYAEDSGFSAIILKSSYLKSGVCRRLVIGCSRAGRGRANACYLSRESTKINCPARISLKLRQDRWLHIDDAKLEHNHPYNQSTTSLINCYKKLTDAKNGVSASRLKGRRNIPAEKEQGNFTEIGRLKFGEGDDEYIQKFFGNMQNKNPYFFYLVDLDNQGRLRNLFWSDARSRAANDYFGHDVVYFDTSYLTEKYDLPLVFFTGMNNHGQPVLFGTALLSDLSVDSYAWLLRAFLSCMKGLCPKAIITEHYNAIMDAVQEVLPEVRHRLCLYRIMKDVAENLKEHAEFKTINKALKKVTYGSLKIPEFEMEWKKIIEEHGLGGNECLSSLYEHRQLWAPAYLRDKFWAGMSISQRGESISSYYDGFVYPKTSLKQFFSKYEMILENKYKKEWQADEESSHRSPLTVTKFYMEEQLAKAYTINMFRKFQDELKATMYCDGMPIKVDGRLVTFEVKECSYMEDGKDTESRTYEVYFCKEEPKVEIECECGFVQFTGILCRHALSVLKLQEIFEIPKDYVLDRWRRDYKKLYYNAKKPNEMPLSDIVERSDYLFTQCSQLLNLGFVSESRYLVALKLLREMERSLLDDGLPARDRQPMLLSFEADAPENGQGLFSPQFSEGVKNSQSAHAKRRGRPLKKVTESTDDTVTQPNKEQDFLRSSFVTENTNMIQGPSSASHLEGPHMGVQGGIDLMDGIPNLSFGNHFGMDINHQHQVPNHQRMQQNNFIQVQAEPHGFGNQWVYHPMLQDNPVLRTPARRAG

SEQ ID NO: 48260 - protein, 214 aa, Zea Mays
MDKILMAQTHDGLERSAEVNELEWSCGRNPDVLIPIANGCEELEIIILVDILRRAKINVVLASVEKYPAVLGSQRMKIVADKSIMSASDSIYDLIILPGGPAGAEQLHRSRILKKLLKQQMQAGRMYGGVCSALKVLQQEGLLEDKTVTAHHAVASELTCQVIDQPNVVIDGNLITGKGLGTVVDFALAIIRKFFGHGRAKAVANGIVFEYPKS

SEQ ID NO: 48261 - protein, 262 aa, Zea Mays
MLSPWHPLLSPVAPPAMELRSPLNSHNCSLTSSIRPPPPRSLARAPPTLSATAAAVSSLSATSAAISSPSCPKKKVLVPIAMGTEEMEAVIIAGVLRRASADVTLASVEDGLEVEASCGSRIIADTHIASCADQVFDLVALPGGMPGSVRLRDSDILQRITVRQAEEKRLYGAICAAPAVVLVPWGLHRRKKEISLHSGQLNQMFRFQESLLQVVGQGQHFSSLYHLLSNCLGFVQLKIWTRFWFVKRNFNTFVFHIIDLSE

SEQ ID NO: 48262 - protein, 453 aa, Zea Mays
MEDAKEDAAMVPWPGLALAPSCLTRHIPLPCPPIRPRAYPSIHTYAAARCRWRRNISERCSGGVTRKEPTGRLSIRAPAQLAVASGIRSITLLLLLLLSLVGQEHTSCLLCRRRRSSRALSSSSRPRRDHSGGCCCLSCWPRHRRFCDTIRSAAAGTLEMSSLGGQQQHGRGDEARARLRWTRQLHGRFVLAVAQLGGADKATPKSVMRAMAVSGLTLYHLKSHLQRYRLAVSQGTASPVGEGDNGGGANERSSSSESQLDEYDDGSVADLHGDSSGSMAARVQREAKRKRHEQMQIEVQRHLQLRIEAQGRYMQSVLRRAQEALADHILGSPATGAEAELSELASAVETGTGCLSSTSCCSTSPSPMRHRSADSCVTSSSSSSSSEAESQAPAGANTCAGTRDCSVERPVQGEESTFLQRHEDEDEAEEADVGAAAAAEDEDGTSSEIDLNR

SEQ ID NO: 48263 - protein, 128 aa, Zea Mays
MDDCLQQLMDRIDAGEGEQLKNLILSERLSKLVRMRLEMQAPYISKWPQALSIQSQPANVSTSLKQRAILVDEIWHAAGDSGSDIDWYVKRTVLGGIYSTSEVYMLTDNSPGLQFSIALCWFPFLATY

SEQ ID NO: 48264 - protein, 416 aa, Zea Mays
MMKLKSGRRPFYKDVKLVDCRSGSSLPHLAAQAKFAAMNMKTEDVNPRRPVQVRRSRWALGDVTEVLDHNSWRLGKITEVLKNDYFVIRLVGCIQPREFHISCLRIPHDRKQLTVGGRDEEAQDAQDAQWITQYILKCRKWKMTICIAAAAMGMYYLDKYWNKADYRIPTESGYQWVMRSLGNRTYCYQNYRMHRNVFDLLHNVLVESYGLTSTRRMSSVETLAFFLWMCGTPQGMRQAEDRLFRSKETLSRKFEKVLNCLNKLAVDNIRPLDPEFTTIHPRLQSRRFSHYFDNCIGAIDGTHIPVVVPANQVVQHTGRKGYTSQNVLAICDFNMRFTFVVAGWHGSVHDMRVFKDAVDKYGNKFPHPPQASFILWIRDIPTGRVIWRRIEVQSTIFLSFSKVLCQEDHLRREQMS

SEQ ID NO: 48265 - protein, 1070 aa, Zea Mays
MSGSPYQPSAERMDQNPSTVAVEPISRNNGFGAPSASDSIKKKKFLSTNDEESIAGSDSLDTSLSGSDSKSLKFQTKVCLSNDLPRENAVIYSGLGLDISPRSSMEESPNGLGGLSPECSNVPFESPRTILQVMTCLPVPGGFLLSPLHGNLLQLRNKVAPVLKNLETHLDMENVSRALEGRSQSFHPLGLIRGNVTKQMRPCSKKKVAVDTKTSKYKGDASATMNNEVNIQVPASQKEKMNTNNKNEFEVGSARKEIPASVKHGELYMQPASSVSTMNAYHVPAPVVIEDHWVRCDICHKLRLLPYGMNPSMLPKKWKCTMLHWLPGMNRCDISEDETTGALNALFAIPATATTLSSGSPHTAVTGGIMERNKAYPKLKTKIRIDQDEQKSYKKTKIEAWHQIDRGQDHRCDSDGVEVPDEHKALLAKAKAMKGSHETDDMSLCKKNIASGYDSSENVNNVNALDVPFHSEKKEHPSDVDILDLSCKKNAVKKLEIQLNSLHCISNGPQKNLKEKKSNKLKSKEMASKEDSRHGKVQHADAVLSSLGHLNYELGADNKFVTGKESLSEQLETLPAKQVLDLAEAPGRDVAYLQSSTTVSSSSSKISSSRRNTNSQEANDSPIKSASSLPLRDFSIKMISGNRKDGTVDASLGNTHNLARYQNSEVIALNYGQQAGNFEGDQVAGEPNFHGSLQGISDSNIKEIPQSAGAQVSNITGFGRSLDNSLPEASCREDLTVNDTVVGRGDHQLCSGEQKDFNMEVRLPLPDQHCFGRINTESGSVRHESKNIEVRQGSGTAQRLGMLFKKEKSHLRILNRDIQNHVNQVVNFPLKGGKQKVCPTSVKSESLKMKAKLVRFNVETGVQHGSVKQVTSSTLDTSPMRKDGSMITFALKEARDLKHKANDLKNKGQELESTGLYFEAALKFLHVAFLLETPSFDISRQGGGGRSMKMYSETAKLCNFCAYEYERCKKMASAALAYKCVEVAYLKAAYYKHRTATKDQQELQAAVQITRGEPPSPSALDIDNLNSHGSSNASSLKGDNSPHVPGNHLPLAIHNQAQLLRLLAYEAKSL

SEQ ID NO: 48266 - protein, 754 aa, Zea Mays
MNRCDISEDETTGALNALFAIPATATTLSSGGIMERNKAYPKLKTKIRIDQDEQKSYKKTKIEAWHQIDRGQDHRCDSDGVEVPDEHKALLAKAKAMKGSHETDDMSLCKKNIASGYDSSENVNNVNALDVPFHSEKKEHPSDVDILDLSCKKNAVKKLEIQLNSLHCISNGPQKNLKEKKSNKLKSKEMASKEDSRHGKVQHADAVLSSLGHLNYELGADNKFVTGKESLSEQLETLPAKQVLDLAEAPGRDVAYLQSSTTVSSSSSKISSSRRNTNSQEANDSPIKSASSLPLRDFSIKMISGNRKDGTVDASLGNTHNLARYQNSEVIALNYGQQAGNFEGDQVAGEPNFHGSLQGISDSNIKEIPQSAGAQVSNITGFGRSLDNSLPEASCREDLTVNDTVVGRGDHQLCSGEQKDFNMEVRLPLPDQHCFGRINTESGSVRHESKNIEVRQGGKQKVCPTSVKSESLKMKAKLVRFNVETGVQHGSVKQVTSSTLDTSPMRKDGSMITFALKEARDLKHKANDLKNKGQELESTGLYFEAALKFLHVAFLLETPSFDISRQGGGGRSMKMYSETAKLCNFCAYEYERCKKMASAALAYKCVEVAYLKAAYYKHRTATKDQQELQAAVQITRGEPPSPSALDIDNLNSHGSSNASSLKGDNSPHVPGNHLPLAIHNQAQLLRLLAYTNDMNLAFDATRKAESVIASATGCPERGVVGDGLASVKAVLDLNFNNVNELLRLVRVSMESISS

SEQ ID NO: 48267 - protein, 456 aa, Zea Mays
MSYNKAPSITAETINPRVKIIRYAPCGEIVKHAAVLSLCDNPALMDRDEARALFSPCSIRRARRILNSIPSKDTGGYTDCRGIKCLRQVVADGITARDGFPSTADDIFLTDGATSAINLMMQILIRSHEDGILSPLPEYPLYSASIILHGGTMVPYNLTEDNGWGLEIFEVKRCLEEARSAGLTVRAMVVINPGNPTGQVLSVTNQEEIVEFCRKEGLVILADEVYQENIYAENKKFHSFKKVARSLAYDENDLTLVSLHSVSMSYGESGRRGGYMEVSGVAANVKDQIYKVASLTLCPNIAGQILVSLAMDPPKLGDESFESFDKEKEQIRSSFCKRAKTLEKAFSGLEGVTCNKLEGALYLFPRLHLPSAAIRAADFEGVSPDIFYAHRLLDATGIAVVPGSGFHQASGTIHIRCTILPDERKIEAMVARLRAFHKAFMNEFRGSQQVMNDLRR

SEQ ID NO: 48268 - protein, 342 aa, Zea Mays
MGRAPCCDKATVKKGPWAPEEDAVLKAYIDEHGAGGNWIQLPHKIGLNRCGKSCRLRWLNYLRPNIRHGGFTEEEDRLICNLYISIGGRWATIAAQLPGRTDNDVKNHWNTKLKRRLLGGGRRPRAEARLQLLTTSPFWQHRDSLASSAAALERMQVSTRLHRRHQPRLDDPAAAAAAFTLYNNYGSLGAPLWPSLLSPSSSPSPAASETSEILPRQPPPGARVVRQENMDGTCTPPLSTSTTGETMTTAVGVESSSSTPTASSASATFGGSMDDEIDMLLRQIQCFGENGSHIGDDGIDHCFRATDHHETANGSVGSWGSCCSTPGVDSVFHDYVQGHNQC

SEQ ID NO: 48269 - protein, 344 aa, Zea Mays
MGRAPCCDKATVKKGPWAPEEDAVLKAYIDEHGAGGNWIQLPHKIGLNRCGKSCRLRWLNYLRPNIRHGGFTEEEDRLICNLYISIGGRWATIAAQLPGRTDNDVKNHWNTKLKRRLLGGGRRPRAEARLQLLTTSPFWQHRDSLASSAAALERMQVSTRLHRRHQPRLDDPAAAAAAFTLYNNYGSLGAPLWPSLLSPSSSPSPAASETSEILPRQPPPGTGARVVRQENMDGTCTPPLSTSTTGETMTTAVGVESSSSTPTASSASATFGGSMDDEIDMLLRQIQCFGENGSHIGDDGIDHCFRATDHHETANGSVGSWGSCCSTPGVDSVFHDYVQGHNQC

SEQ ID NO: 48270 - protein, 325 aa, Zea Mays
MPLDLGAKGSCHIGGNISTNAGGLRFIRYGSLHGNVLGLEVVLADGTILDMLTTLRKDNTGYDLKHLFIGSEGSLGVVTKISVLTPAKLSSTNVAFLSCNDYTSCQKLLLAARRSLGEILSAFEFMDHHCIDLAMQHLEGVQNPLPASPYKFYVLVETTGSDESSDKTKLEAFLLRSMEDGLVADGVIAQDISQASNFWRIREGISEASVKVGAVYKYDLSITVEKLYDIVEEMRCRLGDNAEVLGYGHLGDGNLHLNIVSSKYDDNILAQIEPFVYEWTSAQRGSISAEHGLGLMKAEKIHYSKSPEAVSVSILPCQHLEVCCT

SEQ ID NO: 48271 - protein, 88 aa, Zea Mays
MSEHRARKMCVSTNRLWLCLQDALKDALLEKSELQRCMGVEGLHPSDVLDQHVVVLIRAACIEPSGDLCIGIISAQSRRKDAGFPLIF

SEQ ID NO: 48272 - protein, 267 aa, Zea Mays
MWTWCQRTFYYQFMMANGTLVRTLIHTDVTKYLSFKAVDGSYVFSKGKIYKVPATDMEALKSPLMGLFEKRRARNFFIYVQDYNEADPRTHQGLDLTRVTTRELIAKYGLSDDTVDFVGHALALHRDDRYLDEPALDTVKRMKLYADSLARFQGGSPYIYPLYGLGELPQGFARLSAVYGGTYMLNKPDCKVEFDMEGKVCGVTSEGETAKCKKVVCDPSYLQNKVRKIGRVVRAIAIMSHPIPNTNESHSVQIILPQKQLGRRSDI

SEQ ID NO: 48273 - protein, 180 aa, Zea Mays
MDEEYDVIVLGTGLKECILSGLLSVDGLKVLHMDRNDYYGGDSTSLNLNQLWKRFRGEDKPPAHLGASRDYNVDMVPKFMMANGTLVRTLIHTDVTKYLSFKAVDGSYVFSKGKIYKVPATDMEALKSPLMGLFEKRRARNFFIYVQDYNEADPRTHQGLDLTRVTTRELIAVVLLQDPL

SEQ ID NO: 48274 - protein, 123 aa, Zea Mays
MLVILLFSWYQVMSALEKMTRGVAWGDLDILVVDMPPGTGDAQLSMSQRLRLSGALIVSTPQDIALIDARRGANMFRKVQVPVHILSSLHNCWYLLKSVSEQVQMKATLLLYHHPTQHLRKRT

SEQ ID NO: 48275 - protein, 228 aa, Zea Mays
MLPCQRPGHDEAPAAAASMAARFVAADILGGISWARVLSEGEGAAAQAGLCEKEGKVPLLSLEALHQLHIFIFVLAVSHVFFCASTMLPGCAKIRKWKKWEEEIQKIAAENGPKKVLPMHQVSFIRERYKGIGTDSKTLCWLHSFRKQFYGSVAKSDYAAMRLGFIMTHCRGNLKFDFHRYMLALVDLRGDISAAQCQRLNGLHAYFWIAFLPLVVSADSEVLYRLKF

SEQ ID NO: 48276 - protein, 204 aa, Zea Mays
MSLFTHSDQDDELRISSIFTRAPVCIAGGSDIFSRFLLLLSFSPASMVSLLPRAPSLAFLAKSASSQRPPAPSMSSPFSAASVAAGSEAAAGTRKLPVLLFDVMDTLVRDPFYHHIPGFFQMSMKELLEAKHPTAWSEFEKGLIDENELAKKFFKDGRSFDLQGLKECMVRAYEYIDGVEDILCCLKKNNYEMHAFTNYPVPIN

SEQ ID NO: 48277 - protein, 142 aa, Zea Mays
MMGAGLDASWIPPWSSPVIDNPSSSSAVRSVGLSGVQMMMRQLASVTDSYGHADGTWNLWPEPMAGSSLVPSTSSMVPGSASASGLRLRGSAGTGNGSLSEVLTMVDRVREVLPHIPDELIIEDLMRTNNINATVNNLLLMQ

SEQ ID NO: 48278 - protein, 566 aa, Zea Mays
MATVNCLYVAAASTAVSTAALQWWASSLLDGDAGAGGDGDWLGAVLRSRVTVALLANLAAHVFVVVILALKTIFFVQLTSVETRKVLEHIINYVLHKGTFLPLAVPPTSQQIILWSTWLVILCSLKMFQSLARERLEQLNASPSATPSKYFRVYSALLLVLSADLLWMWLSVGFCRSCNSKLFWLLFFEPLSIAFDTLQSIMVHGFQLFDIWQRHLMESGADFLDFQKSYKQAAGSFSEWRGKLTRDFGFAIDLISMLMSFGHYSMIFWLRGMAFHLVDAVLLWNLRALIVSFLKRIKTYIKLRKALSSLDGALPDATYDEICAYDDECAICRGPMGRAKKLSCNHLFHLACLRSWLDQGLMEGYSCPTCRRPLVLSSEGQTRSPIVEAANVQRIAEQLTMGMNQQRVSGNEHPVEQQNPSDAVWRGAGLDASWIPPWSSPVIDNPSSSSAVRSVGLSGVQMMMRQLASVTDSYGHADGTWNLWPEPMAGSSLVPSTSSMVPGSASASGLRLRGSAGTGNGSLSEVLTMVDRVREVLPHIPDELIIEDLMRTNNINATVNNLLLMQ

SEQ ID NO: 48279 - protein, 588 aa, Zea Mays
MAWPSKCKWLPLQNSGRCLSYTHVCKYHKIWKDTKPFISAKDALKKEPISDVIALKDSMKYFDAEFFNDSKLREMEDGAKEFNVPAFRENRKLVATENGGLHNPSVLLFKSSWSSGSMTSETRSFEYPRASSVHRPTNDEDIAFMSVIELGELIRTKQITSRELTDIFLRRLKRYNPVLEAVITYTEDLAYKQAKEADDLLAQGKYLGPLHGIPYGLKDIIAVPHYKTTWGSRTFKNQVLDSEAYVYRRLKSAGAVLVAKLVTGSLAYDDIWFGGRTRNPWNIEEFSTGSSAGPAASTSAGMVPFAIGSETAGSIAYPAARCGVTALRPTFGTVARTDVMSISESLDKLGPFCRSAVDCAVVLDTIRGTDAGDPSSREVALGDPFHVDITKLTVGYLDDAEMEVVDVLSSKGVKLVPFKLNYTVESVQSILNITMDTDMLAHFDNWQREGHDDDYEAQDQWPVELRRARLIPAVDYIQAQRARGKLIREIKDSFTVDAFVGNVTDWERVCLGNLVGMPVVVVPTGLKSIENPPKGGTKRRTTVTTGIYAPPDHDHIALALAMAYQSVTDHNKQRPPIDDLGPNDVIQR

SEQ ID NO: 48280 - protein, 279 aa, Zea Mays
MVPFAIGSETAGSIAYPAARCGVTALRPTFGTVARTDDKLGPFCRSAVDCAVVLDTIRGTDAGDPSSREVALGDPFHVDITKLTVGYLDDAEMEVVDVLSSKGVKLVPFKLNYTVESVQSILNITMDTDMLAHFDNWQREGHDDDYEAQDQWPVELRRARLIPAVDYIQAQRARGKLIREIKDSFTVDAFVGNVTDWERVCLGNLVGMPVVVVPTGLKSIENPPKGGTKRRTTVTTGIYAPPDHDHIALALAMAYQSVTDHNKQRPPIDDLGPNDVIQR

SEQ ID NO: 48281 - protein, 278 aa, Zea Mays
MSPYTLGRAACVCRKWKYTARNPTLWRAACLKTWQVSVFDFVIQFHVLMFSSIQFYVVKRSGMEANYMMVRSLYDSSWRRMWLQRPRIRIDGLYVSRNTYIHTGVTEWQFKKTVNVVCYYRYLRFFPSGKFLYKISPDKVKDAVKCMHFRASKADCVFKGDYVLSEDGQIEMALLYPGHRYTLVRMHLRLRGTTVGANNRLDVLKILTTGVNATELQNWKGSILELVEGWEEDETHDPDVPAVSHSRGLSPFVFVPFEEADTSVLNLPVEKMDYYVPG

SEQ ID NO: 48282 - protein, 75 aa, Zea Mays
MAWSAAAVSRFAAASPPAAPISVRLGAAASRSSLSFSSGRRRPVAASLSTSATGGCSDREGTTSTRPLFSGHQSK

SEQ ID NO: 48283 - protein, 482 aa, Zea Mays
MARNLTENRTRNTLIVIVVFGLCSFFYLLGAWQKSGSGGGDRIQNWVNEQTKCAQLPNLSFETHHSASNLPNDTGSSKIEPFKPCDEQYTDYTPCEEQKRAMTFPRDNMIYRERHCPPDKEKLYCLIPAPKGYVAPFRWPKGRDFVPYANVPHKSLTVEKAIQNWVHYEGNVFRFPGGGTQFPQGADKYIEQLASVIPIAEGKVRTALDTGCGVASLGAYLLNKNVLTMSFAPRDNHEAQVQFALERGVPAYIGVLGSIKLPFPSRVFDMAHCSRCLIPWSGNDGMYMMEVDRVLRPGGFWVLSGPPIGWKIHYKGWQRSKEDLRNEQRKIEHFAQLLCWKKVSEKDGIAIWTKRLNDKSCSMKQDNPNGGKCDLTSDSDVWYKKMEVCMTPLPEVNSVDEVAGGQLEPFPKRLYAVPPRITDGSVPGFSVESYEEDNNLWRKHVKAYKKINNLLDTGRYRNIMDMNAGLGSFAAALESPKV

SEQ ID NO: 48284 - protein, 90 aa, Zea Mays
MHQGYPKETLVRFLKAREWNVPKAHKMIVDSLDWRIENEIDSVLERPIVPVDLYRSIRDSQLIGLSGYTKEWQYRRLCPRVSAAHAQRNS

SEQ ID NO: 48285 - protein, 173 aa, Zea Mays
MGADSEDAVKQLSLLMEQVEAPLKRSFQNMHQGYPKETLVRFLKAREWNVPKAHKMIVDSLDWRIENEIDSVLERPIVPVDLYRSIRDSQLIGLSGYTKEGLPVFGIGVGHSTYDKASVHYYVQSHIQINEYRDRIILPRLTQQFERPVVRCIKVLDMTGLKLSALSQIKLMI

SEQ ID NO: 48286 - protein, 710 aa, Zea Mays
MDKQSDGQGVERVAEEKQLDEKELERKLKKDQKAKEKEEKKLKAKQKEAARLQAQATSDGTKKTEKKLRKKAVEDENPEDFIDPDTPNGQKKLLAPQMAKQYSPSAVERSWYAWWESSGYFGADSASTKPPFVIVLPPPNVTGALHIGHALTVAIEDAMIRWRRMSGYNALWVPGVDHAGIATQVVVEKKLMRERKLTRHDIGREKFVSEVLKWKDQYGGTILNQLRRLGASLDWSREAFTMDEQRSKAVTEAFVRLHKEGLIYRDYRLVNWDCTLRTAISDIEVDHIDLKEETMLKVPGYANPVQFGVLISFAYPLEEGLGEIVVATTRIETMLGDTAIAVHPEDERYKHLHGRYAVHPFNGRRLKIICDAELVDPTFGTGAVKITPAHDPNDFEVGKRHNLEFINIFTDDGKINSNGGAKFDGMPRFTARVAVIEALKEKGLYKDTKKNEMSLGVCSRTNDVVEPMIKPQWFVNCNHMAKAGLDAVRSKKIEIIPQQYEQDWYRWLENIRDWCVSRQLWWGHRVPAWYVTLEDDLDKNLGSANDRWIVARNESDANLEAQKKYAGKKLRLDQDPDVLDTWFSSGLFPLTVLGWPSDTADLRAFYPTSVLETGLDILFFWVARMVMMGMQLGGDVPFQKVYLHPMIRDAHGRKMSKSLGNVVDPLEVINGMSLDGLLKRLEEGNLDPNELNIARDGKKKDFPDGIAECV

SEQ ID NO: 48287 - protein, 291 aa, Zea Mays
MASCVAAMALVGARPPSHAAGPAAASCSGRAQLSFHRLGARARARVIRAYRRRPHHPSYVPEDGVVLEWLRSAAAALAIVTQISVSLPANAVLYSPDTKVPRTGELALRRAIPANPNMKAIQESLEDISYLLRIPQRKPYGSMEGDVKKSMKIAMDNKEAILASIPEEHKEEGAKLYTSLLEEKGGLQTLLKYIKENNPDKLSIALASSLDTVAELELLQAPGLSFLLPQQYIEYPRLTGRGVVEFTVEKGDGSTFFPTGGGEPKSVATIQVVIDGYSAPLTAGNFAKLEK

SEQ ID NO: 48288 - protein, 275 aa, Zea Mays
MTIMSFGVFGVFISGAIVSAGCYWLFPKVGFGELGAVDYLALGAIFSSTDTVCTLQVINQDETPRLYSLVFGEGVVNDATAVVLFNAIKDLDISRLKGGVVLKVIFDFLYLFATSTVLGISIGLVTAYVLKALYFGRHSTDREVALMALMAYLSYMLAELLELSGILTVFFCGIVMSHYAWHNVTESSRITTKHIFATLSFIAETFIFLYVGMDALDIDKWRTSKESFKTSIGIFGILILLILLGRVAFVFPISILSNIMSGSSERTPITFKHQV

SEQ ID NO: 48289 - protein, 524 aa, Zea Mays
MRQRIHGGGGVVGDAGGGSGGGWNRWEQHHGGVHLHVHDGAVPVPRRGPPPRGEQGCIIGVIVFLLTKGKHSHILRFDEQLFFIYVLPPIIFNAGFQVKKKQFFHNFMTIMSFGVFGVFISGAIVSAGCYWLFPKVGFGELGAVDYLALGAIFSSTDTVCTLQVINQDETPRLYSLVFGEGVVNDATAVVLFNAIKDLDISRLKGGVVLKVIFDFLYLFATSTVLGISIGLVTAYVLKALYFGRHSTDREVALMALMAYLSYMLAELLELSGILTVFFCGIVMSHYAWHNVTESSRITTKHIFATLSFIAETFIFLYVGMDALDIDKWRTSKESFKTSIGIFGILILLILLGRVAFVFPISILSNIMSGSSERTPITFKHQVVIWWAGLMRGAVSIALAYNQFTFSGVTSDPVHATIITSTIIVVFFTTLVFGFLTRPLISGMLPHQSRALSRGHSTGSNSPKDDFTLPFLSGDEGASGSGIVLEQAKRSLSMMLERPVHTVHIYWRKFDDRFMRPIFGGPRSH

SEQ ID NO: 48290 - protein, 485 aa, Zea Mays
MIKGISGGQKKRLTTGELLVGSARVLFMDEISTGLDSATTYQIIKYLRNSTHALDGTTIISLLQPAPETYELFDDVILIAEGQIVYQGPREYAVDFFGAMGFRCPERKNVADFLQEVLSKKDQQQYWCHYDYPYQFVSVSKFAEAFKTFIIGKRLHQELTVPYNRHHNHPAALCTSSYGVKRLELLKSNYQWQRLLMKRNSFIYVFKFIQLLLVALITMTVFFRSTMHHDSVDDGIIYLGALYFAIVMILFNGFTEVSMLVTKLPVLYKHRDLHFYPPWAYTLPSWLLSIPTSLYESGMWVLVTYYVVGYDPQFTRFLGQFLLLFFLHQTSLALFRVMASLGRNMIVANTFGSFALLVVMILGGFIITKESIPVWWIWGYWVSPMMYAQNAISVNEFHGHSWNKQFANQNITMGEAILTGYGLFKEKYWFWIGVGALFGYAIILNILFTMFLTLLNPIGNLQAVVAKDQVRHRDSRRKNDRVALE

SEQ ID NO: 48291 - protein, 344 aa, Zea Mays
MWSLTKISGCEEEKITFLQELKDIRMLCNEPWLTAGDFNMIYQASDKNNDNLDRDMMGRFWRFLNKFDLKEIPLLGRKYTWSNERSSPTLVRLDRAFCCLEWENIFPDSVLQSSASNVSDHCPLILGLKLQTKGKRRFHFESFWAKVPGFLEVVQRNWEAHVQSTSAVERLFLKLQRLSKDLQKWGQRKVGNIKLHIEMAKEIIHRLEIARDSRDLSNREEWLKKKLKLHLLGLASLERTIARLHSRILYLKEGDANTFFFHHQARFRKKKNFIAKLHTETSMAITQEEKQAAVLKFYEKALGTAESRPLTLNLSEIGMQQHDLASVDNPFTEEGLWAAVKDLP

SEQ ID NO: 48292 - protein, 1200 aa, Zea Mays
MEAAFDAYFCAADLDRDGRISGQEAVAFFKGSGLPQPVLAQIWTYADKNRTGFLGREDFCNSLKLVTVAQSGRELTPDIVRSALFGPAAAKIPAPRINVSTAGPQTNSVASPPNATRALGSGQQNPAVRGPQVLPGASSNPQVRPPQPPNANTVPPVQGVASRPPVGGGPSGLNHTSSTTTNLATDWFSGKRSASSLGATSQAPTRGISPQGNLTTAGISAQNSTPLPVYNSHMPGATTPANANSTNVNMMPSQPSVSDSKTLVPLGNGLPSNSTFGVDPFSVTLQAKQESALTPNVPNNLPSSTAPASAAGPHHPPKPMQAGPLQGISSLPSHTSQLPHSQPAPRQQQFNAIPSTPGPVGANIPGGQIPSNPYQSQAPWPKITQVDVRKYMIVFIKVDRDRDGKITGEEARNLFLSWRLPRDILRKVWDLSDQDKDGMLSFKEFCVAVYLMERHREHRPLPDVLPDGIWAEGTSLPSTGQFAGNPSGPPSHASTGFASRGMQGPHHGMLPSSMKPTSRRPLPLDADDTVKAEQQKPKIPVLEEHLVGQLSKEEQGTLDAKFKEASDADKKVQELEKEIQDSREKTEFYRTKMQELILYKSRCENRLNEVSESMSADKREVQSLAAKYDERCKKEKKLEIYNAIVKLQKGDESDEKLQERANKIQSDLEELVKSLNEQCKRYGLRAKPTTLVELPFGWQTGIQETAATWDEEWDRFGDEGFSIIKELTVEVEPPVVPKSQPTVEDVKVSTNGASTEKEDNKFAKSTAAAAVEQAVEPEAIPSNSKLESTKSPPVSPVKNRDDGSTDELDTKQSGPNDVLPRATESVSNRGMDSSAHGDKTYDGHSWAPSFDHGTDNDSLWNFGHKIYCTIWYLPPRSVSQDGENGDSDLFFGPQGLPPIRTGGSSSNSLFVKEQKPSFDSVPGTPMEKPFFDSIPGTPVQKSVFDYSVPSTPMQNSVFDYSIPSTPMQKPLFDSVPGTPVQKSVFDSVPSTPMQKSVFDSAPSTPTQKPFFDSFPSTPMQRSMFDSGPSRAESPTAGSVYGKEQKGFFDSSVPSTPMYNSNLTPRYSEAGDDSFDTMSQYSSFGMHDNNSFGQIDSFSRFDSFRSNADNGGNDAFARFDSFRSTSDQGGGNSFMRYDSMNSSSDHDRTDTFARFDSMKNSDFNNQGYSFDDDDPFGTGPFKSTETSNSPTRHGTDAWSAF

SEQ ID NO: 48293 - protein, 650 aa, Zea Mays
MEAAFDAYFCAADLDRDGRISGQEAVAFFKGSGLPQPVLAQIWTYADKNRTGFLGREDFCNSLKLVTVAQSGRELTPDIVRSALFGPAAAKIPAPRINVSTAGPQTNSVASPPNATRALGSGQQNPAVRGPQVLPGASSNPQVRPPQPPNANTVPPVQGVASRPPVGGGPSGLNHTSSTTTNLATDWFSGKRSASSLGATSQAPTRGISPQGNLTTAGISAQNSTPLPVYNSHMPGATTPANANSTNVNMMPSQPSVSDSKTLVPLGNGLPSNSTFGVDPFSVTLQAKQESALTPNVPNNLPSSTAPASAAGPHHPPKPMQAGPLQGISSLPSHTSQLPHSQPAPRQQQFNAIPSTPGPVGANIPGGQIPSNPYQSQAPWPKITQVDVRKYMIVFIKVDRDRDGKITGEEARNLFLSWRLPRDILRKVWDLSDQDKDGMLSFKEFCVAVYLMERHREHRPLPDVLPDGIWAEGTSLPSTGQFAGNPSGPPSHASTGFASRGMQGPHHGMLPSSMKPTSRRPLPLDADDTVKAEQQKPKIPVLEEHLVGQLSKEEQGTLDAKFKEASDADKKVQELEKEIQDSREKTEFYRTKMQELILYKSRCENRLNEVSESMSADKREVQSLAAKYDERCKKVGDVASKLTMDEASFP

SEQ ID NO: 48294 - protein, 542 aa, Zea Mays
MMKNCGEYVQFEVAEQHVLQEMVKIIQKKNDMQVRDKILLLLDSWQEAFGGPGSKYPQYHWAYLEVKTTGVVFPKRPMDAPPIFTPPATHNSETYGSPRYSAGSLSDRMSSDVETLSLGDLNKIRNVTDLLNDMVYALNPSDRMAINDEIITDLVTQCRSNQQKLLQFVSSSGNEQLLKQGLETNDLLQSVLSKYDAVASGAPLAVEASVREAIEAPAVKSYAPPEHNDNVNEEEDEFAQLAQRKNKSVVSSSDDASSSTLGDLALVPIDQAVSESPSSVASNALVLLDPAPSTSTESKELDMIDLLSLTLCSPTPETSTDSSAQDQNGPQQPAVTHNQKGLQEPTVTNGQQYPSSVPQYPSNYQPHTANQAYAPQTSNYVAPWAQTGAYPPQPPAYASGYAYPAPPWVAPTHPVDSNPFLSVNYQDPRPAATSVAQTATYAPPPASYPPSISYAQFATPQSIQHSNSVASPSNGQIANQAQMNVNQQPKDSSAASSRPYYIPDNLFSDLIDAKSFGGGNKMGGPTTMGSSNGGQPMIGGKK

SEQ ID NO: 48295 - protein, 252 aa, Zea Mays
MLVTLCEEAGEILSNMNHPAGDCPLCLYPLMGEDKVGSELPFMKLMSCYHCFHSDCIMRWWEWLQHGDTNPKEPNTGDKHYNVNQPRGFCPVCRKVFDEKDIEHVRDLLGDNTSRLASLTVDLGEDEKELLHSEAEQNRRKRIESLVNLQQELNGLIEPKKDLAIQPGMYVSVPPSTPDTAEEENADPSQGTATSTSETEQRGQASNASSNKPKNPGHRRRNRANASRRQPHGQGQPARQQWQRKEAGTSHQ

SEQ ID NO: 48296 - protein, 231 aa, Zea Mays
MLQFLPLTPKATTFKIQKSNAMPQQLEDEFKRFGAIKHECIQVRSNKEAVAPALPKVRGHIGSAYGEEDAREAGSSSLFGGDGSSDDTHPSSGSGHRSSVASSQKSLDEFEFGVTWDGDGLQEDEVEQGKIFLGVSRLFRGSVVTSAENTMRQNCTLLAVLCGEFAEKQRTPASLALGTKRLRLSYPFLELASFGRLEGQQQENEEIGTLVWGDTDLSDPQMFVSHLCMSF

SEQ ID NO: 48297 - protein, 396 aa, Zea Mays
MNDTGTLLLSGGTEKVVRVWDPRTGSKNMKLRGHTDNIRALLVDSTGRYCLSGSSDSMIRLWDLGQQRCVHSYAVHTDSVWALATTHSFGHVYSGGRDQSVYLTDLSTRESVLLCTNECPILQLSLQDDTIWVATTDSSVYGWPAEGLTPQKVFQKGGSFLAGNLSFSRARASLEGSAPVPVYKEPSFVVPGVPAIVQHEIMNNRRHVLTKDTTGSVKLWEITRGAVIEDFGKVSFEDKKKELFEMVSIPAWFTMDARLGCLSVHLDTPQCFSAEIYAVDLNVSGAQEDLKINLAHDTLCGLLVHWSKRKQKSSSHGLPNGDSSIGKDVPSKDSHRSRTEKVLVEGLGERELLIWMEPKVIYLGGVWTVLLTIDIQRKIQSVAFIYILLKVRLRQT

SEQ ID NO: 48298 - protein, 587 aa, Zea Mays
MHRVGSAGNTAGSTRPRKEKRFTYVLNDADDKKHCAGINCMAYLNGSTFSTSDYLFSGSRDGTLKRWELNNGDASFSATFESHVDWVNDAIIVGEKLVSCSSDTTIKVWNCFSDGACTRTFRQHSDYVICLAAAEKNSNIVASGGLGGEVFVWDLDAALAPVAKSVDAKEDEVPNGNSGPPLTTLCSVNSSSNIASSNSQSHGYSPIAAKGHKDSVYALAMNDTGTLLLSGGTEKVVRVWDPRTGSKNMKLRGHTDNIRALLVDSTGRYCLSGSSDSMIRLWDLGQQRCVHSYAVHTDSVWALATTHSFGHVYSGGRDQSVYLTDLSTRESVLLCTNECPILQLSLQDDTIWVATTDSSVYGWPAEGLTPQKVFQKGGSFLAGNLSFSRARASLEGSAPVPVYKEPSFVVPGVPAIVQHEIMNNRRHVLTKDTTGSVKLWEITRGAVIEDFGKVSFEDKKKELFEMVSIPAWFTMDARLGCLSVHLDTPQCFSAEIYAVDLNVSGAQEDLKINLAHDTLCGLLVHWSKRKQKSSSHGLPNGDSSIGKDVPSKDSHRSRTEKVLVEGLGERELLIWMEPKVWLLFTSC

SEQ ID NO: 48299 - protein, 581 aa, Zea Mays
MGCTTSHDAVAAAVTSSSSRPRARRASASASGPSPRRGDPAALCRERVALIRAAADRRYALAAAHAAYFRSLAAVGDALRRFVASALAPGTPGSSPVLTLPPSPAKPVAAASASLPPSPSSTVSPLSHSVSDDDLHLHDLDDTPSPSTSTRHYHHFMRRSPTVPTVVYEDPNAQTQYTTAETSYGYAYGVGDGYGPAYPYGPYGEVVAGETPEAAPRSPGPPPSPPTAEASPWEFFDPFTQYDQFMEDYTRGNLPTNSPNYAELRRMEGIPELEDEAELVGNAEASKPSTSGVSDQNKKGKGPIQDNAASNGDFSGDSKLQKKATSKADSSGGKLQRDATSISDSPGGKLQRKGSEPPPGGKLQGKGSEPTTDAKGEAGKPVSRNDSGPSNVSSKNKEGRKKNTMSLKGTVSSDIDGSSTSGKKKGVAFERERSIREAEGCGEIHGQSVVSSDPFSPSHHGTRDVREAINEVNELFDEAANCSTDVSRLLEVGKMPRSDTPRVLRYVSSRVMDPLGLAVSTSSCLPKSHGRKSRPSSSMARTSASLDAGSSNDVGHLSSTLEKLWVWEKKLYQEVKVVVLG

SEQ ID NO: 48300 - protein, 155 aa, Zea Mays
MNVSVSSWPHRSIPQAVASSMVKEDLGAGTLGPNNFCSSSTEGPPRTWQPGETNGPINQIPSLRLMPDFAGVYSFLGSVFDPSTSDHLQKLKEMNPIDVETALLLMRNLSINLTSPDFEDQRKLLSLYSASDGPELGSSRSSALATSAPFMIKGG

SEQ ID NO: 48301 - protein, 326 aa, Zea Mays
MAAVRQNYGQKVLVQFEDFANHNAFTLLEKYRTNHLVFNDDIQGTAAVVLAGIIAALKSVGGTLADHTFLFFGAGEAGTGIAELVALEISRQANVSVEEARKKIWLVDSKGLIVASREETLQPFKKRYAHEHEPVKDLLGAVKAIRPTALIGSAGVGQSFTKEVIEVMSSINERPIVLALSNPTSQSECTAEQAYTWSQGRAIFGSGSPFDPVKYNDKLFVPAQANNAYIFPGFGLGVVISGAVRVSDDMVLAAAEALAEQVTPEHIEKGLIYPPFSIIRKISANIAAHVAAKAYDLGMATQLPRPKDLVKYAESCMYSPVYRSYR

SEQ ID NO: 48302 - protein, 327 aa, Zea Mays
METVAQSKTSRSSMGGAADTGMSPEAQEFKESMDVMIPLLGTANMWDFLPVLQRFDVFGVKNKMAAAVSGRDAFFRRLIDEERRRLDDGVESENKSMMAVLLTLQKSEPENYSDDMIMSLCFSMFSAGTETTATTAEWAMSLLLNNPEVLKKAQGEIDAHVGNSRLLGADDMPHLPYLQCVLTETLRLYPVFPMLIAHESTADCKVGGHHVPSGTMLLTNAYAIHRDPAAWTEPDAFRPERFEDGSAEGKLLIPFGMGRRKCPGETMALRTLGLVLGTLIQCFDWATVGGVPKVDMTEASGLTLPRAVPLEAMCKPRQAMLDVLQNL

SEQ ID NO: 48303 - protein, 360 aa, Zea Mays
MSWRRNQLRAFLVLAVILLITAATYRANAQPAPPADPTPAADTCADPSVEGACRNVPKALRLKLIAIPTILVSSVIGVCLPLLSRSVPALRPDRNLFVIVKAFASGVILATGYMHVLPDSFSNLTSPCLPRKPWADFSFTTFVAMLAALFTLMVDSLMLSFYNRRKGGNTSGRRTSGAVADHESPAHEHHWHSHGHGHGHGHAGGIVVADKPEDDEASQVQLRRNRVVVQNVCTIRPLVTAMCFHQLFEGMGLGGCILQAEYGAKMKAGLVFFFSTTTPFGIALGLALTKVYRENSPTALIVVGLLNAASAGLLHYMALVELLAADFMGPKLQSSVRLQLLCFLAVLLGAGGMSIMAKWA

SEQ ID NO: 48304 - protein, 141 aa, Zea Mays
MGDHVAVDVGELVASRVGEAAGLLSGGKEEMKALAGMVECRICQEEDLAKNLESPCACSGSLKYAHRECVQRWCNEKGDIICEICHESYKPGYTAPTQVHHDETTIEISGGDWTISGNRLDLHDPRILAMAAAQHRLLEDD

SEQ ID NO: 48305 - protein, 454 aa, Zea Mays
MTWHEDLATHVGNTGVRLPGAGGHAPAAANVAAAGAGWYGEEEEGRAEEGWAQQAKGFAESTAEMLRELGRGLWDVAAQSLAGAEDSEVARRLRKRAAATGKRLSFMNEYLPEERDPVRCWLTVAAVAFVSLLVLGFGSGNETPVELPKKLIIGPPSADRIQLPDGRHLAYQEQGVSANRARFSLIYPHSFLSSRLAGIPGIRASLLEEFGVRLVTYDLPGFGESDPHIGRNLNSSAMDMLYLANALNIPEKFWVVGYSGGGMHAWSALRYIPDRIAGAAMFAPMANPYDSKMTKDERRKTWDSWSTKRKLMHILARRFPSLLPFFYRQTFLSGKQGHPESWLSLSLGKKDKTLLEGPAFNAFWERNVAESVRQGDARPFVEEAVLQVSDWGFSLSDIQMQKKEARGFFELIKSLFNQAEREWVGFLGPIHIWQPNKGFPKAEALTFHISIGDG

SEQ ID NO: 48306 - protein, 194 aa, Zea Mays
MSVAAALGRADELRALDDTLAGVRGLVASGAKQVPRIFRVPYPEELLHHEQPPAAATVPVIDLSGDRAAVIDAVRGAAAGWGFFQVTGHAVPEQVMSAAVAAMRAFHEADGGEGSDKARLYSREPGRAVKYHCNFDLYQSPVANWRDTVYLRMAPDPPAADDLPEICRLTNKVASSTYIEILIVGERLPICSVC

SEQ ID NO: 48307 - protein, 120 aa, Zea Mays
MRRRGRLPAALWLVVVTLAALVARPACAAWCIARSEASDKALQSALDYACGPARGADCAPIQASGLCYLPNTLAAHASYAFNSIFQRSRAAPGACDFAGTATVTVTDPSYGSCTYPSSPR

SEQ ID NO: 48308 - protein, 112 aa, Zea Mays
MRRRGRLPAALWLVVVTLAALVARPACAAWCIARSEASDKALQSALDYACGPARGADCAPIQASGLCYLPNTLAAHASYAFNSIFQRSRAAPGACDFAGTATVTVTDPSQYA

SEQ ID NO: 48309 - protein, 196 aa, Zea Mays
MGKSYASFFVGPFVATDDERIAECCRGFGADVIMTSASCKNGSERCCEALKKLDKHYDIVVNIQGDEPLIEPEIIDGVVMSLQRAPDAVFSTAVTSLKPEDAFDTNRVKCVVDNLGYAIYFSRGLIPFNKSGNANPKYPYLLHLGIAGFDSKFLKIYPELPPTPLQMEEDLEQLKVLENGYRMKQHIFLYGDQSGP

SEQ ID NO: 48310 - protein, 198 aa, Zea Mays
MEAGPRELTGAVDLISHYKLLPHHDFFCKKPLPLAISDTHYLHNVVGDTEIRKGEGMELDQLVHNAYLRDKPAYIQPFDMETLGQAFQLRETALVDLPSTEKGIPTISGKPKSESKDKEKKHKRHKDKDKEHKKHKHRHKDRSKDKDKDKDKDKKKDKSGHHEKKRKHEGTEDSVDVHKHKKSKHKSSKTDEMGNGVS

SEQ ID NO: 48311 - protein, 151 aa, Zea Mays
MFISCALLFFLPGARSLLSGLHAHRVQLPPPAVSAARPSLELRSASNSGARPSSLILLYNFDGGTICSVVILKEWLGIHRVAAAEISKGLPIFGIGVGHSTYDKASVITLMLAICLVGYSYSQNHKSAWFEAISTKPNKGFRLSSSDSPSC

SEQ ID NO: 48312 - protein, 97 aa, Zea Mays
MASTCFRAAARVASAASRSAAAYRSAPSAARAGAGGARVLRGIVTAAAAQCGGVSQADVAAEHGVELPCSLSADGSIRSKVINGQMDGRPAHVMLSD

SEQ ID NO: 48313 - protein, 73 aa, Zea Mays
MASTCFRAAARVASAASRSAAAYRSAPSAARAGAGGARVLRGIVTAAAAQCGGVSQADVAAEHGVELPCSLSA

SEQ ID NO: 48314 - protein, 131 aa, Zea Mays
MRYFLQCFPLQSLVCSLQSPSLFYSNGGLSCHSLPGADTYIVAKCISLLSDNPHLQMCPVCLCSYKLAPIELSVFLHMKVVNKSVCCPRKVRWIDCFCGYMKGLRLALWLVIKMVILMEATGYSGPTLPQY

SEQ ID NO: 48315 - protein, 325 aa, Zea Mays
MPFPRSKGRRKLKRSPRFLWSTHARRRRWCPWLRGCCSPSPPSRGLPRPHQAPPPAAAAMAAETAAIGGRPSSQPSQACKSAALSAAASPASSAHRGNGSGGRYISNGKLLSRRPRGIDSKKRLWTNVLLALNVLAYVAQVASQGKLLMWGAKINSLIDRGQFWRLATSSLLHANLTHLAFNCFSLNSIGPMVEMLSGPRRYLAVYFSSALAGSLMSYRFSASPAVGASGAIFGLVGAYAVYMWRHRRFFGNSRESLEHIGRVVVLNMGMGLLSRGIDNWGHLGGLLGGVAMAWFLGPAWQYQYVAKDGRAVFKDRAPVLRLIKG

SEQ ID NO: 48316 - protein, 140 aa, Zea Mays
MPFPRSKGRRKLKRSPRFLWSTHARRRRWCPWLRGCCSPSPPSRGLPRPHQAPPPAAAAMAAETAAIGGRPSSQPSQACKSAALSAAASPASSAHRSALFSGNGSGGRYISNGKLLSRRPRGIDSKKRLWTNVLLALNVL

SEQ ID NO: 48317 - protein, 246 aa, Zea Mays
MNRLADGILDRSASAGPAPLERPGRHGSAAVGKAWETIRHGWTEYLRQPVLPASLAYVLVCFNVALAPGALMTTFLIHLGVSASVLGAFGGSSAVVGILATFVTPYLVKELGILKAGAAGLVAQSALLGAAVVVFVTGPVSRRGALFAFLGFIVASRLGHMAYSVIGLQVVQTGNPMGKAKLIGATEIAVASLAELAMMAVAVVAGDAAHFGCLAALSAASVAAAACLFCAWLANPTDDLRRLFPC

SEQ ID NO: 48318 - protein, 165 aa, Zea Mays
MFIRLKPLTTFPTRYGFYDECLRKYGNANVWKYFTDLFDYLPLTALIENQIFCLHGGLSPSLDTLDNVRSLDRIQEVPHEGPMCDLLWSDPDDRCGWGISPRGAGYTFGQDIAQQFNHTNGLSLISRAHQLVMEGFNWCQKHQMCRARLHKTLGNQTQVGCIALA

SEQ ID NO: 48319 - protein, 115 aa, Zea Mays
MCDLLWSDPDDRCGWGISPRGAGYTFGQDIAQQFNHTNGLSLISRAHQLVMEGFNWCQDKNVVTVFSAPNYCYRCGNMAAILEIGENMDQNFLQFDPAPRQIEPDMTRKTPDYFL

SEQ ID NO: 48320 - protein, 520 aa, Zea Mays
MRARPTQSHISDRVNDWYLSRNPTPKRNTRFRLKIPNATRRWWRPARPPPPPPPNSDLPWPRSSPFSPSNRPPAGPLRPAARASRPSSLRRPRPPRPPWGRRGGSCRPRAWPSWTARRGTSSAPTSGPASSSSTAAGASSTIPTAASTSTWPPASPSRRSATRTQTCAPPSRSRPVRSSTSATSSTPNPRSASLSQVELAKRLVEVSFADRAFFASTGTEANEAAIKFSRKFQRAAHPESGDPPTEFLAFSSSFHGRTMGAVALTSKSQYREPFAPVMPGVTFVDYGDLEAAKKFVRSGRVAAVFVEPVQGEGGIHSATREFLQGLRDACDEAGALLVFDEVQCGFGRTGHLWAHEAYGVEPDIMTLAKPLANGIPIGVVLVKEKIAAAINYGDHGTTFGGGPLACQTAITVFDKITRPGFLAEVSRKGESFKQLLRAKLSGNPHVREVRGVGLLVGVELDVPAGPLVDACLDAGVVVLTAGKGNVVRLVPPLIVSEKELEHAADVIRDCLPALDVVAAA

SEQ ID NO: 48321 - protein, 430 aa, Zea Mays
MLEKDRISYFYDGDVGNVYFGPNHPMKPHRLCMTHHLVLSYGLHQKMEIYRPHKAYPIELAQFHSADYVEFLHRITPDSQHLYASELTRYNLGEDCPVFDNLFEFCQIYAGGTLDAARRLNHKICDIAINWAGGLHHAKKCEASGFCYINDLVLGILELLKYHARVLYIDIDVHHGDGVEEAFYFTDRVMTVSFHKYGDLFFPGTGDIKDIGEREGKYYAINIPLKDGIDDTSFTRLFKTIIAKVVETYLPGAIVLQCGADSLARDRLGCFNLSIEGHAECVKFVKKFNIPLLVTGGGGYTKENVARCWAVETGVLLDTELPNEIPKNEYIEYFAPDYTLKVPNLNMDNLNSKTYLSSIKVQVMESLRYIQHAPGVQMQEVPPDFYIPDFDEDELDPDERVDQHTQDKQIHRDDEYYEGDNDNDHDDGTR

SEQ ID NO: 48322 - protein, 111 aa, Zea Mays
MPLPSLSSPLLLSHSPTRFAVQKPAKLPSPRKEKKTVTFNSIPSSPPESERRRRSRSRQLPASGGYLVRRAISAVLCHSGTELPAQAALSGSPRLNKTELPRFRILNCHLS

SEQ ID NO: 48323 - protein, 563 aa, Zea Mays
MVHFLKIDLPLLKDSVVSLIDDAFNVLTHESFMSAISEEYPLIILVYSKGSPRCAQFIEYWKQIGTQLDGIVRTAMVEVGDSQVAGYFAEKRFSKRPFFRNGVPTLVAYPANCKSPSCYMRYPGGLFVDSVVDWVATSVVGLPRILYYSKETLGPQFIGKSGNHKVKTIFFSSTGERAAPFVRQAAQEYSSYSSFGFVLWREDESQIWWNSLGVESAPALVFLKGPGTTPFVHHGIFSKSEFIEMMEEHKHHELRQLRSDTSLELGCDARGHSRAGNDAAIWYCVIVAGRPGAELSKKRQILRKAQDKLLGDVDRSAGNVDNSVETSSAATAFKDDRLTFVWLDGEVQKQICAFYLATDYTGACGPRDFGDDNDKPEIFIVRFQRNATYEALKAEKKNNLVDVLQGQHADASQLVARYKGPVEIEEINRWISQIIKDGDTREIPYFTSKVPDLVPEETSKAWNSKSIRSAGKSLKENIGFHFQDYLTHPMIGSTLLMCGCISMGILWFRNNTPTQSTRQEKARKDKAKRPRPKLSTSLFGEPSVPDVDPKDARQWEMSSSDSD

SEQ ID NO: 48324 - protein, 565 aa, Zea Mays
MSPLLNTGQWVWFRLHNDKTNNILYLPTRKLSNSSLKGFIAPELGRLSFLQELYLDHNLLFGTIPKLIGSLKNLRVLDLSVNRLTGPIPSELGGLSSVSIVSTAHNGLCPSSRLYVADFSYNFLVGKIPSCLKYLPRSSFQGNCFQDEYSVQQRPLQICTSGSTGQQGVIYGSKHPGHKHEKMEQPIWLLALEIATGVLLVVFVITGIVTASRSCKLKPSIRISSWNRSKSWSDEITVLIDSDMLKSLPKLSRQELEVACEDFSNIIGSTPETVVYKGTMKDGPEVSVISLCAFEGHWTSHHELFYQNKVIDLARLNHENIAKFLGYCRESDPFSRMLVFEYAPNGTLFEHLHYGEGGQFSWLRRMKIAIGIAQGLRYLHTELQPPFAISELNSNSVYVTEDFTPKLVDFECWKMMFSRHSISRDEKARGHLNSKSSFPGHGDSAADRQADDIQANTFAFGVILLEIISGRLPYCKDKGYLVDWASKYLQQAEEIGKLVDPELGSVRSEDLAVLCSVVSRCIDPDPSKRPSMQIITGVLENGIDLSAAAILKESSLAWAELALAL

SEQ ID NO: 48325 - protein, 200 aa, Zea Mays
MKIAIGIAQGLRYLHTELQPPFAISELNSNSVYVTEDFTPKLVDFECWKMMFSRHSISRDEKARGHLNSKSSFPGHGDSAADRQADDIQANTFAFGVILLEIISGRLPYCKDKGYLVDWASKYLQQAEEIGKLVDPELGSVRSEDLAVLCSVVSRCIDPDPSKRPSMQIITGVLENGIDLSAAAILKESSLAWAELALAL

SEQ ID NO: 48326 - protein, 288 aa, Zea Mays
MDPTQGTNQTKDTFWRRIHKYYESNRGTLPERSQNSLLHRWSSINDAVSKFCACVTQIHNRNQSGMTIHDRVEEAEKLFQSLDPQKKSFQFRHCWLQLRNQPKWHDKLQQMAAVKTSNKKQKVAKDLSPGLVDLTTQVGNEVSPVQIVPPNIAAPERPMGKKRSKEAMCKGGFDACSDALDILWEKKRQADVEKELKREERYAQAYALDKERLELEHKRLTIEEQKHTNEQKRLDQEKERLANEANNLYIKRIEEEQKIMSIDLTTMSELQRQYYMCLQADIVARRMN

SEQ ID NO: 48327 - protein, 201 aa, Zea Mays
MLSWKGEKEGIILEAESGDYLGIHRGFWFYTIGQRQGLRLPGGPWYVVEKDVQNNVVFVSRNYYSLDKRRRTFRVGSLNWFDNCGPGNNEQLKCKVRHSPEFHDCTLVKERSEENGDALVVHLAEDDQGLAAGQFAAFYSENVCLGSGIILDSWDKMSFPVCSRALEIAKLADKSSLGKPIRIVNLEHIVKPEQQEEIKVA

SEQ ID NO: 48328 - protein, 97 aa, Zea Mays
MQLASKFVGVSKVGITGDGKDRLEVEGEGVDTVLLVNYLRKKVCRSADIVKVEVKDKKDEKKPEEPPYYCWPNYYYCPPPPPPLPMVERADDSCHVM

SEQ ID NO: 48329 - protein, 139 aa, Zea Mays
MCIAGSVVIVIHAPQEQEITSVKEIWNMATQPAFLLYVASVIVIVFVLVFYFSPLYGQSNVLIYTAICSLMGSLSVMSVKALGTSLKLTFEGTNQLIYPETWFFMLVVATCVLTQMNYLNKVCSTCYTLLSFSNLSSMT

SEQ ID NO: 48330 - protein, 96 aa, Zea Mays
MLLNADDLDAMWVCLRENCVIDDATGAEKMNYEDFCHIATVCTEQIGQKCKRFFSPSNFMKFEKDDSGRIAILPFYLYVMRTVSYFLRERAVKLAS

SEQ ID NO: 48331 - protein, 98 aa, Zea Mays
MIKLWSSGSGSSSDGRAPLSKYWGVSVTNTIGPTMGIEALKYINYPAQVWFRLLLPSHLGCYMHCPGHCVMLMLGSCRGHMGNIVTDAYGLRCSDRVN

SEQ ID NO: 48332 - protein, 280 aa, Zea Mays
MMLTRASMGVMDAAAVDEVVRRLVEGGRGGRQVQMSEAEIRQLCVEAKQVLLSQPNLLRIHAPVKICGDIHGQFVDLLRLFDLGGYPPTSTYIFLGDYVDRGKQSLETICLLLAYKLKYPDNIYLLRGNHEDAKINRVYGFYDECKRRFNVRLWKIFCDCFNCLPMAALIDDKILCMHGGLSPELTSLDQIKDIERPTEIPDYGLLCDLLWSDPSHDTEGWGESDRGVSCTFGADKLVEFLEKNDLDLVCRAHQILKPNETGAPHSRKPLPSKAPKGENV

SEQ ID NO: 48333 - protein, 193 aa, Zea Mays
MADYHFVYKDVEGASTQWDDIQRRLGNLPPKPEPFKPPPFAPKVDAGEQPKSKEWLDEREAEELEELEDDLDDDRFLEQYRKMRLAELREAAKAARFGSIVPITGSDFVREVSQAPSEVWVVVFLYKDGIVWRNWLQDTQRQSLLKLSPRTASPTTQIGMFLQYWCITTVLSKGLMLVCRSLVERDAHLNLLH

SEQ ID NO: 48334 - protein, 521 aa, Zea Mays
MEDRRKDSLNPTTTIAAINLSGSDVHEPKVLISGNDFYAFPRIDQNKKRIAWIEWSHPNMPWDKSELWVGYFAESGDLTKRVCIAGGNRLLIESPSEPKWSPKGELFFVTDRGSGFWNIYKWVEQTNEIVPVYSLDAEFTRPLWVFGISSYDFLGNSDHIVFSYRQQGKSHLGVLDCDSGSISLLDIPFSDLSDVVAADDYFYIEGASASIPRSIAKVTLNESKTKVVNFSIAWSSSPDLVQYRPFFSTPELVEFPTSKSGQKAYAYFYPPSNPNFQGLPDEKPPLLVKTHGGPTAETRAILDLSVQYWTSRGWAYVDVNYGGSTGYGREYRERLLNKWGIVDVDDCCGCARFLVESGKVDGQRLCITGRSAGGYTTLASLAFRDTFKAGASLYGVGDLTLLRAETHKFESHYMDNLVGNERAYYERSPINFVNQFTCPVILFQGLEDKVVPPDQARKIYSALKEKGLPVALVEYEGEQHGFRKAENIKFTLEQQMLFFARLVGKFEVADDITPIKIENFD

SEQ ID NO: 48335 - protein, 371 aa, Zea Mays
MLNLRDHCGFLASARMIFLETATTLFSVIGSISLLDIPFSDLSDVVAADDYFYIEGASASIPRSIAKVTLNESKTKVVNFSIAWSSSPDLVQYRPFFSTPELVEFPTSKSGQKAYAYFYPPSNPNFQGLPDEKPPLLVKTHGGPTAETRAILDLSVQYWTSRGWAYVDVNYGGSTGYGREYRERLLNKWGIVDVDDCCGCARFLVESGKVDGQRLCITGRSAGGYTTLASLAFRDTFKAGASLYGVGDLTLLRAETHKFESHYMDNLVGNERAYYERSPINFVNQFTCPVILFQGLEDKVVPPDQARKIYSALKEKGLPVALVEYEGEQHGFRKAENIKFTLEQQMLFFARLVGKFEVADDITPIKIENFD

SEQ ID NO: 48336 - protein, 87 aa, Zea Mays
MGVIETETMGTRVKESKTVLVEKELELIDEPQIQESPPVRALLHDEVDFAESSLAIRESDIPVKKVLIIVTITFVWPQQPYYLKPMF

SEQ ID NO: 48337 - protein, 904 aa, Zea Mays
MFKSMVYYVNTSIGEVEVWPKGEASAGLTMAAWAREIRVERISPPSERCPPLAVMHTVAVGARCLVMESRPPVVADVVPPLVVMHTACLRENKTAVVPLGDEELHLVAMTSRRNLTNHACFWGYKLPFGLYNSCLTMLNLRCLGIVFDLDETLIVANTSRSFEDRIDALQRKLSNETDPQRRNGMLSEIKRYQDDKSILKQYIEGDQVYDDGKVYKAQPEIVPPLSDNQQPMTRPVIRLQDKNIILTRINPLIRDTSVLVCLRPAWEDLRSYLIARGRKRFEVYVCTMAERDYALEMWRLLDPDSRLINSVQLHDRMVCVKSGLKKSLLNVFHDGSCHPGMALVIDDRLKVWDEKDQLRVHVVPAFTPYYAPQAEANCSIPVLCVARNVACNVRGGFFKDFDEGLLPRISNVHYEDEVNEISAPDVGNYLITDDENVALVNGNRDSLPFDGMADAEVERRMKEANAQSFHQTAGDFVMPVAPAQNFVSTSVASLAPPLGMMPSPFSQPVAPPGFSDSLQGSPAREEGEVPESELDPDTRRRLLILQHGQDTRDPTSPLPAIPPVQVPVPPVQPHGNWFPTEDGINQSNLNRGSAGFTVESDSIVYEKKQPPHPSFFHGGDSPMPSDRFGYQNQRFPSQLPHEDHPMMQNHAPPKYRSFSGEELASWHVPSSQRNNQIESGRHFAQYAGTSAGILEGIALKCGSKVEYKSALCDTAELQFSIEVWIVGEKVGEGIGRTRREAQRQAAEMSLRNLANKYLSSDPNKLSDMKENDFSSNRNVFGYSGNTRDDMLPLSSTSEESRFMKMENNNSRKTGSSVAALKELVQVGGQILGKGVGLTWEEAKLQAAAEALGTLRSMLGQLGHKRSGSPRSLAPNFNKRFKPDFPRTVQRVPYGTYSRIEGHVP

SEQ ID NO: 48338 - protein, 916 aa, Zea Mays
MFKSMVYYVNTSIGEVEVWPKGEASAGLTMAAWAREIRVERISPPSERCPPLAVMHTVAVGARCLVMESRPPVVADVVPPLVVMHTACLRENKTAVVPLGDEELHLVAMTSRRNLTNHACFWGYKLPFGLYNSCLTMLNLRCLGIVFDLDETLIVANTSRSFEDRIDALQRKLSNETDPQRRNGMLSEIKRYQDDKSILKQYIEGDQVYDDGKVYKAQPEIVPPLSDNQQPMTRPVIRLQDKNIILTRINPLIRDTSVLVCLRPAWEDLRSYLIARGRKRFEVYVCTMAERDYALEMWRLLDPDSRLINSVQLHDRMVCVKSGLKKSLLNVFHDGSCHPGMALVIDDRLKVWDEKDQLRVHVVPAFTPYYAPQAEANCSIPVLCVARNVACNVRGGFFKDFDEGLLPRISNVHYEDEDENVALVNGNRDSLPFDGMADAEVERRMKEANAQSFHQTAGDFVMPVAPAQNFVSTSVASLAPPLGMMPSPFSQPVAPPGFSDSLQGSPAREEGEVPESELDPDTRRRLLILQHGQDTRDPTSPLPAIPPVQVPVPPVQPHGNWFPTEDGINQSNLNRGSAGFTVESDSIVYEKKQPPHPSFFHGGDSPMPSDRFGYQNQRFPSQLPHEDHPMMQNHAPPKYRSFSGEELASWHVPSSQRNNQIESGRHFAQYAGTSAGILEGIALKCGSKVEYKSALCDTAELQFSIEVWIVGEKVGEGIGRTRREAQRQAAEMSLRNLANKYLSSDPNKLSDMKENDFSSNRNVFGYSGNTRDDMLPLSSTSEESRFMKMENNNSRKTGSSVAALKELCTVEGYNLVFQACPSSADGLVGKESYAQVQVGGQILGKGVGLTWEEAKLQAAAEALGTLRSMLGQLGHKRSGSPRSLAPNFNKRFKPDFPRTVQRVPYGTYSRIEGHVP

SEQ ID NO: 48339 - protein, 469 aa, Zea Mays
MDFHSLSRRELQALCKSNGIRANMSNAAMAEALRCLPAVDRIDEIGSTAPPPVSAMKEQTPDAEEAVGGEQEHGCPLPRGGRARGKRRKAGARKSKTEGDEEEVMVPGPQTLPGPKMTVAREAAAAPVDDAEEAAVGIRTRRSARSKVKVALDQKEEDVQAAAARKEQKVSDKSCEDSEEHAIVVGVVEEEEVRKPQEGQNVTRRAAPYKTHEDLQPDQRTAEELSMAKKRTRRSTRSKVAAAAQKGQKADSSDTTVGPEIDPKYDEVVPKVEEATKPQEGKNVTKRATAYIYKAHEEVQTGQVTAAPEATAEEVATTKRRRRRSTRSKVGAAARKAQKECAADTSDAVNGSTVSDDPKEEQVVEVIEEGTTKHNEEREQINNVRQFASLPKLEDSPILGIVSKPNTADASDKAPVAHQEASKEDRFTFTGEADVSNLLVNTLDRFAKPVYESRVKEEKKCSECWWMLL

SEQ ID NO: 48340 - protein, 1153 aa, Zea Mays
MSSSRPTRSSISPFRSRRSAPAVSAAGPPPPARTSSGGRPSTPSSTASGRPTTPSSSGGRPATPSAAFARPATPSSSSARPATPSSTASARPTTPSSISSRVAVRAPLVDAANAKENIMVTVRFRPLSPREINKGDEVAWYADGDNMVRNEYNLSIAYAFDKVFGPATTTRHVYDIAAQHIVSGAMQGINGTVFAYGVTSSGKTHTMHGEQKSPGIIPLAVKDVFSIIQDTPGREFLLRVSYLEIYNEVINDLLDPTGQNLRIREDAQGTYVEGIKEEVVLSPAHALSLIASGEEHRHVGSNNFNLVSSRSHTIFTLTIESSPSGENEAEEVKLSQLNLIDLAGSESSKTETTGLRRKEGSYINKSLLTLGTVIAKLTDGKATHIPYRDSKLTRLLQSSLSGHGRISLICTVTPASSNSEETHNTLKFAHRSKHIEIKASQNKIIDEKSLIKKYQKEISSLKEELQQLRRGMMGNGGILPTDQEDLVNLKLQLEAGQVKLQSRLEQEEEAKAALMGRIQRLTKLILVSTKSSISSNVSGKTNFRRRHSFGEDELVYLPDRKREYFVDDDDVSLDSELSLEGKLDLNNPEESARFGRRNHKRGMLGWFKLKKSDQLSGLSSSVDGDSTASVSPSCSKSSQQKHLLLDLKDGRRKSMTRKGDDPSLADSFLERTQAGDLFSAAPRVRHPLPSGTTIVDQIDLLQEQVKMLAGDVALCTSSLKRLTEQAANNPDNLQIQEQIVRLKDEIAEKKSHIHMLEQRMVQSLETTEGPAIKTELSQTFSKLSTQLSEKTFELEIMSADNRILQDQLQAKVTENAELQETVAHLRQEISNLSKAAKSEDSFASVQSSEPSTASTDTRDQTNEISNRANMSSRTTDLNESGFISQVLKQASEIESLKQENLRLVEEKDGLEIHSQKLAEESSYAKELASAAAIELKNLAEEVTRLSYENAKLNADLAAARELNASMSRSNIHPDPKRRDHESGILVEELQKELVASCQREAVLEDTLSQKDRRESELLKIIDDAKCREHELKNELASMGALLSKIKKENSQQDVFEFKAKQNGFHSSKTDSGRLVSEMQASDNGCWDGLSTFEEARAAYNFERMRCKELESIVSKLKGEDLRGLDVKVLEELQNFHVEALSRICQEKMASQAL

SEQ ID NO: 48341 - protein, 662 aa, Zea Mays
MAATTPATDPPDALLAVTADAPTPARPTPAELVARAVAPVKPAFLCPPPVREAPKEEGKAAGGGAVVKVEKKSKRQLKRERQQEQKSTSHLCIEVGKSGNVDSCKYGTSCHFSHDINAYLSQKPADLEGTCPFTALGHLCPYGLTCRFLSTHKDNLAPQNHPEGNCERNPLSKEIQKLLWKSKYKFPKASAQIKLLGLKDGNKNKAEAVNDDNPDETCNLNDNSGGEPLVVDSVESVEPRASKKSKVEVDETRDNEIKGPTTGIHDNEAESEVNSISGVKVSSNNQSSCKVDLITIPHLREKKIIDFREKLYLAPLTTVGNLPFRRLCKTLGADVTCGEMAMCTNLLQGQASEWALLRRHPSEDLFGVQICGPYPDTVARTVELVDNECSVDFIDINMGCPIDIVVNKGAGSSLLTKPMRIRSIVQAASTVTEKPLTVKVRTAFFEGRNRADSLVSDIYNWGASAITIHGRSRQQRYSKLADWDYIYQCAQKAPDYLHVIGNGDVFSFTDWNKHVSDCSKISTCMIARGALIKPWLFTEIKEQRHWDITSGERLNILKDFVRFGLEHWGSDFKGVETTRHFLLEWLSYTCRYIPVGLLDVIPQRLNWRPPSYYGRDDLETLMVSDSAADWIRISEMLLGKVPEGFTFAPKHKSNAYDRAENG

SEQ ID NO: 48342 - protein, 149 aa, Zea Mays
MSVNLTKTEIIAGSVDGTVRAFDIRMGRETVDNLGHPVNCVSLSNDNNCLLANCLDSTVRLLDKSSGELLQEYKGHTCKSFKMDSCLTNDDAFVVGGSEDGYIFFWELVDAPVVARFRAHSSVVTSISYHPTKACMLTSSVDGSIRVWT

SEQ ID NO: 48343 - protein, 222 aa, Zea Mays
MTSSGTVAQQLPRTEARSLSGHEGAVLAVRFNRDGNYCLSCGKDRTLRLWNPHTGAQVKTYKSHAREVRDVHSSSDNAKLVSCGADRQIFYWDVASGRVIRKFRGHNSEVNSVKFNEYNAVVVSAGYDRTVRAFDCRSQNNDPIQTIDTFQDSVMSVNLTKTEIIAGSVDGTVRAFDIRMGRETVDNLGHPVNCVSLSNDNNCLLANCLDSTVRLLDNSPPP

SEQ ID NO: 48344 - protein, 86 aa, Zea Mays
MSSGELLQEYKGHTCKSFKMDSCLTNDDAFVVGGSEDGYIFFWELVDAPVVARFRAHSSVVTSISYHPTKACMLTSSVDGSIRVWT

SEQ ID NO: 48345 - protein, 337 aa, Zea Mays
MPVLRSAARRAREAQGHPAAADEKAPEAAAAALAAAPAPPPVEKRRRVTRAEEREREEIRPREVVAGEGGDDEGERGMDEPDSAARSADKLTFDDEDGPTVPEAVQVGSSPKYRVDRKLGKGGFGQVYVGHRMSATGPGAVEVALKFEHRTSKGCHYGPPYEWTAYNAIGGIHGFPRVHYKGRQGDYFVMVMDMLGPSLWDVWNNKSHIMSVEMVSCIAIEAICILEKLHSKGYVHGDVKPENFLLGTPGTPEEKKLFLVDLGLATKWKDIATGRHVKYDQRSDVFSSSTRGSLGRGQAFDALNQGPDQGVASPKICGEEMQLKGFSDSDMGNISLC

SEQ ID NO: 48346 - protein, 691 aa, Zea Mays
MPVLRSAARRAREAQGHPAAADEKAPEAAAAALAAAPAPPPVEKRRRVTRAEEREREEIRPREVVAGEGGDDEGERGMDEPDSAARSADKLTFDDEDGPTVPEAVQVGSSPKYRVDRKLGKGGFGQVYVGHRMSATGPGAVEVALKFEHRTSKGCHYGPPYEWTAYNAIGGIHGFPRVHYKGRQGDYFVMVMDMLGPSLWDVWNNKSHIMSVEMVSCIAIEAICILEKLHSKGYVHGDVKPENFLLGTPGTPEEKKLFLVDLGLATKWKDIATGRHVKYDQRSDVFRGTFRYASVHAHLGRTGSRRDDLESLAYTLVFLLRGCLPWQGYQGDNKSFLVCKKKMATFPVSLCCFCPHPFRKFVEYVVNLKFDEEPDYAKCASLFHSVLSVVGSNPDVRPINTDGAQKLIHQFGQKRGRFFIEEEADEQPKKKIRVGMPATQWISVYNGRVPMKQRYHYNVSDSRVGQHIEKGNADGLFISCITSCSDLWALIMDAGTGFTSQIYELIPHFLHKEWVMDQWERDYYITAVAGANNGSSLVVMSKGTKYTQQSYKVSNSFPYKWINKKWQDGFYVTSMATAGSRWAVVMSHNAGFSNQVVELDFLYPSEGIHKRWDRGYWITAAPATCDQAAFVLSVPRRRLTDETQETLRTINFPSKHVKVNKPAVVPHSVSYLQLTAGSDKMYSCFIAGQMV

SEQ ID NO: 48347 - protein, 507 aa, Zea Mays
MDYDKSRRSNSKKRRHSNSDDGKRKRLSSRHDDTSMSSEPIETIYRILCPAKKIGSVLGRGGDIVKALREETKAKIRVADSIPGADERVIIIFNYQNQPELTDEAAEKQISDGLGNMKPHCFAQDALLKIHDKIVADEIYDEVAHDESSDDVTARILVQGNQVGCLLGKGGSIIQQLRSDTGAGIRVLSSENLPQCALQSDELVQISGAPSLVRKALYEISTRLHQHPRKENRPLEQIIDASTQRKHESPTLQHENPMLPHLHSHHPPPIPLLDPYRSGPQYPVSETEEFSIRILCASELIGSVIGKSGANVRRVEQQTGARIKVQEIDKDASGERLIIVSSNEIPTEPISPTIEALILLHDKVITEMRRRTGAEIRVYSKADKPKYLSFGDELVQAAGQIHGLEDYRGLPSASGRFSSTIELRIPNSSLESIVGVGGVNLAEIRQISGARLRLHEAHAGSSESVVEIQGTLDQAKAAQSLLEGFISANSRQQQSHSSRMPLYPRWG

SEQ ID NO: 48348 - protein, 366 aa, Zea Mays
MDYDKSRRSNSKKRRHSNSDDGKRKRLSSRHDDTSMSSEPIETIYRILCPAKKIGSVLGRGGDIVKALREETKAKIRVADSIPGADERVIIIFNYQNQPELTDEAAEKQISDGLGNMKPHCFAQDALLKIHDKIVADEIYDEVAHDESSDDVTARILVQGNQVGCLLGKGGSIIQQLRSDTGAGIRVLSSENLPQCALQSDELVQISGAPSLVRKALYEISTRLHQHPRKENRPLEQIIDASTQRKHESPTLQHENPMLPHLHSHHPPPIPLLDPYRSGPQYPVSETEEFSIRILCASELIGSVIGKSGANVRRVEQQTGARIKVQEIDKDASGERLIIVSSNEIPTEPISPTIEALILLHDKVGR

SEQ ID NO: 48349 - protein, 412 aa, Zea Mays
MPRKHAPAFTPEAASASSSGGAGQPHNLPVLQAKMKRDPEGYEEELRQLHRHFESSVFLFQQQAALATTSSSGGGGEVAKELGDLALFLAHVAPFYPDDLADLPDQIGGLLDTNARGLPPGLRSHLVQALVLLVNRKIVDLEDTMELFMELQVIGDRAVKKLAFSHIVHSIRRMNQKHKNESTNRKLQNVLFKFLQAEEESRAKRAFTILCDLHRRRVWFDERTTNAICDACFHPSSRIMIAAISFLLGYENAPQEDDSDASSSEDEADQNPQILLSKQDVYKANHKGTSASKKKKKAKLQRVIRSMKRQQRKSVEETGSSFYSPLTYLKDAQGFAEKLFSRLQKCNERFEVRMMMLKVIARTIGLHHLVLLNFYPYLQRYVQPHQRDVTTLLAAAVQACHDMMLLNHCSSR

SEQ ID NO: 48350 - protein, 257 aa, Zea Mays
MGCGGGERMEEDEAGTASSSSSPPIVQLGYDQVLSVLRLLPPEAVLSFAATCRVFRAWASSDALWEALCCRDWGSRATAALAERRRDRGGGLQAPWRRVYAEVARLGALSARRVPARGASPRPRASHSLNLVAGWLVLFGGGCEGGHHLDDTWVAYAGSGAGNRPPPILSWQQLASGTPGGRFSHSCLLVGDTLVLFGGITDQGQRLNDTWTGQIICEEPRRPRISWRLLEGSMEAGLVIHGFLISQMAFSLAAGTK

SEQ ID NO: 48351 - protein, 236 aa, Zea Mays
MADKEKLESEEEYESDLDDAPLSALRRRDAASDDEDEDEDGGMPLRRRKAGSDADSDGQGAAEVYDEDGAYEESEEYEEYEYGGFKAGGGGVRGVAVEAVAGAGHEEGEAGDGEAEKAGEAAPGGEEEDKKGNEPYSVPTTGAFYMHDDRFQEGRGRGRGRQRRMVNSRRLWSPKDEQAWVHDRFDEMDLHDFHGDNPKRKQGGVFRGRGGGQGGRTRGISRDLRVLKALRQMQTW

SEQ ID NO: 48352 - protein, 996 aa, Zea Mays
MTGPLHSSSGHNAAAGGGGKTIEEMYQKKTQLEHILLRPDTYIGSVEKHTQTLWVYEDGAMVNRSVTYVPGLYKIFDEILVNAADNKQRDPKMDALRVEIDVDGCSISVYNNGDGIPVEVHQEEGVYVPEMIFGHLLTSSNYNDNEKKTTGGRNGYGAKLTNIFSTEFVIETADGRRQKKYKQVFSENMGKKSEPQITKCKQGENWTRVTFKPDLAKFNMIHLEDDVVALMRKRVVDMAGTLGKTVKVELDGHRVPIKSFCDYVDLYMKSANCDRPDNFKKIYEQVNDRWEVCVSQSEGQFQQVSFVNRIATIRGGTHVDYVTNQIATHVMAFVNKKNKNANMKLHNVKSHLWVFVNALIDNPAFDSQTKETLTTRQGSFGSKCELSSDFLKKVEKSSVIDNVLSWADFKLSKELKKTDGSKKSRISGIPKLEDANEAGGKDSHKCTLILTEGDSAKALAMSGIAVVGRDYYGVFPLRGKLLNVREANHKQIMDNAEIQNIKQILGLQHGKQYDSTKGLRYGHLMIMTDQDHDGSHIKGLLINFIHSFWPSLLKVPSFLVEFITPIIKATRGQTTKSFYTLPEYEEWRNNLGASASSWTIKYYKGLGTSTAKEGRKYFEDITEHKKDFLWVDDQDGNHIELAFSKKRIADRKQWLTNFQPGTYIDQRDKHVKYSDFINKELILFSMADLQRSIPSMVDGLKPGQRKILFCSFKRNFVKEAKVAQFSGYVSEHSAYHHGEQSLAGTIIGMAQNFVGSNNINLMYPSGQFGTRAQGGKDAASPRYIFTKLSHITRSIFPKDDDILLNYLNEDGQSIEPTWYMPILPMVLVNGSEGIGTGWSTYIPNYNPRDILANLRRLLNGESTVPMHPWYRGFKGSIEKTVNTKVAGSTYTVTGIIEVLDNTTLRITELPIRRWTQDYKDYLESLAPDTKNKDKVPFIEDVTCQGDNEDVYIQFTLSEKNMNIAMEEGLVKKFKLTTTIGTSNMHLFDSDGKIRNT

SEQ ID NO: 48353 - protein, 265 aa, Zea Mays
MSRRRQEGPIMYCSRTIFEDATPELVRDFFWDGDFRLKWDPMLAYCKSLDEFPQNGATIVHWIKKFPFFCSDREYIFGGRIWESGKTYYCVTKGVPYPSLPKKEKPRRVELYFSSWRIRAVQSPKHVGQQSACEVTLVHYEDMGIPKDVARVAVRHGMWGAVKKLQSGFRAYQQMRHTETTLSHSVIMARMTTKISITASNDPLDHDLSVADKISDENDSSNAVQHGFDWKWLVVGGAVAAVCVLNTGLVGKAVLLGAARRQAKK

SEQ ID NO: 48354 - protein, 127 aa, Zea Mays
MAGWCEQAVALLQRPAVAEMAVDVLLCAVPIWAAVMIGLVVGWSWRPRWTGLLFLGLRSRLRILWVPPGLGARRLWFACTALSACSVATKLISSAFRRCRGKHQDRASPDDDAAATRDGGCRADGRF

SEQ ID NO: 48355 - protein, 224 aa, Zea Mays
MELILAEKEGESKLSGPRGNSRRSPTNAKPTKTLFVINFDPINTRIRDLERHFDKYGRVANVRIKKNFAFIQFEAQEDATRALEGANGSHFMDRVISVEYALRDDDEKGERATNGYSPDRRGRERSPGARRSPSPYGRGRERGSPDYGRGKERGSPDYGRGGRSPDNGRGGRPAGGGGGGRGDHARGGGRRRSPDYYDRERREASPGYDRPPSCSPGTGRDARD

SEQ ID NO: 48356 - protein, 123 aa, Zea Mays
MDGIPIGRKIDLSALGSYDELSLSVDKLFRGLLAAQQDPLAAGAKECSQEEVAISGLLDGTGEYTLVYEDYEGDRVLVGDVPWGMFVSSVKRLRVLKTSDLSSSLTAPPGQKRTVTECPVFTS

SEQ ID NO: 48357 - protein, 440 aa, Zea Mays
MVNMRDNDSSSDAQLDEPLGRVSILSYGSGHMLNDITSSCWFTYLLVFLTDLGLSPGDAAIVMLSGQLADGFTTIFVGELMDRFGHFKLWHAGGSILVAISFSSVFGSCVPCKLMGINTSTLETVGYSTFAAIFNVGWAVTQVAHMSMVNCITSNPTSRVSLVANLSLYGVALVIFTLLQSVNVLVQVSISLGSCFVVIFLIGTKEPGSIRHCLDKSPSRISWDYWFKRVLYYQVALVYTLTRLVTNVSQAFLAFYVINDLEMNQSSKALVPAIIYICSLIVSVILQETRWSSWRLKLYFSAGAVLWILSGLGIVLLPSRMHNLMYAISIVIGAANALMTVTSISMEGVLVGEDLNGCAFVYGSLSFVDKVSCGIALYVLESYQGSTKIRSNLGTTSGYSVTRLGLGLVPAACSLLSAIAAYTMELPDTQKGPLVEPLLA

SEQ ID NO: 48358 - protein, 96 aa, Zea Mays
MRAKVYSTHLPSYFSRLLPHLLDPCGISPCWCSRRWPRSRSGRVGGGGGTNDSHRHGHRRRLIGLPLLHRCGNDRNQVMGTGLSRPCGSNDWNTSP

SEQ ID NO: 48359 - protein, 830 aa, Zea Mays
MDNNDTSDLRKFSRQAYLQKRRDKKIEEIRDEILDHQYIFQDLKLTEAEEKELRYKMKIYDLVKEHVETPDDVGAYKMPEAYDMGENVNQEKRFAVAMQRYKDPKANDKMNPFAEQEAWEEHQIGKSKLQFGSKDKKPSSDEYQYVFEDTIDFVKSSVIEGTQPEDDSDKEDVEAKDILKRELQDERKTLPIFKFRDELLKAVEEYQVIVIVGETGSGKTTQIPQFLHESGYTAKGKVACTQPRRVAAMSVAARVSQEMGVKLGHEVGYSIRFEDCTSDKTIIKYMTDGMLLREFLGEPDLASYSVVMVDEAHERTLSTDILFGLVKDISRFRPDLKLLISSATLDAEKFSDYFDSAPIFKIPGRRYPVEIHYTKAPEADYIDAAIVTVLQIHVTQSPGDILVFLTGQEEIETVDEILKHRTRGLGTKISELIICPIYANLPTELQAKIFEPTPEGARKVVLATNIAETSLTIDGIKYVIDPGFCKIKSYNPRTGMESLLINPISKASANQRAGRSGRTGPGKCFRLYTSYNYMHDLEDNTVPEIQRTNLANVVLTLKSLGIHDLVNFDFMDPPPSEALLRALEQLFALSALNSRGELTKTGRRMAEFPLDPMLSKMIVASEKYKCSDEIISIASMLSIGNSIFYRPKDKQVHADNARLNFHTGNVGDHIALLNVYNSWKETDYSTQWCYENYIQVRSMKRARDIRDQLDGLMERVEIEICSNTSDLDAIKKAITSGFFHHSARLQRDGTYKTVKNPQTVHIHPSSGLAEVRPRWVVYHELVLTTKEFMRQVTELKPEWLVEIAPHYYQLKDVEDSGTKKLPKGQGRAAL

SEQ ID NO: 48360 - protein, 340 aa, Zea Mays
MAERVVGTGSFGIVFQAKCLETGETVAIKKVLQDKRYKNRELQIMRSMDHCNVVSLKHCFFSTTSRDELFLNLVMEFVPESLYRVLKHYSNMNQRMPLIYVKLYTYQIFRGLAYIHTVPGVCHRDVKPQNLLVDPLTHQVKICDFGSAKMLVKGEANISYICSRYYRAPELIFGATEYTTSIDIWSAGCVLAELLLGQPLFPGESAVDQLVEIIKVLGTPTREEIRCMNPNYTEFRFPQIKAHPWHKIFHKRMPPEAIDLASRLLQYSPNLRCTALEACAHPFFDDLREPHARLPNGRPFPPLFNFKQELANASPELINRLIPDHARRHLGLTLLPATGP

SEQ ID NO: 48361 - protein, 267 aa, Zea Mays
MSQKRQPEEGDVPRRAADAGGGGGGDEPGGSSSRSSLPQRHGEPKRQRIALRDVITEVMRNTSIEKFLIALEPLIRRVVKEEIESAFANHASMMARSVTDSVPSVSKNLQLQFMTRLSLPIFTGSKIEGEGSLSITIALVDALTRQIVAPGKEFQIKVEIVVLEGDFESGEDDDWTAQEFNNNIVKEREGKRPLISGDAFIALVDGIGTVGELSFTDNSSWTRSRKFRLGARTEDGSFNGVRVREAKTESFVVKDHRGEYLVLVEED

SEQ ID NO: 48362 - protein, 303 aa, Zea Mays
MAAPRSSGGGHPDYPPETGVYYRGDLAPGSVDDSEWEEEEEDDDEEEASSSGREPETEETRFKSGIEGMLTRLQKDREQARPPPRSSTHDTREQSDDDALAGNSGAPSHIAAGGRHIRRVPENGSVRGSHYQNGIIEGNNTLESSSNDAWKTWTLGKGGLSHFEVAEVLPTERRKLSQHGDIASVQNDVQRSSNGVAVSDYPSDGVGTERDEIHSRLQSLELDLSSALKTLRSRFDKVLSHMSNSNGATVLDDISDDWELEETKVMQAQEELRSIRAKIAVLEGKIALEIIESWKDQKTACFP

SEQ ID NO: 48363 - protein, 483 aa, Zea Mays
MAAAAAAVNGSLDRLDVHERKAQKSYWEEHSGELNLEAIMLDSRAAELDKEERPEVLSLLPSYEGKSILELGAGIGRFTGELAKTSGHVFAVDFVESVIKKNGSINDHYGNTSFMCADVTSTDLMIEANSIDLIFSNWLLMYLSDEEIDKLVERMVKWLKVGGYIFFRESCFHQTGDTERKFNPTHYREPRFYTKVFKECQTFNQDGTSFKLSLITFKCIGAYVNIKKDQNQICWLWKKVNSSEDGGFQSFLDNVQYKATGILRYERIFGDGYVSTGGAETTKEFVEKLNLKPGQKVLDVGCGIGGGDFYMAEKYGTHVVGIDLSINMIMFALERSIGCKCLVEFEVADCTTKTYPDHMFDVIYSRDTILHIQDKPSLFKSFFKWLKPGGKVLISDYCKSPGKPSEEFATYIKQRGYDLHDVEAYGQFLSVLQKELDKFEKNKDDFLSEFAQEDYDDIVNGWKAKLQRSSAGEQRWGLFVATK

SEQ ID NO: 48364 - protein, 488 aa, Zea Mays
MAAAAAAVNDRLDVHERKAQKSYWEEHSGELNLEAIMLDSRAAELDKEERPEVLSLLPSYEGKSILELGAGIGRFTGELAKTSGHVFAVDFVESVIKKNGSINDHYGNTSFMCADVTSTDLMIEANSIDLIFSNWLLMYLSDEEIDKLVERMVKWLKVGGYIFFRESCFHQTGDTERKFNPTHYREPRFYTKDGTSFKLSLITFKCIGAYVNIKKDQNQICWLWKKVNSSEDGGFQSFLDNVQYKATGILRYERIFGDGYVSTGGAETTKEFVEKLNLKPGQKVLDVGCGIGGGDFYMAEKYGTHVVGIDLSINMIMFALERSIGCKCLVEFEVADCTTKTYPDHMFDVIYSRDTILHIQDKPSLFKSFFKWLKPGGKVLISDYCKSPGKPSEEFATYIKQRGYDLHDVEAYGQMLKNAGFSHVIAEDRTDQFLSVLQKELDKFEKNKDDFLSEFAQEDYDDIVNGWKAKLQRSSAGEQRWGLFVATK

SEQ ID NO: 48365 - protein, 185 aa, Zea Mays
MAATALSMSILRAPPPCFSSPLRLRVAVAKPLAAPMRRQLLRAQATYNVKLITPEGEVELQVPDDVYILDFAEEEGIDLPFSCRAGSCSSCAGHLQREAHHAGGGGGAAGARRRLHPGLRRGGRHRPALLLPRGVLLLLRRQGRLRLRGPVRPELPRRRPDRRRLGAHLRGVPHLRRRHRDAQGG

SEQ ID NO: 48366 - protein, 754 aa, Zea Mays
MEDGAEKATTPDSSSSQAAPPALSAVYVNRRLVAGNRAMAAVHVALVATVIGQRALALLSAGTSSASPASRSLQVQHVAMALADLTLLFVWALSQSGLWRPVTRAAFPGRLLAAVPRGALPRVDVLVVTADPDKEPPLGVVNTVVSAMALDYPGGKLSVYLSDDAGSPLTLLAARKAYAFAARAWVPFCRRHSVQCPWPDRYFAGDDDDADGDRRREELAEERARVRKLYEKLKADIEAAKNDETISGSWSKDKRQNHDAYVEIIEDGDGVEEIPALVYVAREKRRAWPHHFKLRVSGVVSNAPYVLVLDCDMACNSRASALDAMCFLLDRRPPPDSLAFVQFPQLFHNLSHKDIYANELRYIFGTRWFGLDGVRGPPLSGSGFYVRRDALYGATPTADFMPDATAVAELKTRFGHSDRLVASLRSPGVPPEAEAMMSLAALASCAYEAGTAWGAGVGFMYQSVVEDYFTGFQRFFARGWTSAYCYPEPRPAFLGSVPTNLNDVLVQNKRWMSGMLAVGVSRRHSPLACRPLLRASLLQAMAYAYFGFAALCAVPVLCYATLPQLCLLRGVPLFPCPAATAAAFASSLLQHMAEVCVSRRGRLDLRTWWNEQRFWVLNALTAQLFGCVSAAQELLGARALDFDLTSKAAVDGSLYQDGVFDFTGCSALLLPATTLSVLNAAAIVAGTWKMSSSSSSSSGGFHFAPQLFLMCYGAALSYPLLEGMFLRRDPARVPPRITALSVALAAVLLAAMLG

SEQ ID NO: 48367 - protein, 590 aa, Zea Mays
MISARTAAASPASLWKRGGQSEGGGSCDGCRTYRNTLRRAAAAKVRALPSRAVEAVKMGSAAEVEQEEAVKMGSAAEMEQEEAEVAAAAAGVVVEDHYGEDSATEELPILPWAFSVASGYTLLRDPHHNKGLAFMEKERDAHHLRGLLPPAVVPQELQIKKIMHNLRQYQVPLQRYMAMMDLQERNERLFYKLLIDNVEELLPVVYTPTVGEACQKYGSIFRQPQGLYVSLRDKGKVLEVLRNWPHRNIQVICVTDGERILGLGDLGSQGMGIPVGKLALYTALGGVRPSACLPITIDVGTNNEKLLNDEFYIGLRQKRATGEEYHELMEEFMAAVKQIYGEKVLIQFEDFANHNAFNLLAKYSKSHLVFNDDIQGTASVVLAGLLAALKVWAHEHEPLTTLYDAVQSIKPTVLIGTSGVGRTFTKEVVEAMASFNERPIIFSLSNPTSHSECTAEEAYNWTQGRVIFASGSPFDPVEYDGKVFVPGQSNNAYIFPGFGLGLVISGAIRVHEDMLLAASEALAAQATQENFDKGSIFPPFTNIRKISARIAAAVAAKAYELGLATRLPPPRDLVKYAQSCMYTPVYRNYR

SEQ ID NO: 48368 - protein, 466 aa, Zea Mays
MILSTVKRKASSPLNGTDHEGNIDEEESFILRDRLLPLIICLLRTDKFPAVLRIYRDTLITVMKASIKATVAELLPVLTARPIDSDSVTGGRATDADAGGQSLANKLRSLSSEGFVQLLSAIFRIVQVHLQQAAEVKRIVEWIMGNLDETLSIDASNPTLQHGGSVIYDTQENDSSRGSNTLARSTSKIPFVQGKINDFSIISSIKNVRADVLRENTEAVFAACDAAHGRWAKLLGVRAGLHPRLRLEEFLIIYSITEEFIAATEKIGGRLGYNIRGILQQQSKQFVDYQHNVRMTKIKAVLDQETWVAVDVPEEFQAIVLSLSSTYSSVNGMEMPSTDDNSKFSDHQPTSQELTYSAENNADNGKVTSGTGENQVESTSQSANNVAGNLKSTLQTIVHGGVGYHMVNCGLILLKMLSEYVDISKCLPSLSLEVVQRVVEILKLFNTRTCQLVLGAGAMQNLSCIH

SEQ ID NO: 48369 - protein, 791 aa, Zea Mays
MASRPPLRTTSVASVFSSTDSSTSTGPPGGVPQSITALLNNPLPSSAASSYSWLSWPPTTITLPDAAPPPPSHPCEITRADFAPYLAAVSDPFARFADIRLHAHAELAASSDAEGAPAASSGLAACLREVPALFFKEDFALEDGPTFQAACPLDDDALQERLGQHLDVVEAHLVREIALRSESFYEAQGRLRGLDGEIVTAVGRIRELREVVQVLTGDLVGAARQVQELNATRGNLVALQQKLTVILYVSQALTALKLLVAAADCAGALDVIDNLQNLLDTDELAGLYCFRHIRDQLGTSLDSVNSILSAEFVHAAVPDGKAVDAMILSTVKRKASSPLNGTDHEGNIDEEESFILRDRLLPLIICLLRTDKFPAVLRIYRDTLITVMKASIKATVAELLPVLTARPIDSDSVTGGRATDADAGGQSLANKLRSLSSEGFVQLLSAIFRIVQVHLQQAAEVKRIVEWIMGNLDETLSIDASNPTLQHGGSVIYDTQENDSSRGSNTLARSTSKIPFVQGKINDFSIISSIKNVRADVLRENTEAVFAACDAAHGRWAKLLGVRAGLHPRLRLEEFLIIYSITEEFIAATEKIGGRLGYNIRGILQQQSKQFVDYQHNVRMTKIKAVLDQETWVAVDVPEEFQAIVLSLSSTYSSVNGMEMPSTDDNSKFSDHQPTSQELTYSAENNADNGKVTSGTGENQVESTSQSANNVAGNLKSTLQTIVHGGVGYHMVNCGLILLKMLSEYVDISKCLPSLSLEVVQRVVEILKLFNTRTCQLVLGAGAMQNLSCIH

SEQ ID NO: 48370 - protein, 303 aa, Zea Mays
MDGLHGTDACFSPARAVSPQVRLPGPPDVGSQYLAELLQEHQKLGPFMQVLPICSRLLNQEIMRVLNIRRQHGAAVDFEKFAAASPNQIHPSPPMPNFCGNGFSPWNGMHSERVGVPQGAMGWQGPPQSPASYIVKKILRLEVPTETYPNFNFIGRLLGPRGNSLKRIEACTGCRVFIRGKGSIKDSGKEEQLKGRPGYEHLSEPLHILIEAELPANVIDARLAKAQEILEELLKPVDESQDYYKRQQLRELAMLNSPLREESPRSGGAPPSPFSKTVSVQHICTEDKGCWHDDHRGRKGALP

SEQ ID NO: 48371 - protein, 170 aa, Zea Mays
MGWQGPPQSPASYIVKKILRLEVPTETYPNFNFIGRLLGPRGNSLKRIEACTGCRVFIRGKGSIKDSGKEEQLKGRPGYEHLSEPLHILIEAELPANVIDARLAKAQEILEELLKPVDESQDYYKRQQLRELAMLNSPLREESPRSGGAPPSPFSKTVSGRPNKTGDTEL

SEQ ID NO: 48372 - protein, 164 aa, Zea Mays
MDASRSNLAGGSNPSQFANVESWNFDGCYYNIMDDENLQHNADVHEVQGLPSDDVEVHSTSATKKVARRAKNFSHQEDEVICSAWINGSQDAIIGMNQTSGGYWKRFADYYDKYKPEGSQRTQIAIQHMWKTIQKEVNKFCAYLSKIEHRNESGKVAEDRLKMP

SEQ ID NO: 48373 - protein, 173 aa, Zea Mays
MTSTVTTTVGCGGLPVRPLSTATRGRPRRCAVRAQAAGADASNDKSVEVMRKFSEQYARRSNTFFCADKTVTAVVIKGLADHRDTLGAPLCPCRHYDDKAAEVAQGFWNCPCVPMRERYATVCFFLLPIMTLLGRIRLSPSRRSKRRHRSSKPLYLSRSVYLTANFLYVYVLK

SEQ ID NO: 48374 - protein, 481 aa, Zea Mays
MKSTVFSTAVVSIGYALLGWDFAALSEANHHMEKEFELLNGPSIEGEIAAIVEGVDIISDSTVGAARAQSFSGTSASHTWPRSTFYWQLSDPLVDLLGSVHENMSEGGSRRNSFFPVFNSFSFPEHEHMNEHRDGNSDQQTRETYYAGEANNGDGLRASLLSQAASVEVNDTNTSFTSEGSSSYLRRHGTSVLAQEFMASIHDYDIEEEEEEIHGFALPHQSAPRDMESTGRHPFRHQIVRLSETADMKFKWRVLLQPGIRHALCYGMLIQALQQSTGISGLLRCAPEIFEQSGVASLFSDIGLSPHSTSILMSTLNALLILPCITAAMLLMDVCGRRVIVLATTPVLILSLSVMSMSTLVNMGPFESAVLFHFALTICFWSYVIGLGPIPNILCSEIFPTKARATCASFCSLSFWFGGLLSAYCFPVMLSTIGLGGACGIYALVCCAPLFLVYYRIPETKMLNLELIAELFKLSRQEHVQ

SEQ ID NO: 48375 - protein, 139 aa, Zea Mays
MISPAHLAFAAAFLLVVRSSAPGAAAARPIFDGKPSPSEATATARWLAAQNTWGVLSTISSDLSGAPFGNVVSYSDGVPGEGRGIPYFYLTTLDPSARDALEDERTSFTLSEFPLGTCGEIDPENPTCAKLTLRLMERY

SEQ ID NO: 48376 - protein, 128 aa, Zea Mays
MCSILFLSQVIVDQFPFGWLLINLEYFICSTISSDLSGAPFGNVVSYSDGVPGEGRGIPYFYLTTLDPSARDALEDERTSFTLSEFPLGTCGEIDPENPTCAKLTLKWKGTKNYIHDKMIDHSPFVCI

SEQ ID NO: 48377 - protein, 1078 aa, Zea Mays
MAYRGGGGRGGGGRDGDQQRPPHVHGRGAGGPGGGRTFVWPPPPSSTPRPVPPYHHHHHHQVPMGYRAPIVLPHQAAYGVPMAVYRGAPAPAYRVPAPASPRPRVSFSPAPPASPVTIRAPPPSPTTPPAAPTTPAPPRQPAPAPAPEPAPAPPPAPSLAALAKEVEKKLFVSETALAPAAAAAAAAAAQGTAGAGADDAASDVDLAPVSKKGLAHPARPALATVGRNVFVRANHFLVHVADNNLFHYDVAINPESKSRATNREVLNELIKLHGKTSLGGKLPAYDGRKSLYTAGSLPFESEEFVVTLVDPEKKEKERVEREYKITIRIAGRTDFYHLQQFLLGRQRDMPQETIQVLDVVLRESPSWNYVTVSRSFFSTTFGHRGDIGEGLECWRGYYQSLRPTQMGLSLNIDISATSFFKPVTIIKFVEEFLNLRDTSRPLFDRDRVKIKKALRGVRIETTHQQDQIRRYKITGITPIPMSQLIFPVDDKGTRKTVVQYFLDKYDYRLKYVSWPCLQAGSDSRPVYLPMEVCKIVEGQRYSKKLNDRQVTNILRATCKRPQEREKSIRDMVLHNKYADDKFAQEFGIEVSSDLVTVPARVLPPPLLKYHDSGREKTCAPSVGQWNMINKKMINGGTIDNWTCLNFSRMRPDEVQRFCMDLTHMCNATGMVVNPRPFIEVRSAAPNHIENALRDVHKRATQILAQQAVGNQLQLLIVILPEVSGSYGKIKRVCETDIGIVSQCCLPKHASRPNKQYLENVALKINVKVGGRNTVLERAFSHDGIPFVSEVPTIIFGADVTHPPPGEDSASSIAAVVASMDWPEITKYRGLVSAQPHRQEIIEDLFTVSKDPQMGHNVNGGMIRELLIAFRKKTNRKPERIIFYRDGVSEGQFSHVLLHEMDAIRKACASLEEGYLPPVTFVVVQKRHHTRLFPEVHGRRDMTDKSGNILPGTVVDQMICHPTEFDFYLCSHAGIQGTSRPTHYHVLYDENEFTADALQSLTNNLCYTYARCTRAVSVVPPAYYAHLAAFRARYYVEGESSDGGSTPGSSGQTVAREGPVEVRQLPKIKDNVKDVMFYC

SEQ ID NO: 48378 - protein, 193 aa, Zea Mays
MLHTKFIAPLPPNMHEFMCSLKMVFPNVVDISHLWRQIGPLRKAKNIQAALSYLQRQYFVPIEIEIPQQDGTSSITKNEQNVLRITKLFAKLSNLLKISPECQLQSREQCTAVEEYCNIFYPSCVVGGSDDANFAFESDTTETVSTDNIIFLWGFREKSVKELKSYLIGLHQAFSEDFEVKLLDKTCSAFDIP

SEQ ID NO: 48379 - protein, 585 aa, Zea Mays
MDSDYGVPRELSEVQKKRTLYQPELPPCLQPIAHFLRKTAVVPDAKVISEHQAVRVGIVFCGRQSPGGHNVVWGLYEAIKAHNQNSKLIGFLGGSDGLLAQRTLEITDKVIASYKNQGGYDMLGRTKDQIRTTEQVNGAMASCQALKLDALVIIGGVTSNTDAAQLAETFAEAKCATKVVGVPVTLNGDLKNQFVETTVGFDTICKVNAQLISNVCTDALSAEKYYYFIRLMGRKASHVALECALQSHPNMVILGEEVAASKLTIFDITKQICDAVQARAEKDKNHGVILIPEGLVESIPELYALLQEIHGLHGKGVSVENISSQLSPWASALFEFLPPFIRKQLLLHPESDDSAQLSQIETEKLLAQLVETEMNRRLKEGTYKGKKFNAICHFFGYQARGALPSKFDCDYAYVLGHVCYHIIAAGLNSYMATVTNLKNPVNKWRCGATPISSMMTVKRWSRGPSATQIGKPAVHMASVDLKGKAYDVLRQNSSSFLLEDVYRNPGPLQFEGPGADSKPISLCVEDQDYMGRIKKLQEYLEKVKRIVKPGCSQDVLKAALSAMSSVTETLNIMTSSSTGQTPLSH

SEQ ID NO: 48380 - protein, 1043 aa, Zea Mays
MHSQAMSVLKHLAVTGFSCTAIFTSLLRTISRFDPTNHVVFELLVKAYVKERKVLDAAVAVLFMDDCGFKASPVSCNTILNALVEEGESKHVWLFLRESLARKFPLGVTTCNILLNSLCTNGEFRKAEDMLQKMKSCHISNSVTYNTILHWYVKKGRFKAALCVLEDMERDSVQADVYTYNIMIDKLCRIKRSTRAFLLLKRMRKDDLTPDECTYNTLINGFFREGKINHARYVFNHMLRQNLVPSVATYTTMIDGYCRNRRIDKALSILSEMQITGVMPSELTYSALLNGYCKVSMLGPAIYLMEDLKSRGITINKTMRTILIDGFCQVGEISKAKQILKSMFEDGIDPDVITYSALINGMCRMAKMHETKEILSRMQKSGILPNDVLYTTLICYYCKAGYVKEALKHFVDIYRRGLVANPVIHNALLHAFYREGMITEAEHFRQYMSRMNISFDSVSFNRIIDSYCHRGNIVGAFSVYDDMVRYGYSPNVCTYQNLLRGLCQGGHLVQARQFMSCLLDIPFAIDEKTFNALLLGICRYGTLDEALDLCEKMIKNNCLPDIHTYTILLSGFCRKGKILPALVILQMMLEKGVVPDTVAYTCLLNGLINEGQVKAASYVFHEIICKEGLYADCIAYNSLMNGYLKSRNVNTIKRMMSDMYQNEVYPNSASYNILMHGYVKRGQFSKSLYLYKYMVRKGIRPDNVTYRLLILGLSECGLIDIAVKFLEKMVLEGIFPDRLVFDILITAFSEKSKMHNALQVFNCMKWLHMSPSSKTFSAMINGLIRKGYLDHSHKVLHEMLQVGLQPNHTHYIALVNAKCRVGEIDRAFRLKEEMKAIGIVPAEVAESSIIRGLCRCGKLEEAVIVFSSMMRSGMVPTVATFTTLMHSLCKESKIADALHLKRLMELCRLRVDVVSYNVLITGLCKDKHISDALDLYGEMKSKGLWPNITTYITLTGAMYSTGRVQNGEELLEDIEERGLIPAYKQPENLERRMEDAIIRLNMIRNCRKEVPFRGVELLPLDPKPVCSAASDCNPTETRQHKGI

SEQ ID NO: 48381 - protein, 232 aa, Zea Mays
MEAAGGGAEDEQVMSEVHLGCPPHFSGLLVSHFSFSSRPLGPYGHKGGGGGGGGSELVAATSGSGGDSPDAVAVDEDGDLVLDRRRRNKYARGDRHLFTIQHGVTSSLKSVGLQVWKAALLLSDFILHESFSSPNFDGVTAIEIGAGTGLVGLALARVARRIFVTGSMKLKSVYENWTGKWHGLHLWVHMTLLIQVGIYGLQVKLRRLRKQQSCLLQMLFTVMISQICSSTR

SEQ ID NO: 48382 - protein, 57 aa, Zea Mays
MMGLPVFSSPRTKGAALVAFLAGSIAFFWLLFPATSPELYNSSFDRCSCWHGFCNWK

SEQ ID NO: 48383 - protein, 292 aa, Zea Mays
MATPAGLLLASPPVISGVAAMAACAAMAVFYVAVLYAPTVILRFPPPTSLRTFLHRRFACAAVASAASVLATASLLRVWSLSDFADMFAVFGIRKDHLIQAVAIPLLLTSLVYAGSFVARVWLLVSSWGGGDEVEIGCAQRLAQWIQAAVADVMVWRNYVVAPFTEELVFRACMIPLLLCGGFKMSTIIFLSPIFFSLAHLNHFFELHQQGCNFMRALLIVGNLLCPIIAHVFCNMMGLPVFSSPRTKGAALVAFLAGSIAFFWLLFPATSPELYNSSFDRCSCWHGFCNWK

SEQ ID NO: 48384 - protein, 202 aa, Zea Mays
MATPAGLLLASPPVISGVAAMAACAAMAVFYVAVLYAPTVILRFPPPTSLRTFLHRRFACAAVASAASVLATASLLRVWSLSDFADMFAVFGIRKDHLIQAVAIPLLLTSLVYAGSFVARVWLLVSSWGGGDEVEIGCAQRLAQWIQAAVADVMVWRNYVVGMHDTSSALWGIQNVYNYISESNLLQSSALEPFFRTTPAGM

SEQ ID NO: 48385 - protein, 200 aa, Zea Mays
MATPAGLLLASPPVISGVAAMAACAAMAVFYVAVLYAPTVILRFPPPTSLRTFLHRRFACAAVASAASVLATASLLRVWSLSDFADMFAVFGIRKDHLIQAVAIPLLLTSLVYAGSFVARVWLLVSSWGGGDEVEIGCAQRLAQWIQAAVADVMVWRNYVVAPFTEELVFRACMIPLLLCGGFKMSTIIFLSPIFFSLAQ

SEQ ID NO: 48386 - protein, 194 aa, Zea Mays
MKLREASGNSDMISRLEAAESKLQELKSNMGVLGKEALAAMTAVEGQQQRLTLQRLIALVESERNYHQKVLQILDQLEREMVSERQRIEGAPPPVVESSMPPPPAYEEVNGIFMRNTVAELVETVEYFLAEAIQSYRAESDTELNLSAGDYIVVRKVSNNGWAEGECRGRAGWFPYDYIEKRERVLASKVAQVF

SEQ ID NO: 48387 - protein, 229 aa, Zea Mays
MGAIGIVVRACAPLAPAAAAAPAPSGSSSRDAAQAQRWSKPTRTGRVLVLGGTGRVGGSTATALSKLRPDLGILVGGRNRFDREKGESIAAKLGGQSEFVQVDTRNAGMLEEALQGVDLVVHTAGPFQRAEECTVLQAAISTKTPYIDVCDDTDYSWRAKGFHEQAKAAGVPAITTAGIYPGVSNVMAAELVHAARSENGEPERLRYWWCWSNNSDNKFSTSWGGCDCI

SEQ ID NO: 48388 - protein, 1282 aa, Zea Mays
MDTPCLVKLLSVLVEIFGPTPLFFKTCKENDEKLDIKSYLEFFNDELLPWCLDGKYSTCNSKIDLLLSLFQDESFFDQWCSIIKCTTTEQKQSVDDKTSNILGRYELLTLLLQKIREKIAGGKLRNLQENGYLLQHLRLDILDSTAASVLCDLPASDCQVSFICAALGGADQEDQICFLSPETVCKILGSILKNLALVLKTSTFEWARLAHSLLPAEPEHLMVPEENSSIINFEMARIAFKVLQGSLFSLWRLEENSVFPSILAALFVIEWECSMSLALDEEKCLESNIEDTEVGVSMCSSSKGCLEEEMHLKVNLAESIHVFCQSLSPSFWDNLHSCTLNRLATILPQCVRNLESFFDVLLSEGEHWPLWLMPSLQNGHLSVKVQLDPDITDEIELKHERFVAFVDRLILKLGFSEVVLGIPGNIQSATSQSIDITSPVSSLSRVWVAGEVLCTWTWKGGCALKTFLPLLVQYMKDESYLEINIVPLLLDTLLGGALMHDSGPWVLFNAWHLSDNEIDKIQDRFLRALVALLFTINTNDCLWRESDALVFFEQLLSNLFIGSSVNRKCLKILPYVMTSIIKQFSALNNGDSSYADLVRKSIQSWLDATISCLSSSSREVPVQDIEDWMQVVLSCFPLRITGGARELVAVVEREISDTERSLMLTLFQKYQIFYGSTASSLVTSGTAVSTTVELLGVKLTAVLVGYCWSNLKENDWHFVFRMVFKCIESSVLLVEEMTDGINDATINQVSSEDALEKLKLVVGTTDKLTLSLAESALVTMCQLNHLCNIQEAENSQCVQLIKSGDYAESNDKMVESVLRLFLASGVSEAITKSCSEEASSVIGSSRHAYLHFWELVASFIKNAPLQSRKSALESMELWGLTKGSVSGLYSILFSSQPIFHLQLAAFSLLLSEPFCQLSLVKNYSMGESCSSAQQSGTSQSAELMPDSDKTVHLREELSDLIEFPTSELLKTDLTARDRVDVFIAWSLLLSHLQTLPASSSIKGDVLQYIQEKVSPCILDCIFQHIPVKAAAPNGKKKDTELAPEAEAAAKASKNAIATCSLLPYLESLWPIGTLQMASLAGSLYGMMIRLLPSFVRTWFTTLRDRSLSYSIESFTKQWCSPPLLLDEFSQVKESVYGDENFSVSVNRSAFEIVATYKKEETGIDLVIRLPSCYPLRHVDVECTRSLGISEVKCRKWLLSLTSFVRSQNGAIAEAIRTWKSNFDKEFEGVEECPICYSILHTSNHNLPRLACKTCKHKFHGACLYKWFSTSNKSTCPLCQTPF

SEQ ID NO: 48389 - protein, 393 aa, Zea Mays
MDHSFTEKGKKRFVPVKLSDVRKEVQCPICLGIIRKTRTVMECLHRFCRECIDKSMRLGNNECPACRTHCASRRSLRDDPNYDALIAALYPDIDKYEEEELAFNEEENDRNKQIQASIAEAFRKQSEVIGRKSTAKATAAAFVRRSRRNIRPNGQNTYFRGRGKASSDDVALACSEDEEDGNGESCSKEASSAEESSPEKKQKRLPKWPTPRSSPARACNDEVASDEKDDVGISRENFSTSPLRAWGKNGTRSQTRHSSFSGSNGRMVKGGRMIKLVECLRNSDDNEGERDVHLCLLPLDGQTAPNLEKSYLCCGPTLSIKQLCQFVASQTSHKDEEVEMYALKPSCSKPVSTNTCGPDKARLAGEERLSDLRSSFTFPNGVLELVYAIKVAN

SEQ ID NO: 48390 - protein, 258 aa, Zea Mays
MVGNPLTDDYYDSKGLAEYAWSHSVVSDEVYERIKKVCDFRVSNWTDDCDTAMSAVFSQYQEIDIYNIYAPRCNLPPSSAALALAVDKAVVANRQEHFRRRIRMFSGYDPCYSSNAEKYFNDAGVQTAFHANASGARKWEVCSDSILRSYNFSVLSVLPIYSKLIKAGLRVWLYSGDADGRVPVIGSRYCVEALGLPVKTQWQPWYLNKQVAGRFVEYHGMTMVTIRGAGHLVPLNKPAEGLALIDTFLQGKQLPTHR

SEQ ID NO: 48391 - protein, 225 aa, Zea Mays
MHDVHAVIGELSESGSFIGHVNQSLGSCPIEVFNLVKGSILQAAEPLKELLPAIMDVMIGIIVKKSNEDLKHLKGITATYRMTSKLPVRHSPYVSGILHPLKVFLEGDRMHYLSEDDKTKLCRGSANKITATYYDLVSEVVTVARKTESSLQRLRQGAQRRVGASTDASDSIISDTDKICMQLFLDIQEYARNLRAIGIDAREIDSYRALWQCVAPKDRHENIQF

SEQ ID NO: 48392 - protein, 127 aa, Zea Mays
MTSREMQTVVGTLGMVDHRDQSGMETENLGVGMMIEEQKIGTDSGVTTHLRDHEVRGRGTMTDPTEEEKQNQKDADMMWNMRIASGQGTAESDAMKEVFTKNTNGARGRGGLTFVLLNCNTTSAVKF

SEQ ID NO: 48393 - protein, 184 aa, Zea Mays
MTAASTFAAAFMTPLLTSKLAGQYVAVDPMGLFVSTSQVVLAPVLLGALLNQYCNGLVQLVSPLMPFIAVAAVAVLCGNAIAQNASAVLASGSQVVLSVGCLHASGFFFGYVLSRVLGIDTSSARTISIEVGMQNSVLGLVLANKHLGNPLTAVPCAVSSICHSVYGSILAGIWRSMPNKDKGE

SEQ ID NO: 48394 - protein, 312 aa, Zea Mays
MVRIGEALSLGFPVWVASACALALWRPPAFLWVGPTAQMLGLSFTMLGMGMTLTLDDLKTTLLMPKELAAGFILQYTVMPLSGFFVSKLLKLPSHYAAGLILVACCPGGTASNIVTYLARANVALSVLMTAASTFAAAFMTPLLTSKLAGQYVAVDPMGLFVSTSQVVLAPVLLGALLNQYCNGLVQLVSPLMPFIAVAAVAVLCGNAIAQNASAVLASGSQVVLSVGCLHASGFFFGYVLSRVLGIDTSSARTISIEVGMQNSVLGLVLANKHLGNPLTAVPCAVSSICHSVYGSILAGIWRSMPNKDKGE

SEQ ID NO: 48395 - protein, 102 aa, Zea Mays
MTLRKTSSTSREEVEKLQMENRSLREKEEKSSSETKRLQREIARLNEGMKKLKSETEEHERKASVAEAHVDALQKQSEELLLEYDRLLEDNQILQTQLLSRG

SEQ ID NO: 48396 - protein, 182 aa, Zea Mays
MVVSVRTNPSHAPPTPPGARPHLSTSGDYHQSTTMAATSLARLSRRATISATAAAPSLRRLLSVTSTASVAASAPPPPPSAAGAAAVGADRVRWDYRGQRKLVPLGQWMPKVAVDAYVAPEAVLAGQVTVHDGASVWSGAVLRGDLNKITLGFCANVQERCVLHAAWTAPTGRSGTIFVSAL

SEQ ID NO: 48397 - protein, 302 aa, Zea Mays
MDNHQLVAMAAVAQPASPTSPHVAHKIPPGDGPYARAKHFQLVEKDLDASIAWFWKAISAGDKLDSALKDMAVVMKQRGYLAEAIDAIRSLRHLCPKQSQEPLDNILLDLYKASGRTKEEIELLKQKLRKIYLGEAFHGRTTKRARSHGRKIHVSVKQETSRVLRNFMAAEVVYRKAQMIDPDANKACNLALCLIEQARLADAELVLADVLAGRYLQARDQQDGKIVRKVEELLARIMAHTTWPGGGGGDGRRRPADKSGSGSESDDDDWVENQMLALLDVAVPYRKKSRRLPVFEEISRAE

SEQ ID NO: 48398 - protein, 320 aa, Zea Mays
MICQDSFTRCFKSNSPEPWNWNIYLFPLWCFGVVIRYGILFPLRSLTLAIGWLAFFAAFFPVHFLLKGQDKLRSKIERKLVEMMCSVFVASWTGVIKYHGPRPSTRPHQVFVANHTSMIDFIILEQMTAFAVIMQKHPGWVGFIQKTILESVGCIWFNRNDLRDREVTARKLRDHVQQPDNNPLLIFPEGTCVNNQYTVMFKKGAFELGCAVCPIAIKYNKIFVDAFWNSKKQSFTMHLVRLMTSWAVVCDVWYLPPQYLREGETAIAFAERVRDMIAARAGLKKVPWDGYLKHNRPSPKHTEEKQRIFAESVLMRLEEK

SEQ ID NO: 48399 - protein, 535 aa, Zea Mays
MTQVKPAPGGRMLTVLRVHLPSEIPIVGCEITPYVLLRRPDGGVFTDDVSETAPVDGYFMRYKWYRIQSDRRAAICSVHPTEQATLQCIGCLKSKIPVAKSYHCSSKCFSDAWQHHKVLHDRAISALNENGTEDDELFGRFGSGSSSSGVISAALSGSTSNLSLSSGVNNGPTPVYPTGTEKSSGETWFEVGWSRTYTATTDDIGHVLRFECIVVDVETRGTVRAPTSVMTSRVIPAPTPTPRRLIPVNAADAMVHFDLDSRTSSFGTFTVLSYNILADTYATSDTYSYCPTWALTWAYRRQNLLREIIGYHADIICLQEVQSNHFEDFFSPELDKHGYQPLYKKRTTEVYSGSPQAIDGCATFFRRDRFSHVKKYEVEFNKAAQSLTDAIIPAAQKKLALNRLVKDNIALIAVLEAKFSNHGTENPSKRQLLCVANTHINIHHDLKDVKLWQIHTLLKGLEKIAVSADIPMLVCGDFNSTPGSTSHGLLARGKVDHLHPDLAIDPLGILRPLSKLTHQLPLCILIIREYGWCWL

SEQ ID NO: 48400 - protein, 402 aa, Zea Mays
MTQVKPAPGGRMLTVLRVHLPSEIPIVGCEITPYVLLRRPDGGVFTDDVSETAPVDGYFMRYKWYRIQSDRRAAICSVHPTEQATLQCIGCLKSKIPVAKSYHCSSKCFSDAWQHHKVLHDRAISALNENGTEDDELFGRFGSGSSSSGVISAALSGSTSNLSLSSGVNNGPTPVYPTGTEKSSGETWFEVGWSRTYTATTDDIGHVLRFECIVVDVETRGTVRAPTSVMTSRVIPAPTPTPRRLIPVNAADAMVHFDLDSRTSSFGTFTVLSYNILADTYATSDTYSYCPTWALTWAYRRQNLLREIIGYHADIICLQEVQSNHFEDFFSPELDKHGYQPLYKKRTTEVYSGSPQAIDGCATFFRRDRFSHVKKYEVEFNKAAQSLTDAIIPAAQKKIILR

SEQ ID NO: 48401 - protein, 373 aa, Zea Mays
MKQVWGRSSKDMTTMPPPRHRGAAKKPMWIIVLLSLVCVALMGAYVYPPRHYSACYFFASSVCTPFKDWLPAVVRERTDEEIVSSVVIRNLLSMPMAVSKNPKIAFMFLTPGSLPFEKLWEEFLQGHDGRYSIYIHASREIPVHSSSLFVGREIRSEKVVWGRISMVDAEKRLLANALEDVDNQFFVLLSDSCVPVHTFDYIYNYLMGTNVSFIDCFLDPGPHGTGRYSMEMLPEIEQRDFRKGAQWFAITRRHALLILADNLYYNKFKLYCKPAEGRNCIADEHYLPTFFNMVDPGGIANWSVTHVDWSEGKWHPRSYRAADVTYELLKNITSVNENFRITSDDKLGLRSRGPGSLPMAEQERRLLIPVRLD

SEQ ID NO: 48402 - protein, 304 aa, Zea Mays
MAAPVPSPSPGGGAASSPGPTGGRGPDGGRDPCAGLLLRRSTSARSMAASLSLVATTCSAAATSSRAWTQLAVAFFDVTLSARHADIRHRRHSPAALRPVREECVSHVQFLAGLPLLEARSARRYLVLCCGTASCMGTKVLSTLDGIQRHKQDPCLRTLREKLGRDRSAPDQPGRHQHEPHLRDEPRRARPERKEEGEQDVRRPHHPCRARRSSSRAHETGVPSNSQGREPAEPAAAAERQRPGNRRRRGDPGAGARAGGGDAAHNRGPLLYRVCSRPQLLRSCVPVARVFDWIFFQPFSVCIS

SEQ ID NO: 48403 - protein, 164 aa, Zea Mays
MTSMHYRLSLRLIKIAVLSLRVVSSKPSRKITVQRANLTQNSPQNRSKGYFCCLSLLVHLNLFQIITLKKGVTMKNKGSRIIILKKGFLCCLLKKCVSHGLMMKGALQLDMFLLRIHIGHKHHALLQFLLSLSLAIRWLVLRVIMADIINHQHLRLSLDTFLLF

SEQ ID NO: 48404 - protein, 292 aa, Zea Mays
MEEGNDYYVVRKGDVVAVYKTLSDCQGQICSSVSGPAASAYKGHSWSRGKEEYLSSRGLSDATYVINAAELREDILGPLVPCSFQDILGSSSNQLAPNHIGFHNVIASQTGAQYVDLNHEARSSSSRHISPANFNHTGTVDAQPISKQYMVGILHFDGASKGNPGKAGAGAVLMTEDGRVISRLREGLGVATNNVAEYRGLILGLKYAIRHGFKRIKVHGDSQLVCNQVNGVWQTKQPNMMELCTEARKLKENFHSFEIIHVRREWNAEADRQANIGITLASGAVFEERGDI

SEQ ID NO: 48405 - protein, 314 aa, Zea Mays
MMQFEALRVSYKKMNPFCVPFATTNMGSAILAMDLGWMGPNYSISTACATSNFCILNAANHIRRGEADVMLCGGSDAPLIPIGLGGFVACRALSQRNSDPTKASRPWDMGRDGFVMGEGAGVLVLEELEHAKERGATIYAEFLGGSFTCDAYHMTEPHPEGRGITLCIEKALADAGVAREEINYVNAHATSTQAGDLKEYEAIVRCFRQNPQLRVNSTKSMTGHLIGAAGGIEAVASIQAIRTGWVHPNLNLENPEDTVVSSLACVVCVASILVVFCPARSCKSRLDSFFFLFNIMMRNSPVCSGKNKSSFYFY

SEQ ID NO: 48406 - protein, 613 aa, Zea Mays
MLELNSWQILRLLQAQVSAFCLEDCINVESSIELDILPESIEQKLCFLLSKAISSHQSSRLHRGSDFKSVEAGYYGTAADNYHTFLRNASEWLSHRATDKPLYLLVSAIMLMTMSCLFLMGTVSYLFKGRSLSQADHHSESYLDQRWHLDEVLVLAGMFLYVISLGSSSFVEEEQYTWHFLTSTLYLIFLAKAVQSMLKGSNPTLGHKAEGNSFDRSSFFYATSYELTPGKRNGYKLCTILVVLVAGRVIRAWHQGGINWVHFPDISKLLAQADPSVVKSLQIISVLAVVVLFSISLTLLRARPEFVIGVWLTHISCGFLVLLHVWGNHIGTSLPINHTTASVARQFYVIASVSVSVTVLASPWVFPIFSREAKSPSSGSSPVKAIHGIRKSLVLTGMTYTAFWGLLQLLLQQPINAIPLFLILLQTVSSAVHFSLDKTLHKQWVQVVAMHFLGMAGHFGLGNTNSLASIDVAGAFIGISSYSTVLSGILMFMITYASPLMLYLGLVLHASVKDVDDASNLRQLKWSYILDKIVTLPCLFPLLINSLALTSYTIVLLAMRNHLFVWSVFSPKYLYACAATVCTYVGVSIIAMTALYSCAVFKFRARSYRDKSL

SEQ ID NO: 48407 - protein, 104 aa, Zea Mays
MEHHHKPGLRVRLRITAARRRAWLSACLRPPCRKPPRRDHSDSVHKVARREIGGGHRRPPRPAAPSSSSFSCPEKFRNFQLQGKKSSKRAFRKNKMIQTIRKRR

SEQ ID NO: 48408 - protein, 216 aa, Zea Mays
MAATVLFTPAQCHRATATTSGRGAPSHCALAPGHRRPGRGSVRAVPPEQSSLPQAAAAAVYGTAGDVKAALYRALDGANRGIFGMTSAKRSEIHGLVELLESRNPTPEPTAKLQDKEKAVNVVEFSARALKILTGKLTIEASYRVTSQTRVDIKLESSTITPEQLMNIFQKNYDMLLDIFNPEGWLEITYVDESLRIGRDDKENIFVLERADLPDV

SEQ ID NO: 48409 - protein, 454 aa, Zea Mays
MNAKKIKLHDYHHCYGSPMCDPQLFPRAAAATTAGLSLHPGPGLVGSLPQRHGGGGGGWVHEEHTATTPRAAQGQGGCVVGSDAAAFFAAEELMMGTARFDSPLGGTTTALQELTAFAKGPPFGRPRPTTGGERERERLYPVDPLPLRDCAAVRTYYVRPQQRDGATEAPPSLELPFQRRQQQQVHGLFGDPSTGRLLGGGEPQAHSFPAHVPASTFVPAMEAPPGMQSLMDNPLSRSCSIIGAAATHAGSGNAAAPGQGAPSKTRIRWTQDLHERFVDCVNKLGGADKATPKGILKLMNSDGLTIYHIKSHLQKYRIAKYMPVSSTSEGKEKRAAAANDVQNLDPGTGMKITEALRVQLDVQRRLHEQLEIQRNLQLRIEAQGKKLQKMFEEQMKTSRTVMGPPQGADVAFIGAGEQEEEVEVEDAFDDVQLLAAVSSASVGYRDGGFQSKIS

SEQ ID NO: 48410 - protein, 204 aa, Zea Mays
MVSDQEIASCVESVLRGSAGGPGEVSLTAVLQQAEATLGVDLSHKAGFIRDQMDLFFGPRLQPQPLTTPQLAPPPPQAVVAPADAVPQPQPQHQLPAISPVPVVSAPPAMAFYPPPPLAFRYTTGLAGAATGGTVSFQQPAPGAGGTASPTAAPQVAGDNKESSSKRKRGGPGGLNKVCAISPELQTIVGETAMSRTQKVNFMK

SEQ ID NO: 48411 - protein, 247 aa, Zea Mays
MVIWSCSSCLHGFIPRAAWRRHYPLLSPRPPASPPPIHHFSSARRSTKKSAPKAPMGSSIPAAKALIDSSREPFYVIRKGDVIGVYKNLSDCQAQASKSVLHPSVTVYKGYSLRKETEEYLAARGFRNAVCSIGAADASDELFGDLVPCPFQQPDENTQSILKMSQGQEMETRSSEHPKVADLEPLPDSELSCILEFDGACKGNPGKSGAGVIIRRLDGSVEFNSDADVQANFGCQLAVDEVQELSV

SEQ ID NO: 48412 - protein, 204 aa, Zea Mays
MVIWSCSSCLHGFIPRAAWRRHYPLLSPRPPASPPPIHHFSSARRSTKKSAPKAPMGSSIPAAKALIDSSREPFYVIRKGDVIGVYKNLSDCQAQASKSVLHPSVTVYKGYSLRKETEEYLAARGFRNAVCSIGAADASDELFGDLVPCPFQQPDENTQSILKMSQGQEMETRSSEHPKVADLEPLPDSEEILGNQVLESLFGG

SEQ ID NO: 48413 - protein, 168 aa, Zea Mays
MSQGQEMETRSSEHPKVADLEPLPDSELSCILEFDGACKGNPGKSGAGVIIRRLDGSVIAVLREGLGIMTNNAAEYRALILGLNYASKKGFKYIRCQGDSKLVCNQVQGAWRARSDNMSILCDIAKELKETFLTFQINHVLREFNSDADVQANFGCQLAVDEVQELSV

SEQ ID NO: 48414 - protein, 179 aa, Zea Mays
MAPGLFGLAYHLSSGPSYHTGGRRGAANRQSGFASSQSNPHSPPPSRPSPARGSVGVNPTGPIVTRLRELLASSAALSLRPFRPWRPRCACAVAAASASTPRRSCPSATARCCRLMRSSTSTQAPPELLPRVISLSLSGTSTRSYQPISELASSCTTAMTSPTVFAPRRPSCSNQIMGS

SEQ ID NO: 48415 - protein, 121 aa, Zea Mays
MGGTCGSSTSWLSGLAAIRPRKRGTAPLQQQEAVTSPKAGRYLMALDKKPIATKGHHLCCPHPSRGPHLPDSVATKWSISGNTKHHGELFRQELRTRAIDGELMPLGLWALLLGTKAKSSG

SEQ ID NO: 48416 - protein, 165 aa, Zea Mays
MVSFVATNGEPTTTATSKLVWWNLVEQMTMTPTSCTSAATLPTRTRAPPSRALYKSGSIIVLGKTDFLRPDMLQEALVPWTRSLDRTIVASTPRSCCPLASSSYNSPTSPTLFFKQEMELSLVGLQNARKTSLAAARSDTPASSSWKLYLFQNKQVSYLVNQLVF

SEQ ID NO: 48417 - protein, 143 aa, Zea Mays
MVSFVATNGEPTTTATSKLVWWNLVEQMTMTPTSCTSAATLPTRTRAPPSRALYKSGSIIVLGKTDFLRPDMDPITRWTATKKSGLISYKKLLFHGLDLWTALSLPQPLGRAALWPPHRTIHQHLQRKCSRFSNELKSGIRIL

SEQ ID NO: 48418 - protein, 359 aa, Zea Mays
MDPFARLIIWGNLRGAPTSVVEVTCTPTLDLSEDHQLPHQDRVQVISQAQDEANPPNFEQIPNNQPPKNVVPKRCKNFTVSEDECLVSAYLNISKDPIIGTNQPIKGYWQRITEYFHEHKSTPYDRSQSSLQQRWGDIQKETSRFCGFYVEVERRKQSGLNVDDKIKEAMAMHERIVGTPFKFMHCWLILRHEMKWNALLDSMNPTDAKETEQKGTNIMEELLPPKIARPTGRDHDKNMKSNISSSSFTACINVLQKLSMEHGAFEERQDATSREEATHMVVRSDRKLALQEEVIIIQKASLEIQQQMLKLQEEEREERVMTMDVNKMEPWVREYYINKQKKIAASSMNVETSSAREPS

SEQ ID NO: 48419 - protein, 541 aa, Zea Mays
MERRNWTCGRGDDKGYLLTKLAVFLLKEIEIGVMSYRNMLWTHQSVNPEWEQGHVQVQPRSSYYAGTVSDSSNLGMQVAVGVPVNTVNVGICDLWNHERLPVHNSYPHASVTSRFVLPTSMYNPCMPAAAVNIYIPQTQSFGLGNVLPPSLHSQVSTGTIDENNSSFNFGDSAIGSMKRKTAVVAGNHHILHGFAGSSSSVHVPQNPVYGPWNASSQSNCLPSSAASNLPEYHNSNGWPFLEESSANASNSFTSVDACPELVPHGNNLYPACHIIQCNTWVPQTASHGVPQWGYGNVMVNPPGTVDMPNGNIQDYQAGHSSIHGPLPHFCQIPLRSMQVPQIQVPHQQFIGNNVVHGLNPSAAGLPLDPRMLAFPFNDEHTFGHQVHPPLINQANNGALRILPYQNATVMDHSRIYEAGHVIDEHRDMRLDVDNMTYEELVALQEQIGDVNTGLTESYIQENLRSTFHVPGAASISDQFCELSLENDACIICQEEYEARELIGALECGHKYHEDCIKQWLMVKNVCPICKTTALSSDRRNG

SEQ ID NO: 48420 - protein, 139 aa, Zea Mays
MHSGCTFNHRYVKSNPREVENATWMLTYFCLHFEAFQLGMAPVYMAFLRFMGDENDARNYTYSLEVGGNGRKMVWEGTPRSIRDSHRKVRDSHDGLIIQRNMALFFSGGDRKELKLRVTGRIWKEQTNPDGACIPNLCS

SEQ ID NO: 48421 - protein, 51 aa, Zea Mays
MHERKSPKQKIWSRARPHGPSNSNVTWWLPSSRRALPLHQLIVPDGGAEIH

SEQ ID NO: 48422 - protein, 280 aa, Zea Mays
MRIYSPDAKALAALRNSGIALILDTGNGGGVLGQLARSASFADSWVQSNVRPYYPAVGIKYVAVGNEVQGDDTRSLLPAMRNLDAALARAGFPGIKCSTSVRFDVVANSFPPSSGSFAQGYMADVARYLAGTGAPLLANVYPYFAYRDNPRDISLGYATFQPGTTVRDNGNGLNYNNLFDAMVDAVVAALEKAGAPNVRVVVSESGWPSAGGFGASVDNARKYNQGLIDHVGRGTPKRTGPLETFVFAMFNENQKGGDPTEKNFGLFYGNKQPVYPIRFN

SEQ ID NO: 48423 - protein, 614 aa, Zea Mays
MSSGGGGGGARGPSGPVPASARKLVQGLKEIVNRPDAEIYAALRECNMDPDEAVSRLLSQDTFQEVKSKRDRKKEVKETPEPRSRGASNSSRSSRGGVDRAGRGNSVQSGSSGTDYMASRSSILGPAVAATNAMQKPTVPSLSTNKDVVPNGSVGAQQSSSGFQHNWFGVPEENNSTAVEATLSSERHLEIVEDDNHFNDGLLQNSSAYQAQVHSYVDNEVGISNVDAESASMNFQHLSLQNEDIAATKSAEDNPAVILPDHLQAANADCAHLSFGSFESGAFSGLLSSKVPKGSLEDDEVLIPDESRSVNRIDVRNQDYYDDDALNSSENVDVETRIGNMDNIDGPSVSESDALRQGAIDVPGLQYDLPSVSSHAYSNTTQPSTMEEPQGNTQAQPLSHFSGLLQANTLPNNLLGSNLTPLREFDFSQFLQTQSATKYNPSVAPNNLPPISMQETSKQGGFPNTQSTQHVPSTSISSGLPLPQQLPVYSQPTLPLGPFTSLVGYPYLPQNYYLPSAPFQQAYSSNGPFHQSAAPAVPGAGMKYPMPQYKSSPPASTLPQPSSLSGYGGFGSANNIPGNFSQNQGAPAAPTTLGFDEALGTQFKHPNHYAALQQ

SEQ ID NO: 48424 - protein, 298 aa, Zea Mays
MGVGPYALRLSPPPRLDAMLFPQLRPHLRRRVSARVAASGTTWSPAANDSEDSFGGWWFPEYEKHMKQGRRRIGIQQLIVAPLHYVQDKLSTMESTEIIKEDASERESDEIEVSSATHDKKAEAITDDSRQNYRTAIASHFLFRVHTDPVHEEAFSILKKLQIIEKDVSSSDFCTRREFARWFVKLSSKFERKRMCRIVPNKLTSDTVQCAFDDVNIDDPDFLYIQSLGESGIVSSKLSNSLEMLTSGSPCSKGNTLFLPDSYLSRFDLVNWKVLVEHPRALRIDEKEILDAFNRANL

SEQ ID NO: 48425 - protein, 237 aa, Zea Mays
MGVGPYALRLSPPPRLDAMLFPQLRPHLRRRVSARVAASGTTWSPAANDSEDSFGGWWFPEYEKHMKQGRRRIGIQQLIVAPLHYVQDKLSTMESTEIIKEDASERESDEIEVSSATHDKKAEAITDDSRQNYRTAIASHFLFRVHTDPVHEEAFSILKKLQIIEKDVSSSDFCTRREFARWFVKLSSKFERKRMCRIVPNKLTSDTVQCAFDDVNIDDPDFLYIQFPDLLFEKLTL

SEQ ID NO: 48426 - protein, 154 aa, Zea Mays
MNEALDVLRNGGWLHTFPEGKIAQEDQPIRRLKWGTASLIVRAPITPIVLPIVHSGFEKVMPENSFFGRRPPVPLCSKKIDIIVGEPIEFDLPSLKQEASTVPHDSSSERKGWPAITPDGLDEAAQRWLYQKMSDKVQSVMERLRKTVTNLKQR

SEQ ID NO: 48427 - protein, 185 aa, Zea Mays
MLANLCAVVLVQEANGKCIPITRGGGIYQEHMNEALDVLRNGGWLHTFPEGKIAQEDQPIRRLKWGTASLIVRAPITPIVLPIVHSGFEKVMPENSFFGRRPPVPLCSKKIDIIVGEPIEFDLPSLKQEASTVPHDSSSERKGWPAITPDGLDEAAQRWLYQKMSDKVQSVMERLRKTVTNLKQR

SEQ ID NO: 48428 - protein, 396 aa, Zea Mays
MAVLALRLGFVAPPHPRTSSGRFAFSPPSSRAVANAGVAAGPSRPITVDGDPPTVVSAPGRRIVAIGDAHGDLSQTRAALVLAGVLSTESEGHVWTGGRTILVQVGDILDRGEDEIAILSLLSSLNMQAKSQGGAVFQVNGNHETMNVEGDFRYCDPGGFDECMRFLDYLDECDGNWDNAFLNWVNVCERRKKEYVALPNGDWGPWNFVKKQKGFAARSSLLKRGGPLAHELARHPVVLKINDWIFCHGGLLPHHVEYGIERMNREVSMWMKCSGEDSGDETDIPFIATRGYDSVVWSRMYSQDPAERTRRALMLSSIAAEQTLEAVGAKGMVVGHTPQTHGVTCKCDGKVWCVDVGMSCGVLCSRPEVLEIVNDRPRVLKERRELYDEMEVLDYL

SEQ ID NO: 48429 - protein, 310 aa, Zea Mays
MHMQSCGSDSTVIPTNSDATNYIRHGLHGTQLVTMHSVDSGMHLTNSKRDSKVNGNHETMNVEGDFRYCDPGGFDECMRFLDYLDECDGNWDNAFLNWVNVCERRKKEYVALPNGDWGPWNFVKKQKGFAARSSLLKRGGPLAHELARHPVVLKINDWIFCHGGLLPHHVEYGIERMNREVSMWMKCSGEDSGDETDIPFIATRGYDSVVWSRMYSQDPAERTRRALMLSSIAAEQTLEAVGAKGMVVGHTPQTHGVTCKCDGKVWCVDVGMSCGVLCSRPEVLEIVNDRPRVLKERRELYDEMEVLDYL

SEQ ID NO: 48430 - protein, 546 aa, Zea Mays
MARKRRAPSPPPPPQEESSSEESGSEELEEPPRLPELRSPPQAAANNADSSEADTDSDTDAQAFQMRQVPRSLTKHTHPVPQPESDPEEEEGESSESEHENPVPVVQKKAAAAAVLSKAEQERKRPPSDPAPTGKAKKMKAVATPLAKAKKGKAELEKPAPEATPAGNAKKGKAELEKPTFDAIPAGKAKKGKAKEAAPEATPSGKGKKDGDKLEKSAALDPSHSDSKSEKPVRPTWGKDDEMKILEALAAHVKREGELPKTDLLLASVRDHLVRKNCTYSDIYEKVRRLKERYKKAASTGIVPSKEDGLQMYNLSEAIWGEKAMEAAAAVTSQKGGAVIKGKKGQANKEKMLENAKSDVTKESAPSTANQSGDSQKASKKGQARLSEEATTTASPSKSKKQESHNGELNKDDGNLAKGKKGKTDKGKMDIDMDRLTPKEPVNANQNGGIVIRSKEGEINDEGTEGDANVQGVHRRFGELQKLYSNLAVYVEEIETHHPCGETLKRVFEFIADEKAEDLESKIKKLRVAQAKAEVRQGNIKKEMGG

SEQ ID NO: 48431 - protein, 407 aa, Zea Mays
MAKNHKSKAYYQHRGMVPGVLDSKSPSHRHAHFLLCSIFILISSNTATLSSAQASNRSEDDRQALLCFKSGLSGNSAGVLGSWSNDSLNFCKWEGVTCSTAIPIRVASLKLRSVQLRGKLSSCVANLTSLVQMDLSNNSISGEIPDEIGSLPLLQTLILSKNLLSGTIPPEIGKLVSLTKLAMDQNMLSGIIPWTIGNLSNLVVLALSTNSLSGEIPARIGYLPQLIQLYLDDNTLSGRIPAQLVQCTRLAMLNLSVNSLNGSIPSEILSISSLSLGLDLSNNNLIGTIPSQIGKLINLGLLNVSSNKLSGEIPSELGQCVLLLSLQMEGNMLDGVIPQSLNTLKGIQHMDLSENILSGQIPDFFENFSTLDYLNLSYNRLEGPIPTSGIFTNSNAVMLEGKNNPAI

SEQ ID NO: 48432 - protein, 1599 aa, Zea Mays
MFSGPKTMKASAILPTTDPLLQNTGKRKSFIGSSHLGSQAVHEYQFLPEQPSDTYERASQSHFYDSSAEASNLRVAPLSTGSRFLHGVEQAPSYTFHSQSSGSSHLTQRGSGRSPIASALTDHEGALSNINASTTPIHGQLGIPQVAGFESPLASPERLGYHDEDTYHMDRKRKHNEEAKIAREVEAHEKRIRKELEKQDLLNRKREEQMRREMERHDRERRKEEERLMRERQREEEKFQREQRREHKRMEKFMQKQSIRAEKLRQREELRREKEAARQKAANERATARRIARESMELMEDERLELLELASRSKGLPSMVSLDSDTLQQLDSFRGMLGKFPPETVRLKVPFSIKPWAASEDIIGNLLMAWKFFVTFGDVLGLPSFTLDEFVQALHDYDSRLLGELHVSLLKSVIKDIEDVARTPSVALGVNQSSSANPGGGHPQIVEGAYAWGINILNWQRHLNFLTWPEILRQFGLCAGFGPQLKKSDAEIVHHRDDNEGRNGVDVISILRNGSAAVKAAALMKERGYTNRRRSRHRLTPGTVKFAAFHVLSLEGSKGLTILEVAEKIQKSGLRDLTTSKTPEASISAALSRDTKLFERTAPSTYCVKTPYRKDPDDSEAVLAAAREKIRAFQNALPECEEVEKDVDEAERDDDSECDDADDDADGDDVNIEDKDAKSPLVGAQYGAQITVVGDIKKESNIVMNTSVPPSIQIKSSASVPFHTLDSKASSSTDPEVGDDAKDIEIDESNQGESWVQGLAEGDYCDLSVDERLNALVALIAVANEGNSIRAILEERLEAASALKKQLWAEAQLDKRRIRDDFTSKMQYDSYVSMKVDTDQENNAAEITLTPVHDPIKNNNGNANLMNNGLLVDKQNQLTTGDVYHQRNGASRESSTNAESLSVQQYASSEKTRSQLKSFIGHKAEQLYVYRSLPLGQDRRRNRYWQFSASSSSYDPGSGRIFFESRDGYWRVIDTSEAFEALVASLDTRGIRESHLHSILQSIEPTFKEAVERKRCANLEHPTGRTSENGSNESPNCNNEFGSPCSTLSGVASDNLMAHSDIFKIEVGRNEAEKNSISKRASVFLKWIWRECYSHQSTYAMRYGKKRCPELIHSCDYCYQIYLAEERHCSCHKTFKHIHNFLEHSSQCEEKQRTDPNWKMQTVDLSVPVGLRLLRLLLATIEALVPAEALLPFWTDGYRKSWGAKLYSASSAEEVLQMLSVLESAIKRDYLSSNFETTTELLNSSTQDFATQNSAGGSGSATALPWVPDTTAAVALRLLDLDASISYTLHPKLGSNKEQESGDFMKLPPRYPSMNKGKQEIEQFRPIGFDQQDGTLLPNSNGRRGRGRGGRGGSRGGRSRGHGGRVPRGIGSSSRIQFRDDNSMLYGRAPRKNARGGRGRGRGRGRGLRTVRPRQPSELSARSIPKANLLGSFSMLSKTNHTGTTHSPESSGAEEWAFERREYVKDDENNLVSQSDESEENVEPMNEEYGEHISGYPRDNSDSRPVQMMGDGSDDNDEDAEGDEGEEDGEDYEAEDPGDEDDDVEMDGDDDVEVDEDDDIEMDGDDDIEDDDDDDGGDGAANGDEDGGGTSSYSSEYSE

SEQ ID NO: 48433 - protein, 358 aa, Zea Mays
MSWGCRRRAPPPLRRRRLGARGHRSPRSTARSGAWRAEVLLSFLAGGGMDWAAAFGSPSWSAVATDPGPTMLSFAGPSSSATDAEVRLQDFTVGRMEAEATVASITHGWGQAIARHADAQVQQCWGITSGRGYRGVRHGDGAGARAGIAMTGAGAGGGTRITGVEPRWWWTPSLVSYRVVEIEIVGVHNSQWRTVLLSLHPPALPPCYINARRFCLSLSLRRLPPPHPSPLLGAAPRRAASSASPPRSPTTRPAPTSSRCSQSPPATPPLTPRIPDAESCPSPAAVSSVFSKFRDPAPSPVTPDDAAAAPDEPRDLGFDDDDSFDADSILCGVHQSAAEGIDGIMASGRIRISSSIKR

SEQ ID NO: 48434 - protein, 209 aa, Zea Mays
MAGASLLSPSCTLLRLIPSASHFKRFDRVRRFAPAAMATSSGPKEAPANNPGLQTEMLRVKDPKVSLDFYSRVMGMSLLKRLDFEEMKFSLYFLGYEDVTLAPDDHIKRTEWTFRQKATLELTHNWGTENDPEFKGYHNGNSDPRGFGHIGVTVDDVHKACERFERLGVEFVKKPDDGKIKGIAFIKDPDGYWIEIFDQTIGTVTSSAS

SEQ ID NO: 48435 - protein, 931 aa, Zea Mays
MSHGKKVCIDRLPESAKADEMGITSSNAAQQVGGNITIQNMSVSGGSQTLRPNNSSQDAARTLLPQSGLQQTLCYSAAGNDHMAGPPANFSGTSSCISSHQSLIGYSDSVAANSLLSVKREMQDASLQDPKRIKRTGGIDDVQQQQIRPQPLGGQEMQWKNHQLHPQLDVKGMQYASSLSGQRYPSSMMNNMQDPGSSLYFSHQQNLRYDAKQEQMDGSDKSKDTLQSMAPETSMLDQQQSQSQHLPQQSVARNNVPNMGQWQNTRFAAEKDFKKEDIIQRRKLAPSSRAPTGPVIQSPVSSKSGELSGSSMGGQFGSAVTSAVTGVQKDKFAANSGTAVGFPSVASSPSDSMHRIQQPAVASSKRKTNSVPKTQPPFLWKSVMGDFLRKFWVARYQLFNKKKFDKISQKKTIINRNQNVAGCLNSCFHSEDYIDTTRPLCNSMISGTINTCKGRVINFVSTKDMYQGHSRPFPVDFNELSDETVRMQYGDIKDFDDPNSYGCVFILPTKHYADLFAGQLISLMLQDGHSKADDEVVRSTPFANISTPFGPLPNNVVSDVKQEGGVSQQLNAAAHANVAPGTQMQQLPVNRMLPSANGNQILAMQQGYMQGAAMPPRSQHLDQNLVQQPQHQQPQQQPLQQNAQAQVQQPSSLPLNQMQRPQVLPTSPLSQMLGPGSNLPMGSSQIGKNKAPPTSLQLQMLQAQPQQPMSRKVMMGLGSAMNMGNMVNNVVGLGGLGNVMGMGNVRPISSPMASMSGLGNNSNPMNMGMASNLAAAGLRPGMNPAAIAKVRMGLAQQRAAGMYPGMVGMPGSSSSILPSSAGLSMMGQPLNRGNLGPLQRAMMSSMGPPKMPGGNFQLNAQQQIHLQHQLQQLQQNPQQQLQQLQQQQQIQQLQQQQQQQLQQQQLQQQQQMGSPLGPPPSPQLSSGQQHS

SEQ ID NO: 48436 - protein, 105 aa, Zea Mays
MKLVNRMKFSMPEESTLGDGLGKGYGLLGQAGSGKLRVSAGQSKLSTKIAKMGEATWLAVDAHTSLQIQNSVIIIKISPYKHLSYPILMHPQESCTPFISITITK

SEQ ID NO: 48437 - protein, 1128 aa, Zea Mays
MLLVLPIEECPLPLVNGTHRKWRKLVKDLNIPRRFNMQNLAVFMINLIDELHIEELRQSLHGNKLKELRNASVQPELIPEWNRWKQELIKQYFSLHPAGNVGNFEKNNCYDDPALDQQGSRKRPKLEVRRGEIQISHMGEADYRTPTEDPNQNNLPGNSVMHENVGALGSTDQNNSVTLPGSFGTNENTISSSANAALQNARLDLDSFKSSRQCSAHIEAKGRQCGRWANDGDIYCCVHQSMHFLDHSSREDKALTIEAPLCSGMTNMGRKCKHRAQYGSTFCKKHRLQTNLDAMHPENLLDPSEVLHMGEEPPNKWVEEISKSQAMYSIDLETDKKVQDAVKVKLMTIVSIENSGEKGAMEKADMCVASTSITNTDDTSLCIGIHSHDSIVECQDYAMQHTLYCEKHLPRFLKRARNGKSRLVSKDIFVNLLKGCTSRKDKICLHQACEFLYWFLRNNLSHQHTSLASEHMPQILAEVSKNPDVGEFLLKLISTEREKLANIWGFDTNRSKQIYSENKEGSLVLHKEGTNLSSGPKCKICAHQFSDDEALGLHWTTVHKKEARWLFREGTNGLSLYDSHNIEDANGSQKFICRLCGLKFDLQPDLGRHHKVAHMDSDVVGHSSLGRGKYQLNRGRHYYSAFKKSLRPTSTLKKRSSSGIEKNFKFQSSALTSQIIQSETSSFGKLQDFQCSDVAQTLFSKIQKTRPHPSNLDILSVARTVCCKTSLAAALEVKYGSLPENIFVKAAKLCSDNGIQIDWHQEVFICPKGCKSRYNSNALLPMQLTAVDFPEAPSVDPLNDDEMWAMEEYHYVLDSKHFGWKPKNESVVLYEDISFGREKVPIVCVIDMDAKDSLGMKPEELLSHGSSVPWQGFHYITKRLMDSSLINSENSMPGCACSHPECSPEKCGHVSLFDGVYASLVDINGTPIHGRFAYDENSKIILQEGYPIYECNSSCTCDSSCRNKVLQKGLLVKLELFRTENKGWAIRAAEPIPQGTFVCEYIGEVVKADKTMKNAESVSSKSGCNYLFDIASQIDRERLRTVGAIEYLIDATRSGNVSRYINHSCSPNLSTRLVLVESKDCQLAHIGLFANQDIAVGEELAYDYRQKLVAGDGCFCHCGGTNCRGRVY

SEQ ID NO: 48438 - protein, 86 aa, Zea Mays
MAHIKPSPPSSSSPLQQRRRKPSPVLTPNPRPTQIYLPRAAVAMPFTPGPYSGVSTLALVARASVFGFGVVYGSIKLSILKVRLGL

SEQ ID NO: 48439 - protein, 782 aa, Zea Mays
MGSAHFAALLLCACLFVSGTVAADQNGNLTRPAEVRIGALFTFGSVIGMAVRPAIELAVADVNADPSLLWGTKLSVLMQDTNCSGFVGTIEALQLLAKDVVAVLGPQSSAVAHVISHAVNELHVPLISFAATDPTLSSLEYPYFVRATQSDYYQMGAIAAIISQYEWKQVIAIYVDDDYGRGGITALGDALAKRKCKISYKAKLPPGAAKTTIEDILMQVNDMESRVYVIHVNPDSGLNVFSAAKSLGMMSSGYVWIATDWLSAVIDSSVHGIPDVMELTQGVLVLRQHIADSDIQHAFLSKWNNLTRNGSSYFMHAYDSVWLVAHAVERFLREGNAMSFSADPKLQAKKGSSLQLDSLRIFNSGDKLLEKVWSANFSGVSGPVQFTLDRDLVHPAYDILNIGGTGLRTIGYWSNSSGLSAVAPENLSSSARDSSANNVQLRGVIWPGQTSEKPRGWVFSHHGMPMRIGVPLRTSYKEFVMQDDGPDGVKGFAVDVFKAAISLLPYPVSCKFVLFGDGLKNPSYSELVQKVSENELTSGIQGLDSLISSSSAIGYQVGSFSRNYLVDELSIAESRLVALNSPSDYARALELGSGNGGVAAIIDELPYVEIFLSKYCKFKTVGQVFTKSGWGFAFPRDSPLAEDLSTAILALSENGKLQKMHDEWLSGTECSADNGAGPSNSLSLSSFWGLFLICGLACFLALVIFFLRIFCQYSRYSNQVEAQFAEPRVLNRPARLTTIKSLISFVDKKEEEVKNALKKRPNGTGQQHPSTPNAEEQPTLPP

SEQ ID NO: 48440 - protein, 769 aa, Zea Mays
MGAIAAIISQYEWKQVIAIYVDDDYGRGGITALGDALAKRKCKISYKAKLPPGAAKTTIEDILMQVNDMESRVYVIHVNPDSGLNVFSAAKSLGMMSSGYVWIATDWLSAVIDSSVHGIPDVMELTQGVLVLRQHIADSDIQHAFLSKWNNLTRNGSSYFMHAYDSVWLVAHAVERFLREGNAMSFSADPKLQAKKGSSLQLDSLRIFNSGDKLLEKVWSANFSGVSGPVQFTLDRDLVHPAYDILNIGGTGLRTIGYWSNSSGLSAVAPENLSSSARDSSANNVQLRGVIWPGQTSEKPRGWVFSHHGMPMRIGVPLRTSYKEFVMQDDGPDGVKGFAVDVFKAAISLLPYPVSCKFVLFGDGLKNPSYSELVQKVSENYFDAAVGDIAIVTNRTRLVDFTQPYIESGLIIVAPARVIESNAWAFLKPFTFQMWCVLVVIFLFVGAVVWILEHRSNTEFRGPPSQQIMTVCWFSFSTMFFAHRENTVSALGRFVLLIWLFAVLIINSSYTANLTSLLTVQELTSGIQGLDSLISSSSAIGYQVGSFSRNYLVDELSIAESRLVALNSPSDYARALELGSGNGGVAAIIDELPYVEIFLSKYCKFKTVGQVFTKSGWGFAFPRDSPLAEDLSTAILALSENGKLQKMHDEWLSGTECSADNGAGPSNSLSLSSFWGLFLICGLACFLALVIFFLRIFCQYSRYSNQVEAQFAEPRVLNRPARLTTIKSLISFVDKKEEEVKNALKKRPNGTGQQHPSTPNAEEQPTLPP

SEQ ID NO: 48441 - protein, 285 aa, Zea Mays
MTTTTTAAAAVAQLCAGPRRRKQAAGARLDLRWARLLRLAVVTRVLRLARDQLLACSSCGGGTAARRRYRRLGPPTSASAGPVLSPVDRDDDCAADAEAAAPRDAADDEDNVVSLKVKYVGDDGEEQNGLQMTGLNLMDKTMPVRGARIAYSIWDVAGDHQSVDHVPIACKDAVAILYMFDLTSRCTLNNIVDWYGRARKWNKTAIPILIGTKFDDFAQLPLEMQWAIVNQARAYARAMKATLFFSSATHNINVNKIFKFITAKLFNLPWTVERNLTIGEPIIDF

SEQ ID NO: 48442 - protein, 122 aa, Zea Mays
MAPNHNFVDPERIEHGSPLRLPGHPVNGQPMDLEGWSGIQTEHMGVLQASSMGWNGAPVLAATPVVKKVMRLDVPVDKYPNYNFVGRLLGPRGNSLKRVEASTQCRVYIRGRGSVKDSVKTS

SEQ ID NO: 48443 - protein, 887 aa, Zea Mays
MEISESMDILTKRALRHISLKTVKETLDVPRISLQLLSSVGKLDFPTERLRGQWQKRQANVLEELLLFSASLEYDTSNTLRIVLSKLKSTEDWVVTVPEGRVEVLTIIERYNTKLCSLTKKFDIKDETYHWTHNYHFNFRLYEKLLCSVFDILEDGQLVEEADEILEITKLTWPILGVTEKLHHIFYAWVLFQKFSQTGEILLLKHASLQIREFRLYHDVKEIELYTNSFICSVDAYGGNKVLSLVDSVLLKINVWCRRQLGNYHAHYSKNNYSIFEATLNLVLLLVTNSSEDDFEETMFIESPVGSTPELKLIHLLIVRSIHAAYKQALISSNGRSDSEFKHPLTILANELKAVAEKECTDFSPILNKHYPEAQRVALIFLHMLYGKQLELFLERTDNSENSKEILAASNNFELFIAQKLYSVYGETVGSSFSNYLKPYMVGHFSSPLVLQWLHAQHENVLEWTKRTIEIEDWTPLSAHEKQARSVVEVFRIVEETVDQFFNTSLPLEIVHLRSLLIGITRSLEVYLLHMENQQVPGSTLLPSAPVLTRYAESMNPFAKRKLIEPTVPEEKVAMKLNNLAVPKLCVKLNTLQFIRDQLDAIEEGVKQSWVSVLSAVRLLDYLSCMASGRALSESLTSSDESVDELFTIFDDVRMTAVKITDVILNFIGTRAVFWDMRDSFIFSLYRDSVEGARMQIFIPTIDQVLDQVCDLIVDVLRDQVVLRIFQACMDGLIWVLLDGGPSRAFFETDVDLMQQDLAILKDLFIAEGQGLPIDIVEKEARQTHQILDLYMLKADAVIDMLINASDQMPHDPEATNARRRYVHDANTLLRVLCHKKDKIASTFLRIQYHLPRCSDMLKRGTSFNWSETGQQSFRIMKKKLQEATWQ

SEQ ID NO: 48444 - protein, 245 aa, Zea Mays
MLNKNVSYSTYPTPHEEHPHPLRHTHIQENPHPLRHTHIPDKDSGCASSLGFDSFTTMSLGPNICSHMTPMEGSISAKEPENSEDLPAIVRSSDEMDTRNSGKVHRDTVGTLPESKQSHESCASVNNKFNSGEYQVILRKELTKSDVANSGRIVLPKKDAEAGLPPLVQGDPLILQMDDMVLPIIWKFKYRFWPNNKSRMYILEAAGEFVKTHGLQAGDALIIYKNSVPGKFIIRGEKSIQQTNP

SEQ ID NO: 48445 - protein, 378 aa, Zea Mays
MEGCQLLVGCRMEMEEEAFFDSREELTASPAPSPGPALPWSGSLDSVCQRRERFMRSMGLECCPAPLQADAVATVGDVDKEEEAVPEFGRSWSQSDENDCSMSSWSTEETKSLEDGVSDDNSVSGSSRDDASSKVSRSFSSLSFIQRLMSRSGKLSGVPKAVERRRNGWLRRLGLRSGILDHGGDEASTSSSESEQNRGGRYERVKVRSYRKRSKELSAVYQGQVIKGHDGAILAMKFSPDGQFLATGGEDGVVRVWGVAQSEDCKIPMDDPSCVYLKAHRQSGLGPVDADNEKKCKVKGVKQSADSACVVIPTVVFQISKQPLHEFRGHSGDVLSLSWSNNKHLLSASTDKSVRLWEIGSANCITVFPHSNFVESNQ

SEQ ID NO: 48446 - protein, 428 aa, Zea Mays
MSPKPAKPTPATEFEYCELCRHHHDHGRRHRYIVKHRRNLDAALTCFRSKLSDLRRAFLPGSPSSQPPRTRLWCPFCSIDLVDLDSRSAGEHLKGVKDFLWKHGGRMDQVVSLRISEDVLAKWEKGPECLSTGTKKGTEELIGPSLKQIKDIQNEYACDSLDSFAQNNIPSFSNTASYVVMPLQNSTNGAYGSISTACHGASSSGSASHSAPYGTVGLPITPWGSAETHKLQGALSTNWFHSSGTETKGHQSTVFVNGASQSLSCSDHMLPLRVQQSHTGGNLSNGSKANVHTGAPPPWLKANEHDPKNLSLKSCGLSSRKGKLRKLNPNRVGAAWAERRRAEMEMEKQGEIVPATSDSSWLPNFGSVWQSGTRKESRKEFEKSHKIHDTKSDHDLSLEIKPYISKRMRVGAEKASDKAEELGSHLPQ

SEQ ID NO: 48447 - protein, 135 aa, Zea Mays
MSSKLNHHELSICIHLLATPTDRATPHLWLSASRCFTRCSWQEARNLPCSLPGAKGLTFNFLERGLPPFSGGVSLKMAGFCVVWALFWLAGSATVSTSTTAFAGGEAVVMDARSVVAVTDNDFVCATLDWWLPEK

SEQ ID NO: 48448 - protein, 125 aa, Zea Mays
MSSKLNHHELSICIHLLATPTDRATPHLWLSASRCFTRCSWQEARNLPCSLPGAKGLTFNFLERGLPPFSGGKPSPALLPATRAVLLLDSWHRRFNFAKWRQGCRSRWPASASSGRYSGSPAPPP

SEQ ID NO: 48449 - protein, 106 aa, Zea Mays
MVDGLNFKDFVAFLSTFSAKASLRQKIEFIFKVYDIDGKGKITFKDLLEVLRDLTGSFMSEEQREQVVTEVLEEAGYTRDYAFSLEDFIQIIDHPGLKMEVEVPID

SEQ ID NO: 48450 - protein, 99 aa, Zea Mays
MPAGSAEQRIVLYLELYASCVEYITPLRDSMSSVFPSAHLAFASIDLNAHTVFAITTALAILQTVCLRNLSLLSYLSADGVMATIAVILCLFWVACSGL

SEQ ID NO: 48451 - protein, 248 aa, Zea Mays
MAPRPAANHQATAEQGAKHLGRPSGAPSARAPRPPPAAPERPTGRRAEQSFNSVPDRVFLIQVAASKTKIYMVLELVNGGELLDRIVSRPGRSFFLPCDHRRPVRESSRSRRQGGSSSTWSFPLLYSTHSLITPRRPNSSPGANSLCRMPAGSAEQRIVLYLELYASCVEYITPLRDSMSSVFPSAHLAFASIDLNAHTVFAITTALAILQTVCLRNLSLLSYLSADGVMATIAVILCLFWVACSGLL

SEQ ID NO: 48452 - protein, 352 aa, Zea Mays
MRRPQRRVAAKQTRLREVDEIRLLNEWIDAGKPLPRTKLLPPSKSAGPVPTAGEHPEYGACTLFDELPLSQKTKDGLRKAGFTEMSEIQRAALPHALCGRDILGAAKTGSGKTLAFVIPLLVLDEADQILDHGFRNQVDAIISQIPKVRQTLLFSATQTKSVKDLARVSLRDPEYISVHEEARTATPDTLEQYAMIVPLEQKLNMLWSFIKRHLNSKTIVFLSSVKQVKFVYEIFKKLRPGIPLKCMHGRMKHVVQQAIVADFNEATSVLFSTDITSRGLDIKNVDWVVQVDCPENIDNYIHRVGRTARYNKKGKSLIFLCPEEEAMLEKLKATESKIPIHIRKVSSRIFCF

SEQ ID NO: 48453 - protein, 244 aa, Zea Mays
MRRPQRRVAAKQTRLREVDEIRLLNEWIDAGKPLPRTKLLPPSKSAGPVPTAGEHPEYGACTLFDELPLSQKTKDGLRKAGFTEMSEIQRAALPHALCGRDILGAAKTGSGKTLAFVIPLIEKLYRERWGPEDGVGCIILSPTNDLAGQIFEVIKKVGQFHNFSGGVIVGKRKGIEIEKERVNSLNILVCTPGRCWCLTRQIKFLITDSETRLMLSFLRFPKLDKLYCFLLHKRSQLRTLQGLA

SEQ ID NO: 48454 - protein, 736 aa, Zea Mays
MGGNKYCAAMTKRRWRGLAAAAWVLVAVACSAVMHWTMRRESMDRAEERLVSMCEERARMLQEQFGVTVNHVHAIAILIATFNYDKSPSAIDQDTFAKYTARTSFERPLLNGVAYAQRVFHHEREMFESQQGWIMNTMQREPAPPQVEYAPVIFSQDTVSYLARIDMMSGEEDRENILRARTTGKAVLTNPFRLLGSNHLGVVLTFAVYRPDLPADASVEQRVEATIGYLGGAFDVESLVENLLSKLAGNQDIVVNVYDVTNASEAMVLYGPSSSDERVPFLHVSMLDFGDPFRRHEMRCRYRQKLPMQWSAITNPLGTFVIWMLLGYSIAAAYSRYDKVTEDCRKMEELKTQAEAADVAKSQFLATVSHEIRTPMNGVLGMLDMLLGTDLTMTQKDYAQTAQMCGRALITLINDVLDRAKIEAGKLELEAVPFDLRSLMDDVISLFSSKSREKCIELAVFVCDNVPKDVLGDPWRFRQILTNLVGNAVKFTERGHVFVRVCLADNSNMEAGQVLNGAMNGKDGRVDSTTNGAFNTLSGFEAADRRNSWQYFKMLLSDKESLLDDLEGTNSDQSDSDHVTLAISIEDTGVGIPLQAQDRVFTPFMQADSSTSRNYGGTGIGLSISKCLAELMGGQISFVSRPFVGSTFTFSTTLKRSYKDISVDSSRSLLEALPTAFKGMKAILIDGRPVRSAVTRYHLKRLGIIVQVVNNMSAVVKAFPGQNGATVSSTFPHMEA

SEQ ID NO: 48455 - protein, 284 aa, Zea Mays
MAPPLATRGLPLASRGPPSCAASCSSCLPSYLQLGRRPSRRFRCSSPQVDAAAVPPGKGGEYRPSFADDLLLAFFRSKMVKEVGWDSEKPGYAGLMEVANRLMVKGKSALETEQAAVRVLQSLFPPLLLVLYKALLAPIANGQLAAMMLARATAISCQWLMGSCSVNSVTLPDGKSWCSLRNASTWKRASALAFASTHANCQLRLSSKITWVLICTWSQILKTIAASSTSGCRLHLLILTKPSRNRAWTSAQTQGGVESSEEIAAQMSSVAPKFDMLPVKDCTS

SEQ ID NO: 48456 - protein, 96 aa, Zea Mays
MAPPLATRGLPLASRGPPSCAASCSSCLPSYLQLGRRPSRRFRCSSPQVDAAAVPPGKGGEYRPSFADDLLLAFFRSKMVKASSTPSTDPLVPPSS

SEQ ID NO: 48457 - protein, 514 aa, Zea Mays
MAPGRMGSRCKRDALAETTPTEYEKQRAAHVMRNNQMFQRLGINQLRTIMTATRVRSKDDCSEESGSLYDGEDSEGSEQEEDFQVAKGVRSHNSTHVAEKTTQGTRGHKRVVAPGVNEQQIRITRQRSATINQQSFLNLTTTTHPSSTATTNQESTQNITSATQFTSSAAAEQNYTQGLTAAAQANSPIQADISDHIADEELVPRQRSMGKQLESLSRGLGTKIPIQIYDGKRRPEPPIQVAKFASEGGIILRQHIPIFPHWKEYKKQENEGKITDYIGKLAGQFTMDVDSKAVKDACVDMIKGGQRQMRYRLKRKYFTGVPANQVRTTSPVPCMTDDQWKDLVQMWSTPNHKRQEKYKDMEPSAIDLFKEMHCSKKKGFSEAVQKAIGDMEAMVATPVEDGQHVLSSTEVVSNVLSSSSKFLHNAGLLPTSKRSNTRTISTRMQELQTQLDTERQEKNGFREEMETLKAQSQASEATIANQTTEIADLKKSLSENNSLLRQILSINRGQMTPP

SEQ ID NO: 48458 - protein, 253 aa, Zea Mays
MTYGLSQLSYLVSLNNVRRYKSHLSWPPIFASSWDESVSLRWGDLGLSVSHIFRPVPGCCTMLGPMNIEVKQRKVVAVGRKRTARPTENTCPEELAESSEEVKTDTDRNVLVMFDILRRKKSAKLENLVLNRLSFAQTVENVFALSFLVKDGRVEITVDDSGHIVRPRNAPAASAIASGEVSYSHFVFRFDLKDWKLMKEVVTEGEELLPHRTSQSNLCNEENDQPNLEVRAQIMPIRKKSSCLSELPVVPAE

SEQ ID NO: 48459 - protein, 235 aa, Zea Mays
MTYGLSQLSYLVSLNNVRRYKSHLSWPPIFASSWDESVSLRWGDLGLSVSHIFRPVPGCCTMLGPMNIEVKQRKVVAVGRKRTARPTENTCPEELAESSEEVKTDTDRNVLVMFDILRRKKSAKLENLVLNRLSFAQTVENVFALSFLVKDGRVEITVDDSGHIVRPRNAPAASAIASGEVSYSHFVFRFDLKDWKLMKEVVTEGEELLPHRTSQSNLCNEENDQPNLEGNMEGS

SEQ ID NO: 48460 - protein, 100 aa, Zea Mays
MLPDPRQALATQRAPNPTQPRHRPCPSLHSTRLEPRQPSTVKRATDRHPDPRRAPARHPGFPASTQQRPAHPQELAAKLVVKEILIMWRCRARSLRQCLI

SEQ ID NO: 48461 - protein, 381 aa, Zea Mays
MADSGYSNCWATDLQIINECSSLQEYSVEVSIPCSNGIVSRSGSNYNCPVHFTFGIELISNDPVQGLDMFDKPVAWNCSESFQPHGNRDPIPFDLLKITSALIEHDSNWHFERLSEEIDLFRELPDDNSKFGKLTLARLLLACSAIKSRGRSLIERKGYCEEALGLFTDLIHLDPSHKQYYEDERSLVLMDKLTCDMETFMKHCSVQVQPNSAPLNHVQLCRLSLTCIGFAERLLWVQMLDLSHNSLRSVEGLEALQHLVFLNISNNQISGFTALESLTKIISLKVLDLSFNKIGAHSIDTTRYICSSPFSHKMEASEAFEAYQKVNINVEEYWDAILFFRSLKLAQLDIKGNAVASKENFRTIVMMLIPCLKWFDGEDVN

SEQ ID NO: 48462 - protein, 206 aa, Zea Mays
MASPCHEESGRGRGPIAMAMARGRIAMGGSGLHCASAIHCGKRRGTCCSTQFADTLGNRDSNNISLENAKSYKIEAFKAQMQLPFPKLLCLMTMQAAKDPRVDERGGVGDEQMAGGGPAASALSSPWRALLQRALDANAHLRLRWAPPAGRRTAPSCSGVFRNSVIRFRLTRTPEPTRLVRSRAAPLVRFVGTSQIAGSNSVSVAA

SEQ ID NO: 48463 - protein, 275 aa, Zea Mays
MLLLLSNLCLSLLAPLLPPHLPPFLVPVPVHWLAMGSTSPSGLELTMAVPGLSSSSGSEGFGCNNNNGSGNGNNMRDLDMNQPASGGEEEEFPMGSVEEEEDERGGAGGPHRAKKLRLSKEQSRLLEESFRLNHTLTPKQKEALAVKLKLRPRQVEVWFQNRRARTKLKQTELECEYLKRCFGSLTEENRRPRSPCARAASASPPQRPRAPHARRPPRAPSTRAARPRRFSLVPPHATPAGRGRSRESLVVRARGAKWLCCVNLMMDGENQRGPV

SEQ ID NO: 48464 - protein, 650 aa, Zea Mays
MAPATGVAHFTFTRPEEPTPACNSDTPPESPHQLTSHLTFHSRRRSQTGIPRALPLLPRFLLRWAFGRRGWWAETEMISWNDVYTVLTAMVPLYVAMFLAYGSVRWWRIFTADQCSGINRFVAIFAVPLLSFHFISTNDPYAMNLRFLAADTLQKLVVLAGLAACSRLPSRLAAPRLDWSITLFSVSTLPNTLVMGIPLLIAMYGPYAGSLMVQVVVLQCIIWYTLLLFLFEFRAARTLIADQFPDTAAAIASLHVDPDVVSLEGGRAETEAEVAEDGRLHVTVRRSSASRRSLLMATPRPSNLTGAEIYSMSSSRQHSPRGSNFNHADFFAMVDGAPPPPAPGARASSFGAAELYSMHSSRGPTPRQSNFDERSASARSSRPAAVPSHDAKELHMFVWSSGASPVSDVSGLPAFTGGGAGGVNVGAKEIRMVVPAEMPQNGSAGKENENNGAAAAATGEAEGFGFRSGGKTTAEDAEAGEAAGPEQLTKLGSRYSTAELRAKDDGGGAGSAAQQMPPASVMTRLILIMVWRKLIRNPNTYSSLIGLAWSLVAFRWHISMPAVVAKSIAILSDAGLGMAMFSLGLFMALQPKLIACGWRATGVSMAVRFLAGPAVMAAASLAIGLRGTLLRIAIVQVNPYTVWLIWMHMY

SEQ ID NO: 48465 - protein, 159 aa, Zea Mays
MESGTERRRRRHHFVLVHGTCHGAWCWYKVATLLSSAGHRVTALDMAACGASPGRAEEVPSFEEYSRPLLATVAGLAPEEKVVLVGHSFGGVSLALAMEQYPDRVAVAVFVATGMPSAGKPMAFVFEQSTQRTATWTANSKPAATPSVPWRHFGSGHST

SEQ ID NO: 48466 - protein, 122 aa, Zea Mays
MLQPREADVPALFLVFIVLPVVAYFLLGRWHDSASKKARASVLAQRAAEEAYREETMACPDIIPPGPSLRTMPYFKPAPSLRQEYHECATCHAPAKTRCSRCKSVRYWTMLITPRFLRPSQI

SEQ ID NO: 48467 - protein, 904 aa, Zea Mays
MLQPREADVPALFLVFIVLPVVAYFLLGRWHDSASKKARASVLAQRAAEEAYREETMACPDIIPPGPSLRTMPYFKPAPSLRQEYHECATCHAPAKTRCSRCKSVRYCSGKCQIVHWRQGHKETCQKWLGSGSSSFGGSSTEATEQMPFLANLNSPLPGGDIHLRDMNFDTLSEPSFPTTDGYNLDTDPFPADRSNMNRSNQGIHMSENGAVGVSFEKNNYNAADEIHSSEILSGNKVSNNYFGSDAMSGNGDATYPAKSNAQQPSSCAPDVRKQSKASITVYQPDMSVYLTSDMVSSCEGSYVSAGEPLQRSLSSGRTIGKVTVVNKRPSYPSSKVVSAQKSQDKVSTSYQNDAHEKNPCNKNDQRSTPTCESSQSTSSNLLKSGTSKVEVLKKPSKFLKTSLVALINDNKRNKVLFPYEDIVKFFQYEARGVSPRGLFNCGNSCYANAVLQCLMCTKPLMIYLLLRLHSKDCCSKNWCLMCELEQYASTLRESGGPLSPSRILSNLRNIGCRLGGGTQEDAHEFLRHLVMSMQAACLDGLGGEKHVEPSLQETTLIQQMFGGRLKSKVKCLRCYHESERYENIMDLTLEIHGWVESLQDALTQFTAPEDLDGDNMYKCGRCSAYVKARKQLSVHEVPNILTVVLKRFQSGKYGKINKCVTFPDMLDMVPFVTGSGDNPPLYFLYAVVVHVDTENASFSGHYISYVKDMQGTWLRIDDSEVQVVSVNQVMSEGAYMLFYLRSFPRPPRIYIEKGLPVTSAKRHTSKSSKGSKHDRKQTELLFPANDQAYGVYDFRPDGEGYAQDQHAELRSRAFHHADDAFADSVSADFSEATSSEWSLFTSSDESSFTTESTRDSFSVVDYGDNAGLDPISSIFGPSYAPEHGAPGSFVSRTRFSPSSPQTR

SEQ ID NO: 48468 - protein, 419 aa, Zea Mays
MCTSEFVQAHNGRDYGRQVLVDHGLFLTTSFLKEKGESSGYGGDWAVRLDANNERSGLSDAEESTTHLFFYIADETGNPITMGSYEPSSRGSVLLASGLHEEIGGWELYLRSEDNLEIHRAGFKSMSMHNLSDLVQQAVATNAMQSGNLNLPDITEDSSNIMVYQVSIKSPAQIDIVFLSGSASKSPVIEERISKLTGPMLSDRLETKQKEFEERYDQIFNVNNKVDSKELSVGRAALSSLLGGVGYFYGQSKIALPKGFTQKNGDKYISYWPAALYTAVPSRSFFPRGFLWDEGFHQLVIWRWDVHISMDIIGHWLDLLNSDGWIPREQILGAEALSKVPEEFVLQYPSNGNPPTLFLAIRDLASGIHAQQFSDEEAEKISSFLERAYIRLNAWFQWFNSTQSGKYEGTFYWHENESS

SEQ ID NO: 48469 - protein, 567 aa, Zea Mays
MTGGGSSTRRPAAVARSRGRPSEASEPDPGARRAAAAAAQRRGRGNPGPLRLMDVRPRTLAYFVVASFALVSVTFVVYTGGWWEEVEGEGAATLRKVMRSVTPLPAPRMMDLPQFQNNHKESLYWGTYRPNVYLGIRARTPLSLIAGLMWIGLKNGQYFLRHVCQDSDELRTFGWTAHNEKGESSGYGGDWAVRLDANNERSGLSDAEESTTHLFFYIADETGNPITMGSYEPSSRGSVLLASGLHEEIGGWELYLRSEDNLEIHRAGFKSMSMHNLSDLVQQAVATNAMQSGNLNLPDITEDSSNIMVYQVSIKSPAQIDIVFLSGSASKSPVIEERISKLTGPMLSDRLETKQKEFEERYDQIFNVNNKVQVDSKELSVGRAALSSLLGGVGYFYGQSKIALPKGFTQKNGDKYISYWPAALYTAVPSRSFFPRGFLWDEGFHQLVIWRWDVHISMDIIGHWLDLLNSDGWIPREQILGAEALSKVPEEFVLQYPSNGNPPTLFLAIRDLASGIHAQQFSDEEAEKISSFLERAYIRLNAWFQWFNSTQSGKYEGTFYWHENESS

SEQ ID NO: 48470 - protein, 301 aa, Zea Mays
MTGGGSSTRRPAAVARSRGRPSEASEPDPGARRAAAAAAQRRGRGNPGPLRLMDVRPRTLAYFVVASFALVSVTFVVYTGGWWEEVEGEGAATLRKVMRSVTPLPAPRMMDLPQFQNNHKESLYWGTYRPNVYLGIRARTPLSLIAGLMWIGLKNGQYFLRHVCQDSDELRTFGWTAHNGRDYGRQVLVDHGLFLTTSFLKEKGESSGYGGDWAVRLDANNERSGLSDAEESTTHLFFYIADETGNPITMGSYEPSSRGSVLLASGLHEEIGGWELYLRSEDNLEIHRAGFKSMSNAIWKP

SEQ ID NO: 48471 - protein, 585 aa, Zea Mays
MTGGGSSTRRPAAVARSRGRPSEASEPDPGARRAAAAAAQRRGRGNPGPLRLMDVRPRTLAYFVVASFALVSVTFVVYTGGWWEEVEGEGAATLRKVMRSVTPLPAPRMMDLPQFQNNHKESLYWGTYRPNVYLGIRARTPLSLIAGLMWIGLKNGQYFLRHVCQDSDELRTFGWTAHNGRDYGRQVLVDHGLFLTTSFLKEKGESSGYGGDWAVRLDANNERSGLSDAEESTTHLFFYIADETGNPITMGSYEPSSRGSVLLASGLHEEIGGWELYLRSEDNLEIHRAGFKSMSMHNLSDLVQQAVATNAMQSGNLNLPDITEDSSNIMVYQVSIKSPAQIDIVFLSGSASKSPVIEERISKLTGPMLSDRLETKQKEFEERYDQIFNVNNKVQVDSKELSVGRAALSSLLGGVGYFYGQSKIALPKGFTQKNGDKYISYWPAALYTAVPSRSFFPRGFLWDEGFHQRWDVHISMDIIGHWLDLLNSDGWIPREQILGAEALSKVPEEFVLQYPSNGNPPTLFLAIRDLASGIHAQQFSDEEAEKISSFLERAYIRLNAWFQWFNSTQSGKYEGTFYWHENESS

SEQ ID NO: 48472 - protein, 594 aa, Zea Mays
MTGGGSSTRRPAAVARSRGRPSEASEPDPGARRAAAAAAQRRGRGNPGPLRLMDVRPRTLAYFVVASFALVSVTFVVYTGGWWEEVEGEGAATLRKVMRSVTPLPAPRMMDLPQFQNNHKESLYWGTYRPNVYLGIRARTPLSLIAGLMWIGLKNGQYFLRHVCQDSDELRTFGWTAHNGRDYGRQVLVDHGLFLTTSFLKEKGESSGYGGDWAVRLDANNERSGLSDAEESTTHLFFYIADETGNPITMGSYEPSSRGSVLLASGLHEEIGGWELYLRSEDNLEIHRAGFKSMSMHNLSDLVQQAVATNAMQSGNLNLPDITEDSSNIMVYQVSIKSPAQIDIVFLSGSASKSPVIEERISKLTGPMLSDRLETKQKEFEERYDQIFNVNNKVDSKELSVGRAALSSLLGGVGYFYGQSKIALPKGFTQKNGDKYISYWPAALYTAVPSRSFFPRGFLWDEGFHQLVIWRWDVHISMDIIGHWLDLLNSDGWIPREQILGAEALSKVPEEFVLQYPSNGNPPTLFLAIRDLASGIHAQQFSDEEAEKISSFLERAYIRLNAWFQWFNSTQSDTHLICRSDLRLLHILYSPSSR

SEQ ID NO: 48473 - protein, 596 aa, Zea Mays
MTGGGSSTRRPAAVARSRGRPSEASEPDPGARRAAAAAAQRRGRGNPGPLRLMDVRPRTLAYFVVASFALVSVTFVVYTGGWWEEVEGEGAATLRKVMRSVTPLPAPRMMDLPQFQNNHKESLYWGTYRPNVYLGIRARTPLSLIAGLMWIGLKNGQYFLRHVCQDSDELRTFGWTAHNGRDYGRQVLVDHGLFLTTSFLKEKGESSGYGGDWAVRLDANNERSGLSDAEESTTHLFFYIADETGNPITMGSYEPSSRGSVLLASGLHEEIGGWELYLRSEDNLEIHRAGFKSMSMHNLSDLVQQAVATNAMQSGNLNLPDITEDSSNIMVYQVSIKSPAQIDIVFLSGSASKSPVIEERISKLTGPMLSDRLETKQKEFEERYDQIFNVNNKVQVDSKELSVGRAALSSLLGGVGYFYGQSKIALPKGFTQKNGDKYISYWPAALYTAVPSRSFFPRGFLWDEGFHQLVIWRWDVHISMDIIGHWLDLLNSDGWIPREQILGAEALSKVPEEFVLQYPSNGNPPTLFLAIRDLASGIHAQQFSDEEAEKISSFLERAYIRLNAWFQWFNSTQSDTHLICRSDLRLLHILYSPSSR

SEQ ID NO: 48474 - protein, 371 aa, Zea Mays
MLLNSHNEHNGAVEVDEVEIEVHNNPGGGVGLQPERQTVLEKLKGLSFLRQQDAITSKDCTHSGSDQRVPDETQINPNLSCGPFDATMEDKTSFDECSHGNAEVLQIITDLQKRTEALEKKLIGSDKEILSLREIFKDSGRKVQQLEYIVDELQFKLDSSLAHLGNMCNTLATPSIFLIGGYNGVTWLSSLDSFSPEKDAVLGLTPMSSPRSYASAAVLDGHIFAFGGGDGMSWYNTVECYSSRNNEWTECPSMNQKKGSLAGICLNEKIYAIGGGDGNEFYSEVEIFDPYLGKWICSPSMLTSRFALAASGLNGVIYTSGGYDGNMYLKSAERYDPREGFWVRLPSMSTRRGSHTLTVLGDTLYVRASCS

SEQ ID NO: 48475 - protein, 75 aa, Zea Mays
MRSFSEKDILSPIAKLVLRGVEQGAATVCYLALHPQVAGVTGKYFVDFNAVELKPPATDKELSKKLWDFSVSLLQ

SEQ ID NO: 48476 - protein, 257 aa, Zea Mays
MFGFLKQRRQTPSGFSSSSAAEEVTAGIDGSGLVAIVTGASSGIGAETCRVLALRGVRVVMGVRTPSAGERVKEEIVKNVPAAGHFLLTNLLLEKMKITAMESGIEGRVVIVASDSYKHTYREGIRFDKLNDASGYKGILAYGQSKLANILRSNELSCRLKEEDAKVVVNSLHPGVVATNITRHLGIIKDILSPIAKLVLRGVEQGAATVCYLALHPQVAGVTGKYFVDFNAVELKPPATDKELSKKLWDFSVSLLQ

SEQ ID NO: 48477 - protein, 343 aa, Zea Mays
MAGAATPPPSSSSSASCGTDAAYLLFRGETLLPDGVHASLYAVALAYCFVGLSAVTARFFKSMEQIMRHSREVVVGVDPRTGAPVVRRDKVWNYTVADIALLAFGTSFPQISLATIDAIRNLGQLTAGGLGPGTLVGSAAFDLFPIHAVCVLMPRAGSKKKISDLGVWLVELFWSFWAYIWLYVILEVWTPRVITLWEASLTVLQYGLLLLHAYAQDKRCPFVSIPFARGERPEDWVPPEDVSAVYYAKCDGIDETLPMGADGNDGIVDIFSAHSYYDAAEYSQLAEEDMEGSSTMDQVVKNTQDNMSWLSIWWQQFVDASMVIWFISFMGQMCLTLLIHWTP

SEQ ID NO: 48478 - protein, 112 aa, Zea Mays
MPEEAAEVVPVLRVRRVPALRGGEGEDHRPEVHGAVRRVEPDAPDGGLAVLTTDQSGASGSRAVPILPPCRIKQAVSPCCFRSNSAENNAGTMSVLCCVSAVVASCSTGFRF

SEQ ID NO: 48479 - protein, 633 aa, Zea Mays
MGDSSVAGALVPSVPKPETAPSGDNSTAALALPEEAGTRAASASPQGPAEEEGPADRDLLCPICMAVIKDAFLTACGHSFCYMCVVTHLSNKSDCPCCGHYLTKAQLYPNFLLDKVLKKISARQIAKTASPVDQFRCALQQGNEMGVKELDSLMTLIAEKKRQMEQQESETNMQILLVFLHCLRKQKLEELNEIQSDLQYIKEDISAVERHRVELYRTKERYSMKLRMLLDEPTAQKMWPSPMDKASCRFPPNSRTPLGGSCPGTLQNKKLDPKAQRRVQAQFNELQEYYLQRRRTGAQARRQEERETVAMNREGYHAGLQDFQSVLTTFTRYSIEFDRDDELFATAGVSKRIKVFEFSTVVNEPSDVHCPVVEMATRSKLSCLSWNKYSKNIIASSDYEGIVTVWDVQTRQSVMEYEEHEKRAWSVDFSRTEPSMLVSGSDDCKVKVWCTKQEASVINIDMKANICSVKYNPGSSFYVAVGSADHHIHYFDLRNPSAPVHVFGGHKKAVSYVKFLSNNELASASTDSTLRLWDVKDNLPVRTFRGHKNEKNFVGLSVNNEYIACGSETNEVFVYHKAISKPAASHRFVSSNLDDADDDPGSYFISAVCWKSDSPTMLAANSQGTIKVHVLAP

SEQ ID NO: 48480 - protein, 498 aa, Zea Mays
MGDSSVAGALVPSVPKPETAPSGDNSTAALALPEEAGTRAASASPQGPAEEEGPADRDLLCPICMAVIKDAFLTACGHSFCYMCVVTHLSNKSDCPCCGHYLTKAQLYPNFLLDKVLKKISARQIAKTASPVDQFRCALQQGNEMGVKELDSLMTLIAEKKRQMEQQESETNMQILLVFLHCLRKQKLEELNEIQSDLQYIKEDISAVERHRVELYRTKERYSMKLRMLLDEPTAQKMWPSPMDKASCRFPPNSRTPLGGSCPGTLQNKKLDPKAQVSHQGFQRRDALTSSDPPNSSIQSGNVIARKRRVQAQFNELQEYYLQRRRTGAQARRQEERETVAMNREGYHAGLQDFQSVLTTFTRYSIEFDRDDELFATAGVSKRIKVFEFSTVVNEPSDVHCPVVEMATRSKLSCLSWNKYSKNIIASSDYEGIVTVWDVQTRQSVMEYEEHEKRAWSVDFSRTEPSMLVSGSDDCKVGGYIRQLTAEMIVVSDGHSDS

SEQ ID NO: 48481 - protein, 357 aa, Zea Mays
MGDSSVAGALVPSVPKPETAPSGDNSTAALALPEEAGTRAASASPQGPAEEEGPADRDLLCPICMAVIKDAFLTACGHSFCYMCVVTHLSNKSDCPCCGHYLTKAQLYPNFLLDKVLKKISARQIAKTASPVDQFRCALQQGNEMGVKELDSLMTLIAEKKRQMEQQESETNMQILLVFLHCLRKQKLEELNEIQSDLQYIKEDISAVERHRVELYRTKERYSMKLRMLLDEPTAQKMWPSPMDKASCRFPPNSRTPLGGSCPGTLQNKKLDPKAQVSHQGFQRRDALTSSDPPNSSIQSGNVIARKRRVQAQFNELQEYYLQRRRTGAQARRQEERETVAMNREGYHAVVYVSLRN

SEQ ID NO: 48482 - protein, 220 aa, Zea Mays
MAQEDVHLDDAGLALGLSLGSGSGGASGAARHGGISRRLSREVRLPSPHPLEPSLTLSLPDEATATGSGGGGAAHSVSSLSVAGVKRERVDDAEGERASSTAALPRACAGAEDDDDDGSTRKKLRLTKEQSALLEDRFKEHSTLNPKVALAKQLKLRPRQVEVWFQNRRARLVLTRRHARTPAHGIRRRCCRFFFNNIAMHAHANNKPAASPQKQIRHAC

SEQ ID NO: 48483 - protein, 85 aa, Zea Mays
MDEDEGHNADRRRALLLLVETKGTLTSAALGGGRRRLQHLVVAAVSTSRWGQSSGKNGARKKRNGCRRNIARGTDRLRWQFFDWN

SEQ ID NO: 48484 - protein, 572 aa, Zea Mays
MEKSRGKYAEVDKQRSSGSGGYIGGLHQRYESRLGGYSPRKKKTSLQAEQATTKTPSKMAPTPFSFSVIKDPSTTAVTMLAATEDKLIDCLNDFLLSTGSKLQRSKPCLSCTINREKRQAFVEFLTPEDATAAISFDGRSLNGSVLRIRRPKEYVETVNVTPKKAEETALISDVVADSPYKIFIAGIAGVISSKMLMEIVSAFGPLAAYRFLFNNELGGPCAFLEYADRSVTSKACAGLNGMMLGGRVLTAVHVFPNPHVEAANEASPFYGIPDNAKLLLKEPTKVLQLKNVFEREEYMLLSKSELEETLEDVRVECTRFGAVKSVNVVEYPAAGVSAAEENIVELKIECTEFSDTENIAKAVSEYSVPIIPSIDVLNHSVASDTKDVDLIPESQDQKDKHLPSNAALCESEAPVADEDAELDETQSRAALPTPQHAEADHTEAAVDENKHTGAGKVTATATDDDAVEKSHGDPRTSETCNPAGPTDKAEKPGRYSEQGAGDVTEDRPEKEAQAVGTSDTGFVFEPGSVLVEFLREEAACMAAHSLHGRRFGNRTVHAGYAPYDLYLQKYPR

SEQ ID NO: 48485 - protein, 417 aa, Zea Mays
MVQNVTPKKAEETALISDVVADSPYKIFIAGIAGVISSKMLMEIVSAFGPLAAYRFLFNNELGGPCAFLEYADRSVTSKACAGLNGMMLGGRVLTAVHVFPNPHVEAANEASPFYGIPDNAKLLLKEPTKVLQLKNVFEREEYMLLSKSELEETLEDVRVECTRFGAVKSVNVVEYPAAGVSAAEENIVELKIECTEFSDTENIAKAVSEYSVPIIPSIDVLNHSVASDTKDVDLIPESQDQKDKHLPSNAALCESEAPVADEDAELDETQSRAALPTPQHAEADHTEAAVDENKHTGAGKVTATATDDDAVEKSHGDPRTSETCNPAGPTDKAEKPGRYSEQGAGDVTEDRPEKEAQAVGTSDTGFVFEPGSVLVEFLREEAACMAAHSLHGRRFGNRTVHAGYAPYDLYLQKYPR

SEQ ID NO: 48486 - protein, 419 aa, Zea Mays
MVQVNNVTPKKAEETALISDVVADSPYKIFIAGIAGVISSKMLMEIVSAFGPLAAYRFLFNNELGGPCAFLEYADRSVTSKACAGLNGMMLGGRVLTAVHVFPNPHVEAANEASPFYGIPDNAKLLLKEPTKVLQLKNVFEREEYMLLSKSELEETLEDVRVECTRFGAVKSVNVVEYPAAGVSAAEENIVELKIECTEFSDTENIAKAVSEYSVPIIPSIDVLNHSVASDTKDVDLIPESQDQKDKHLPSNAALCESEAPVADEDAELDETQSRAALPTPQHAEADHTEAAVDENKHTGAGKVTATATDDDAVEKSHGDPRTSETCNPAGPTDKAEKPGRYSEQGAGDVTEDRPEKEAQAVGTSDTGFVFEPGSVLVEFLREEAACMAAHSLHGRRFGNRTVHAGYAPYDLYLQKYPR

SEQ ID NO: 48487 - protein, 604 aa, Zea Mays
MESAFKQMKGEFVGLLIRREVMQGRFSSFLLFWVEPRGVIPLELSGCISQVWSPWFKGDPCVGAATDGTSIYADKMNPGIKCDCSDHNNTICHITELKMNKLDVVGPIPEELRNLSHLTTLNLQQNYLTGPLPSFLGELTALQQMSLSGNALSGTIPKELGNLVNLIILSLGTNNLTGSLPSELGNLVKLEHMYIDSAGLSGPIPSSFSKLTRLKTLCASDNDFTGKIPDYIGSWSNLTDLRFQGNSFQGPLPSTLANLVQLTSLILRNCRIFGTLALVNFSKFTGLTLLDLSFNNIIGEVPQALLNMNSLTLLDFSYNYLSGNLPSWASHNLQFVLPAGLECLQRNTSCFLGSPQSSSFTVDCGSSRSVFASDNSMYQPDDANLGVASYYISSPPRWGVSNVGRFMDTSNGSYIVNSSRRFQNTLDSKLFQTARMSASTLRYYGFGLENGDYTVTLQFGEFDFEDLQTWKSVGRRVFDIYLQGERKEQNFNIKKAAKEAGEASTSYTAVKKQYTVPVTKNILEIHLFWAGKGTCCIPNQGDYGPTISALSATLNTKKKGNKIGVIIGVVIGATVLGLAILATLCVWRHKRRKVSLEQQGKMIC

SEQ ID NO: 48488 - protein, 641 aa, Zea Mays
MLQVQRPLKFFACLIMHRNLVANYFVINKSKDSVLPAGLECLQRNTSCFLGSPQSSSFTVDCGSSRSVFASDNSMYQPDDANLGVASYYISSPPRWGVSNVGRFMDTSNGSYIVNSSRRFQNTLDSKLFQTARMSASTLRYYGFGLENGDYTVTLQFGEFDFEDLQTWKSVGRRVFDIYLQGERKEQNFNIKKAAKEAGEASTSYTAVKKQYTVPVTKNILEIHLFWAGKGTCCIPNQGDYGPTISALSATLNTKKKGNKIGVIIGVVIGATVLGLAILATLCVWRHKRRKVSLEQQELYNIVRIPNVFCYTYGELRTATENFSSANLLGEGGYGSVYKGKLVDGSVVAIKQLSETSRQGKKEFVAEIETISRVQHRNLVKLFGFCLEGNKPLLVYEYMESGSLDKALFGNGRLNLNWSTRYKICLGIARGLAYLHEESSIRIVHRDIKASNVLLDATLNPKISDFGLAKLYDDKKTHVSTKVAGTFGYLSPEYAMRGHMTEKVDIFAFGVVMLEIIAGRPNYDGKLDQDMAYLLEWVWQLYEEDHPLDIADPKLTEFDSVELLRAIRIALLCIQSSPRQRPSMSRVVSMLTGDSEAPEAVSKPSYVAEWQSNTEGTSSSVSTAEAVSVAPFLNPVVDDGR

SEQ ID NO: 48489 - protein, 288 aa, Zea Mays
MNSLTLLFLGNNSLTGGLPSSIGPSIKYLDFSYNYLSGNLPSWASHNLQLNLVANYFVINKSKDSVLPAGLECLQRNTSCFLGSPQSSSFTVDCGSSRSVFASDNSMYQPDDANLGVASYYISSPPRWGVSNVGRFMDTSNGSYIVNSSRRFQNTLDSKLFQTARMSASTLRYYGFGLENGDYTVTLQFGEFDFEDLQTWKSVGRRVFDIYLQGERKEQNFNIKKAAKEAGEASTSYTAVKKQYTVPVTKNILEIHLFWAGKGTCCIPNQGDYGPTISALSATLSILF

SEQ ID NO: 48490 - protein, 286 aa, Zea Mays
MPPILFSPQPKHASPFPSFPFLSLVSSRLRSPFLLRTPSSPHRVKPQHKSTARRLRSPPVPNQPLRCPIRPIPPPIRRRGGASGPTPMYSNFKEQAIEYVKQAVQEDNAGNYVKAFPLYMNALEYFKTHLKYEKNPKIKEAITAKFTEYLRRAEEIRAVLDEGGAGPGANGGDAAVATRPKTKGKDGDGGNGGDDSEQSKLRAGLNSAIITEKPNVKWNDVAGLESAKQALQEAVILPVKFPQFFTGKRRPWRAFLLYGPPGTGKSYLAKAVATEADSTFFRQESF

SEQ ID NO: 48491 - protein, 327 aa, Zea Mays
MGPTTRAHFVYNRRRRRRRGGRHAVEEASDEEQQQMDSSSSSSDEEGDQEEDAEASGEDVDDEEEEEAVAAEPAPKQPPAAAAAGEKRGRRKGSITISLKKVCKACKRTGHQAGFKGAVYIDCPMKPCFLCKMPGHTTLTCPHRVTMEHGVIPAPKRNANTSLDYVFQSQVKGKIPMVKPKFLIPNQLEHGNIKFHQRRVTCLEFHPTKNSVLLSGDKKGLLGIWDYVKLHEKITYDSVHSCILNSMKIDTTNDGMIYTASSDGTISCTDLDTGIGSPLLNLNPNGWNVSLLWSCSIDHFVQKEFMKMLFQSLSTFPHLVLVQALGT

SEQ ID NO: 48492 - protein, 147 aa, Zea Mays
MRTHYRSDVNHSDQALEIASDRVYYIYQILNTSFVKAFTCLKEDVGLLLLHHHRYHATCWNATAGQEHGDEQAQDDSKWRRIPTFDDWNLRDDMPVTQYLQAGTSSSLCRRQRRTTTRICSRCPCVPCQALQLQEVLGANSGLRGPQ

SEQ ID NO: 48493 - protein, 456 aa, Zea Mays
MVVVVPKYGDYEEPQEIGEPRSYHVAGQDMEVKYYHAYIDGVDFVFIDNPVFHYVQSEIYGGDQTDIWKRMVLLCKAAVEVQWYVPCGGFCYGDGNLVFIANDWHTALLPVYLKAYYRDNGFMPYARSVLVIHNIAHQGRGPIDDFRYLDLPGHYMDQFKLYDPFGGDHLNIFAAGIRAADRLLTVSHGYAWELKTPDGGWGLHSIINENDWKFQGIVNGIDTADWNPRHDVHLQSDGYTNYSLETVQTGKAQCKEALQKELGLPVRGDVPVIAFIGRLDHQKGVDLIAEAMPWIAGQDVQLIMLGTGRQDLEDTLRRLESQHYDRVRGWVGFSVRLAHRMTAGADILLMPSRFEPCGLNQLYAMMYGTVPVVHAVGGLRDTVQHYNPYEEVGVGWTFEKAEANRMIDALGHCLNTYRNYWSSWEGIQRRGMMQDLSWDNAAKLYEEVLLAAKYQW

SEQ ID NO: 48494 - protein, 427 aa, Zea Mays
MEVKYYHAYIDGVDFVFIDNPVFHYVQSEIYGGDQTDIWKRMVLLCKAAVEVQWYVPCGGFCYGDGNLVFIANDWHTALLPVYLKAYYRDNGFMPYARSVLVIHNIAHQGRGPIDDFRYLDLPGHYMDQFKLYDPFGGDHLNIFAAGIRAADRLLTVSHGYAWELKTPDGGWGLHSIINENDWKFQGIVNGIDTADWNPRHDVHLQSDGYTNYSLETVQTGKAQCKEALQKELGLPVRGDVPVIAFIGRLDHQKGVDLIAEAMPWIAGQDVQLIMLGTGRQDLEDTLRRLESQHYDRVRGWVGFSVRLAHRMTAGADILLMPSRFEPCGLNQLYAMMYGTVPVVHAVGGLRDTVQHYNPYEEVGVGWTFEKAEANRMIDALGHCLNTYRNYWSSWEGIQRRGMMQDLSWDNAAKLYEEVLLAAKYQW

SEQ ID NO: 48495 - protein, 206 aa, Zea Mays
MGTHGYAAPEYIMTGHLTAKSDVYSFGVVLLEILTGRRSVDKTRPSREQNLVDYARPCLKDPLRLGRIMDPAMEGQYSPRAAQSAALVAYRCLSASPKNRPDMSAVVRALEPLLDLHDDVPVAPLGHAGPVVLFVAAAAEEEKKERAPRKDVHVHRRRPMSPKASPRKRPGTGAGTKEEFWVWHLPVPADHKTRPTLGGGVVQACA

SEQ ID NO: 48496 - protein, 230 aa, Zea Mays
MKRAAPSQEPLDVSSGDSSGSDSDQLGGKDKGGSASKAAAGAEDVKRVVLHKESQDVSSDDDLSSDSDDDAGKGNAWNAFGLPNSSKAASTAEARSKKKKKTGVDFSALSRHGYHGGPSVLTVRPAAEEPNWSWSTGKDRDGKEDAHAPESYEERERTRAAVTEGEKFIGLQNAPPNQLLLEKDRKEKDASFSQKEKRKRDRGQASRGKNYVEEEKRLLRGSGVYSGFDT

SEQ ID NO: 48497 - protein, 174 aa, Zea Mays
MANSCPNEGICRNCGKSGHIARDCTAPPVPPGEVILCSNCYKPGHFREECTNEKACNNCRQSGHLARNCTNDPVCNLCNVAGHLARQCPKSDTLGERGGPPPFRGVGAPFHDVGAPFRGGFSDVVCRACNQIGHTSRDCMAGAFMICHNCGGRGHMAYECPSASLMDRFPPRRF

SEQ ID NO: 48498 - protein, 701 aa, Zea Mays
MMGKTNRFSKGHQLGFVPDYRHGVEAMGESKGLGSPPRIDSGSSCAPPKRKCVSVNSEEGEGASGFSMPRAREVFSLPRMTRLDKKDLEMKLRHELAQVRDVQSRLFLRGSAVSMNGAAVASVPAGDVQPKKKVEKLKRSDSVQTDRGAPPPAATVVAAPVASSVNYTSSFKQCANLLKSIMSHVWAGPFLVPVDIVKLNIPDYFQIVKQPMDLGTIQKKLKAGMYSTPREFAADVRLTFSNAMNYNPVNNDVHLMAKTLSKNFETRWKLIEKKLPKPDDKPQPVEKPPVREPTEKNSTKGVAVEKEDITKKKPSKKSVPKQDIFQEGYSADNPVLQPKKRKTSPLIQDASLVEDVVPTGKRMMTSEQKYDISARLQSFGAFIPDHVVEFIRSRVDDCDADEEEMELDIDVLGDDTLFELQQLLDDYDRVNPSRNLTKEDPHEAESRSQYELINPSVCNDGNELIDEDVDIGENDPPILALPPVVLEDETADRNSKHSTSSSSSSDSESSSSDSDSSSSSGSDADAKAPQQNSGSKEKVLPVDGVDQEKDSLSTLNLPEQSTNPISVSADGEGGNVSEKQVSPDKQIRAALLRSRFADTILKAREKALDQTTKKDPEKLRREREELERVQREERARLQAEAKAAEDVRKRAEAAAAAEAAAEAKRQRELEREAARKALQEVNRYPTWLVKQVLGFKWEATH

SEQ ID NO: 48499 - protein, 366 aa, Zea Mays
MVEMHEMVPGKRFDRYHELGQHAFGERLGLWIVVPQQLVVEVGLNIVYMVTGGTSLKKFHDTVCGDDDHRCKGRDIKLTYFIMIFASCHLVLSQLPNFHSISGVSLAAAVMSLCYSTIAWIASAQKGKSPDVHYGLRATTTPGKVFGFFGALGDVAFAYAGHNVVLEIQATIPSTPDKPSKKPMWKGVVVAYVVVAVCYFPASLVGYWAFGDGVDENILVTLRKPKWLIALANVMVVVHLIGSYQVYAMPVFDMIETVLVRKFGFRPTLMLRLVARSVYVGFTMFVAITFPFFSALLSFFGGFAFAPTTYFLPCIMWLTICKPKTFSISWFTNWICIVLGVLLMVLSPIGGLRQIILRAKTYHFYQ

SEQ ID NO: 48500 - protein, 526 aa, Zea Mays
MELATVAAAVASAAARPHGPFSSPRAVSASVSWTSLSLAYTSRCLSSTSSRRRLRWLPVTSAAVELREATAGGGDSLRVTKTPQPGSSFSVEVPTSIIHECYQSTLQEYAKRVKVPGFRPGKTIPENVLINYVGPQHVQDATIEAILKHTLPQALSSVEERALEDSVRILTQFDDMRNSFSLDNVFRYDVAVDVAPEVRWLSEDKYRNLKVVVEIDEAVDAEKAAEKELQRRHKALGLLRIVADRGLQIGDLVVLDIFAESINNDGSRGEKISSAESTGFHLDTEENSNLVPGFLGSLIGIRAGETRSFPIQFPESFERESLRGVRAQFTVVCKELFYRELPVMDDSLAVKLLPGCTTIDEVRERILKRCKEVEKTAIEQATDNAILDQLGKLVEVDVPRALFQEQGQQLYGAKLLQLQAERKLDKDQLASLSTKRSVQAYLEDEKENITRIIKQMLAVGDIFKSENLQYSTDQLVKEVENSIAEFKQYNQDYDEDNIRQQVQDVLEAAKVLEWLKENCSVEYIRR

SEQ ID NO: 48501 - protein, 1122 aa, Zea Mays
MPMDTDERPLVELASAAAATTLAASSTSSAPFPAPATPGFSRAVRCNAPASSLPADGGAGAQPAYPENAISTTKYTPASFVPKSLFEQFRRAANCFFLVVACVSFSPLAPYRAVSVLLPLVVVVSAAMAKEAVEDWRRKQQDIEVNNRKVEVYDGIQSFHETEWKKLRVGDIIKVKKDEFFPADLIFLSSSSCDGLCYVETMNLDGETNLKRKQALEVTMGLNDDHFHSFKAFIRCEDPNEKLYSFLGTLYYNGQQYSLSPEQVLLRDSKLRNTMYIYGTIIFTGHDTKVMQNAMEPPSKRSSVERRMDKIIYLLFVILFVIATFGSIVFGMRTKHEISPGSYAWYLRPDQANIFFDPNNASFAAFCHFLTSLMLYVCLVPISLYISIEIVKVLQSTFINQDQNMYCAESDKPARARTSNLNEELGQVHTILSDKTGTLTCNSMEFLKCSIAGVAYGSRPTEVETCYGEIVETNGSFGRKDTTEFKRSVKGFNFTDSHLMNGRWAKECSRDAIEMFFRVLAVCHTAIPVADGNSAGMPYEAESPDEAALVTAAREFGFEFYHRTQTTISVHEYDPVVGGKVDRTYKLLNILEFSSARKRMSVIVRTEEGRLFLFCKGADSVIFERLSKDNGTAHLTKTKCHIDEYSEAGLRTLALAYCELTEEQYVVWNQDYSSAKNSVHTDHVAAVEKVSEDIEKDLVLLGATAVEDRLQNGVPECIYKLAQAGIKIWILTGDKLETAVNIGYACNLLRKEMEEIFITLENSSTSASEGSSGEGNKIATFEEIDRKLKDARGKISQKGTSTSFALIIDGNALTHALTGSLKNSFLDLAVNCASVLCCRVSPKQKALVTRLVKIRTSKTTLAIGDGANDVGMLQEADIGVGISGAEGMQICYFFFKNITFGFTLFWFEAHAMFSAQPAYNDWFISFYNVAFTSLPVIALGVFDKDVSSHVCLEVPSLHQDGVNNVFFSWSRILSWMLNGMCCSIIIYFGSLNAILVQAVRQDGRVAGFDILGVTMYTCVVWTVNCQLALYISYFTWIQHFVIWGSILIWYTFLVIYGLFSPAISTTAYHVFVEACAPSPLYWLSTLMIVVTALIPFFVYKISRTLYYPQYHDQVQRANSKNW

SEQ ID NO: 48502 - protein, 582 aa, Zea Mays
MPMDTDERPLVELASAAAATTLAASSTSSAPFPAPATPGFSRAVRCNAPASSLPADGGAGAQPAYPENAISTTKYTPASFVPKSLFEQFRRAANCFFLVVACVSFSPLAPYRAVSVLLPLVVVVSAAMAKEAVEDWRRKQQDIEVNNRKVEVYDGIQSFHETEWKKLRVGDIIKVKKDEFFPADLIFLSSSSCDGLCYVETMNLDGETNLKRKQALEVTMGLNDDHFHSFKAFIRCEDPNEKLYSFLGTLYYNGQQYSLSPEQVLLRDSKLRNTMYIYGTIIFTGHDTKVMQNAMEPPSKRSSVERRMDKIIYLLFVILFVIATFGSIVFGMRTKHEISPGSYAWYLRPDQANIFFDPNNASFAAFCHFLTSLMLYVCLVPISLYISIEIVKVLQSTFINQDQNMYCAESDKPARARTSNLNEELGQVHTILSDKTGTLTCNSMEFLKCSIAGVAYGSRPTEVETCYGEIVETNGSFGRKDTTEFKRSVKGFNFTDSHLMNGRWAKECSRDAIEMFFRVLAVCHTAIPVADGNSAGMPYEAESPDEAALVTAAREFGFEFYHRTQTTISVHEYDPVVGGKNI

SEQ ID NO: 48503 - protein, 68 aa, Zea Mays
MNAAGKLTLPVFGLASYKLKSSIWSSNRPEEQQLAASLTQTADDWLRHRQVYHPDFRFFLTHFNTALR

SEQ ID NO: 48504 - protein, 82 aa, Zea Mays
MLIYHIVLCVCVFLPLPKGDYTIGLMDGGGIILMREGKAGGGSAAWQLARLAQEDHGEGKFDNGGIFFWGPQQEAYTGPPLP

SEQ ID NO: 48505 - protein, 310 aa, Zea Mays
MQPPHQPPMNGQHSQPPPQGPVVPMPPQQQAPPLPYYQQQQAPQYYQQALPQPWGQQQQYAAPPPQYPPPPQTQHYATPPQQYAPLPQQQYAPPPQQQYAPSPYGTTPGSGEVRTLWIGDLQHWMDENYLHYNAFAAVAQQIASVKIIRNKQTGHSEGYGFIEFYSRAAAEHTLMNFNGQMMPNVEMTFKLNWASASTGDKRGDSGSDRTIFVGDLAHDVTDSMLEDVFRAKYPSVRGANVVVDRMTGWPKGFGFVRFGDLNEQARAMTEMNGMLLSTRQMRIGAAANKKNRDAQQTYATDGMYLSNIFI

SEQ ID NO: 48506 - protein, 312 aa, Zea Mays
MQPPHQPPMNGQHSQPPPQGPVVPMPPQQQAPPLPYYQQQQAPQYYQQALPQPWGQQQQYAAPPPQYPPPPQTQHYATPPQQYAPLPQQQYAPPPQQQYAPSPYGTTPGSGEVRTLWIGDLQHWMDENYLHYNAFAAVAQQIASVKIIRNKQTGHSEGYGFIEFYSRAAAEHTLMNFNGQMMPNVEMTFKLNWASASTGDKRGDSGSDRTIFVGDLAHDVTDSMLEDVFRAKYPSVRGANVVVDRMTGWPKGFGFVRFGDLNEQARAMTEMNGMLLSTRQMRIGAAANKKNRDAQQTYATDGSCRGTDYESI

SEQ ID NO: 48507 - protein, 470 aa, Zea Mays
MLSVATTNGSQGNSMETVMATMERQTARRTQTNVTQMMESIFASVSLAKDLSARCKSRALQVTDDEIQSTAQDLENVLQNIYDDLCRIPASAFGSSAYMDVPIKSQPMRDCCKADIPINVMGNRPRTRSLRDNDTPRLVDFLKGMYHESHEFSGQMFNTLLEVTEYIEPLYDAFICALTNEIMTDPVMIESGVTCDRRAIEEYIERFADSSEPVYCPVTKMTMQSKTMVSNASLKCVIEEWTMRNEIMRVRIARTALSLSTTDTMVLEAIHELKLLAKLRVKNRELMHKIGVTKFLARLLDNHNDQIQFEALKLLCLLAQDEEGKDIIGKTKAIARTIKLLSSNSTDERHAAISFLLELSESQLLLDNIGSTPGSILILTTMKLNSSDDPIAAARAGAVLKNLEKCPKNIKYMAESGYLEPLQSHLVEGSEEIQMEMVGYLCELVQEQELTIDINRSTSEILVKMALSLS

SEQ ID NO: 48508 - protein, 324 aa, Zea Mays
MELALSLGETMADAGRDLMLGLGMGVGVRREEEAQRGRRDREVRRELEFTARSARSSPEPAVRLTLLHGLGLPWPPPPSSETNRHLEASARGFDVNRAPSLSAAGGAAEEDEEQDEAAAAAASSSPNNSASSFPTDFSAQGQVAPGADRACSRASDEDDGGSARKKLRLSKEQSAFLEDSFKEHATLNPDEAEADGGGLRVPQAMLRDADGGEPAAAEGAIRAPRAQDGAPLLHAPPGHHPFHVPLLRARRLQLRAGARVIAVPRYWHCGPGTGAEALVVRGSVLVPSEPPAGRPGATATAGAGQLVRRSLLYLRRRERRWIWL

SEQ ID NO: 48509 - protein, 123 aa, Zea Mays
MNANFRKFKEKMVPKNSPSEDKEESEKHMEELCSKIKVGDRCEVEPGAKRGTVKFVGRAEALGRGFWVGVQYDEPLGKHDGMVKGIRFFECPQGHGAIVRPEKVKVGDFPERDPFEDEDDDEI

SEQ ID NO: 48510 - protein, 965 aa, Zea Mays
MKNFLRKLHIGEGSSDGASTPPPPPSRKGGTGTGGGVGGVHHHQPHHDQRHQTSAVSSWLDSVPTRPPPPIPVEAEEEMEQERRRSQEQDEVEERVIRESSEAEERKREREKEEDDLEAYQIQLVLEMSARDNPEEMEMEVAKQLSLGFCPPQRSPAEVLAVRYRNFNALGYDDKILDGFYDLFYVGNGPAAVTMPSFAELRVQPFSHKVDWEAVLVHRGEDPELMKLQQEALIMNHELHSRTSESVGNALVKGLANLVARHMGGVFDPERMSAKYQNMLSYLRSDIGSVIVPLGQLKIGLARHRALLFKVLADGLDVPCRLLKGKRYTGSDDGALNIVKFKDGREFIVDLVSDPGTLIPSDVSVLSTELDRNFVSDNQHFGQDDNTNLLGSSLSGVSSSAYGSFEYELLDRRSTSSNVGPSDTDGPTTNLTSNQQNMSSNSFDKLSVSTFTSENRPVSKESTNPDYIIVGKNKEKYTAAVDSSSSSPSTPDMGSAPAVRRMKVKDISEYMINAAKENPQLVQKIHEVLLENGVMAPPDLFSEDSMEEPKDLIVYDTTLFQSKDEMKRRMNELGSREYTDRGHDPLLPHHPGHELQPKVAPHRAPLESLKPVEGLGIYHPHDIRDIASPFVSQYEPSAPPQEASSQLTKQLPVTAAAVATAAVVASSMVAAAALSTNDVNFDVPVAAAATVTAAAVVATTAAVSKQYEHSDPGNQLFSVPSTSQGNKSVEKAGGDLWDKHHVETDHGQDNCLDQEVPQEAERTSDKSNKSSGTEDVKSDLALDNVAEFEIQWEEISIGERIGLGSFGEVYRGEWHGTEVAVKKFLQQDISSDALEEFRAEVRIMKRLRHPNVVLFMGAITRVPNLSIVTEFLPRGSLFRLIHRPNNQLDERKRLRMALDVARGMNYLHNCSPVIVHRDLKSPNLLVDKNWVVKVCDFGLSRMKNNTFLSSRSTAGTVYPNCLKCV

SEQ ID NO: 48511 - protein, 223 aa, Zea Mays
MPCCSPSLLGVGPRIGCALIGSLGALFNGVLVINLVIGLFAVVAIESSSQRLGRTYAVLLFFAVVLDVAWFILFSHAIWTINPDEKYGELFVFSLRLALWMQIIGFSVRFLSSFLWIQMYRLGASSSTPTYFETNHEARISFLSPRSDSVRRSPTADDILGGSIYDPSYYSSLFEDVRNNACNHQGDKQSGSNDSGSTSAGQTPRLKSFANDVEGGLKRPLNS

SEQ ID NO: 48512 - protein, 266 aa, Zea Mays
MLFVIGGNGSHAGANAIHEECRKRKLKVSVVAVPKTIDNDILFMDKTFGFDTAVEEAQRAINSAYIEARSAYHGIGLVKLMGRSSGFIAMHASLSSGQIDVCLIPEVSFTLDGEHGVLRHLEHLLNTKGFCVVCVAEGAGQDLLQKSNATDASGNVILSDFGVHMQQKIKKHFKDIGVPADLKYIDPTYMVRACRANASDAILCTVLGQNAVHGAFAGFSGITSGVCNTHYVYLPITEVITTPKHVNPNSRMWHRCLTSTGQPDFH

SEQ ID NO: 48513 - protein, 184 aa, Zea Mays
MDSRRESSETLRYEVTGIRPEYLRDAMPLKVAQRRIQEILCNGESLWKLRPRSYGRAKVLVGHGLDHDLERLGLEYPAFMIRDTAKYPPLMKTSKLSNSLKYLTQAYLGYDIHTGIQDPYEDCVATMRLYIRMRSQAHQRDYNSGSGEAQNNYPAWRQRELDRMSPEELLALSASDYYCWCLDY

SEQ ID NO: 48514 - protein, 119 aa, Zea Mays
MASVYSRSHYNMSLSKEFEGGITNGAFWYYVGCVFVGFESNNIIACGPDCKNGTAKQAKISMAYSFIHRPLSDEERRVTCNDQRREVFVAQDIANKEIDRTVAFDKVSSNSSRHHSRPE

SEQ ID NO: 48515 - protein, 176 aa, Zea Mays
MMSCVEIHNALLSIDCGAVISSKGSTVLFPTKASREQKLLTKPTAVIIVSSDSSGAIPSVCKLSPGQAAYHFLAGYHDGKFVPAYNRAPSPADPLALASSLFSHLKEDDTPSYLINAKHSGKYIDGNGFMKLLKLALSHDLPDIKTEGSRVGELKGKYRSFLSSKFGQCLPEEFSF

SEQ ID NO: 48516 - protein, 176 aa, Zea Mays
MQTFMIPGTIFMSLLAGALFGQLRGVALVVFAATAGASSCYFLSKMIGKPLVFTLWPDKLSFFQRQVAKRREKLLNYMLFLRVTPTLPNTFINLASPIVDVPYHIFLLGTLIGLIPASYVTVRAGIALGELTSLSDLYDTQSIALLFLIGVVSVTPALLGKDEAQEKPSEMAVGAS

SEQ ID NO: 48517 - protein, 131 aa, Zea Mays
MIGKPLVFTLWPDKLSFFQRQVAKRREKLLNYMLFLRVTPTLPNTFINLASPIVDVPYHIFLLGTLIGLIPASYVTVRAGIALGELTSLSDLYDTQSIALLFLIGVVSVTPALLGKDEAQEKPSEMAVGAS

SEQ ID NO: 48518 - protein, 162 aa, Zea Mays
MRSRSPIGLGGPAEDIHGGRLLSGAHAPAEPPVVPRNLDSSTIYLTDGFAAKVSDTATTKGSDSSSTADDELSSVSGIDAMVHQYGMLLLERLTGKVAYSEEDDDDGVSLEHLASRYLDDGSMPLAELIDPSLGWFPQEAAHALCEVARSWVGWTQTPTRDH

SEQ ID NO: 48519 - protein, 116 aa, Zea Mays
MRRRSPTDTDDPRKNQDMIQLEIQKGHLLLKPGHHHLLLDLIIHRQRLPDRIDTPPESTAWSLQGVQFFLSWLQLASFCYVLSSQEGGHRQAAMGHRVKRPAAASIRNRCTCVETI

SEQ ID NO: 48520 - protein, 237 aa, Zea Mays
MPVGVVGAITPWNFPLAMITRKVGPALACGCTVVVKPSEFTPLTSLAAADLALQAGIPAGALNVVMGNAPEIGDALLQSTQVRKITFTGSTAVGKKLMAESANTVKKVSLELGGNAPCIVFDDADIDVAVKGSLAAKFRNSGQTCVCANRILVQEGIYEKFASAFIKAVQSLKVGNGLEESTSQGPLINEAAVQKVEKFINDATSKVISNHLRMCIFPSTMGGFTKGKKGTGLISCF

SEQ ID NO: 48521 - protein, 157 aa, Zea Mays
MQADEQAEAPRRAKEAGNDAYRKSLLEEAVEHYTLGALLDPSDIAFLTNRAAAYLRMGKYEECVRDCDEAVKRGRELSSGSELIAKALSRKASALLELACCAADYAPAIGALKLSLAENYSEETLEKLNDAESVRKEVEEQERLDQEAANQCREEGI

SEQ ID NO: 48522 - protein, 923 aa, Zea Mays
MLLLWSDRSSSSCCSFELMSSFVQLNVEERLNGLLSGPWQNPQYSICWRNAVLKASDVSSLKQPLLMLESSLRRVAITTEWQKAADSVEVVGSAAHILVRSSNKSLSHVSATARKPGRKPSPNGELKVDSRDVGVYWWRGGKLSRQVFHWKRLPQSLVNKAARQAGRRRIPTISYTDGSQFARRFKYIAWRAAVEMAENAAQLILQIKELEWNIKWTEILSTLPSSLMTKETQKIARLFKKVIIRRKRIEGTNVEYLLDFGKRENIPPVISKHGTKLEESSSERNRYWLSEVHVPLNLLKAYEAKTFARLLKKKETDELSKKTKKLCGSKPEMPRKTGFDYLFEKAEKRSTMPCGHCHKEVIASEAVNCQYCAALFHRKHFKVPRGATNAVYVCNKCLDEKVLKVESPQKKTAPKKLSPKKKQKKQKKQSRKIETRRNQIVLKCKTKIGKKGKRGRPRKNPTDLSKNEPSKIHESEPSNVSKNEPVKRISKRLHDKYMKSNSNVSENAASSSKRKRTVSQYSYWLNGLRWSQNPHDERARSFRKERVVFPSEDAEISEVNPVCCLCEKCYNEEDIYIACEKCEDWFHGDIYSVNIENVNNLIGFKCHRCRRRSLPVCPYAETVTVVKGQSDEDHCIKLVDQCVGKFVEDEDPNCPKDLGAPGSLQELHDHEIEQGLNVHITEIEFSYDNCLEELNDHGCSKEFDAHSTEKDLEDDKSLRKVDIHNELRALDDLGSEKEPGDHCNPKDLNSHINLKDPGNCRSDKEMKDNNCLNELDGDNNWKALDSYNSWKLLDSHNSQEELDCTTNSKFSPKEIPCPMELDGFSSLKLVSHNILEELDNHNCLKENGNENSSKELDNNGSPKDSGDCLADHFNSSRISGNEALVLTPETDSVNESLGLQSKDDPGKSVPTEHEIDLQVVVTL

SEQ ID NO: 48523 - protein, 450 aa, Zea Mays
MSSTEALKAGLRGKALKILHYYRDMLWDSADGCYVPNEGFFDDIVVEDPNPVSTSQAPDSAEEPEVTNDGSVSAEDAGVDISDNHGTNPGIQIEAVEEITDVVNELKLPEDKTTEQAPVEMEHHNLRTEEIDSLLDKCLLQALYTSIKEKDLPMPGSTLWANHILPNRPPGVTIDIKKSSHKKLSKWLQSKSSSGLISAKEDKYKKEVVLLAINHKHPDYMAFRPEKRVQELVEHEKDVAESSVTKQLEVAEIYKPSSHVKPIFVAVEADMEKYYSAPEASDIVFRYVEKEKLVKPTDRAKVILDVTLCDALYKGAIKKGSAYPTEIHKKDLGSAFLNRMQVHHKVSRGTQEVIRKGAIRTIQIMTERRQGNKKMTRLSGLECFLMDPDSLASELQKKFACSTTTAELPGKKGQYEVLVQGGVIDDLAKHLVDHYDVPKRYIEVYDKTKR

SEQ ID NO: 48524 - protein, 433 aa, Zea Mays
MFKKPVDVKTIQRLSGADKKKLRRTAKGRFPQASDADLDAILPPKAEITVAKYPNHVLVYGIEGEFPMIFNTDARGHELFPTVYALWKVPHLLPAFTLKGGEVSRFVIGGADLMFPGISIPPEGFPSFEAGQPWAVKVPGNPAAIAVGSTTMSSTEALKAGLRGKALKILHYYRDMLWDSADGCYVPNEGFFDDIVVEDPNPVSTSQAPDSAEEPEVTNDGSVSAEDAGVDISDNHGTNPGIQIEAVEEITDVVNELKLPEDKTTEQAPVEMEHHNLRTEEIDSLLDKCLLQALYTSIKEKDLPMPGSTLWANHILPNRPPGVTIDIKKSSHKKLSKWLQSKSSSGLFQQRRTNIRRKLYCLLSITSIQTTWPLDRKRGYRSLLNTKRMLLKVVSLSNWRLQRFISQVLMLNPYLWLSKLTWRSITVHQRLQI

SEQ ID NO: 48525 - protein, 162 aa, Zea Mays
MPRQVTPGVILVQLGAAHQNLAKAVPEEHKRFLHDLVWIHEEENVPVDMDGGQIICNLIAVHAGLERTIDLNEQLRVLRTRDTRVPKVQMLSGRQDVWDTPKGLAGKQTIIVSGHHGKLHIDGLRFIIDEGGGYEDKPIAAIVFPSKTLIRSTEEAGTTSER

SEQ ID NO: 48526 - protein, 114 aa, Zea Mays
MDGGQIICNLIAVHAGLERTIDLNEQLRVLRTRDTRVPKVQMLSGRQDVWDTPKGLAGKQTIIVSGHHGKLHIDGLRFIIDEGGGYEDKPIAAIVFPSKTLIRSTEEAGTTSER

SEQ ID NO: 48527 - protein, 491 aa, Zea Mays
MASLAVSGARLGVVVRAGGSAGSGGERRSGVALPSVLFRRKDAFSRVVLGCDGAPGKELLMAGCGSDHLLSSTEPVVDALQRSEGLQQRKSKSSGVTETGPDPARRRRRTEVWRGGRARRKDGERRRPKSRRDGSGRAEGVGTGDYSLHRVGRRGSSHSRIERLRRTAVAETPPEMSAPSAPPRTVICVGDVHGYITKLESLWSNLQAALPADAFATALVIFLGDYNDRGPHTRRVLDFLLALPTRYPAQRHVFLCGNHDLAFAAFVGALPPPPDGSPFSATWDEYIHNEEHEGWFRGPGFEGMHVQGRRWGGVIKERWNPKKGLPYKGSIYDAQPTFESYGVAHGSSDLAKAVPEEHKRFLHDLVWIHEEENVPVDMDGGQIICNLIAVHAGLERTIDLNEQLRVLRTRDTRVPKVQMLSGRQDVWDTPKGLAGKQTIIVSGHHGKLHIDGLRFIIDEGGGYEDKPIAAIVFPSKTLIRSTEEAGTTSER

SEQ ID NO: 48528 - protein, 193 aa, Zea Mays
METVVGDLMATELRLGLPGTKRPAAEEEEANKRDAEAAPPAAKCCRWCSRAPATCHQLLQGARGRMATGEVVPEELLPAGKAAGRQQQQQGGRQRGCCGAGAQLHGVRSRLKRHRQRRGRLIRQGEHGRRPVPAEARPEDVQGVPGAPGGPGGHVRLLRQRQQQQQPVGVRRHLPGQGRRPHARRRRAVRDVR

SEQ ID NO: 48529 - protein, 66 aa, Zea Mays
MKNPRYPDFKHKQTGEALWVDGRNNPNWVISQLAVLDSRMSSLQDNERKPVSYMYADEFMTLDGNR

SEQ ID NO: 48530 - protein, 269 aa, Zea Mays
MLLVVSSGELLHTWHAHYRAVRCLGLYDYLLVSGSEDGTIKVWDLITVLDEQSRLEVQTPYLYSFSQHALPVTDIACFLGAIAISSSEDRTCKIWSLSEGRMLRSISFPTSIDSIALDPRSHIFYAGGRDGKIYVTAMGVDLSFHGRDESSILGALDDHSKAVTSLASSRDGLLLVSGSEDGNVRVWDTRCQQVTRKFKHSQGPVTNVLIVTPQRVNLPPLQPLRKVRSANGEAERQAVLLHRPENDVPIPGNKTFIFMERYLDELQVI

SEQ ID NO: 48531 - protein, 317 aa, Zea Mays
MLLVVSSGELLHTWHAHYRAVRCLGLYDYLLVSGSEDGTIKVWDLITVLDEQSRLEVQTPYLYSFSQHALPVTDIACFLGAIAISSSEDRTCKIWSLSEGRMLRSISFPTSIDSIALDPRSHIFYAGGRDGKIYVTAMGVDLSFHGRDESSILGALDDHSKAVTSLASSRDGLLLVSGSEDGNVRVWDTRCQQVTRKFKHSQVTNVLIVTPQRVNLPPLQPLRKVRSANGEAERQAVLLHRPENDVPIPGNKTFIFMERYLDELQKHGGSSRLFDFGPNAQNGTPNQQGTEWRDRYLELQDLFVHEVLHQMPSSRNP

SEQ ID NO: 48532 - protein, 216 aa, Zea Mays
MLRSISFPTSIDSIALDPRSHIFYAGGRDGKIYVTAMGVDLSFHGRDESSILGALDDHSKAVTSLASSRDGLLLVSGSEDGNVRVWDTRCQQVTRKFKHSQVTNVLIVTPQRVNLPPLQPLRKVRSANGEAERQAVLLHRPENDVPIPGNKTFIFMERYLDELQKHGGSSRLFDFGPNAQNGTPNQQGTEWRDRYLELQDLFVHEVLHQMPSSRNP

SEQ ID NO: 48533 - protein, 68 aa, Zea Mays
MYRLQRSIRSIFIAEAKCSDDFVFSIVFSVISSACTYIDMIYGMASAIFVIFMTSFLIDVCDMNDGFF

SEQ ID NO: 48534 - protein, 117 aa, Zea Mays
MWWFYRKGPSGFSGASTAEEVTAGVDGHLLVAVITGATSGIGLETARVLALRGVRVVMAVRNVSAGLMAKDAIVAKTPDARIDVLELDLSSIASVRRFASEFDSLKLPLNILISKSK

SEQ ID NO: 48535 - protein, 507 aa, Zea Mays
MTSERQKILNDPKAVMPVSFVTFDSRWGAAVCAQTQQSKNPTQWLTDWAPEPRDVYWQNLAIPFFSLSIRRFLMSVAVFALVFFYMIPIAFVQSLANLEGLEKVAPFLKPVIEAHVVKSFLQGFLPGLALKIFLYILPTVLLIMSKVEGYVSLSSLERRTASKYYYFMLVNVFLGSIIAGTAFEQLYSFLHQPPTQIPRTIGVAIPMKATFFMTYVMVDGWAGIANEILRVKALVIYHLKNMFIVKTERDRDRAMDPGSIGLGENLPSLQLYFLLGLVYAVVTPLLLPFIIVFFAFAFLVYRHQIINVYNQEYESAAAFWPQVHSRIIASLLISHVTLFGLMSTKEAAYSTPLLIFLPLLTIWFHKYCKSRFEPAFRKYPLEEAMAKDTMEHASEPNLNLESFLANAYLHPIFRLFEEAGKEEETVEVRIDKAEKQQHRHEEDEAHARSSSQYREEETHFRSTHETHYHHEESHVSRSTQYHEGIHVRSDTDSPSPPHFVYHYDIQQ

SEQ ID NO: 48536 - protein, 628 aa, Zea Mays
MPPFRMPSHFLALPLLLLLLLQAPSPEAAESTPGTRTRKIGSSGASSVFSLFNLKDKSKFWTESIIRKEFDDLEGSASRDSSKNGLLNFTRAGNIANYLSLAEVDSIYLPIPVNFIFIGFDGNGRHEFKLGPEELERWFTKIDHIFEHTRIPPVGEVLTPFYKTTVKKLQHYDLPLVSHVNHNFSVHAIHMGEDVLSVFEHAIKVLSCKDDLVDSRENEEIFLQVDSAQMEHIFSTLVDHLQIQEAYNIFVLNPKPIGKRINYGYRKGFSESEINLLRENKTLQARILQSKSDNKLFLDIEKGVNRRPLYESHPLSSFSWTRTDSMDMGDWSKKCKEALSKFELLKEGKSKEDIVYEKAVQILHGTKDEVHDIVQSALKSSDLKGLHAQCLTDIWIGRERFAFVDLSAGPFAWGPSVGGDGVRTELSLPNVAKTVGAVAEVTEEEAEEKLQDTIRERFSSFGEDYHAVDILLAEIDVYELFAFKHCVGRRIQLALCKELDERMHDLKKELEGYNTGDFDETNKKKALDALKRMESWNLFRDTSVEHHSYTVAHDSFLAQLGSMLWGSMRHVIAPSASHRVYHYYEKLSFQLYFVTREAVIVRGSIIDDGIFNGTSCSCGAASISQWHL

SEQ ID NO: 48537 - protein, 234 aa, Zea Mays
MALSTPASILVDENQQINRGKRADGPRAKGLKPSENPGNQGRRALKDLSNFSKGTGLKDTSTLKEKSQQKPRSNVANTIKGNALKDKPILKEKSTQEQRSKALKNPMKILVDEEIKMCHEWAKDGVEGFHSTQNNSQKLDKDLLDKRVKKKVAAVNSALCGWPDTVFDSLMYPSMEVAELFYEQNVLEVEPEILPDISWRLSSSMVKQRLMKTVLPMLSLTSTILWRTIQLFLS

SEQ ID NO: 48538 - protein, 58 aa, Zea Mays
MATKKLDPHNGNEDDGHDTPRPPGRKAEKDKLRARKREDNDNDALMEELKKLESQDWR

SEQ ID NO: 48539 - protein, 143 aa, Zea Mays
MNQDDTDNLGSEDYVQVDPLVANMNSQTKPKGLSKNFTDDEDILLLSAYLNVSKDPIAGRDQKDGRFWERIEKYYHVNLTFESLFIASSMGYNPKESKSFQSYYEAIQRKNESGKTMNDKTRAKVVINKGLHNGYQEARSSQR

SEQ ID NO: 48540 - protein, 268 aa, Zea Mays
MVIAYKKDKFKRHNLKPIQDWEDLWRPELAGRISMVDSPREVIGAVLKHLGSSYNTVDMEMDVNGGRAAVLNSFTQLQKQVQLFDSMNYLKSFSVGDVWVAVGWSSDVIPAAKRMSNVAVVVPKSGSSLWADLWAIPCATRFQTDQIGSRARGPSPLVHQWFDFCLQSARSLPFRQDVIPGASPLHLESPVPEVPQDKNKRKPKLDTNLVRGVPPPEILERCEFLEPLSGKALEDYQWLMSRVQRPRLGLFGNMLQKMSAVLDFKRRS

SEQ ID NO: 48541 - protein, 143 aa, Zea Mays
MHSTVQSDDNNPGVSILRTIYEELSPEYKERLQVFYFLHPGLRSRLAIATLGRLFLSGGLYWKIKYISRLEYLWGDIRKGEVEIPDFVIEHDKVLEHRPLTDYGIEPDPLHLADVPAEEVGYSLGRYEDKWTPEDRWYSGNYM

SEQ ID NO: 48542 - protein, 452 aa, Zea Mays
MAEDHLSSAPSAPSAAAAAAAAAVGSSVIPIVNKLQDIFAQLGSSSTIDLPQVAVVGSQSSGKSSVLEALVGRDFLPRGSDICTRRPLVLQLVHQPRRPADAEADEWGEFLHLSGRRFYDFREIRREIQAETDREAGGNKGVSDRQIRLKIFSPNVLNITLVDLPGITKVPVGDQPTDIEARIRTMIMSYIRHKTCIILAVSPANADLANSDALQMARVADPDGSRTIGVITKLDIMDRGTDARNFLLGNVIPLKLGYVGVVNRSQQDINSDLSIKDALAREEKFFRTQPAYHGIAQYCGIPQLAKKLNQILVQHIKTVLPGLKSRISSQLTAVAKELAVYGDPVDSKAGQGAKLLNILAKYCEAFSSMVEGKNEDISTIELSGGARIHYIFQSIFVKSLEMKISAWLFKMQLVLEVLCLYLKFHLKSLYVGRSADCLIQVFSVHNSYMMNL

SEQ ID NO: 48543 - protein, 401 aa, Zea Mays
MLQMKISAWLFKMQLVLEVLCLYLKQISRLLDPSLQCAQFIYDELVKMSHRCLAMELQQFPILRRSMDEVIGKFLRDGLKPAENMIAHIIEMEEDYINTSHPNFIGGSKAVEQAQQQVRSAKMSAAVVRKDGVDAQASEKTQKSRAILGRSGVNGVVTDHIQGVRPAAEAERPGSSGSGSTSFWNQIFTSNEDRTHPPARDNTTNKSYAVPAPNLEHSFSTIQLREPPVVLKPSEHQSEQEALEIAITKLLLKSYYNIVRKNVEDLIPKAVMHFLVNHTKRALHNYLITKLYRDDLLEDLLKEPDEITIKRKQIRENLKVLQQAYKTLDEIPLDAEAVERGGYSLDSDAIGLPRAHGLSSSLHGFNDGSSPYSTPKQSRSRRSNHSGEQLPFNPNMSGNGF

SEQ ID NO: 48544 - protein, 395 aa, Zea Mays
MQTLRPAPASFLVPPAPQLLRTAPPPAPRANAAALAAASHGWFPSPHRACRRRRRVTRSASSGAASATVASVDDAKKDVLIALSQIIDPDFGTDIVSCGFIKDLEVSEALEEVSFRLELTTPACPIKDEFEQKANEVVAALPWVKKVDVTMSAQPAQPVYGGELPEGLQKISNIIAVSSCKGGVGKSTVAVNLAYTLAGMGARVGIFDADVFGPSLPTMVSPENRLLVMNPESKYILPTEYLGVKMVSFGFAGQGRAIMRGPMVSGVINQLLTTTDWGELDYLVIDMPPGTGDIHLTLCQVAPLTAAVIVTTPQKLAFIDVAKGVRMFSKLKVPCVAVVENMCYFDADGKRYYPFGQGSGTQVVQQFGIPHLFDLPIRPTFLQRCPTIDPLKQSE

SEQ ID NO: 48545 - protein, 129 aa, Zea Mays
MGEITNVMEYQAIAKQKLPKMAYDYYASGAEDEWTLQENREAFSRILFRPRILIDVSKIDMTTTVLGFKISMPIMVAPTAMQKMAHPDDTVVLGNFKRRGGCLDRARDPLLPAIRLQGQEGGGAAGEAS

SEQ ID NO: 48546 - protein, 405 aa, Zea Mays
MPSAPGEKDPQVIPRPATGPPLVQTLTPVNATGSPAIDPRLAQPSWPGHVVLLRPCAAWPPHLPVPLLLPHQNVDALEDVAAADVNPAIDSCDEKMLPKVNMLFDGESDAYEFYNAYAEKVGFFVRRSTLWTTSKNIITRRTFVCSREGFREKKKGAKEAKCPRPETRIGCPASLTIRLTANGKYRLTEFVPNHNHQLATASTVHMLKTKKIRRKARAARENLADDTVSTPEFENEDEAYEFYSMYAGKIGFSVRRASMTVNNENVITRRMFVCSKEGFREKKRGAKRVKKPRPETRTGCPACMVIRLGTNEKYQVTEFVTCHNHQLGAAAASDLVMASGSTENDQDDGFDQADRSPDDSVHKQNLIYGSTTLSSLEGRSCKRYKYTKTPRSGDVGATLEYLQKV

SEQ ID NO: 48547 - protein, 850 aa, Zea Mays
MGAIGGNESVQWDKVAGADAVNGGGTSVGRMDRIQVLVRLRPLSEKEVARGEPAEWECINDTTVMFRSTFPDRPTAPTAYTFASVFAYGQTSSGKTYTMNGVTEYTVADIYDYINKHEERAFVLKFSAIEIYNEAVRDLLSAENTPLRLWDDAEKGTYVENLTEVVLRDWNHLKGLISVCEAQRRTGETFLNEKSSRSHQILRLTIESSAREFLGKDKSTTLVASANFVDLAGSERASQALSAGTRLKEGCHINRSLLALGTVIRKLSMGSNAHIPYRDSKLTRILQPSLGGNARTAIICTLSPATSHIEHSRNTLLFGSCAKEVVTNAQVNVVMSDKALVKHLQKEVARLESELRQPASNSSLEALVKEKDNQIRKMEKEIKELKSQRDLAQSRLQNLLETVGDQVKHSGSGKRSARSPPSIGISPGISRDDSSQISHDDSDLFKDVRCIGTSGTGGNEQLDLSAGESSSLQGLNMNSSLHGSGSNASVNSRRSRLLSESPITLEQHLENIKRPFVSLGRDLGSSTHNSSGSRILGRSRSCRSLMGSTMFDGMEMDDGTPLHRSLVGFPGRPEGNHRRGSTPNHDAESETLSRAGSVVSTKTNAACDAEFTGIGEFVAELKEMAQVHYQKQLGNQITNGEFVDIKNIGLDPIADASQSPSRWPLEFEKKQQEIIGLWHACCISLVHRTYFFLLFKGEQADSIYMEVELRRLSFLRDTYSRGNTPSNAVVGSLNSSPAASAKKLQREREMLARQMQKRLTAEERERLYTKWGISLDSKKRKLQVARRLWTEAEDLEHVRESASLVAKLIGLQEPGQVLREMFGLSFAPQQQPPPRRRSSNGWRYGIPSFG

SEQ ID NO: 48548 - protein, 169 aa, Zea Mays
MSGSANARHGQHLLPSRGGKVVSRSINIIILYRGRNYDPQKRPGVPLMLWKPLAPIYPKLVQNVAEGLTFEETKELRNRGLNSPPLTKLTRNGVYVNVVDKVREAFKTVEVVRLDCTHVGTTDCKKIGVKLRDLVPCIPILFKDEQIILWRGKVRQERSVSAECSSSPQ

SEQ ID NO: 48549 - protein, 331 aa, Zea Mays
MPLAGVVDLRLHGHLHEQVLGKRVRHALPFCQEADSRLGLPLVPAAHEAAHGEGGNDGRHGNQPHRPGDHDAEAPAAAAADRPEEALAHGGAVQEPPLGVHHLGVDHVVRAEAVLAHHGPEPAAAEVAADADRGADPRGEPERPAALARHGVVELPERGARAGPRHAAPGVHADVAERGDVDHGEGPGARHGSVGEALVVVAAAAGPDREAVAPAAGDAGPRLGDGRRGQQQRRARRPRGREAEVLDRGVQKGRVRSGRRGVDEPGRVGGGRREARDAADEAPVEGAAAALLLRGTSLGEEQQEEEREVPGSWSHSRLRLAHHLLHLHGIR

SEQ ID NO: 48550 - protein, 121 aa, Zea Mays
MAALRHLAAGPTCHHHHHHGVAAATASLRLHRLPLPFRPLRSRSGSFTRVYAISSNDIRVGTNVEVDGAPWKVLEFLHVKPGKGAAFVRTKLRNYVTGNTVEKTFRAGSTVNHSHLKPHVF

SEQ ID NO: 48551 - protein, 539 aa, Zea Mays
MAVSAATKLQRLRHLSWYFKQSAKTMEQQFQKETRFYGSLIRLQQNWKVKRQRAVGSPGSEGFMFDLVDSSQLDTTTVLRLSPLSLIPIDQDSSGTLSVQIPQKSLRSLSLKFHGDIVNNAESSAIKKKEGTLTNTTAEAEKDVLADDDVNKSIRYAHSILRDIHKSIFEEQVFDMVIRETFNQSQGINVTGMCEDFLQLAIGQECSLCLSLELSGQNNNAGTVGQQDHMDTNYPGNLAVATVNGKESSNKDVRGFPNPKSLEIYLLHMFHEILRKLREKSRHVVRYQSSAQAAPDDCGLLSHFCMTVAHRIFSNKVHLELESVVSRVPYLHLRSLPTWHSRTSSWSLCLKVPQPILATGRVTKPSDYHELKYKSRSQFSTKVILKDGQISLMGEGSPSIVGSLTGKPSDSRLINSYNCDLEDLPMMLLQQVASQVIHWLHDEAMILGMNVTRDFLCLYFDLGQGETLGLLAHVDPDDTYGCISWYLTVEHPMEEGKMSAGSPESEKRRFLGYLSLEVLYSTLMDLIKLCSTSDQIRAS

SEQ ID NO: 48552 - protein, 216 aa, Zea Mays
MYQVIKNHPSSLKLYEQKLLGTSEVMKEDVQRIHDKVNRILNEEFAKSKDYVPNKRDWLSAYWTGFKSPEQISRVRNTGVKPKILKRVGQAITTLPENFKPHRAVKKIFELRAAMIESAQGIDWAVAEALAFATLIVEGNHVRLSGQDVERGTFSHQHAVLHDQETGAKIKRLVGASLLIFANKQDMQGALKPTGITKVSELQSFIICIRDMFSYL

SEQ ID NO: 48553 - protein, 381 aa, Zea Mays
MAGRDKRRRAAPLEGDEQQLRRRLEEAALLLRRIKGLVRWIVEEVAAGRSPSIVLHRYRNYCSSADSASPSPCACSYDIPVGTDVLSLLHKDYHTSRLNVLLRVLFVVQQLLQQNKHCSKRDIYYMYPSIFVEVAVVDRAINDICILFKCSRHNLNVVPVVKGLVMGWIRFMEGEKKVYCITSVNAAFSIPVDIEAIKDVVSVAHYILVVEKETVFQRLANDKFCERNRCIVITGRGYPDIPTRSNWHMMQTCCVSLIYGGLEFSHLILKNIAFQTAAYFVCHLKIGGKLKAFLLGAIYTGKPQNGGQSWKQCCKRVSSLRLRHYPQIPFPFYRMSTFPRKSNKACIYKIGHSCIRPGCVIEYNLFLSDYSYIRRHIMCKH

SEQ ID NO: 48554 - protein, 164 aa, Zea Mays
MYKKVTEADIEEFEAKYRGSDSEKTDLKELYTKYKGNMNRLFCTMICSEPKLDSHRFKDIIDGAIAEGELKSTKAYEKWSKKISEMEPPTNPLERRAKSRKKSEENDLILAISQRRAERKNQFNSILSNIMSKCDSKASSSEPTEEEFELARQRLESKMAKRRK

SEQ ID NO: 48555 - protein, 109 aa, Zea Mays
MAEPTPSQSPAQTPPPPPTQQTPAAGGLEDMLACVAALEAALLPCLPARELQAVDRSLQSSHQLMLRGTQGISWRLPRSSSLISSACSVRNRHLQKRCFERRLRQWRKS

SEQ ID NO: 48556 - protein, 349 aa, Zea Mays
MLCTKAAASSERFTECQKASSCREGITVKMAMAPSSYENSGEDIFSENVFLEYVLAYKCYLSKAQKKRVMELIQEIQPEFTVFISIMRRGNVRPPGPFLGINKEYANAHFPDKSTNVTLEMPDKSKKWHPKFYRRDVSRTCMLTGQWLDFVCDNHVQEGDICLLLPTKDEIRCTFMVYVLHETTHSSRGEHVSSESDMREIPHESLSRGDSDDQFEPPYFVPCKSPLSESQKRMVEERVRAIRSEIPICVAVMKNNNVGVAQRWMLELGSRYGSVYLPTKGQTILLQCGGTTWKAKLMFHNGRRWFLNGGWPNFARGNGLRVGDICLFELKKKDSKLTMAVHIIRREKF

SEQ ID NO: 48557 - protein, 336 aa, Zea Mays
MPSKPNAASRLVFLAFLLVISAAAANDDAAARRTMEQFAGFPASDDGEGPSSDFHVDSEGLQRQIDELASFSDSPAPSVTRVLYTDKDVQARRYIKGIMNQLGLVVREDAVGNIFGRWEGSEPGLGAVATGSHVDAIPFSGKFDGVVGVLGALEAISLLKRSAFLPKRSLEVIMFTSEEPTRFGISCLGSRLMAGIEELAQSLRKVVDNQNVSFLDAAESAGYKLNLEDLHSVFLKTDKYSAFIELHIEQGPILEKEGIPIGIVTAIAAPASLKVDFEGNGGHAGAVLMPARNDAGLAAAELALAVEKHVLESGSIDTVGTVDKWTPRRLSVLAPG

SEQ ID NO: 48558 - protein, 409 aa, Zea Mays
MAEDNDRKPLHIVHICSEMYPVASCGPLSAYVASLSCEIQKKANLVEVILPKYTSINLDGIHGLRRSEAEYESYFGGLWHKNKIWTGTSSGVGLVIIEPSQLSYFSRDMLRGYPDDFERFSYFSRASLDYIVKSGKRPDIIHIHNWETAIVAPLFWEIFAHQGLGNTRILLTCQDLNSECLEEPNKLEMCGLDPRKLHRPDRLQDTNKTHLVNILKGGIVYSNKVVLMSSTHSKDALIQGSRHELQSTLAAHREKILVASYGLDGELWDPFKDIYLPRRYSANDIEGKSICRQALRRRLRFNGDSSIIVGCICDDNSDVHSLKEAVHVALHRNTQVIIMETLGSVVNSILQALKGEIKGDKIAFVEAYDEALAHLIYAGSDIILCSSFQDPSLQIAKCNMGLQLLEDRV

SEQ ID NO: 48559 - protein, 637 aa, Zea Mays
METPRLVVGAASRAPPPAPRSQRRRILRPCGGAHCSPSARAAPPVLLTRCSSYSSSREGNGDSHGKARRESSGSVRLDVEADSDQVPSLADEQREGDITELFNLAQRNILYINKQRLIAMEEMKKLHDENNLLLEEIQGLETEMQGIPLEAAQSSSFSELLLRIDTMVISGMISMTEASDLREKLVTNRSIIQSTFCDIHHKPNTELLSELQLFLRKPIEKPLHIVHICSEMYPVASCGPLSAYVASLSCEIQKKANLVEVILPKYTSINLDGIHGLRRSEAEYESYFGGLWHKNKIWTGTSSGVGLVIIEPSQLSYFSRDMLRGYPDDFERFSYFSRASLDYIVKSGKRPDIIHIHNWETAIVAPLFWEIFAHQGLGNTRILLTCQDLNSECLEEPNKLEMCGLDPRKLHRPDRLQDTNKTHLVNILKGGIVYSNKVVLMSSTHSKDALIQGSRHELQSTLAAHREKILVASYGLDGELWDPFKDIYLPRRYSANDIEGKSICRQALRRRLRFNGDSSIIVGCICDDNSDVHSLKEAVHVALHRNTQVIIMETLGSVVNSILQALKGEIKGDKIAFVEAYDEALAHLIYAGSDIILCSSFQDPSLQIAMKAMKYGSVPVQLNFSSDESSLCFPFIC

SEQ ID NO: 48560 - protein, 428 aa, Zea Mays
MNLISVAFGIKIKYGLGKDTLLVCKEITSSGVGLVIIEPSQLSYFSRDMLRGYPDDFERFSYFSRASLDYIVKSGKRPDIIHIHNWETAIVAPLFWEIFAHQGLGNTRILLTCQDLNSECLEEPNKLEMCGLDPRKLHRPDRLQDTNKTHLVNILKGGIVYSNKVVLMSSTHSKDALIQGSRHELQSTLAAHREKILVASYGLDGELWDPFKDIYLPRRYSANDIEGKSICRQALRRRLRFNGDSSIIVGCICDDNSDVHSLKEAVHVALHRNTQVIIMETLGSVVNSILQALKGEIKGDKIAFVEAYDEALAHLIYAGSDIILCSSFQDPSLQIAMKAMKYGSVPVQLNFSSDESRESKGHECRNTVMSQYIISTYGDLSLSQALDDFKNDPSHWDRQIKDGMARGSSWDAKCYSLHWEAYSSITKL

SEQ ID NO: 48561 - protein, 146 aa, Zea Mays
MIGINAAIFTQTGTSAGVGFAIPSSTVLKIAPQLIQFGKVRRAGLNVDFAPDPIAYQLNVRNGALILKVPGGSAAAKAGLAPTSRGFAGNIVLGDIVVAVDGKPVKGKSDLLRVLDDYGVGDQVSLTIRRGSETLEATLPLEEADM

SEQ ID NO: 48562 - protein, 225 aa, Zea Mays
MPRPGASAVGGLSSKGVTSATHDSEEAPPRSMRATGDRGAMSSKTLWLVSKRKLIALSAFCLSLHSSRYFPAFALGDTSVKIEDVTPKIFPSGPLFPTEKRIAELFEINTYSVVNIFDATLRPQLNVTGVVEIPEGNGSGVVWDDFGHIITNYHVVGSALSKNPKPGDVVARVNILAAEGIQKNFEGKLVGADRAKDLAVLKVDAPTDLLKPINVGQSSALRVVV

SEQ ID NO: 48563 - protein, 256 aa, Zea Mays
MVSSQLTGSSDVAQRSEEWFALRKDKLTTSTFSTALGFWAGNRRPELWNEKVFGATEIKLADAARSAMDWGTHHESVAIEQYTSITGRPVGTLGFAVHTEASFGWLGASPDGVLGCEPHDGILEVKCPFNKGKPELALPWRAMPYYYMPQVQGLMEILGRDWVDLYCWTPNGSSLFRVPRDCAYWELIHEALRDFWWGNVVPARELALLGKDDEARSFEPQPKHRLTNLVLYRSRKLASEAKLLCMDVGGHVEFFQ

SEQ ID NO: 48564 - protein, 556 aa, Zea Mays
MGRRTCGTAFILLYVLSTSTLPASSSNTGDGLIRIPLKKRSIMDTIYGDLLPKPSAPEEKEKQAVDDPVRDAIARARERQHEMLVQAAATERRRRYYWSYSGAGGKGNGSRLHDGGQGEGSGSIAIVALKNFLNAQYFGQIGVGCPPQNFTVVFDTGSANLWVPSAKCFFSLACLFHPKYDSRQSSTYKPNGTPASIHYGTGGIAGFYSQDQVTVGNLVVQNQEFIEATHEPGFTFLLAKFDGILGLAFQEISVEGSLPVWYNMVNQNLVAQPVFSFWLNRNPFDGEGGEIVFGGSDEQHYKGSHTYTRVTRKGYWQFEMGDFLIGGRSTGICVDGCAAIADSGTSLIAGPLVAIAQINEQIGAAGVVNQECKQVVAGYGLQIAGLLEAQTPPSEVCSKVGLCTFDGTRGVSAAGIESVPGSVDGMAEALCNACEIVVFWTQSELSPNRSNEGTLEYVDRLCESMPDPVGSRVDCGRVGSLQTVAFSIGGRAFELRPDQYVLKVGEGFAAHCISGFTALDVPPPVGPLWILGDVFMGAYHTIFDYGKMRIGFADSA

SEQ ID NO: 48565 - protein, 331 aa, Zea Mays
MLAPLLAAFAVVFLLLLSRPCARDMRLFLASLCQQLVLSLLGFLAGLRLLSGVAAASAATETMPLMPSFKRKRAAATVENAEEAAATAGGGETSVLDLPELAIDCILEKLRPAELRSMAAVCRSMRERCRGDHLWERHMTNRWGRVLGRAARDEWRTHLASASESRAAGGGGKRRKWLAALSCVCPVVSWMRPRADGGKSSAPVLDDSIMSWYLSVESGKFWFPAQVYNREHGHVGFMMSCYDAALSYDFHTDTFRARYPPHGRRTVVLEDGVQWDRVRAPPVDTLAHDLHTSDCLHELRPGDHIEIQWRRNKEFPYVDSVFSFMHFHACL

SEQ ID NO: 48566 - protein, 516 aa, Zea Mays
MLVDARVISGLLREPKWGHLKELHKAIKLCEPALVAGDPIVTSLGNAQQASVFRSSTDACVAFLENKDKVSYARVSFNGMHYDLPPWSISILPDCKTTVYNTASVGSQISQMKMEWAGGFTWQSYNEDINSLGDESFATVGLLEQINVTRDNTDYLWYTTYVDIAQDEQFLSNGKNPMLTVMSAGHALHIFVNGQLTGTVYGSVEDPKLTYSGNVKLWSGSNTISCLSIAVGLPNVGEHFETWNAGILGPVTLDGLNEGRRDLTWQKWTYKVGLKGEALSLHSLSGSSSVEWGEPVQKQPLSWYKAFFNAPDGDEPLALDMSSMGKGQIWINGQGIGRYWPGYKASGTCGICDYRGEYDEKKCQTNCGDSSQRWYHVPRSWLNPTGNLLVIFEEWGGDPTGISMVKRIAGSICADVSEWQPSMANWRTKGYEKAKVHLQCDHGRKMTHIKFASFGTPQGSCGSYSEGGCHAHKSYDIFWKSCIGQERCGVSVVPDAFGGDPCPGTMKRAVVEAICG

SEQ ID NO: 48567 - protein, 363 aa, Zea Mays
MEESDLGGNLGKQTEEDKAAGESGDEGKIERSQSINLNRVPAVAVEAMSTQGNCETHGAAVPGTKDAGTGKAGQSSGDRQEEKLPKCEQVDYGSEVEGCADDENPGKRAALVTLVGNEYCGDEDERVQVLTIVKKDEHADDIVDRINPGTVAGYSEVKGAVGASAATSAVRPAGSRSSSFHGVTRHRWSGKYEAHLWDSSCRVEGRRRKGKQVYLGSYDTEEKAARAYDVAAIKYWGENTRLNFPISQYGKELEDIRDLSREECVTYLRRRSSCFSRGASIYRGVTRRQKDGRWQARIGLVAGTRDIYLGTFKEEAAEAYDIAAIEIRGKNAVTNFDRSNYVDKGMHCIEGEGLRLLASKPEE

SEQ ID NO: 48568 - protein, 130 aa, Zea Mays
MSLIAGEDFQHILRLLNTNVDGKQKIMFAMTSIKGVGRRFSNIVCKKADIDMNKRAGELTPDELERLMTVVANPRQFKVPDWFLNRKKDYKDGRFSQVVSNALDMKLRDDLERLKKIRFFSRSCIARCYG

SEQ ID NO: 48569 - protein, 294 aa, Zea Mays
MRIRRRTSHVLGSGYSTPATPPPMLVTPPPISEPCLEPLTSHIHDDFLSPTTTRESLCKLSRSPWDLLDDLSLSDPQEVDDLLDGYYVNMDSHAWSLSSATMPVTSVKNEKTTTMAAASSERAQLQILNKNTTLKKATVGEKRVREIQNQKTANVKKKEAEEDKAMAAAPTSAASKPSSSSNTQKTKLPNNYDANEGFYYYHGFRPSRGKRRCRNHPKNDEEVKVEPSKSASLPSHAKVEIEDASTSNGATAGGDDVCNDNNSGRGNVNNMDQRNQNPLKLPRKPVKVRLLMSL

SEQ ID NO: 48570 - protein, 352 aa, Zea Mays
MGRFEQVTPEGPETNQHDEQRSIRLHAFSDLSHVPAATFIYLLKDCYGYGTNKATSKFKILMQLVKVALHNGPQPGPFTYVVQCMYIVPLLGKTYSEGFSHMLTSSLKHLKSVESAQKDFLEAKHLAAQLVLDILDSIVPHENRILVKLLETFEIELRDMARALYDSELDDGDLMKAREHLRQQVKRCMESESNALAVTLITHFSIQCCDESFIIKLIKNNQLEIAEQCAIFMGKEMISLVVQKYLDMKMLKSANKLVKEHELTEEFPDVSYLYKESSVKKLAEKGCWDIAETRAKKDTKLLEYLVYLAMEAGYMEKVDELCKRYSIEGYVDSLAIKFMTFWWKWNFKSCDV

SEQ ID NO: 48571 - protein, 141 aa, Zea Mays
MNSMDKDGILSDENLAKMESAQPNGQRVDIIIIDSQSDENKIGVETSIRESSLKEHKEPPRTTVDNNVNEETSTTDDDSEANSYEFFVRESDNEQASASEEGTEVPLTEEEVEELVVEFLEVESKVTYIIFYILCTFFFLI

SEQ ID NO: 48572 - protein, 503 aa, Zea Mays
MALQLQLPRPLAAARPSILLPSPAHGASASATPLHARAGGVAFSLQTNVRLLKPNRRVRRSRDPYYDLDEDDEEEAEFDEDDEDDEEGYESDDDLSGLEYPGVLYSNSPRASSKKPVVKENWEGRQTKTHDKYGSPGRSKSMHPRSKVGRSSTDLKNMDREVELKNASISRSLFQKLQEEYDFDDKWLPLIDYLCTFGLKESHFTYIYERHMACFQISQASAEERLDFLLNAGVKSKDMKRILVRQPQILEYTLGNLKSHVDFLVSIGVPNRRIGQIISAAPSMFSYSVEQSLKPTVRYLIEEVGIEESDVGKVVQLSPQILVQKIDSAWKSRSLFLSKELDAPKHSIVKMVTKHPQLLHYSIEDGILPRLNFLRSIGMRNSDILKVLTSLTQVLSLSLEDNLKPKYLYLVNDLKNEVQSLTKYPMYLSLSLDQRIRPRHRFLVSLKKAPKGPFPLSSFVPTDERFCQRWAGTSLEAYHTFRQRLLLTSFAEKSGRKTLVSRR

SEQ ID NO: 48573 - protein, 303 aa, Zea Mays
MQTETDYDRTASIIDGKSIAEDMRLHIAEEVCQMKCSVGHVPGLAVVLVGDRRDSESYVRYKTKGCEEVGIKSLLAKLPGNCSEDEVMDSVSRFNEDPSVHGILVQLPLPEFMDEEKILSIISLNKDVDGFHPLNVGNLALRSRNPLFVPCAAKACIELLLQSGIELMGKHVSVIGRSKVVGLPTSLLLQRHHATVSVIHAFTTNPEAITRESDIVISAAGVANLVRGSWLKQGAVVIDVGTNPIEDPTSDYGYRLTGDVCFEEAVNVASAITPVPGGVGPVTIAMLLGNTLDSAKRVYGLSD

SEQ ID NO: 48574 - protein, 281 aa, Zea Mays
MGGAAAAVLAVAAARRKSGPFVSLFSRAARRLHDAVETAAAEEDMAGTRSPRRRRRSSSSLLLGPEFPDTWDPSSRDTTPQSPPRCAQADYDRTASIIDGKSIAEDMRLHIAEEVCQMKCSVGHVPGLAVVLVGDRRDSESYVRYKTKGCEEVGIKSLLAKLPGNCSEDEVMDSVSRFNEDPSVHGILVQLPLPEFMDEEKILSIISLNKDVDGFHPLNVGNLALRSRNPLFVPCAAKACIELLLQSGIELMGKHVSVIGRSKVVGLPTSLLLQLLEWPIL

SEQ ID NO: 48575 - protein, 585 aa, Zea Mays
MGMDAGGGKLPYSYPAHQDGKLVKSFSRVEPRKFGLALVAGFLLVTCAYFSTAKFDAIHVAMISPVSGNAAGIGPLVGAANADTSDSKQRLDLGKQDPDDALSRSEEEEGSRADEVLEKDDGKASSSSGTDSGSNAPLEDTRRDETFVGDSGGASSAAGARSEAVPARHEHDDDAPAAALLPPVTSEGAANSTQGSGVLEDEELQVQDAVANPSKRSNDSAATRSSSSGRSPSVVHSDPAILPAPSQQIAPAAPQEADKALAVQHIPAIPEVKQSDSETPAREWKPLCDITSNRRIDWCELDGDVRVLGANASVTLVAPPGGADGRTFRAESWRIKPYPRKADPNAMRVVRVLTVRSVPGEAPACTDRHGVPALVFSDRGYTGNYFHAFTDVILPLFLTARQYAGEVRLLIARARTRRFVNAEEIVRGAEKLGFEVVVSEGTHEVAPFAELANSCDAIMGVHGAGLTNMVFVPTGGVVIQVVPLGGLEFVAGYFRGPSRDMGLRYLEYRITPEESTLINQYPRDHPIFTDPNGIKSKGWESLKDAYLDKQDVSLDMKRFRPTLKKAIAHIRKARAKANAGGGGNN

SEQ ID NO: 48576 - protein, 216 aa, Zea Mays
MDQWAQHPQAETALSSILPCVDESTTNRTLYQSKEVVVRLVGIVNRAISALSNRRPHHKHPGQFMPYLCSPYDSNLNDRPCKYREATFENATTAWLNYTCMAQDTDLCSGNKTLTYDIYGQLVLAANVSYALYHYAPFLLNLQDCKFVRATFSAIASRYCPPLGHDLVLVSAGLALIASAFVLCLVWMLFADRPRREEVSDLASGSRIAPVDSSPS

SEQ ID NO: 48577 - protein, 537 aa, Zea Mays
MPYISCPWRIHASKSPAKKEFMVKKISESHTCESETVKSNRLASQRWVASVIKEKLRDSPNYRPRDIANDLQREYGLCLNYSQAWRGRSIAQKELYSTHEEACSQLPWFCERIVETNPGSVATVVALEDSKFRFFVAFHASLHGFEHGCRPLLFLEAITAKPNKHWKLLAAASVDGEGDVFPVAFGVVDDESRENWHWFLEQLKSSLGTSRTITFISNGEHGLWDVLSSVFQECHHGYCVESLIEEFKMQLDDAWTEELKDSMVEHLKKAINSCTADEFNQYIELIKSGSDKLADWLLEIKPERWSDAFFKGSRHGQYSCNIFGTVSEWIPTRYELSVVQLVDTIRCKLMEMMYTRRESSNAWTEVLTPAANQKLQEEVNKAHTLNVLPAENGENGNVFKVCDDSVNVVNLDTWECTCQRWHISGLPCMHVIAVLERTGQYAYDYCVKYFTTECYRLTYSLSINPIPDVIVPPTLIDLAQSPATYPCPLRTRRRVGRPKEKPADPRIAIKRAVRCSRCKGYGHNKATCKVPISSFST

SEQ ID NO: 48578 - protein, 190 aa, Zea Mays
MKRLDDTDFYLCEVSSNMVIDATNKGNLSRFINHSCEPNTAMQKWTVDGETRVGIFALRDIKIGEELTYDYKFVQFGAAQVCHCGSSKCRKMLGTTKYSGSSQNHRTKKKKRKTSCENCIQQFLRLWHPRQKMYVGCWIVDFDQGTKMHTLQFIDHHTEKFDLKEEEWHFLEVLRCQRKMNKWMMLNEQG

SEQ ID NO: 48579 - protein, 140 aa, Zea Mays
MSVVPSLSLTRLSLDNMFLCGILDDMNRFPPIIGTTTLGWWPSRSCFVLSSGSSLLQELICGSDTTSPLSVLEFVLEACPRLESSRHPLAAAVALLALSDASPRSVHIIRNNQIFHRTRVHRHTVSRLRVLDVSILHMSN

SEQ ID NO: 48580 - protein, 385 aa, Zea Mays
MFSWNRKQSSSSGSPSPSSSSGRRRGGADASMDSSSRGGGGSGSGSGSRGRSPRLDRRNAVKRVDYEAGAGASVSVAASWSSSSSADQQRSPGPGLQPSRSLDVAPGADLRISGSVEGEVDELCRSLGLSGPEDFAIPVAAWEARKSRSNSDLLPRSHPDPSTPADEPSPIARVVSAPDVQPTRFVPAPIPATVAAPEESPKAAPAVAVAAPVGGLPLPSPRRGGGEVGIRGARPPLLSPPPPIGALAPPPVRRSFVDDDMTRSAWDIVQSFAPREQGSEPGERLDTRCNSDTEEESEAEDGVAAVEGELKELRIGETFEGLTGTSSLSTTNDDDASSTTTEAMFIISPNGKFKRKIKSWMRGALLGSGSFGMVYEGIMRVLFSL

SEQ ID NO: 48581 - protein, 317 aa, Zea Mays
MAGGFRVLHLVRPFLAFLPEVQSADRKIPFREKVIYTVISLFIFLVCSQLPLYGIHSTTGADPFYWMRVILASNRGTVMELGITPIVTSGMVMQLLVGSKIIEVDNSVREDRALLNGAQKLLGILIAIGEAVAYVLSGMYGSVSQLGTGNAILIILQLFFAGIIVICLDELLQKGYGLGSGISLFIATNICENIIWKAFSPTTINSGRGAEFEGAVIALFHLLITRTDKVRALREAFYRQNLPNVTNLLATVLVFLIVIYFQGFRVVLPVRSKNARGQQGSYPIKLFYTSNMPIILHSALITNLYFISQEVQWKLPC

SEQ ID NO: 48582 - protein, 559 aa, Zea Mays
MQYGLNSMSVMTILGFAQRGQKKTQYLFPGSPKTMRKRWLVLLPSLNSLQVFKMDIKGRKKQTASHTSAHISPTQIDMESWPGLPSLNPTLDRNYSDDNIASTYLDFCAATSLQEVTRNSTEQLDGKSEVFGNDQEEKSNSFLDCDWGNIGGFDDFDRLFSHSDSIFGNEIVANDSDFLSASSNLMDTAVLSIPVPVEAHKRPVWSRRKPEERGKSKISSSTSGFSHSKVESSSTNLQTPMEPVQTPQYALFQDSKKIGEVQHANQFMFPGYGYPPAYPFPTIPLVSNIQAEGYQTKPAGTSYRTSEDYLKQSSSTEMSQDIPSRPLTMTPQEKIEKLRRRQQMQALIAIQQQQQQFGQQGPGSDTMVSQAYTPGNKNPDSLGSSIVIDENTNKVISPEMIPTDHDRVHKSSAISDDPFIEEKIYYQLQDALGKLDTKTRLCIRDSLLRLVHSATERKIDGDRSTNKTNKDEDEASEDASTRKTRSPNKEAETTTNPIDRIVAHLLFHRHCSKVAKATKEIISSIPLTLEPEPKVPLGTPRVPSKDQRDEQEIVLQPSQ

SEQ ID NO: 48583 - protein, 392 aa, Zea Mays
MVGAGRAIRGEGRRVPAARGPLVPGALVLSVLSGAGVADHKSLFNGEWIPNPSGPAYTNASCRFIDDHQNCMMNGRPDKEYLHWKWKPYGCDLPPFDAVRFLDSVRNKGWGLIGDSILRNQVQSLLCLLSKAEEPVEVYHDNEFKNRRWHFQSYNFTVSIVWAPFLIKSGIFENEDGVSTSEIQLHLDILDANWTSQYESFDYIIISGGQWFLRTAVYWENGAVVGGHNSQNKNVAELGFEHLYQKTLQNVFNFIVSAKHKPVIFFRTWSPDHFEDGEWFSGGSCRRKLPYNKGEYREGNIERVMRQIELESFNKAVAALRGSADMDRLRLMDTYSLSSLRPDGHVGPYRTPYPFARGSSKSTPVQNDCLHWCVPGPIDAWNDLVMKMALDP

SEQ ID NO: 48584 - protein, 164 aa, Zea Mays
MVGAGRAIRGEGRRVPAARGPLVPGALVLSVLSGAGVADHKSLFNGEWIPNPSGPAYTNASCRFIDDHQNCMMNGRPDKEYLHWKWKPYGCDLPPFDAVRFLDSVRNKGWGLIGDSILRNQVQSLLCLLSKVNATDFTFSFSRDALYSVPILYLNMMGSFTKLY

SEQ ID NO: 48585 - protein, 169 aa, Zea Mays
MAAVAALSCPAPPRVFRCAKTLPAPSAATSSRGRVGYGSSYARRWQCRRWTHRPDATTTRIRRATPRRTAVVRVNCAYSPRAETITACSWNEYVICSDVPVLIEFWASWCGPCRMVTRIVDEIAQEYVGRIKCYKLDTDDYPQNDQERYSVSGLGTGGAGVVCHSHCSY

SEQ ID NO: 48586 - protein, 99 aa, Zea Mays
MCASIRHGLDSRSQTLLLQLTKEENPALYQMQTPLPLPDMSSPSSNFVYFSFISSISEREEKPSRTRKRHKEHELNSLLTDGERHDGATGFAGIVRLVL

SEQ ID NO: 48587 - protein, 134 aa, Zea Mays
MASDGAAATPAKVTPKKANLLDPHSIKHLLDETISEVVKSKGYTEDTRLGNWKLGIGAAVIAVALLAQFYPKKFPQNRDFLLGCIALYVVLNVVLLILSYTKEKDAILFTHPPMVYKGRSSCGGPVLEGCREAD

SEQ ID NO: 48588 - protein, 135 aa, Zea Mays
MGRFRCLRHASRFLALQSGEVVLQRRAWIQPNTSCSSTGIYISNKFYDRFMLIPFVWSRSFHATDHRCSKHKDYYKILGVPKDASQDDIKKAFHSLAKKYHPDTNRGNTAAKRMFQEIRDAYEANTTGPFKEGAI

SEQ ID NO: 48589 - protein, 607 aa, Zea Mays
MGCITQLQPKQLTDCRGPGRPGRERRAGAASTTPVRLPLSLHSPLSPSACARVAASVPVRPPPFPSPIPATPHPAPGARARSGPRVYSPPPAPLLPNRRRRGCRHSGCFRSRSRGGRRQAMARRVRPSHLVLALAAAYLLLISLKFRRVLDLAATDLADDPAAAAAAAFSSPSSADHLPPPGSASATSSSSSPPFPVRPFWHRYDRVSLPDLASRNRSALDRMADDAWALGLTAWEDAAAFAGDPWALLAAATSRASDAAKCPSAVSQRARGRVVFLPCGLAAGSSITVVGTPRASHREYVPQLARMRQGDGTVMVSQFMVELQGLRAVDGEDPPRILHLNPRLRGDWSQHPILEHNTCYRMQWGAAQRCDGTPPDDNDDKVDGFPKCEKWIRNDIVDTKESKTTSWLKRFIGRAKKPAMTWPFPFVEERLFVLTIQAGVEGFHIYVGGRHVTSFPYRPGFTLEDATGLFVKGDVDIHSVYATALPSSHPSFSLQQVLEMSEKWRSRPLPKGPVSLFIGILSASNHFAERMAVRKTWMQAPEIKSSEAVARFFVALNSRKEVNVMLKKEAEYFGDIVILPFIDRYELVVLKTIAICPELDCCKHHEM

SEQ ID NO: 48590 - protein, 479 aa, Zea Mays
MGCITQLQPKQLTDCRGPGRPGRERRAGAASTTPVRLPLSLHSPLSPSACARVAASVPVRPPPFPSPIPATPHPAPGARARSGPRVYSPPPAPLLPNRRRRGCRHSGCFRSRSRGGRRQAMARRVRPSHLVLALAAAYLLLISLKFRRVLDLAATDLADDPAAAAAAAFSSPSSADHLPPPGSASATSSSSSPPFPVRPFWHRYDRVSLPDLASRNRSALDRMADDAWALGLTAWEDAAAFAGDPWALLAAATSRASDAAKCPSAVSQRARGRVVFLPCGLAAGSSITVVGTPRASHREYVPQLARMRQGDGTVMVSQFMVELQGLRAVDGEDPPRILHLNPRLRGDWSQHPILEHNTCYRMQWGAAQRCDGTPPDDNDDKVDGFPKCEKWIRNDIVDTKESKTTSWLKRFIGRAKKPAMTWPFPFVEERLFVLTIQAGVEGFHIYVGGRHVTSFPYRPVIVFRGSLLKMQQGYLSRVM

SEQ ID NO: 48591 - protein, 523 aa, Zea Mays
MLPPSRREFKDIYVVFELMESDLHQVIKANDDLTKEHYQFFLYQLIRALKYIHTANVYHRDLKPKNILANSNCKLKICDFGLARVAFNDTPTTIFWTDYVATRWYRAPELCGSFFSKYTPAIDIWSIGCIFAEVLTGKPLFPGKNVVHQLDLMTDLLGTPSMDTISRVRNEKARRYLSSMRKKETISFSQKFPNADPLALDLLQRLLAFDPKDRPTAEQALAHPYFKGLAKVEREPSCQPITKMEFEFERRRVTKEDIRELIFREILEYHPQLLKDYINGTERTTFLYPSAVDQFRKQFAHLEENSGNGPVIPMERKHTSLPRSTIVHSSPIPVKEQPRIGPCRERPSSDESYRNPRETEQYSGNLPRTSQAPQRVPTARPGRVVGPVMPYQNGDTKDPYDTRRLAMSSGYPPQQIPQTFGYYQTHGKPACCEPSQAERYTLHQQAAYACANRTAASDVALDMRAPPFQHLSAGQRSDSCDRLTAETNLYTRSTNGIAATAAGVAATTHRKVGVVPFGMSNMY

SEQ ID NO: 48592 - protein, 459 aa, Zea Mays
MAAVDATTKEMDALHVGQNDETKETLIKEDKAANSNHSVVAAQSLLPEDDDDDEAQADGPSQDGAAAVKKKKKKNKSKKKKGPLQQTDPPSIPVDELFPSGEFPEGEIQQYKDDNLWRTTSEEKRDLERLQKPIYNSVRQAAEVHRQVRKYMRSIIKPGMLMVDLCETLENMVRKLIKENGLQAGIAFPTGCSLNWVAAHWTPNAGDKTVLQYDDVMKLDFGTHIDGLSMILFPFIVFGYIVDCAFTVAFNPMFDPLLQATRDATNTGIKEAGIDARLGDVGAAIQEVMESYEVEINGKVFQVKSVRNLNGHSIGPYQIHAGKSVPIVKGGEQTKMEEGEFYAIETFGSTGKGFVREDLECSHYMKNFDVGHVPLRLAKAKQLLGTINHNFGTLAFCRRYLDRLGETKYLMALKNLCDNGIVQPYPPLCDVRGSYVSQFEHTILLRPTCKEVISRGDDY

SEQ ID NO: 48593 - protein, 856 aa, Zea Mays
MLWRHLSSTIPLVLQLQSTLENRHPRNKRRGVTLLMKMGWRQGRSIRDSHADSLYESRRNARKAFLALSGAKDGEDQDQSAEKPSLDKAVVGSVGEIPVSGNTPVYVLHPKQDFHGLGYDPFKHAPEFRDRKTLQKSRERGRKRNDVSMRGNLLISNSGHYAPGFGIGALEELDVEDEDIYASGFAYEQTEVDIEPSKTANDSNYKLDDRKRGFYLSFKIASNSEYKLERFLPPEIPDDFDAQHKFPTPVQSAEMFSDSAPLEVPPPEDTSLTLLIDGCAAMVARCGKHIEDFYKEKSKTNPQFLFLSGGAGCNYYMRKLWEHQQKHIGQRWHDSAKSKTSSDKLTAENRGKILGERPLDRTTKVHSPSLSAKEAVQLQSNLTETFVKPISLDGLPEYEKPFSNDPAKQVRFEQFLRDKYKGGLRAANVTPTSTMSEGDRARERLDFEAAAEAIEKGKGKKVIDPLSVFSLPGMNEQRFVAATQPESSVVIQDEKPIYPQRQQFEWRPSPILCKRFDIVDPFMGKPMHVQRPRSKMENLIFMTESNKGTNDEVESSSRSLQHASMEALSDVESRGAATDPDFEPSSLQRPVDLYKAIFSDDSDDDADEILSNQLVDPVKTSEGANMALNRLVAEDFLESLGKELGLEVPPERPHVSSEPEKFSASRASLSSQDERITTALTKVKENQCSIDIVQVGNINEDTPLASAETLGMKYENQENRTEKIRSRPMNRQSQNHSPRSDSSSERHRSWKRRHRHIWNGTPESESGERHRSKRKESHSRHRKRRSRSPGSDTPSDTQHETKRKEKRHRRTYTSDTDSSDHEHSERYKSSSRRSSDKDRSRKRRIHHKHRRKDHVD

SEQ ID NO: 48594 - protein, 306 aa, Zea Mays
MASCLCFRRRRRPIIASSVPFFLLLVSFLASASASSTTTTKLLGSGNNATRRVTFSSEELRGLRSITARLARLRDASVKTIQSPDGDVIDCVPAHLQPAFEHPKLRSQKPEEEPEERPRSSAGRFSDADLDEDDDPLPQVWRRSGEHCPEGTVPVRRTTEDDVLRATASSATRFGMKARGAGLGFARRDSTGGGHEVSANRRSLSHRRGDDGRRSTVNTPIIYLWLCKRSARNLLINGTPHTMKSGNDTNNCVIIVVCLRLASPIHPAQVTVTVQGAALAMASTCTCCRLDCIVKQWENVSTSLSS

SEQ ID NO: 48595 - protein, 265 aa, Zea Mays
MGERQYVTEQLDGLCLQHAVGYVTGGQFYGAKASLNVWPAQVASPAEFSLSQIWVISGAFGNDLNTIEAGWQVSPQLYGDNSPRFFTYWTDDAYQETGCYNLHCSGFVQTSSRVAIGAAISPVSSYAGRQFDVTLLIWKDPRRGHWWLQLGSGALVGYWPSALFTHLGSRADMVQFGGEVVNARPAGAPHTPTQMGSGRFPAEGYARAAYFRNVQLVDWDNNLVPAAGLRLLADRPGCYDIAGGSGGAWGTYFYYGGPGRNARCP

SEQ ID NO: 48596 - protein, 141 aa, Zea Mays
MMTYDLSDLLLCLKEILKIIRNSPHETDSAEVPCTGSFLVPSLQSSTPHGSETETDATRCNVREYQRRTQSQSLSSEICLRPCGAHGATTDRGLGRRSGMSTWRSVASRRVTHPPAPRHGRVRLNRSRWPLSRHGHISSSA

SEQ ID NO: 48597 - protein, 396 aa, Zea Mays
MHMMRRLKSIASGRSSVSDPGGDSGSKRPKFEQDGAGDIVMEPHLTEDKPVRIDQESSSTSNRDAEASTSTSMKPVKTEEAGADLLPKEMNIMTISDDKADGHNDKEGEGVTLDGTGTETGQIIVTTIGGHNGKPKQKVSYMAELVVGTGSFGIVFQAKCLETDETVAIKKVLQDKRYKNRELQTMQLHDHPNVVQLKHHFFSTTQKGEVYLNLVLEFVSETVYRVAKYYNRMNQRVPIIYVKLYAYQMCRALAYIHRVVGVCHRDIKPQNLLVNPHTHQLKICDFGSAKKLVPGEPNISYICSRYYRAPELIFGATEYTTAIDIWSVGCVVAELLIGQVDACAHPFFDELRDPKACLPNGRPMPPLFDFTAAELEGLPAELVHRIVPEHMRKEVN

SEQ ID NO: 48598 - protein, 310 aa, Zea Mays
MHMMRRLKSIASGRSSVSDPGGDSGSKRPKFEQDGAGDIVMEPHLTEDKPVRIDQESSSTSNRDAEASTSTSMKPVKTEEAGADLLPKEMNIMTISDDKADGHNDKEGEGVTLDGTGTETGQIIVTTIGGHNGKPKQKVSYMAELVVGTGSFGIVFQAKCLETDETVAIKKVLQDKRYKNRELQTMQLHDHPNVVQLKHHFFSTTQKGEVYLNLVLEFVSETVYRVAKYYNRMNQRVPIIYVKLYAYQMCRALAYIHRVVGVCHRDIKPQNLLVSSQIHFSSKQFVWLLVLQVFCYSHFGPFCYHLACKL

SEQ ID NO: 48599 - protein, 141 aa, Zea Mays
MNHIPPTEHGNGGSKQLEIPQPGSFSCGLISSEARPQFRHQPSNSMAANFGNKIRNAKLVLLGDVGAGKSSLVLRFVKGQFVEFQESTIGAAFFSQTLAVNDETVKFEIWDTAGQERYHSLAPMYYRGAAAAIVVYDITNP

SEQ ID NO: 48600 - protein, 213 aa, Zea Mays
MPLELRRQLPVDLAEGNLKALSLQALGQGVDMQLGLAIDSPKATLAVKRRLACEMVKYWQQVQESIPELPISDGWGKKHRLFIKWKYVEAKAAAYYFHGLILDEGNTEKSHGMAIAALQASEEFLKESKRVSEAFHATPPTSRSPNPFGTAKYLFDKIPRDASSKVRINQDLYTQEKVIGAPPPLPDFALALTPEEYDLPPLDPLWNKEDTSH

SEQ ID NO: 48601 - protein, 122 aa, Zea Mays
MSLLAAAIPSTSSHFSAPFLPSFHMPRKNLTAPLHRIRRPRPFTVVSSVPDPAAGPVEYTPWLIAGLGNPGNKYYGTRHNVGFEMVDRIAAEEGITMNTIQSKSLLGIVVCNLWSATTLCKG

SEQ ID NO: 48602 - protein, 219 aa, Zea Mays
MSLLAAAIPSTSSHFSAPFLPSFHMPRKNLTAPLHRIRRPRPFTVVSSVPDPAAGPVEYTPWLIAGLGNPGNKYYGTRHNVGFEMVDRIAAEEGITMNTIQSKSLLGIGSIGEVPVLVVKPQSYMNYSGEAIGPLAAYYQVPLRHILLIYDDTSLPNGVLRLQKKGGHGRHNGLQNVIEHLDGRREFPRLSIGIGSPPGKMDPRAFLLQKFSSEERVQV

SEQ ID NO: 48603 - protein, 580 aa, Zea Mays
MAAAAEVDPSPNPPPTTASGLSKTKTREADRRRRRRSKAKKNKSVTEADAQDADGGASSSDAKENADPNPEPQVEVEIEYVPEKAELDDPLLDDFKAIFEKFTFKDAAAAAAEKDEGAADATKKGSLDDDDDDEDDEQEANKKKDGGLSNKKKKLERRMKIADLKQICNRPDVVEVWDATAADPKLLVYLKAYRNTVPVPRHWSQKRKFLQGKRGIEKQPFQLPDFIAATGIEKIRQAYIEKEDSKKLKQKQRERMQPKMGKMDIDYQVLHDAFFKYQTKPKLSSHGDLYYEGKEFEVKLREMKPGMLSRELKDALGMPDGAPPPWLINMQRYGPPPSYPQLKIPGLNAPIPPGASFGYRPGEWGKPPVDEHGRPLYGDVFGVLQQDEPNYDDEPVDRSKHWGDLEEEEEEEEEEEEEEEPMEDEEMEDGIQSVDTISSTPTGVETPDVIDLRKLQRKETDKQAERPLYQVLEQKEERIAPGTLYGSSHTYVLGTQDKSSAPKRVDLLKNQKSDKVDVTIQPEELEAMDDVLAAKYEEAREEEKLRNQKEDFSDMVAENAHKRKRKQEKEGKSKKKEFKF

SEQ ID NO: 48604 - protein, 142 aa, Zea Mays
MIFWLYPSLGGMEYVLHHTLSLVAIAYTMLSGEGQFYTYMVLISETTTPEINLRWFLDTAGLKKSSAYLVNGILMFVAWLVARIFLFMYVFYHIYLHYSQIMQMHAFGYYLTFVVPSVLFVMNTMWFMKILKGVMKTLAKWS

SEQ ID NO: 48605 - protein, 279 aa, Zea Mays
MRAIASPLAPPRPEPPIAVRSRSNALKRATLPPVPLTAARLRLRRQPEPGPSPPTRLSHPMPPPTATMSPAAGGSFPELTCPADFATVAAPGGRFSVVGFGSLLSERSARSTFPELEGFRVAVLRGFRRVFAHAAPIFFERGIAIEATKEFSSLSVEPCDSELIVVTVFEIKEEEVPAFIEREHEFRFLAVVPEGLDGVPFTNRAVVCARYSNEEYFQERCRGSKEIYNKYYGRYNIDKIWRDDILPCRLYLRHWRAACHFINASFGSLELNSILIIVI

SEQ ID NO: 48606 - protein, 357 aa, Zea Mays
MNMGGVSPSTVRCKHCSTQLTVCPGERAIQCTQCCGVTRIRRRRVQRPAAAPPTTGFPRARGKKRALLIGITYAAGLRPAEGGPQRRQVHEATPLPALRLPQRLHHHAHCWTSSRGADDQKDPFRLPTKDNIRLGMQWLVEGSSEGDSLVFHFSGLGAQVADDDGDELDGYDEAICPMDSFQKGPILDDEINETMVRPLVHGVKLHAVVDACHSATVLDLPFCCNMSRSGSWQWKDESPPSGAYRGTSGGKAMLISGYSDGKAKSSVASAQKPEACATMGAMTHSFITAVEREPQGVTYGRLLTSMKAIMTNSGGCAVQGPIGAGAAARKVANFSGVEEPNLSSSEKFDIYRKAFVL

SEQ ID NO: 48607 - protein, 416 aa, Zea Mays
MNSRCRGGNGCKVGDDNGSLMLMWEDGFCRPRVAECLEDMDGEDPVRKAFIKMSIQLYNYGEGLMGKVASDKCHKWVFKEPSECEPNISNYWQSSFDALPPEWTDQFASGIQTIAVIQAGHGLLQLGSCKIIPEDLHFVLRMRHMFESLGYQSGFFLSQLFSSSRGASPTPTPPFPLKQPPAAPAARAPPQLFSWPGHHQPQQLPSPAGASPLFPPGPGAFHPSSARPMPPFPGGKDEGHMFHLPPAAHHGTNKQPPQHMDEHHHHQQQPMVGAGGDAPDGDLRWPNGLSFFTALTGRADDAKLLFGGPGAGAGAADDDDKAAPDAHGGAENVEEYLSLESHSNKARKVESPAAQSTNKFKRSFTLPARMSSSSSTSAFPSVSASTAPPQQQQAGMEYRGPHEGGVYSDLMETFLE

SEQ ID NO: 48608 - protein, 288 aa, Zea Mays
MCNSNVKSAGVAQIDGRPVLQPAGNRVAAPEPDASRPLKKSLQKSLSMPVYYDSNATAGARPAPAENTTRAAANSSPLPPAKAATKAAGAFPAEKSGRSKAARRPGAVPPPVVAFAALEALEPAGSIAAAQREHAAQAQAQRKLRIAHYGRTASFSRVEGRVVGAAAAAAERAVPASPTGHDEKRCSFITPYSDPLYVAYHDEEWGVPVHDDELLFEMLTLSGVQVGADWTSILKKRHVYREAFSGFNVDAVAKYTEKQMASLSADYGLDLGTVRGTVNNACRIIEVP

SEQ ID NO: 48609 - protein, 740 aa, Zea Mays
MFFDGCPRRLGCTVLLRGKSYEELKKVKLAVQYALFAAYHLSLETSYLADEGATLPKVPSDLQLEKPNSSSRYYQQNLIEFQTIEGETYGAGCITPCLNGSANQSHSRDDIIHEEHAHCHSRSDLSWEEYTGGTIDVYPYSTEASMYSSCMPPVCMTVQTPKSSLASARKSTPGNLFFSNNVHIDEAGGGMSKVDNDVLDLDNGWNHISDEDSVAIHDHNGNHNEYFPTSDSPQSILVSLSIACPLRGIVCKQSQLFRIKFYGTFDKPLGTYFREDLFVQTSCCESCKEPAESHVRCYTHQQGSLTISVKTLPSVKLPGELDGKVWMWHRCLRCKPKDGIPPATQRIVMSDAARGLSFGKFLELSFSNHTTANRIACCGHSLQRDCLRFYGLGSMVAVFRYSPVDILSVNLPSSVLDFACPKAQDWIIKEAVDVCARKEHLYREIVAKLDCIEKIVKDQNIGMKSGLHKHVADLKELVKVEWKKYDVVSAFSIVDNLQTFEPYIDVLELNLLRRELVHDIHVWDRRLYMMHSLTKENCRTMPNDAQFSEKFTESSLEQSKDVTSGKHLNAESSLEQNQPSTLEVAAVSVKSSPMTEQTNTSISHLALETTIMGDASMHSVSTVISFAPGSYEMQSEGVLAELEAGKTLQKSQSSASNLSDRIDLAWTGSGQLVNDSSSSMEAVSFIPASLKDNPAYQKVIAPIRIKSFDSAISSRNVDDSNASIRRSYSQRPPKAIERTV

SEQ ID NO: 48610 - protein, 969 aa, Zea Mays
MGVPVAQKSDSWVTVLAMTDSGGLGVRPINGGRGSAVEQRGLGLGDNGPPVSPPERVSTPPAPRLAAWWRMSSPGPLRCSTPRSVGCEDGDDSDRYFSPQSEFSQDTSDTDSMSTSISRMYTFRLGTSSPLDSPIKQLGVGDTSPPSRKGCHSPRYPWNSCRGSDDVDSSFMSSPRHDDEERKYDVQPIDFESRHIWYPPPPQDENGTFQYDEDDDNDVCDGKVFGHINHDYCDGEDDDDVLGIKGKHSISHKEFLRSALHGHFRALVSQLLEGHGIDPVDGWPDIVSSLAWQAATFVRPDTSKGGSMDPTDYVKVKCVASGNPNDSAFIKGVVCSKNVKHKRMVSKHENPRLLLLGGALEYQKVTNKLASINSILEQEKEYLKNAVAKIEAQRPQVLLVEKSVPLHAQQLLAKDISLVLNVKRSLLERISRCTGAQIASSVENITSTGVGQCQTFWIERVTECSSPKVSNKNTVKTLMFFDGCPRRLGCTVLLRGKSYEELKKVKLAVQYALFAAYHLSLETSYLADEGATLPKVPSDLQLEKPNSSSRYYQQNLIEFQTIEGETYGAGCITPCLNGSANQSHSRDDIIHEEHAHCHSRSDLSWEEYTGGTIDVYPYSTEASMYSSCMPPVCMTVQTPKSSLASARKSTPGNLFFSNNVHIDEAGGGMSKVDNDVLDLDNGWNHISDEDSVAIHDHNGNHNEYFPTSDSPQSILVSLSIACPLRGIVCKQSQLFRIKFYGTFDKPLGTYFREDLFVQTSCCESCKEPAESHVRCYTHQQGSLTISVKTLPSVKLPGELDGKVWMWHRCLRCKPKDGIPPATQRIVMSDAARGLSFGKFLELSFSNHTTANRIACCGHSLQRDCLRFYGLGSMVAVFRYSPVDILSVNLPSSVLDFACPKAQDWIIKEAVDVCARKEHLYREIVAKLDCIEKIVKDQNIGMKSGLHKHVADLKELVKVEWKKLYQRFLS

SEQ ID NO: 48611 - protein, 405 aa, Zea Mays
MEVLCIGTADTKFEELLFLAAQLRSALAASGSDSKVQVSIVDVSTTEKTTANDFKDIIFIPRNTILSCHLGVDQHNLPDNRGEAIALMSKALQSFLKKRYDSGMLVGAVGLGGSGGTALIAPALRLLPLGVPKLIVSTVASGHTTPYVETSDLVLFPSVVDICGINSVSRVILSNAAAAFAGMVHGILSASNESDETSTKPTVGITMFGVTTPCVNAVKDRLNKEGYETLIFHATGVGGKAMEDLVRGGFIQGVLDVTTTEVADHIVGGIMACDETRFDAIIENKIPLVLSVGALDMVNFGARDTIPLAFADRNIHVHNEQVSLMRTTVEENKKFARFIADKINKSSSKVTVCLPQKGISAIDAPGMPFYDPEATSTLLGELNTLIQRTDIREKYCGGRGQYYIN

SEQ ID NO: 48612 - protein, 531 aa, Zea Mays
MEVLCIGTADTKFEELLFLAAQLRSALAASGSDSKVQVSIVDVSTTEKTTANDFKDIIFIPRNTILSCHLGVDQHNLPDNRGEAIALMSKALQSFLKKRYDSGMLVGAVGLGGSGGTALIAPALRLLPLGVPKLIVSTVASGHTTPYVETSDLVLFPSVVDICGINSVSRVILSNAAAAFAGMVHGILSASNESDETSTKPTVGITMFGVTTPCVNAVKDRLNKEGYETLIFHATGVGGKAMEDLVRGGFIQGVLDVTTTEVADHIVGGIMACDETRFDAIIENKIPLVLSVGALDMVSLMRTTVEENKKFARFIADKINKSSSKVTVCLPQKGISAIDAPGMPFYDPEATSTLLGELNTLIQRTDIREVKLFPYHINDPEFANALVDAFLSMDVQASSSAQPKQDLNIGKSCSGQKISDSSIIWRTPVDFPDAKPEILRRTRSILHKLKEQISDGTPVIGAGAGTGISAKFEEAGGVDLIVLYNSGRFRMAGRGSLAGLLPFGDANDIVLQMANEVLPIHFVEWNTFSDN

SEQ ID NO: 48613 - protein, 708 aa, Zea Mays
MILIGKVQVSIVDVSTTEKTTANDFKDIIFIPRNTILSCHLGVDQHNLPDNRGEAIALMSKALQSFLKKRYDSGMLVGAVGLGGSGGTALIAPALRLLPLGVPKLIVSTVASGHTTPYVETSDLVLFPSVVDICGINSVSRVILSNAAAAFAGMVHGILSASNESDETSTKPTVGITMFGVTTPCVNAVKDRLNKEGYETLIFHATGVGGKAMEDLVRGGFIQGVLDVTTTEVADHIVGGIMACDETRFDAIIENKIPLVLSVGALDMVNFGARDTIPLAFADRNIHVHNEQVSLMRTTVEENKKFARFIADKINKSSSKVTVCLPQKGISAIDAPGMPFYDPEATSTLLGELNTLIQRTDIREVKLFPYHINDPEFANALVDAFLSMDVQASSSAQPKQDLNIGKSCSGQKISDSSIIWRTPVDFPDAKPEILRRTRSILHKLKEQISDGTPVIGAGAGTGISAKFEEAGGVDLIVLYNSGRFRMAGRGSLAGLLPFGDANDIVLQMANEVLPVVKGVPVLAGVCATDPFRRMEYFLRQLETIGFCGVQNFPTVGLFDGNFRQNLEETGMGYSMEVEMISMAHRMGFLTTPYAFNPDEAAAMAKAGAHIVVAHMGLTTAGSIGAMTAATLDDSVLRVQAIADAAFGVNPDIIVLCHGGPISGPLEAEFVLKNTKRVHGFYGASSMERLPVEQAITNTMREYKRISLK

SEQ ID NO: 48614 - protein, 945 aa, Zea Mays
MVWQFPEIQQRKFAWHLASLRENSPVIRAKALRAVSCIVEADPEVLGDKRVQYAVEGRFCDSAISVREAALELVGRHIASHPDVGLKYIEKVAERIKDTGVSVRKRAIKIIRDLCASNPNTDTTHAFVEIISRVNDEESSVQDLVCKTFYELWFEEPTGSHKHLVADGSSVPMEIAKKTEQIVDMLRKMPNHQPLITIIKRNLTLDFLPQSTKAAGINSSMVASIRKRCELICKRLLERILQVEEGAANEMEIHTLPYIVALQAFCIVDPTLCIPVTDPSKFVVTLQPYLNIQVDNKSSAQLLESIIFVIDAVLPLIRKPPQNVVEELEKDLKHMIVRHSYLTVVHACIKCLCALSKSAGRGPGLVENLVNIFYKHLCGANSDSQLLGRSLFCLGLLLRYGYQLMLTSENQLDFPKIINLLQRKYLLKDDFSLKVRALQTLGYILIAKPEFMLQKDMLNLIETALSSEVDYRFKIQGLQNLYEYLRDAESQLTAESTAKPPGQCEINGRSEVPVAAGAGDTNICGGIIQLYWSSILERCLDTNDQVRQSALKIVEVVLRQGLVHPITCVPHLIALEMDPLEGNSKLAHHLLMNMNEKYPSFFESRLGDGLQLSFKFFESIVSNHKMSANIKSNPIAFVKPGISRIYRLIRSNRNSRNKFVHSIVRKFESDSRSRSTVSFLVYCAEVLASLPFTCSDEPLYLIYDINRAIHLRAGGVEGNLKRWTSMSQSQEMAGMPTLPGESHVVMQEEPGGYYDNMGDATERVNDNPCSTSDVDIAKVQGDCHDAIALQLLLKLKRHLKVVYGLDDARCQAFSLKEPPKSGETFSRQNVSFNIGNTNLSLPSCLQDAASVYQDFKTVLREDSMDFAVFVPSVQTRKRPTPRNTTSPTPRSMTRVRRTAAPSVTKARGGARGDDSDDTDDDDWTGGPRVLDFSGGGRVTRQRVQV

SEQ ID NO: 48615 - protein, 879 aa, Zea Mays
MIAAAISLTLGMTTEGVDEGWYDGGSIFLAVFLVILVTATSDYRQSLQFRHLNEEKQNIQVEVVRGGKRFGASIFDLVVGDVVPLKIGDQVPADGVLISGHSLAIDESSMTGESKVVHKDQKAPFLMSGCKVADGYGSMLVTGVGTNTEWGQLMANLSEDNGEETPLQVRLNGVATFIGLVGLSVAGAVLVVLWIRYFTGHTENPDGTPQFVAGTTGVKQGFMGAIRILTIAVTIVVVAVPEGLPLAVTLTLAYSMKKMMRDKALVRRLSSCETMGSATTICSDKTGTLTLNKMTVVEAYFAGTKLDPCDDVSQMSDSAASLIIEGIAQNTTGTVFLPEDGGAAELTGSPTEKAILSWGLKIGMDFDDVRTKSSVIHVFPFNSEKKRGAVAVQLDDGVHIHWKGAAEIVLSSCKSWLSVDGSVQSMSAEKHDEFKRSIEDMGANSLRCVAFAYCSFDIEKIPMEDITSWELPEDDLTLLGIIGIKDPCRPGVRDAVRLCTTAGVKVRMVTGDNIETAKAIALECGILDANSVISEPVVIEGKVFREMSESARGEAADKIIVMGRSSPNDKLLLVQALKRKGHVVAVTGDGTNDAPALHEADIGLSMGISGTEVAKESSDIIILDDDFTSVVKVVRWGRSVYANIQKFIQFQLTVNVAALVINVVAAVSSGDVPLNAVELLWVNLIMDTLGALALATEPPTDNLMKRNPVGRREPLVTNIMWRNLFVQALYQVAILLIFDFDGVRILRLQNESRSDAEKITNTFIFNTFVFCQIFNEFNARKPEEKNVFKGVTKNHLFMGIIGITTVFQILIIQFLGKFFKIVRLGWRLWLVSVAIGLVSWPLAYVGKFIPVPVRPLPDYFKPRCCWKPPRRDEEEGGQS

SEQ ID NO: 48616 - protein, 469 aa, Zea Mays
MPAESETGNNNLGLESILPLPPQPQRPPLPPSVRGSSSSSVSAGNKRKTSGSSMGAPIVQSSSSAQAAENKDANKLVVADTSNTGTRAVASVDIAGLDDDEEDIPEDMTGTGKRQKRRTSIVWKYFTKETVEVEVNGKKFEQLWAYCNFPKCKQRYRAESNHGTNAFRNHLRSHHSIVKGQLELKAEKDNGKDVTTIQPFRYDPDASLRKFYLAVIMHEYPFNIVEHDYFVDFIKSLRPNFAFKSRVTARKDILDIYFEEKEKLYAQLKNVTCRFSATMDIWTSCQNKSYMCVTLHWIDDSWHIQKRIVGFFHVEGRHTGIKLAQCFTEVMVKWFAEKKLFSLTLDNASNNLVAVKDIIQDLRVNASSCLICDGIFFHIRCACHILNLVARDGLAVISKALEKIKDLVLTVKGSPLQWEELMKRATECGLDTSKGIQLDVSTRWNSTYMMLRDALHYVCLMSEIVIPNS

SEQ ID NO: 48617 - protein, 644 aa, Zea Mays
MAAEAPPSASASASSSSAPRPPTAAASAPGGGGGGAPASAESYLGSLISLTSKSEIRYEGVLYDINTEESSIGLRNVRSFGTEGRKKDGVQIPASDKVYEYILFRGTDIKDLQVKSSPPQPPPPQAASLHNDPAIIQSHYSQPASTSSSLPSAGGAVLPDFSSQAVQYGLQRPTFQSNLPLYQPGNTPWGSSVAPPAGNAPWGSSVAPPAGNASTLSVPSMYWQGYYAPSSGLPHHLQPPPLLHPTPGLSVPQNLQYPGLNPSLQSGPQKLSELQPSLMPPITSQGPSSGILPATTAPASATLLAPESSKPLLPNMGSLFAPRATSLGATFPLPSQPTAVAETSATVSQNLTSFGSSKVPALPGSTLAYQTVSQSVSSTIAPSSSAQAEMPVPLLAPSGQLLQNTSSILSSSHSMQAPLQLASKEVKPIEPKAKVAEPLLPDPLLPDPPSRAMPEIKEPILPLPKQTPQKYNGSGSRNHHNFRGRGRGRGSAFSQSVTAFTEEFDFTAMNEKFNKDEVWGHLGKKSQSRDKDGEVGDDVFDEELEAEETDNPELAVKDDFFDSLSSGTFGRGGPNGRGRPSERRRVDTETFGEFPRHRQPYRGGGRGYRGGGRSRGSYYGGRGYGNTGRGGPGNSYPHWGNGRD

SEQ ID NO: 48618 - protein, 1477 aa, Zea Mays
MYSSYSAAAFALRAAKPSLHAHSSYSYFYHPPPHLCHCDDADEHRHHNKVVPRSPYLAPRFLFDGCLLRHSAYLLLSAQLRLLPPPPRPYASRCCRRRAPIGCCRDGGGGRQLAGQLCCHVEAHKCRCCGSGAGRPDLGAIRRRLKAPECRCGSSGDGTLLGAGCVRRDVPRLVGRAMRQEVWEYEGGQWLYGRSSTECLDSEEEEEDCGYGQLEVGGMHFSRRWEDGNVDDGDGHCMDCCRRKGIENYYSGEDVYSSRRRERRDLNEGRHSFRDSDRRQRSEYYDDEDDLDLGQRKQGWEGRDTRNFVPNDAVDTRSVETRRYCDDGREYNCIRDRRNFNSDDVANVRRAGRYAEDIGGFDRRRESRDFEIDDKVIVRREGRRHRNDHRYVSRHPRRSEDTDGEDVSLLRSRHWNDKEIGYNEQDLADRRYYSMVRSQKSAGASSLHEDDSKRASNFRSTFDARHTGQKENSASSVRWHDNVGGRTEQISEERDRRRSAGWSNDERERYDYDDAQFVRVRNSRIGRQDDKFITEDETRVTSSSKNTSILKHGSNADQQAAVHKDGSTKSSQKITEISEVHDNSTEQDSRAQRYHQEDRENYTKNTPSSVQNSVKMASDSRRQVDQHNEVNQNLVSVTDSRKNSGNLNVTIDSSHNVSRVSHSMRNHNEINQMDIDDSSTSLQNITHVIRDKKSIVNQQVIHETDIDAQNITHVDISKIHASDTSTSRSSQSHLETRSDMNSSSSMGFINRTRSQEKEGYGNMISANDSGMVRGSQSHLETGLYDPFHSKPSANITDNKRESHEQAELNIANASNAAAANTSGSHLQTKTDYQFQSPSAVAIDSMNEQIDFAKIHAIDATVSSSQGPVIRNDNQVHKASTVHWSSERQGMNGRQITQVSNTERDDEARSIFPESSQDTHHNMDLIWQQADTSGISDDKNITGLLVESTKKGFMTNVDMGKQEATMGSYDQEVRSEITAGSSLPSDSSARQSVKESMLESAARLEKSSTFLVGRFVDELQQGVSDPDATLTKKNGKSIMEGITSSSSRSRTKGPADEMWDVQSTTSEETFKTADKEEGSSADGATNSASQTPKNESVVARKVHKSLWAYVADIIRLGFIQHGDSHDSSHKSVKKSSSNNSQSTEGWLSSQERDNDGTKKKNGSTNTLGGGEQESGVASMSNEEYLHTDTHGLQISETVVEPQVGRSEGDLLPTSSTDDLHISGGRTKQSDAGELRKGNSIDDSTPTYLDITIGHLPERKTASRITTEGSGEFITGKGMLAGTSSVTISAMEAGRSEDGADSIYDPSGAITPYHDSQTQTVMPHENTSTGILGPPALPVGVSTRFEEKNIMQEAPEIIKTGGKDTELKRRNFQRNKQVLKDTFDEWEEAYQRDAEQRKADELFMREALLEAQRAADIWEVPVGAVLVQNGEIIARGCNLVEDHRDSTAHAEIVCIREASNKLKTWRLAAVPWGWTNKHS

SEQ ID NO: 48619 - protein, 618 aa, Zea Mays
MVRKRLGYSSRGHRIPTMPRVPNSARGKRSTRRKKDENDDMCAMDLLATVAGKLLADQDNSSSVPNTSAAKAKKRKSVKEEHFDEIPPLKNVAMEKDVGSGSVSAFPRQAKNCLAENSSTRNGADTVLESLTVKSNMLAKIPECGSYGIHHAGSSSSAEPEQVHQAEPKVSRRQADGHPVAYGIFNSVDVDGKPPALVSSDSSSCVPLSSHDKEHQTSSLYRGVVQYTADREDDENSSGCTHPSTIESKGCKPQYLGNHRIRKLLASKVRKAARNKICGGIPSKKICGGLSKKGSKLNLCGKKMSTTHQKVQRMIFKKKKLTHRTSFAKEMLTEASGTSFAMEGQNKSCEAENYHVKLRIKSFNIPELFIKVPENATIGSLKRAVMDVVNSIMEGGLRVGVLLQGKDIQDDNKTLCQAGICHDKKLNNIDFTLECEREREPPSGVIIQEQMDFLTTDMVEPLARMKCEEPFPEADVGDDSQQPRAPYRSRSLSDLYSVHCPVQMASQDTTASSQAIVPVSPAPSDVGALAIVPLCKSKGSEVGQRRMRRPFTVGEVEALVGAVEQLGTGRWRAVKTLAFDSIDHRTYVDLKLIHPRPRKLLDGFIHQHLQAMLVLNTT

SEQ ID NO: 48620 - protein, 512 aa, Zea Mays
MAGFARATAPASPSPAAALLTGERLVVFLFAARVALAAPVHLAAALAVLVAAALAVELAVDGSGSAPLRRFRTRPGASSGILLGATTLPSVMLSRLIQLSRLLPADPNGPKGLMVTTNMAYMLCHGVAAVILIKHILEKFPSCASFGEALLVSGGLVLYFGDMLAHTLSKMEFSMSSKAFIHTPQTRSDMTAIIQGILLVLFLLPLLYKSSLKVWYCWTKERKQQTQTPEEHKRIRIDSAIFYISLAVVLIFLLPSWTHLVQGLKVHPFVWIVNYMFTDSHERLVLCAYWICVIYVSVRRFYSISKQSKTERILLRKYYHLVAVLIFSPAVIFQPAFLDLAFGAAFAVFLILEMLRIWEIYPLGRVVHQFMNAFTDHRDSEILIVSHFSLLLGCALPKWMSSGLNDRPLAPFAGILSLGIGDTMASMIGYKYGVLRWSKTGKKTIEGTAAGITSVLAACSILVSLLASSGYILSQNWLSLLIAVTLSGLLEAYTAQLDNAFIPLVFYSLLCL

SEQ ID NO: 48621 - protein, 122 aa, Zea Mays
MELDTPKIIAAASSFAGACPQQQSRRDTVTLGEAPCCPSRWIELCPSPQLAIVEYWACRRCRACHAQQEPQRHDLFQLDESSHIVVDPCPCRHASRIPCSTKAPSCGQHADMRDTSRPGCSL

SEQ ID NO: 48622 - protein, 123 aa, Zea Mays
MHSSCMSQIIAAASSFAGACPQQQSRRDTVTLGEAPCCPSRWIELCPSPQLAIVEYWACRRCRACHAQQEPQRHDLFQLDESSHIVVDPCPCRHASRIPCSTKAPSCGQHADMRDTSRPGCSL

SEQ ID NO: 48623 - protein, 264 aa, Zea Mays
MLMPPHWRSWKNRALTASLKPPQSRLFRTSTGRKSISQDTRSHCLTSWNIEEAGEKFGYPLMVKSKRLAYDGRGNAVAKNKEELSSVVASLGGFERGLYVERWTPFVKELSVIVARSRDNSTVCYPVVETVHKENICHVVEAPADVSNKIKKLATSVAEKAIKSLEGAGVFAVELFLTEDDQILLNEVAPRPHNSGHHTIESCYTSQYEQHIRAILGLPLGDPSMKAPAAIMYNILGEDEGEAGFFLAHQLISRALTIPGTSVH

SEQ ID NO: 48624 - protein, 346 aa, Zea Mays
MHGGSYNAYTSSETTNFFFDVNVDNFEEALDRFAQFFIKPLMSQDAVLREIKAVDSEHKKNLLSDGWRMYQLQKHLASKDHPYHKFSTGSWETLETKPKARGVDIRLELLKFYKNYSANLMHLVVYGKESLDYIQGLVERMFSDIKNTDQRCFKCPSHPLSEEHLQLLVKALPIEEGDYLRIIWPITPSIQFYKEGPCHYLSHLIGHEGEGSVFHIIKELGWAMNLMAGESTDSNEYSFFSVSIRLTDAGHEHMEDIVGLIFKYLHLLKVDGVHEWIFNELEAINEMEFHYQDKVDPISYVMRTVSTMRLFPPEEWLVGAALPSKYAPQRINMILDQLSPERCYAP

SEQ ID NO: 48625 - protein, 349 aa, Zea Mays
MATAVAATAAAAGGSNVEFIRARSDKREYRRVVLANALEILLISDPDTDKAAACMEVEVGSFSDPEGLEGLAHFLEHMLFYASEKYPGEHEYTKYITEHGGSYNAYTSSETTNFFFDVNVDNFEEALDRFAQFFIKPLMSQDAVLREIKAVDSEHKKNLLSDGWRMYQLQKHLASKDHPYHKFSTGSWETLETKPKARGVDIRLELLKFYKNYSANLMHLVVYGKESLDYIQGLVERMFSDIKNTDQRCFKCPSHPLSEEHLQLLVKALPIEEGDYLRIIWPITPSIQFYKEGPCHYLSHLIGHEGEGSVFHIIKELGWAMNLMAGESTDSNEYSFFSVSIRLTDAGHA

SEQ ID NO: 48626 - protein, 318 aa, Zea Mays
MGGHTAAVSCVAFSAFGEKGKFLISGGNDASVKLWDWSKGFYSETNSKVDLVLDIDVKKKSETLSGCKLLLYPLEQEEEEGSSKLASLPAIAKKVLSYEEGIYAKLSRKWIEEGLRTVSIGRQEPGGFAAVLWRRREMGGLLLPHHRTFPNSLQASIPGPLSLHKGDRKNLHYFAPDVHLFCSLRQGFPRSSWSAVIRSEASGNAVASPGTVIKRSKEELITFFRDIQTSIAECSRKASKRTRKQPPDLFQEVRRREEQSHGGGDSGTDDVSEGPRKVKSLEDMNVAGLRELARARRMRGYSKLKKGELIDRLRGATT

SEQ ID NO: 48627 - protein, 147 aa, Zea Mays
MDVRDMSMFPDESFDCAIDKGTLDSLMCGVDAPLSAAQMILEVDRLLKPGGTFILITYGDPSVRMPHLNQSACDWKVVLYILPRPVFTGKITRRVLDPVPLTERGRLPDGFVPEDPDSHYVYVCKKMQGLTGTGSPTVNHIERQGEE

SEQ ID NO: 48628 - protein, 384 aa, Zea Mays
MAMAPPPACSLFPRVAAAAPSSVTSNSVLTSRGPGILPSPRLAFARRHLSAAWSSKAAASASVEIQDDYTDEMDAVNIAQDVTQLIGKTPMVYLNRVADGCVANIAAKLEYMGPCRSVKDRIGLSMINDAEEKGLISPDKTILVEPTTGNTGVAIASVAAARGYKLIATMPSSLDVERRILLRAFGAEIVLTDPTKGLKGAFDKAEEIVLRTPNAYMFQQFNNEANSEIHFQTTGPEIWEDTLGSVDILVASIGTGGTISGTGRYLKRMNKDIKVIGVEPAETSVISGDSPGYIPSILDVQLIDEVVKVSTAEAVDSARELALKEGLLVGISSGAAAIAAINVGKRPENAGKLIAVIFPSFGERYISTILFRPIYDSVRRMRKR

SEQ ID NO: 48629 - protein, 623 aa, Zea Mays
MEASAGSSPPHSQENPPEHGGDMGGAPAEEIGGEAADDFMFAEDTFPSLPDFPCLSSPSSSTFSSNSSSNSSSAYTNTAGRAGGEPSEPASAGEGFDALDDIDQLLDFASLSMPWDSEPFPGVSMMLENAMSAPPQPVGDGMSEEKAVPEGTTGGEEACMDASEGEELPRFFMEWLTSNRENISAEDLRGIRLRRSTIEAAAARLGGGRQGTMQLLKLILTWVQNHHLQRKRPRDVMEEEAGLHVQLPSPVANPPGYEFPAGGQDMAAGGGTSWMPHQQAFTPPAAYGGDAVYPSAAGQQYSFHQGPSTSSVVVNSQPFSPPPVGDMHGANMAWPQQYVPFPPPGASTGSYPMPQPFSPGFGGQYAGAGAGHLSVAPQRMAGVEASATKEARKKRMARQRRLSCLQQQRSQQLSLGQIQASVHLQEPSPRSTHSGPVTPSAGGWGFWSPSSQQQVQNPLSKSNSSRAPPPSLEAAAVAPQTKPAPAGARQDDIHHRLAAASDKRQGAKADKNLRFLLQKVLKQSDVGSLGRIVLPKKEAEVHLPELKTRDGISIPMEDIGTSRVWNMRYRFWPNNKSRMYLLENTGEFVRSNELQEGDFIVIYSDVKSGKYVCSSIADYFLAT

SEQ ID NO: 48630 - protein, 297 aa, Zea Mays
MAPSCYDAAASMLLCAEEHSSILWYDEEEEELEAVGRRRGRSPGYGDDFGADLFPPQSEECVAGLVERERDHMPGPCYGDRLRGGGGCLCVRREAVDWIWKAYTHHRFRPLTAYLAVNYLDRFLSLSEVPDCKDWMTQLLAVACVSLAAKMEETAVPQCLDLQEVGDARYVFEAKTVQRMELLVLTTLNWRMHAVTPFSYVDYFLNKLNNGGSTAPRSCWLLQSAELILRAARGTGCVGFRPSEIAAAVAAAVAGDVDDADGVENACCAHVDKVRSALKAAKRRHACGMRCELGSVV

SEQ ID NO: 48631 - protein, 199 aa, Zea Mays
MLIGLVIISFGPSYSYTLLKLLYGERHSDGEAPVILRYYCLYIISLAMNGTSEAFLHAVANENQLKQSNDMLLLFSVIYIILNVVLIKSSGAVGLIAANAINMLLRISYSAVFIKDYFKGSFSFRRCVPAGWGILLISGLTTVFSERVFLNKTRFKQTVPIHIAIGIMCLSIALLEIYRGEKQFLMQIIRTLKHNDKSQ

SEQ ID NO: 48632 - protein, 391 aa, Zea Mays
MGIVEAWMREKPIRTFLARLAQRRAAAAAAFLASPSATTVIDGEGGSDGSIPQLSSVANSVVSRCSRILALSIENLQRSFETDFPHSCNEANTYARDLLEYCCHKALHEVTTRPDYLADKNLRRLMFDMMLAWETPGAQDVSVDNGSIVRDSLEIEDEDEGSIFYANSTRLAAQVDDKKTVGLSAFARIAPSCPIIADLVTVRNLFDALTSSSGGRLHFLVYDKYLKSLDRELRSVKGIMQSSLASSFHLDAGECILAIDGDKPIQPVLQHIGISAWPGRLVLTTHALYFQSIRVGYGDKIVKYDLSTDSNQVIKRDLTGPLGVRLFDKAVMYKSSTLTEPIYFDFFELGGPSRRDYWLAITREVLQSIECRRTILYHFLCMLSLEWVFFC

SEQ ID NO: 48633 - protein, 459 aa, Zea Mays
METSPFNRYCNILEYQHGQSIRVGYGDKIVKYDLSTDSNQVIKRDLTGPLGVRLFDKAVMYKSSTLTEPIYFDFFELGGPSRRDYWLAITREVLQVNRFIRKFNLGDVQKAEALSKAILGILRYSAVKEAFHIAPSHFKTTLTFSLAEKLPKGDMVLEALYNNYFQLLDSSLRHLAIDSAVDRMSENHSIPFSLYALSRMGFLLLKTNDKSEKEMSFCAVCFGVTKSLEAALEESICYSERIESARATVDQVKVEGVDANLALMQELLFPLIQAGKIVYSLSQWEDPLKSLLFLAFMLYAIQRGLISYIAPFVFLTFAIIMLWHKYIGDGKLLEVLEVKPPPSKNAVEQILTLQEAISKLENFLQSANITLLKFRSVLFACVPKATEVVAAVLIVAAAFLVFLPSRPLIQMLVLEMYTREMPLRKQNTEKFRRRIREWWARIPAAPVQMIRPNESKKKR

SEQ ID NO: 48634 - protein, 606 aa, Zea Mays
MFDMMLAWETPGAQDVSVDNGSIVRDSLEIEDEDEGSIFYANSTRLAAQVDDKKTVGLSAFARIAPSCPIIADLVTVRNLFDALTSSSGGRLHFLVYDKYLKSLDRELRSVKGIMQSSLASSFHLDAGECILAIDGDKPIQPVLQHIGISAWPGRLVLTTHALYFQSIRVGYGDKIVKYDLSTDSNQVIKRDLTGPLGVRLFDKAVMYKSSTLTEPIYFDFFELGGPSRRDYWLAITREVLQVNRFIRKFNLGDVQKAEALSKAILGILRYSAVKEAFHIAPSHFKTTLTFSLAEKLPKGDMVLEALYNNYFQLLDSSLRHLAIDSAVDRMSENHSIPFSLYALSRMGFLLLKTNDKSEKEMSFCAVCFGVTKSLEAALEESICYSERIESARATVDQVKVEGVDANLALMQELLFPLIQAGKIVYSLSQWEDPLKSLLFLAFMLYAIQRGLISYIAPFVFLTFAIIMLWHKYIGDGKLLEVLEVKPPPSKNAVEQILTLQEAISKLENFLQSANITLLKFRSVLFACVPKATEVVAAVLIVAAAFLVFLPSRPLIQMLVLEMYTREMPLRKQNTEKFRRRIREWWARIPAAPVQMIRPNESKKKR

SEQ ID NO: 48635 - protein, 200 aa, Zea Mays
MPSHGDLDRQIAQLRDCKYLPEAEVKALCEQAKAILMEEWNVQPVRCPVTVCGDIHGQFYDLIELFRIGGDAPDTNYLFMGDYVDRGYYSVETVSLLVALKVRYRDRITILRGNHESRQITQVYGFYDECLRKYGNANVWKYFTDLFDFLPLTALIENQVFCLHGGLSPSLDTLDNIRSLDRVQEVFIRAMSGNCRILPN

SEQ ID NO: 48636 - protein, 73 aa, Zea Mays
MILYWRDLKVAVIYAVLFCFLMVSCYAALYLKWFRLSAMFVTFGILLPVSLKISRHRRLKRKRERRLLLPLSM

SEQ ID NO: 48637 - protein, 412 aa, Zea Mays
MDGGAGAGRRSVPSSSGFRRRVPPAENGHGHDAPPPSRRSSASLSRGHSTAAEKGKAIAAAVEGVEKHWGTAVSGPNNFIETLRERMFRPSLSTIISENSKVVTVVPSDTVLTASKKMLELKMSSAVVAIESKPGGILTSRDILMRVIAQNLPPESTTVEKVMTQCPECASVDTPILDALHTMHDGKFLHLPVLDRDGNVVTVVDVLHITHAAIATVGNSGAAGSESTSAMMQRFWDSAMSIGPLDDDDDSTRSEGSTKVASEAADIGRSALFPASALSNTFGFKIQDKQGRMHRFNCETSSLTDLITSILQRVGDDIDRKHLPQILYEDEDHDKVILSSDSDLIAAVDHARQIGWKSLRLHLDYARRKRGDGSSDFEYAGKDAWASAYSAVAAGAALVAGLGVMAYLKRSG

SEQ ID NO: 48638 - protein, 450 aa, Zea Mays
MFASPWQLVIGDKHQRLCVTPIAVACSSSVKFSVKGFNIVQPTTKLLCVFGDKYLIQEETQMLLEDSTVQQGPQCLTFSCSFSCTSGRGFIEVEDYDQSSLCVPFVVADKDVCSEIRMLEHGLNLISFDETSERIDDLMAYRNRSLHFLHEIGWLLQRSHVRATSEQPQYCPDRFPVERFRWLLSFAVDQEWCAVLRKLLNTMFQGDIDLDVPSPIEFALGENVLLTAVKKRSKPLVEFLLRYTATDYAPVGSGAGAPVQFLFTPAMTGLSNITPLHIAATISDATGVLDALTDDPRQLGIKAWKNARDATGFTPEEYARKRGHISYIQLVQDKIDRRVSRAHVSVTIPSTIDTAGKHASRLKPADQITFGVEKKQRGMNQTLSCRQCVQQVQQLAFHSRTNRFLSNRPAMLSLVAIAAVCVCVGLIMKSLPQVGGMRPFLWDKIRWGPN

SEQ ID NO: 48639 - protein, 153 aa, Zea Mays
MLIPCRSIPGHGGTGENGPDGGVQGSILDDCAPWSSLLRAFQRSRLACGQEIQYVRRADCLRGLWRISPLVVWAWLVSERRRSFSLHSIHDHHGYLASSSCELAPLVYRWPQVSQFAALVRAFPWSCRLHRPLLDSRGGGLPEEELQVLTQAA

SEQ ID NO: 48640 - protein, 158 aa, Zea Mays
MGRRKMSAAAPPSRSWSNVGGSVIPELLAKHKMDLENLTLTKHPIRTLHFFLLAMLQYLKRLATYILRKSGLFFLLIVLVVASGILLSISDGLHKKHVQEFLNYAKFVLWWISLGVASSIGLDTAGSSSLGHWDCTWRASPLFYITSSSLIRKQVKSC

SEQ ID NO: 48641 - protein, 432 aa, Zea Mays
MREILHIQGGQCGNQIGSKFWEVVCDEHGIDPTGRYVGTSDLQLERVNVYYNEASCGRFVPRAVLMDLEPGTMDSVRTGPYGQIFRPDNFVFGQSGAGNNWAKGHYTEGAELIDSVLDVVRKEAENCDCLQGFQVCHSLGGGTGSGMGTLLISKIREEYPDRMMLTFSVFPSPKVSDTVVEPYNATLSVHQLVENADECMVLDNEALYDICFRTLKLTTPSFGDLNHLISATMSGVTCCLRFPGQLNSDLRKLAVNLIPFPRLHFFMVGFAPLTSRGSQQYRALTVPELTQQMWDAKNMMCAADPRHGRYLTASAMFRGKMSTKEVDEQMINVQNKNSSYFVEWIPNNVKSSVCDIPPRGLSMASTFIGNSTSIQEMRKAFLHWYTGEGMDEMEFTEAESNMNDLVSEYQQYQDATADEEAEYEDEEAIQDE

SEQ ID NO: 48642 - protein, 284 aa, Zea Mays
MANAADDLDLLLSLGEAVPETPPASPRTADVPVCDGAFTPPRTAPPGGTDMSVFRDAVKDYLEAAPETTSPLANRPKRPKATEILVDKYSGLRIKHLTLSPLEISNRFADIRFVRITALKNSVGSDRFSGCWATAGVLLDKGVQRVSAKGSSYSIWKMGALDETDVSLFLFGDAHVHYSGAAVGSVFAVFNGNVRMDNGGKGFSMSVASVGQMLKMGVASDFGLCKGKRKDGVACTMAINKSKGSYCKFHSSKTSQKYTTGRVELKGGTTQSKKFFATGESNVN

SEQ ID NO: 48643 - protein, 63 aa, Zea Mays
MYLQYYINEKGDKVYTTKESPLGVPTQSAHPARFSPDDKYSRQRYLLKKRFGLLPTQNPGPKY

SEQ ID NO: 48644 - protein, 298 aa, Zea Mays
MKDENGNKMVNQYVHLGKIGSGSYGKVVLYRNIKDGKLYAVKVLNKPYMMKVHVVHTKTAMTDVLREVSIMKMLNHPNIVNLVEVIDDPNMDKFYMVLEYVEGKMVCDNGLEEATARFFLRDIISGLLYLHSHNVIHGDIKPDNLLVTSTGNVKIGDFSVSQVFEDDDDMLWRSPGTPVFTAPECCQGSAYHGRASDTWAVGVTLYCMVSGHYPFLGDTLQETYDKIANDPVELPGDVNPQLADLLLRLLCKDPGDRITLRAAAEHPWVAGDEGPVPEFICRCGFGRRKRNDVREEVQ

SEQ ID NO: 48645 - protein, 415 aa, Zea Mays
MSINLPSEHVDVNIHPTKKEVSLLNQERVIETIKNTIEEKLRNCNTTRIFQTQAVNSALTQVYTQKDKGTEVKMAPGVKSQKAPVSQMVRTDPRNPSGSLHAYWHGQSSKLENKYDLVSVRNVVRSRRNPKDAGDLSSRHELLMEIDSHCHPGLLEVIKNCTYVGLADEVSALIQYNTHLYLVNVVNVSKELMYQQALCRFGNFNAIQLSEPAPLQELLLMALKDDESIGDENDEEKLEIAEANSKILKENAEMINEYFSIHVDHDGNLTRLPVVLDQYTPDMDRLPEFVLTMGNDVTWDDEKECFRTAAAAIGNFYALHPPILPNPSGSGVQVYKKNKACMASGEHVDSTDEDDIDHELLAEAETAWSQREWTIQHVLFPSMRLFLKPPKSMATDGTFVQIASLEKLYRIFERC

SEQ ID NO: 48646 - protein, 255 aa, Zea Mays
MALPKPRPPTPTASAATGTSSSRIDSPSLKAALAMALIHYNRLPGKANATAGTSPPSLLHWKRKAKDRKREILRLREELKVLQDGVRGEEMEPPVASCRCHFFDGCRDLRPQQGGGGGEHWVDEVLRRRFLRLVRWKEKRRRVDRSLPSSSLIDFNSEDEMQQLSMSTDFLVELSDGIFAKSEAGHSFATFSHQAVDFILATLKNILSSEREKDLVGEIIDSLVTRLMKRMCTVPEKLVTSDSGFSYLSSSYLIT

SEQ ID NO: 48647 - protein, 304 aa, Zea Mays
MAENTHGSGRHVLGDLTNVICKRAATSDLEKSTGGIKIRRIEKTGTRKEYDANAKASSIGKGIVFGHLFDDVAREKFQSHSIFQNSRVQHIAAEAAGLLSKEANDSKNHYASIGPLDLSDKEQDSSLESEDDYDDEDNDETNGELLHHFFSSELANKMSTNDGECLTQEEIVGSSGNQKPLSSLDATTGGDLPISSAQHASVRTGGLEEAVAPKSCACSFCLKAAFMWMDLHYQDARSRLSVLKKSIKFARSLEEKCRGNEYAANVAGYESKRAVGVEFELSQQQRSLFLYTENALVLAINMHL

SEQ ID NO: 48648 - protein, 167 aa, Zea Mays
MQLQHGPRPGVAGAARPRSSLPRRPSLPRRRRSSSSTTRTTRTALVVLVAAATRDGARKTTASASRATAADVVRQFYDGVNRRDLAAVEPLIAEGCVYEDLVFPRPFVGRERVVGFFGEFMGTISPDLQFVIDDISAEDSAAVGVTWHLGMVETAWSRPPSPGIWHW

SEQ ID NO: 48649 - protein, 333 aa, Zea Mays
MAGPMEREGRDAAEKPLLVRVGGSGGSQGGSASSSSVAVVVGCTAIAVAGSFEFGMSIGYSSPTQLGIMRDLRLSLAEAMAISDVLCALGYLLIGFSQSYWWLDIGRVLIGCGIGILSYVVPVYISEITPKDLRGGFATVNQFMICCGGSLAFVLGTFIAWRTLAIVGVVPCLVQLVGLLLIPESPRWLARFGHPGAFTGALQTLRGHGTDISEEASEIKVFTEKLQRLPKSKMLDLFQKEYIRAVIAGVGLMALQQLGGVNGVLFYASEVFVSAGFSSGNTGTVAMAVVQVPMVGLGVLLMDKAGRRPLLMISAAGTCVGCLLVGLSFLSKV

SEQ ID NO: 48650 - protein, 569 aa, Zea Mays
MTMPASSPSVGSACDPPPPPPPPPPRAMKRELAFALQSLSEISASHGRTRSGRPISSLPDPSASASLKRRKRSDPPAPAPAPAPAPAADLVSPPTPPIDAEPPNQPLRDIIQPLHGSNPPTASDHRFDSNADQEVLAMEVIAKPNLPAEEDIAADDSAMEVTAKSNVAAADGVSKPNVSAEDTASKSNVAATVAVAPTLLETAIAAGNDQCDTSNSNGENLQQQAVENVLVSTTMLAEDTVTPAAAAGLKPARRFTRSLLKNNKPDKEESASCESQATPDGSKDASVGFTLLLEKPQRRFTRSLLKTKVESSLVGSDDVLDSASDSPPSVKKMEMKMSKKVACLTKHPGNIRELLNTGMLEGMPVMYIIPHSKKAVLKGVITGCNIRCFCLSCNGAKAISAYYFEQHAGSTKKHPADYIYLGNGNSLRDVLRASDRSPLEALEETIRSSIDPVVKRSRINCLNCNELVLPSSHENVLCQVCLESKQPQDPLTASYTCNGSSSLSRSSKEALLRNISSGKKGGSAGKVTNKDNRLHKLVFNVLLDGTEVAYYVDGQRKVDGYIKDHRIYC

SEQ ID NO: 48651 - protein, 554 aa, Zea Mays
MAPRSPLEALEETIRSSIDPVVKRSRINCLNCNELVLPSSHENVLCQVCLESKQPQDPLTASYTCNGSSSLSRSSKEALLRNISSGKKGGSAGKVTNKDNRLHKLVFNVLLDGTEVAYYVDGQRKVDGYIKDHRIYCNHCNRVVSPSAFEAHAGEGSRRKPYDNIFTSNGVSLHELAMKISKDMELSERETDDLCRECGQGGDIFPCKICPRSFHPACVGLSKVPAEWYCDSCRNLVQKEKALAKNKNAKAAGRQAGVDSIEQIMKRAIRIVPISDDLGGCALCKQKDFNNAVFDERTVILCDQCEKEYHVGCLQSQWQVELKELPEEEWFCCSSCSETRSSLDKIISDGAQLLADPDLEIIKKKHETRGLCMDTSKDLKWQLLSGKRATEDGSILLSAAVPIFHQSFDPIREALTGRDLIPEMVNGRGPKEGMPGQDYSGMYCALLTVGSTVVSAALLRVMGGDVAELPLVATSQDVQGLGYFQALFSCIERVLVSLKIKHFVLPAAHEAEGIWMNKFGFSRISPEELEAYLNGAHLTIFHGTSYMYKAVPVS

SEQ ID NO: 48652 - protein, 425 aa, Zea Mays
MTGTVSKLAAPRPAAPPLRPASLRTAALAFAPSARRVRVSVAGRARSPIIAMASAKEGNGAPTKRTALHDLYELQGLSPWYDNLCRPVTDLLPIIASGVRGVTSNPTAISSSSAYDDQFKQLISAGKDAESAYWELVIKDIQDACKLFEPIYDETDGADGYVSVEVSPRLANDTQGTVEAAKWLHKVVNRPNVYIKIPATAECVPSIQEVIANGISVNVTLIFSIARYEAVIDAYLDGLEASGLSDLSRVTSVASFFVSRVDTLIDKMLDKIGTPEALALRGKAAVAQAKLANRLYQKKFSGPRWEALAKKGAKKQRLLWASTGVKNPAYPDTLYVDSLIGPDTVNTMPDQALQAFIDHGTVSRTVDANVSEAEGVYSALEKLGIDWEEVGKQLELEGVDSFKKSFDSLLVSLQEKGNSLKMASV

SEQ ID NO: 48653 - protein, 179 aa, Zea Mays
MLHSACIDEKGTLFIFGQKTEKGFGRPNEEFRPNIVEEIPFSEEVACGGYHTCVVTDSGDLYSWGSNENGCLGLGGTDMVRSPEILKSSLFKLPVSKVSCGWKHTAVVSGDDIYTWGWGGANGTFFEEGHSSGGQLGHGNDVDYFEPMMVPFGTNARAVHVSCGFNHTGAIYECSEDFD

SEQ ID NO: 48654 - protein, 152 aa, Zea Mays
MKLLPTGRKSSLAIFTYSSLVGMTTYFLHYLSGMLRSVLVEIGIAEDMHNPLGIFVLVSVILAGAWFGYWGVRKFVLAEDGSVDEGVAYFVEWAILIVSAVMILQSSLDYLFAFTTLVLCGIIKVIARIEGKSKVLRYIFGYDQLSSLIGTF

SEQ ID NO: 48655 - protein, 505 aa, Zea Mays
MQHRRKPASAAAPPAAKQPAARRPTARLSLAGLVVSIFLVATFLYNEDVVKAASGSSSSATTADAAEVGVSGRARSPDLRVLQEAAHQGVEAEEREVGDRTEAEQKQKPLTLPIPIPVVALAEEELVENTKGRQKQQQQEEEQTQKPPPPPPPPPQVAGCDLYRGRWTFDAAGEQAPLYRESECEFLTEQVTCMRNGRRDDSYQKWRWQPDGCDLPRYDARLLLERLRNKRLMFVGDSLNRNQWESMVCLVQSVVPWGHKTLHKFVNNGSLNVFTAHDYNATVEFYWAPFLVESNSDDPQAHSVMNRVIAWRAIAKHAKNWKGVDYLVFNSYIWWLNTFEMKVIRRHQHQLEKEEEGVRWSKYALVDRPVAYREVLKTWARPWAWGNDGGIKCAMETQPISNNRTGRLDIGTDWRLHGVARGVLARYLRRVPVHFVDITGLSELRKDAHTSVHTLRQGKLLTPEQQADPKTYADCIHWCLPGLPDTWNHFLYAHILSLSSSAQDH

SEQ ID NO: 48656 - protein, 301 aa, Zea Mays
MAQRRLLGTAPAPAGDAASHGSGSSPDAMRIMVGVLVTVIVCTLLYCVYCWRWRKRNGETALCCHPEIPAGQPMAAVELGPAAHGPRLHPRCHRQLLQGQQARRGRLRPRLQRRAERRLRDRREASVSAVAAGRGGVPERGGAHRQAAAPQPSAAAGLVRRARGEAAGVRVPPQPQPRRLPLRSEQECAAWVEHPAQRDPGHRPRPAVPPRGLAAEGGPPGPQGQQRAARPQDDPDVRPTMSNVLLMLISDHTKLPEPAMPPLFARLRNISLLAPPLTTKTESTTSPLSINDVSITMIEPR

SEQ ID NO: 48657 - protein, 259 aa, Zea Mays
MIPALLFSHPEIPAGQPMAAVELGPAAHGPRLHPRCHRQLLQGQQARRGRLRPRLQGVLSGGSEIAVKRLSARSRQGAAEFRNEVELIAKLQHRNLVRLLGWCAEREEKLLVYEYLPNRSLDAFLFDPSKSAQLGWSTRHNVILGIARGLLYLHEDSLLKVVHRDLKASNVLLDHKMSPKISDFGMAKIFEDDSDAINTGRVVGTYGYMAPEFALDGVFSVKSDVFSFGVLLLEILSGQRNGALYLEEHQQSLIQDVPF

SEQ ID NO: 48658 - protein, 270 aa, Zea Mays
MPSTQLNLQSMMALTNHSVQELLYATGVVPGKVIKYVVAARKARYCSEKHQALHWRTGHKNDCLQIISSAASNSVLPAVGIVPASISWPEFEIKIDYEGTFDSDSGDENNSKSLVMQRHGKLDAMMQSWMDHFEADADNKCWASFQERVSRAPNQVLRYCREPNAKPLWALSFGCPSDADIPSCSYCRGPLCYEFQVMPQLLYFFGVGNQPDSLDWATIVVYTCQGSCDQTVSYKEEFAWVQLYPTTTTRRELTGIIGKCIPPLGTGILR

SEQ ID NO: 48659 - protein, 73 aa, Zea Mays
MLHFSSDSSEALAFCGICRFFCLFSWIRGFIGARCTDEQGPFCLDWCCWRSAMCSCVDKRPGVLDMPLRRLRA

SEQ ID NO: 48660 - protein, 756 aa, Zea Mays
MLGLCSQIMMSLVCKRLYQTPRSSRNGATKLKLLSSRMAMKITSVIPALDSTTPIFASSFTMELIKKRLKEFGIFLSSRLKVLRIKKRFQAGPFEVEPIRVTHSIPDCCGLVLRCGDGIIFHTGDWKIDESPVDGKKFDRQALEELSKEGVTLMMSDSTNVLSPGRSISESVVAGSLLRHISEAKGRVITTQFASNIHRIGSIKAAADLTGRKMVFVGMSLRTYLEAAFKDGKAPLDPSTLVKVEDMDAYAPKDLLVVTTGSQGEPRAALNLASYGGSHALKLSKEDVLLYSAKVIPGNETRVMKMMNRLTDLGPKIIMGKDSGLHTSGHAYREELEEVLRIVKPQHFLPVHGELLFLKEHELLGRSTGIRHTTVIKNGEMLGVSHLRNRRVLSNGFVSLGKEDLQLMYSDGDKAFGTSTDLCVDERLRIASDGIIFVSMEIFRPQKEHGLAQSGLKGKFKITTRCLWLDNGRLLDALYKAAHAALSSCPVNCPHSHMERMVAEILRKMVRKYSGKRPDVIAVATENTTAGFSEHLDTKASGNFGPSSATSHLSRSPATSLEGSYKTHPDNPEVDAEEILPETVRTTPDDATTSSNGEALFSSDLHQPKTLEHFWESFKSPTAVKIARIVNGGDKQNFGKIGIMGQDSLIQSAPAPVKSSKRNKWKPEEIKSLIQMRGEMNEKFQSVKGRMVLWKEISDTMLNQGVSRTPAQCKSLWTSLVQKYEESKDTESMKTWPYFSAMDKILSQQGEMATKG

SEQ ID NO: 48661 - protein, 576 aa, Zea Mays
MVALASLSSLCPCGIARRRAASATSSTAFSISCCAVATPSFSGKGPQESRTPRRRLRKTEGATKSLEDSVKRKMEQFYEGADGPPLRVLPIGGLGEIGMNCMLVGNYDRYILIDAGVMFPDYDEFGVQKIIPDTTFIKKWSHKIEAVIITHGHEDHIGALPWVIPALDSTTPIFASSFTMELIKKRLKEFGIFLSSRLKVLRIKKRFQAGPFEVEPIRVTHSIPDCCGLVLRCGDGIIFHTGDWKIDESPVDGKKFDRQALEELSKEGVTLMMSDSTNVLSPGRSISESVVAGSLLRHISEAKGRVITTQFASNIHRIGSIKAAADLTGRKMVFVGMSLRTYLEAAFKDGKAPLDPSTLVKVEDMDAYAPKDLLVVTTGSQGEPRAALNLASYGGSHALKLSKEDVLLYSAKVIPGNETRVMKMMNRLTDLGPKIIMGKDSGLHTSGHAYREELEEVLRIVKPQHFLPVHGELLFLKEHELLGRSTGIRHTTVIKNGEMLGVSHLRNRRVLSNGFVSLGKEDLQLMYSDGDKAFGTSTDLCVDERLRIASDGIIFYGDLPTSEGTWVSAVRFERKI

SEQ ID NO: 48662 - protein, 328 aa, Zea Mays
MAFSFASPAASNPFQTPATPNPFQTPAPATSQAPSLSPSPFQFSFQQQPQPQQQVAPAAQPPQPQPQPQPQKLMLYTTDMKSAGYSTKWEELHAESQKALLQIEDKIRDYKDECERLDQCSRLYDSSISNANFELDASRIAQVENLHQHVESMKTEYLNEQRRTGNGSDPFLEANRREAAKQEAAARRVHPTLHLPTPAQPTAQIAAPATSQPQQPSFPSAATSSSAFSTFSTPASAPSSSSLFATPTTPAPSGNLFGAPGSAQLTTPFGTPSTPTLASTPAPGFGTSATSNLGGTSLFSTPFGGGATASGSSFGGASKGRSKPRGRR

SEQ ID NO: 48663 - protein, 115 aa, Zea Mays
MKIAWGKKSKVKKQSVVVSTIPGLPFGAGSDNDEVETEEKSDANTNCPGTKPVETAELLQSQGDKLAEEGKYHEALAKWEAALILMPDNAILHEQKAQVLLEVGDAWRALTAATT

SEQ ID NO: 48664 - protein, 139 aa, Zea Mays
MSPTLPPSSRCLGLSSPSPSYRIVLRMRCSVRVPSLSIRRDPQQREGGVPDRPHLQVRQGHRALPLQEEDQSPDVHGVVGEVPEDPEGGTAGVPAVPRAGDQVPGRTELQGCQVMVISRPLGSRGGLKHPSFASFDVGC

SEQ ID NO: 48665 - protein, 1078 aa, Zea Mays
MPSKWQVWGQPDGSIVWLPVSDAPPNPPRPGPLRPAPRHPPLPDEAPIEETLCPDTAGGCRISSMADLLLQAREQLIEGDAMDGLAQSVNTAGLFSTGSGRPLAVSQRAVRRASALVGEEVDEATDNNNKKRSGVHKDNFFPMFQSGSGKAVLLNKDSIQKARAVLEENVENAAGAKQPMFHTSTGRSVLVSKSSIDKARAVLGGRMIAHEGDVGGVDGMEQFPVSQAGSGRAVSIRNVEGPGRPANQSLIFQTSSGRPVLISKRYVERSRALLMDEDVKNIRQWDTGCQLPIFQTGLGRPVAVKHSSIKKASTILGDGDVKRSGNGHTGVCTTPFQFETPKSVLMSSSLIINGMTVTPEENTSVRAEKCFNDDGQLPLFQTGSGRSVTASKGSFKRASSVLEPRNIAKELEDESHLNDGYATSIFKTGLGKSILPTENSRERAQFVLEAKEAVKQVISDIGAGFGENPMFHSGKQQFSPENDTSRPRASTPMEQGKFATKGYEDCGSPLPMFQTGSGKSVLVCESSMQKARAVLEEEEHYKLVKMDKKIAASASPLKTSHARTVNISSTGVSRAATLLGLEENTLSTQFFGHVSDKLGTEITVKRGNPEHMLDVASAHAISSGTHKGFIYPTENPTHMDKHQQFGFSKSSTSYVGEHSIRFSTAGGRSMAISVDALQRAKSLLGDSDLVVSPNGSIGRSLASAIENLPKPTISPKGDVSNLSYGTRAIGYAVPDTPVTKTSANQFHMGREYRPVNEIPKVPKPPSRCLSEGDNASNSKDKTQWHHMPAGSGNTDCLANGKRIIGGRNSVSPFKRPRSSRWVSNHYKWIVWKLASLERCYPTRVAGKFLTVDNVLEELKYRYSLDASLDVALLEQLEKRKLFVGQKLRIWGASLCGWSGPVSFHEVSGVVKLVVHINGTYRARWNDALGFCKHVGLPLAFRCIKVSGGRVPRTLVGITRIYPILYRERLPDGRFVVRSERMERKALELYHQRVSKITEDILFEQQENCDSTDDNEEGATICKMLEHAAEPEFILAGMTPEQLKCFSSYIEKQKVSSLASVGSYLHGKLHMLCRYAADC

SEQ ID NO: 48666 - protein, 331 aa, Zea Mays
MAKRPRHAGNGAGRSQLASFERKLHDLILNGGLAGPGASAEDIANTLRIHHPKFRRLKHGPFFASVRRALTSIPIPSSSDDDGSSASRCRHDAHTTSSASVSDAAAHPSPPAPAFDVTKSTLFSHYAAQTRKRNQNQQLEIEVTAEKPRRLITAEGGGGGDAKPEAVPAAEGFCREDKGPRFADLGGMEAVIEELMMEVVVPLCHPKLPHRLGVRPVAGLLLHGPPGCGKTTLAHAIAIETGVLFYKISAPEVVSGVSGASEENIRGLFQKAYRTAPSIVFIDEIDAIASKRENLQREMERRIVTQLMTCMDQYHQNIGSDTGNLDAESSE

SEQ ID NO: 48667 - protein, 618 aa, Zea Mays
MDTSSEGKIQVPINPQIAPGFSMVIPKNEKKHSGLDLSKKPAYVSVSMPTNDAKATQVGLDARLPFSLRNYATRNLNRCKNDAQREACRSIMNEITKKAFAEGTLLTKNWDTEPLFPLPESTVGMTGTSVNNLSPFSSVSTPRKRVKSRWEPVVDENVTNKVEQIAKGLIGSNVHSTSDPKNRMGSSWDHRKFLQSSQAPSNKVNQRSAKKQKMGSNLSQIQNGNASSDSEKEHDLTKYYASATALANSPEEKKRREHRSKRFEKSKDSSFKSRNVSANKDAMTNLRARRAILSFRTRTYEGGTLAVEDMDWDALTVKGTCQEIEKRYLRLTEAPDPAKIRPEDVLEKALAMVETSQKNYLYKCDQLKSIRQDLTVQRIQNELTIKVYETHARLAMQAGDLHEFNQCQSQLKRLYAQGIKGCYFEFSAYNLLCVMLHSNNKRDLLSSMASLSKEAKQDAAVKHALAVHASVLSGNYVLFFKLYKKAPNLNSCLMDLYVERMRFEAMKCMSRSYRPTVPVGYVAQILGFMRTDTGCATNGDDGLEECEKWLKAHGIVLSEGNSGELQIDMKASSSTLYMPEPENAVAHGDASLAVDDFLARTDGHLKRCSSDEPTVDTP

SEQ ID NO: 48668 - protein, 386 aa, Zea Mays
MDSTPAPEAAPGASSSATAAAEDLAGGVAAMTLDERFALLRGIGEECIQEDELRRLLENKPVPICYDGFEPSGRMHIAQGIVKTINVNKMVRAGCKVKIWIADWFAQLNNKMGGDLKKIQTVGRYMIEIWKAAGMNLDGVEFLWSSEEINRRAHEYWPIVMDIARKNNVKRITRCCQIMGRSDQDDLTAAQIFYPCMQCADIFFLKADICQLGMDQRKVNVLAREYCDYIKRKNKPIILSHHMLPGFKEGQEKMSKSDPSSAIFMEDDEAQVNVKIKQAFCPPKIVEGNPCLEYIKYIVFPWFGRFEVARKESNGGNKTFTSMDELISDYETGALHPADVKPALAKAINEILQPVRDHFNNNNEAKVLLNTVKSNQLRSGRCSSLG

SEQ ID NO: 48669 - protein, 70 aa, Zea Mays
MCMGATLSCSCSAAVLVCPRIHVHQVVVEFHIPAYIISDACPYIYNPLVGSSEVLPPRHGSDVLRSCWPI

SEQ ID NO: 48670 - protein, 167 aa, Zea Mays
MRPAAAAATATTAALRLRAASLSPSLAASLSPSLAALLSHRRSSLILPPLRRICSLAPPHSSAAPNSQPPPQLLSPIMDAQFVLFRAQLDESSTLRDRIRAVVAEIESASRVATAALLLVHQPVPLADVLVKAKAQVEVIKGLYARLAEVLKECPGQYYSVLWGVWP

SEQ ID NO: 48671 - protein, 97 aa, Zea Mays
MTSFCARSVTRRMTSFTAPEGVGGLAGRRTIPAVPVPLPPPRPAGQRARKKMTRLHQSITLSEAISVENKGKPRPLQPEQEAPSGFVLPDLNLPADV

SEQ ID NO: 48672 - protein, 521 aa, Zea Mays
MGSTTMSPPSFPVVLLLLLLATIAAAAGSNMDEEVVDDLQYLIDNSDDIPTNDPDGWPEGDYDDDDLLFQDQDQDLTGHQPEIDETHVVVLAAANFSSFLASSHHVMVEFYAPWCGHCQELAPDYAAAAAHLAAHHHQAHLALAKVDATEETDLAQKYDVQGFPTILFFIDGVPRGYNGARTKEAIVDWINKKLGPAVQNVTSVDEAQSILTGDDKAVLAFLDTLSGAHSDELAAASRLEDSINFYQTSTPDVAKLFHIDAAAKRPSVVLLKKEEEKLTFYDGEFKASAIAGFVSANKLPLVTTLTQETSPSIFGNPIKKQILLFAVASESTKFLPIFKEAAKPFKGKLLFVFVERDSEEVGEPVADYFGITGQETTVLAYTGNEDARKFFLDGEVSLEAIKDFAEGFLEDKLTPFYKSEPVPESNDGDVKIVVGKNLDLIVFDETKDVLLEIYAPWCGHCQSLEPTYNNLAKHLRSVDSLVVAKMDGTTNEHPRAKSDGYPTILFYPAGKKSFEPVSDYN

SEQ ID NO: 48673 - protein, 771 aa, Zea Mays
MKKIQIISTKLLQHHAFLALLSQYSLHGYSGEQELNNLVLNDLYYLIRGELEGRQISSGPFQELLSFLLGFRIFEHNPLEQLQNTYLMANDKFLFDVEHIHDELGVDLWTDSDKRSKEVAKKMLDIMSKANLMKYYADAKLSALMSFLKFLSVYKGAISNKNLDLPDGGISVAATQSAIKCACKSFESTVDSLLPQAHTDEVLFPLLSGQVELLLTLARILFHQAKNKKSSHLCPDIVLLMKTSGASTCLFVDLMPSAHALKQPVKTLLVLLLSSYEFMYSKVDIKDLPNDINIFGELALLSVSLLPILCKLAENRECSDLAVASMDLILKGSVPSNLWMPILQKHFHLQTILHKCQNGDLLSTQVILNFLLTLGRTKDGAKVLQSANIFAFLKLLLSQLSLDDSCLRNSLSAQVKDVNLWGLGLGIVASLNHCLDDDISHNNVVSNTISFLSGHVPLVSSYLSTQSATTHQSKKRALSQKSQTSLSALSLTENILILLCILAKYHFPRDTGKKEVDSELREIIIHLLAFISKGSVKTGNASKWNSSFFCPAVIKEEVALNEKPPLICSKYGWFRFAASCTLSTAGVSVSPSAALSVVRRDKTSGDSDSIRQTRFTEILAVQIYRIAFLIMKFLCSQAKEAVKRAEELEFLDLAHFPELPMPDILHGLQDQVVCIVTEIFEANGSSTLNPETEKVCQLLLVTLETSLYMELCVSQSCGIRPVLGRLEDFCKGIKAMLQAIEKHSSFEPFVRSLTEITSLLYPGLLHNNLLM

SEQ ID NO: 48674 - protein, 1292 aa, Zea Mays
MIDIAKVFCNSIFKYVRDVNNADILSKTFGLLAEMMKCAPYHVFDAAFECNIFTSQLSSPSSDWLLSGALARMLFAAYEGNGDCSSLTSSVLDFTTQVLRKGADADDIISPLIVFSIKYIMINHVNWKHKECSRWKTTLRVFELVKSCLQVKPFSSKLGGIIWEILLYDSSVHGVLWSILSVLTRLLHDSYRSNYHGLKDIEDIQLVLCNGLDIIYHILSNLPEGMQVAAARAFSALCFIAYKAQPQLMENASFTSDVSEIRRLESNISCILDEDDKNNDCLVVAVFNLLTSAARYQPAFLISLIEQSTKSTDHNASTNDRDNRVLVTSKSNARLVDQILDYIDRSIELMNRSPLVLLSILDLLKALWESGIRFLFILEKLRSSVTFWDNLSRCIRATLDISPIDNIDAIDEKFSLRYHCQGKIFEIMSHELFLQGKLLTETSNTVQDDPKGQKEHKSGPCRISVVLKWFDNAILADLVSNLSSNAYKKELHHAKVAACLCIIHLITKLSTGDTGSLSFSFMKKIQIISTKLLQHHAFLALLSQYSLHGYSGEQELNNLVLNDLYYLIRGELEGRQISSGPFQELLSFLLGFRIFEHNPLEQLQNTYLMANDKFLFDVEHIHDELGVDLWTDSDKRSKEVAKKMLDIMSKANLMKYYADAKLSALMSFLKFLSVYKGAISNKNLDLPDGGISVAATQSAIKCACKSFESTVDSLLPQAHTDEVLFPLLSGQVELLLTLARILFHQAKNKKSSHLCPDIVLLMKTSGASTCLFVDLMPSAHALKQPVKTLLVLLLSSYEFMYSKVDIKDLPNDINIFGELALLSVSLLPILCKLAENRECSDLAVASMDLILKGSVPSNLWMPILQKHFHLQTILHKCQNGDLLSTQVILNFLLTLGRTKDGAKVLQSANIFAFLKLLLSQLSLDDSCLRNSLSAQVKDVNLWGLGLGIVASLNHCLDDDISHNNVVSNTISFLSGHVPLVSSYLSTQSATTHQSKKRALSQKSQTSLSALSLTENILILLCILAKYHFPRDTGKKEVDSELREIIIHLLAFISKGSVKTGNASKWNSSFFCPAVIKEEVALNEKPPLICSKYGWFRFAASCTLSTAGVSVSPSAALSVVRRDKTSGDSDSIRQTRFTEILAVQIYRIAFLIMKFLCSQAKEAVKRAEELEFLDLAHFPELPMPDILHGLQDQVVCIVTEIFEANGSSTLNPETEKVCQLLLVTLETSLYMELCVSQSCGIRPVLGRLEDFCKGIKAMLQAIEKHSSFEPFVRSLTEITSLLYPGLLHNNLLM

SEQ ID NO: 48675 - protein, 418 aa, Zea Mays
MHACTETPTSLVHHACFTLQLHTTGRAFPRLPAAAQPQAVLLCELPHSRGGPGARCRRHPRLQERQVRARLLPVRHHHHTRRHWRRTSNTQDCDGTIIRSFTYSHLRHATRNFSDRLGGGGFGSVYKGTILGRDDDGSAVTTIAVKRLLDGARQGEKQFRAEVSSIGLIQHINLVKLVGFCCESDKRLLVYEHMVNGSLDVHLFNSNGGGGGGKDGVVVLDWSTRYQIAVGVARGLAYLHEGCRERIIHCDIKPENILLDASLVPKIADFGMAAIVPRDFSRVLTTFRGTIGYLAPEWIGGEAITEKVDAYSFGMVLLEIVSGRRNSPKVYTTNSCHVSYFPLQAITTMLHDGDVNSLVDPQLHGEFNLEEALRLCKVAFWCIQDNELDRPTMGEVVQALEGLHDVGVLYFMFISSCL

SEQ ID NO: 48676 - protein, 270 aa, Zea Mays
MNGSSGSQGHHVSGEKKQVCHVSRPILNNGPKHRPLTPMRRCRGVACVVIILSTAFLLVVYLAPITTFAVRLFSVHYSRKATSFLFGMWLSLWPFLFEKINKTKVVFSGENVPPKRRVLLFANHRTEVDWMYLWDLALRKGHLGYIKYILKSSLMKLPIFSWAFHIFEFIPVERKWEIDEAIIQNKLSKFKNPRDPIWLAVFPEGTDYTEKKCIMSQEYASEHGLPMLEHVLLPKTKGFICCLQELRSSLDAGEHPFPYSFYARMIRFLS

SEQ ID NO: 48677 - protein, 240 aa, Zea Mays
MAMAARLLRATEVASRFLSASHGFVQRAAYTAGGIVDVGQPTPQSHPELLADGEITPGITNEEYISRRKKLLEVLPEKSLAIIASADQQMMTDVVPYPFRQNGDYLYITGCTQPGGVAVLSEETGFCMFMPDTNKEDLVWQGETAGVEAAVDFFKADKAFPLSQMQKILPELIEQSKGVYHNVNTTSSYKNLDAFRRASLNNKVKDLTNYTDELRWVKSKSEIKLMRESASIVSQVNFWS

SEQ ID NO: 48678 - protein, 461 aa, Zea Mays
MAMAARLLRATEVASRFLSASHGFVQRAAYTAGGIVDVGQPTPQSHPELLADGEITPGITNEEYISRRKKLLEVLPEKSLAIIASADQQMMTDVVPYPFRQNGDYLYITGCTQPGGVAVLSEETGFCMFMPDTNKEDLVWQGETAGVEAAVDFFKADKAFPLSQMQKILPELIEQSKGVYHNVNTTSSYKNLDAFRRASLNNKVKDLTNYTDELREESQLAAKIEYECKMRGAQRMAFHPVVGGGANGSIIHYSRNDRKIRTGDLLLMDVGCEYHGYLSDLTRTWPPCGRFSPAQEELYSLILETNKECIKLCKPGTSINEIHNHSVKLLIKGFQELRILEKGKSIQYNYLNPTAIGHSLGMDIHDSMTLPKDKPLEPGVVITIEPGVYIPAAPVLNERAPSRYRGMGIRIEDEVLITDDGHEVLTASVPKEVSHLTTLMNMGRGGSAADAHGHELRAACS

SEQ ID NO: 48679 - protein, 121 aa, Zea Mays
MEQGCGTPMDVATVATDSSVNNAFPVQHFSPRHTQAMPDFARVYNFLGSIFDPETNGHLQKLKEMDPIDAETVLLLMKNLSINLTSPNFEEHRRLLSSDASSMDQKSGSSRVHLPFMITSK

SEQ ID NO: 48680 - protein, 206 aa, Zea Mays
MGISRDSMHKRQATSGKQKAWRKKRKYELGRQPANTKLSSNKTVRRVYVRGGYVKWRALQLDTCNYSWGSEALTRKTGILDVVYNASNNELVRTQTLVKSAIVQVDAAPFKQWYLTHYGVDIGRKKKVIIAKKDATEGQEGEAIVEETKKSNHWHFLLLASYILEDKELEFYMKKLQRVQFLKGWECVQEDKGIDPPNLRYQFKQQ

SEQ ID NO: 48681 - protein, 320 aa, Zea Mays
MAGPNEKAAAGGGGGERRKYPIHMEDYELYEEIGQGVSAIVYRALCKPLDEIVAVKVVDFERTNSDLNNIVREAQTMILIDHPNVVKAHCSFAKDQTLWVVMPYMAGGSCLHIMKSVHPTGFEEPIIATILREVLKGLEYLHHHGSIHRDVKAGNILVDSRGGIKLGDFGVSACLFDSGDRQRARNTFVGTPCWMAPEVMEQLHGYDFRADIWSFGITALELAHGHAPFSKYPPMKVLLMTLQNAPPGLDYERDKKFTRNFKQMVAMCLVKDPSKRPSAKKLLKQPFFKQARSTDFIARKLLEGLPGLGVRYQALKVQWF

SEQ ID NO: 48682 - protein, 281 aa, Zea Mays
MTTKDKSAVSSPDQPASLVRNASMRGMPINGSFRKDNSTESFDLECQEKHLDIVPTSSSPERKFSFSSCSSNGLLLSKESSKQQTSIHNLDKCNGGHLHVSDETSSEAAPKTHKSAEDHDDRSKPPLIRGRFRVIPGHVDSKAQPPGLQKCHSMQTISRLPSLSIPSSAEVASTIIGGSFYMQLYSILQTNMLQRDQILNAMKQVSGCAMASPGVPSMASPCIPSTSRSTSPSGVPSVDRSMLEAAQEREKELLNEVLELQWRLLCTQDEVQKLKAKAAQI

SEQ ID NO: 48683 - protein, 129 aa, Zea Mays
MVVETLAEKHFDLAFRMLHEFDLPERKKGGQLTEFLKNIRGTIDDDEWDQVIGAAINVYANKHKERPDRLIDMLISNHRKVLACVVCGRLKSAFQIAARSGSVADVQYVAHQVSYLHKFTDVCCLLIIE

SEQ ID NO: 48684 - protein, 434 aa, Zea Mays
MMQDQLILAKAYLHFASPQGSVHLVRELKLKIKEIERAISHSSGGTHVPGSVLQKIKAMELTLSKAQRTYPHCSQMTSKLRAMMHNSEELVRAHQSESSFLEQVAVRTLPKGHHCLAMQLTAEYFSLDPTKREFPKRDNIQLGGYYHYAMFSDNVLASAVVVNSTIAASKDPGRILLHIVTDALNYPAMMMWFLTNPPTPSVIQIQSLDDLKWLPGDFSSRFKLKGVRDPRYTSALNHLRFYLPEVFPSLSKVLLLDHDVVVQNDLSGLWDLDMKGKVTGAVDTCTSSEGFRQLDSLIDFSNPSVFNELDPKACAFAFGMNIFDLNEWRKQGLSTTYHRWFQLGKSEKLWKAGSLPLGQVVFYNRTLPLDHRWHVLGLGHDSSIGRDELESASVIHYSGKLKPWLEISIPKYRGYWNRYLNYDNPHLQQCNIHG

SEQ ID NO: 48685 - protein, 300 aa, Zea Mays
MWELLRKFRCNEHGREDCTMTSSVESSFHSACLIWQDPGRILLHIVTDALNYPAMMMWFLTNPPTPSVIQIQSLDDLKWLPGDFSSRFKLKGVRDPRYTSALNHLRFYLPEVFPSLSKVLLLDHDVVVQNDLSGLWDLDMKGKVTGAVDTCTSSEGFRQLDSLIDFSNPSVFNELDPKACAFAFGMNIFDLNEWRKQGLSTTYHRWFQLGKSEKLWKAGSLPLGQVVFYNRTLPLDHRWHVLGLGHDSSIGRDELESASVIHYSGKLKPWLEISIPKYRGYWNRYLNYDNPHLQQCNIHG

SEQ ID NO: 48686 - protein, 343 aa, Zea Mays
MDTAVAIRTLEATYKQSADSVAVESMIAKLTEKEGPCLKGKGRASDAARIVVLTWRSLLIMSRDWKYFWIRLVLYMLIAVSIGTIFTDIGHSLSSVMVRISAIFAFVSFVILLSASGVPAQIDEVKIYSHEEANRHSGTMVFLLGNLLSSIPFLFLVSILSSLVFYFLIGLRNEFSSLMYFVTTIFVCLLANEALMMVISYIWLETYKCTLTLVFLHVIMMLVAGYLRIRENLPYPVWTYPLSFISFHTYAVQGLVENEYVGTSFAVGQIRTIPGVQAVRGSYDISSSPNAKWVNLLVLLLMALGYRILLYLLLRLDVRKNARRLGNWRSWWSSVHSAATGAK

SEQ ID NO: 48687 - protein, 590 aa, Zea Mays
MEDEEMEKKVQQYLQRKGFRLTELALQEERNRLSTSAISDVALARSDNDPARYYDGYSRLRTWAYSSLDQYKHELLRVLYPVFIHSFMDLVAEGHMQEARSFFHTFREDHEVMHSRDLQKLEGVLSPSHLEEMELARSFRKNKFKIKLCEYSYELLLQYLQKTQALVVLGVINEHITFEVSPGQPSLISDDADVVALIGTSKDLAKQINQKEVHWGLLEDSVEERMEKALAESDKIEAESKDADAEDNKKRNAEGGKQGASLKKAKKDKLVGATGKSVRTETSMVSVAPRVKPELTLPATPVEVEQSILEDLRNRAQLNSVALPSVSFYTFLNTHNGLNCSSISHDGSLVVGGFSDSSVKVWDMSKMGQPAKISRSQGENGPSQGERISTLDEGKRTYTLFQGHSGPVYSAAFSPFGDFLLSSSSDSTIRLWSTKLNANLVCYKGHNYPVWDVQFSPVGHYFASASHDRTARIWSMDKIQPLRIMAGHLSDVDCVQWHVNCNYIATGSSDKTVRLWDVQTGECIRMFIGHRSMVLSLAMSPDGRYMASGDEDGTIMIWDLSTGRCVSPLLGHSSCVWTLAFRSIACIGIG

SEQ ID NO: 48688 - protein, 224 aa, Zea Mays
MLSHSGSSLLRDIHRELPSSGVSGGVMSLIDGSYEYYHYLHDGIDDNGWGCAYRSLQTIVSWYRLQQYSSIDVPSHREIQQVLVEIGDKDPSFIGSCEWIGAIELSFVLDKLLGVSCKVINVRSGDELPEKCRELARHFETQGTPVMIGGGVLAYTLLGVDYNGASGDCAFLILDPHYTGTDDLKKIVNGGWCGWKKSVDSKGRSFFLKDKFYNLLLPQRPNMV

SEQ ID NO: 48689 - protein, 458 aa, Zea Mays
MAGSSKKIELQNKSNDGVNTKVDASKDSDGAPSESEKNVRSKCLNGITSAKVAEQIMDNALRITDASSRRPTNLGKDLAMTEPAADRKCQSLVMENNAVKEKNPGEKSKSAVIGHADSYPSQFLETNLGKQQYRNGYKNQEFREKDIFNHSNSSAFSRYGNRRIESSGEIQFLPSRCIVGQEQHVHGKDPVFQPNGVLLPPNDHNTGESTRQARITLDSSMEGADIICSSSAREDAGASSSSHRKDSMSHPSYGFVPVPIPVGAMMPYHCGAILQPVYYPQGPLMHCNSSAINKATIHQTSGQSNYREDCGSGRPSQVDEHKQSEEKHQLHHSRQIHRESGQPVDMVRAHMDHANQSASCSRDICKGSGCTGSGEADTNANTTVALESGNESGIQNSDRSHREAALMKFRMKRKDRCFDKKVRYHSRKKLAEQRPRVKGQFVSQKLKAAMATEAETDS

SEQ ID NO: 48690 - protein, 161 aa, Zea Mays
MISAAQMVKPVSLELGGKSPLIVFDDIGDIDKAVEWTMFGIFANAGQVCSATSRLLLHEKIAKKFLDRLVAWAKNIKVSDPLEEGCRLGSVISEGQYEKIKKFISTARSEGATILYGGGRPQMLVRQCKFGKRKSLDQLSVLRSLGQRVKLWNLQMILTMV

SEQ ID NO: 48691 - protein, 348 aa, Zea Mays
MAPPQTIPRRGLFIGGAWREPCLGRRLPVVNPATEATIGDIPAGTAEDVEIAVAAARDAFSRDGGRHWSRAPGAVRANFLRAIAAKIKDRKSELALLETLDSGKPLDEASGDMDDVAACFEYYADLAEALDGKQQSPISLPMENFKSYVLKEPIGVVGLITPWNYPLLMATWKVAPALAAGCTTILKPSELASVSCLELGAICMEIGLPPGVLNIITGLGPEAGAPLSSHSHVDKVAFTGSTETGKRIMISAAQMVKPVSLELGGKSPLIVFDDIGDIDKAVEWTMFGIFANAGQVCSATSRLLLHEKIAKKFLDRLVAWAKNIKVSDPLEEGCRLGSVISEGQESGQ

SEQ ID NO: 48692 - protein, 133 aa, Zea Mays
MSKRKDFSWITAKKLLPVSIFYNANVGFALASLKGVNIPMYIAIKRITPLAVLVAGCMRGKGKPPTQVILSVICTATGVLIAALGDFSFDLYGYCMALTSVFFQVVLFPCALFLQIYSITFERFLGKVLYLCN

SEQ ID NO: 48693 - protein, 375 aa, Zea Mays
MGHDHMSRIKMHMAEGSFGDRNRCQQPGCNEVVDGRVVYCKTHSGELSCQQFSHLQSGLESSAVPCTEQELHVKHEGDDRGKLKDSSGYTLGQTAQFVFPGAGMFCKNDSCSKQAHENSIYCKLHSGVSKGCMVRGCTRGAHGGTPLCIGHGGGKRCVIPGCPNAACGQGLSDRCVRHGGGRRCRFEGCAKGAQGNTDYCIRHGGGRRCKFEGCTKSAQGRTDFCIKHGGGSRCKFQGCGTSAKWGTDFCSIHRKALLGGDNAAVPEALPAASEKRRRAKKPKKAAKLSEASQENATAAAAIAGNSTQHMGGLLIAIPVANRDMLTKAVAATGQAAIASAQIVAPLSMKSPTPSGAAAATLTGREAGASREMLGL

SEQ ID NO: 48694 - protein, 73 aa, Zea Mays
MASPFSLSFPRQRWFQGGRDLMHKGTQQHFLDASVAYKRVVLNDIEYLARFGYSKEQVYLLLSCCPCEAGSLE

SEQ ID NO: 48695 - protein, 107 aa, Zea Mays
MASPFSLSFPRQRWFQGGRDLMHKGTQQVFSCTSSMVLFLANTTSVDESGKQHFLDASVAYKRVVLNDIEYLARFGYSKEQVGSRVTNDYPLSTIYVEYCLNVGGFI

SEQ ID NO: 48696 - protein, 122 aa, Zea Mays
MADDANRAAFMELQSRMIDTTAKIKQLQTQMRSKEGEKKRAYLTLEELRQLPDDTNTYKTVGKVFILEPKSVLFNEQEQKLNDSESAIASMQTTLRNSRAKWRTILGSCFNRTQDLRVRSSQ

SEQ ID NO: 48697 - protein, 433 aa, Zea Mays
MLEATAAASSPRAAAAAVAAGAAAAAVVSSPRRGGGSAHNHRRWAPAPFRACLLALWLLGFALVFLWQSTSVGRVRLYTRPPMPKRAVASLGHWAASPPVYDLREFGAVGDGRTVNTAAFESAIAAIAERGGGRLTVPAGRWLTAPFNLTSHMTLFLAAGAEILGIQDERYWPLMSPLPSYGYGREHKGPRYGSLIHGQDLKHVTITDSCENVVIKNCYISVGDDGIAIKSGWDQYGIAYGRPSANITIQNVVIRSMVSAGVSIGSEMSGGVSDVLVENVHVWDSRRGVRIKTAPGRGAYVTNVIYQNITFENVRVGIVIKTDYNEHPDEGFDPKAVPTIGNISYTSIHGHRVRVPVRIQGSAQIPVKNVTFHDMSIGIVDKKHHVFQCSFVQGQVIGYVFPVPCKNLDLYDERRGLVKQSTLQNISDIDYSF

SEQ ID NO: 48698 - protein, 277 aa, Zea Mays
MRSSNIIISNITLRDSPFWTLHTYDCKNVTISETTILAPIAGAPNTDGIDPDSCENVVIKNCYISVGDDGIAIKSGWDQYGIAYGRPSANITIQNVVIRSMVSAGVSIGSEMSGGVSDVLVENVHVWDSRRGVRIKTAPGRGAYVTNVIYQNITFENVRVGIVIKTDYNEHPDEGFDPKAVPTIGNISYTSIHGHRVRVPVRIQGSAQIPVKNVTFHDMSIGIVDKKHHVFQCSFVQGQVIGYVFPVPCKNLDLYDERRGLVKQSTLQNISDIDYSF

SEQ ID NO: 48699 - protein, 287 aa, Zea Mays
MMRRCVSALARRRRPDRTVDTMKARFQCLVNISSSIRDTDSQRCSSTCATSCATDPDVLSRETSSSEMLVDSFGRFHNYLRISLTERCNLRCQYCMPAEGVELTPKSELLSHDEIIRIADLFVTSGVNKIRLIGGEPTVRKDIEDICLHLSSLKGLKTLAMTTNGIVLSKKLPKLKECGLNALNISLDTLVPAKFEFMTRRKGHSKVLESIDAAVELGYSPVKVNCVIMRGINDDEICNFVELTRHKPINVRFIEFMPFDGNVWNVKKLVPYAEMLDKVVSGKVIKE

SEQ ID NO: 48700 - protein, 313 aa, Zea Mays
MTFGDVVKEVDKYFGKDLFERKPLIRSLIEEELFRLADEAEKKELEESEAAEAKARAEQAAKEMAQVQTVELVINEQNVLEDGRDSNTKDSLKNANDSANKKCIDGGASVEYGFNENSCYAAEGSEEHKVDDDNKNITKDGNGGKVAVAPTANTDCTLQLQGSSNVEAETTMKSNVGTLEASKDGEVRDARNGENNGTEDGGNEGIRSGNVGSNAEAEESHGHGNNERAEHTEDDKAQECSHNENSASVGILGDGDGEAREGDINAEAEQSQADGGGNSKAEDAEHNENTKTDANSSKNGTTAAVEFEYEDVD

SEQ ID NO: 48701 - protein, 407 aa, Zea Mays
MAGDLHHFMRHSATRSEKNNFVQHLLVNGCGGAFLHPTHVFRNFERFSGTTYECKAAYPSYDESTGIALGNILKFRKKNWQFDIIGGFIYFILVFSMFPQCNLVRILNEETWSGRLKSFSGTIWSALLYIFEHSYVSSVGSLTLLTASYSFVPSKLSRRRRAIIGGLHVLAHLTAALLLMLLLELGIEICIRNHLLATSGYHTLYEWYRSMESEHFPDPTGLRARLEQWTLGLYPACIKYLMAAFDVPEVMAVTRINICKNGMMSLSRSVLIMYYTSVFIYFWIFSTPVVSLIFGSYLYICINWFHIHFDEAFSSLRIANYKSFTRFHVKKDGDLEIFTLAVDKVPKDWKLDPRWESEGRGPHQLSHDRKHPSKWRSASSTDPVRSVRVVDHFTIERTRTPDMEPSS

SEQ ID NO: 48702 - protein, 711 aa, Zea Mays
MGSDKQIGSPRQLLETLKMGRVRTILTHTYPYPHEHSRHIMTAVIIACLFFISSDNMHTLIHKLDNNIKWWSMYVCLIGFFYFFSSPFLGRTIQPSYSNFNRWYVAWICFASLYHLPSFQSMGVDMRMNLSLFLTIYFSSVLFIIAFHIIFIGLWYIGLVARLAGTRPGVWTILQNCTVISIACCVFYSHCGNLAVHKSKSFGSSSDPNLLAFLKNENGSTWISNFLRMNQLKDEICSSWFAPVGSASDYPILAKWVIYGELVCSGSCAGPSDEISPLYSLWATFVGLYIANFVVERSTGWALTHPSTDLEDEKLKRHMKPDFLDMVPWYSGTSADLFKTAFDLMVSVTLFVGRFDMRMMQAAMKGPTGNTPNDDLLYDHFNEREDLWFDFVADTGDGGNSSYTVARLLAQPSIRTVIGGSMHTLPRGNLLIIGGDLAYPNPSSFTYERRFFRPFEYALQPPPWYRDEHIALDKPELPPGVSKMTEYDGPQCFIIPGNHDWFDGLHTFMRYICHKSWLGGWFLPQKKSYFALHLPKGWWIFGLDLSLHGDVDVYQFKFFADVCQNKVGENDSVIVVTHEPNWLLDWYWNETTGKNVSHLIQEYLKGRCKLRMAGDLHHFMRHSATRSEKNNFVQHLLVNGCGGAFLHPTHVFRNFERFSGTTYECKAAYPSYDESTGIALGNILKFRKKNWQFDIIGGFIYFILVFSMFPQ

SEQ ID NO: 48703 - protein, 162 aa, Zea Mays
MSTHERKSSIKEFYAVIFPSLLQLQRGITDVEDKKQKAVCMEKYRKKDEDGRDTLSDIDVEREEECGICMEMNSKVVLPNCTHAMCIRCYQDWSSRSQSCPFCRDNLKKTCPSDLWIYVEDQDVVDMETVSSENLRRLFMYISKLPLIVPDVIFSVYDSHIK

SEQ ID NO: 48704 - protein, 516 aa, Zea Mays
MPRLSQIIFPRGLAAPSASSTQDIFIGQLGGAIATTIEHVIAPDIRFETVDMAVRLLVPIIVLQNHNRYNILQEGHNYSIDVQAIEREVKKMVHPGQEVIIISGSHALHQHEKLAVAVSKATRSHSLHETKSDGRFHVRTKTYLDGAILKEEMERSADVLSAGLLEVANPSLSSRFFLKQHWTDGEDDVKDSIKHRPLWESYMPKNNKGRRGTGKKKHGSLYRTYGTRVIPVFVLSLAGVDAELLMEEESLVWTSKDVVIVLEHNNEKIPLSYVSETTRQFALPSIAQRHILAGLASAVGGLSAPYERASRIHERHVVNWLWAAGCHPFGPFSNSSQISQILQDVALRTTIYAQVDAALRKIRDTSEFVQSFASEHLKTPLGELVKGNKNKSTTELWVEKFYKKVTNLPEPFPHDLVEKLEEYLDKLEGQLVDLSSLLYDHRLVDAYQNSTDILQSTIFTQQYVERVLANERDKMKCCSIEYSHPKQSSQAFVYGGILLAGFLVYSLVIFFSSPVR

SEQ ID NO: 48705 - protein, 392 aa, Zea Mays
MGRGGARAAPAAAVPPWHALPDEVWEHAFSFLPADSDRGAAACACHAWLRFERRSRRRLAVANCYAASPRDAVERFPAVRAVEVKGKPHFADFGLVPPAWGADAAPWVAAAAAGWPLLEEISFKRMVVTDDCLEMIAASFRNFQVLRLVSCEGFSTAGLAAIAAACRNLRELDLQENEIEDCSIHWLSLFPVSFTSLVTLNFSCLEGDVNITVLEQLVTRCSNLKTLKLNNAIPLDKLANLLRKAPQIVELGTGRFSADYHPDLFSKLEAAFAGCKSLRRLSGAWDAVPEYLPAFYCVCEGLTSLNLSYATVRGPELIKFISRCKNLQLLWVMDLIEDHGLAVVASSCNKLQELRVFPSAPFEAAEQTDDQRGPYYHREEPAQLHLLPPMHH

SEQ ID NO: 48706 - protein, 271 aa, Zea Mays
MSSRPGSRSTAGPSLPQIAQQEGFRGMYRGLSPTILALLPNWAVYFTVYEQLKSFLSSNDGSHQLSLGANVVAASCAGAATTIVTNPLWVVKTRFQTQGIRAGPIPYKGTLAALRRIAHEEGIRGLYSGLVPALAGISHVAIQFPVYEKIKAYLAERDNTTVEALSFGDVAVASSLAKVAASTLTYPHEVVRSRLQDQRANSDARYKGVIDCVRKVYHKEGVAGFYRGCATNLLRTTPAAVITFTSFEMIHRSLLDLFPAEPEPHIQPLKH

SEQ ID NO: 48707 - protein, 369 aa, Zea Mays
MAASGEGASLPSPAGGEDAHRRRVSYFYEPSIGDYYYGQGHPMKPHRIRMAHSLVVHYGLHRLLELSRPYPASEADIRRFHSDDYVAFLASATGNPGVLDPRAIKRFNVGEDCPVFDGLFPFCQASAGGSIGAAVKLNRGDADITVNWAGGLHHAKKSEASGFCYVNDIVLAILELLKFHRRVLYVDIDVHHGDGVEEAFFTTNRVMTVSFHKSYNVPMMVLGGGGYTIRNVARCWCYETAVAVGVEPDNKLPYNDYYEYFGPDYTLHIQPKSVENLNTTKDLENIKNMILENLSKIEHVPSTQFHDRPSDPEAPEEKEEDMDKRPPQRSRLWSGGAYDSDTEDPDSLKSEGKDVTANFQMKDEPKDDL

SEQ ID NO: 48708 - protein, 257 aa, Zea Mays
MARSRPRVWLVAGCAAVILWASVAQLVAVGRFLLLFGLVGDADPSPPPSALPPPRIYMSNGYLKISCNGGLNQMRSEICDMVAVARLLNLTMVVPELDKRSFWADQSNFGDIFDVRHFINSLRDKVHIIEQLPEKLGPRDSNIIILEMPPVSWSDEKYYLHQILPLFNKYSIIHFNKTDARIANNGNKLVHKLRAKGSFVALHLRYEMDMLAFSGCNHGLSPEEAEELKKMRSGSVCFKHLIWSRSFRIDHRPHNPL

SEQ ID NO: 48709 - protein, 236 aa, Zea Mays
MNQLDSFSDKLVKRILKAHEPYNHNDNTKCSVVSERVSYEFVPERKACSSLNKSVVQNASGCDSNRNKCLASGKAVSKKKDQSTNNSLDKENMSSCGSGGTKVSSPGSLGLAREVDSGNCLSLLDNRNCPMTRTSKANHNNCRQTADILDFNLRECSSFKKGHSKGLSEAQKHEKSLPGSSIACDIEDAGDCNDNLVKAPFIKQRNRFDRLEQGRCQCKQLLTYDLGIYVISVRCK

SEQ ID NO: 48710 - protein, 208 aa, Zea Mays
MNQLDSFSDKLVKRILKAHEPYNHNDNTKCSVVSERVSYEFVPERKACSSLNKSVVQNASGCDSNRNKCLASGKAVSKKKDQSTNNSLDKENMSSCGSGGTKVSSPGSLGLAREVDSGNCLSLLDNRNCPMTRTSKANHNNCRQTADILDFNLRECSFKKGHSKGLSEAQKHEKSLPGSSIACDIEDAGDCNDNLVKAPFIKQRNSQL

SEQ ID NO: 48711 - protein, 104 aa, Zea Mays
MTSVSIRSRPSSLRFKICCSKETVDKVCSIVKEQLALPDGTAITGESKFAELGADSLDTVEIVMGLEEAFNITVDETSAQDIATVQDAADLIEKLMLEAPPKVV

SEQ ID NO: 48712 - protein, 311 aa, Zea Mays
MYMVVFGIVQIFFSQLPNFSDLSWLSIVAAIMSFSYSSIAVGLSLARTISGRSGTTTLTGTEIGVDVDSAQKVWLALQALGNIAFAYSYSMILIEIQDTVKSPPAENKTMKKATLMGVTTTTAFYMLAGCLGYSAFGNAAPGNILTGFGFYEPYWLIDFANVCIVVHLVGAYQVFSQPIFAALETAAAKRWPNARFVTREHPLVAGRFHVNLLRLTWRTAFVVVSTVLAIVLPFFNDILGFLGAIGFWPLTVYYPVEMYIRQRRIQKYTSRWVALQLLSFLCFLVSLASAVASIEGVTESLKHYVPFKTKS

SEQ ID NO: 48713 - protein, 75 aa, Zea Mays
MDKGKSVVAELSASSSSLPSPSSYPFSKKAKPRKLVSLCLGTLGQHLEDIITDISEFAALFPPHITLRQDLRCYL

SEQ ID NO: 48714 - protein, 748 aa, Zea Mays
MLAARTPVSLSLHHRIVAGGHRGRCVGGSQRRRGGAPCRQFTQALQSLWRHSPPIPPPAPPAAGAATSGEAEPSRQPPVLENAAFEEYYKVQQIVREEEWDAFMSVLRKPLPATFRINACLAWHLNFSRKELRKNQALESFHEFLKHESEVPPLFLNVQPDHHILDMCAAPGSKTFQLLEMIHQSKELGLLPGALDQLGPVNGSVWPVGRGAGMDCSGSYKDPCKLQKLEFDRILCDVPCSGDGTIRKGHDMWRKWNSGMGNQLHLLQVNIAMRGIALLKVGGRMVYSTCSLNPVENEAVIAELLRRSGNSVELLDVSSELPELVRRPGLSTWKVQDRESWFQSHDEVPHNRKNVVFPSMFPASNSTEESHTVCGDVEVNINNMNSFSRNINIEETSKLNQDMDGVSVSPTKILECTSNIVSSKFPLHRCMRIVPHDQNSGAFFIAVLHKLSPLNGSQIKDTKIQHRLGTDRTIQFQKEPKPETRPYETTLTRRQHNVSEVDDTEVLGRGQKLGTDSQTSKDKNSSEVEIVSILAESGDRMELQKQSRWEGVDPVLVLNDEAVIKSIQSFFGIKESFPLEGHLVTRSPDNARRIYYVSKSVKEILELNSKVGGQLKIASLGVKMFERHRSKDPCPCAYRLSYDGLSLVLPSISKRILYASALEFHRLVQYRSISFAHFTDTRFGEQAASLTPGCCVVVLLEGNRRVDSICKDPSTIAVVCWRGKGTINVMVSPSDRKDLLERMAYRFG

SEQ ID NO: 48715 - protein, 570 aa, Zea Mays
MRRCDLLIHNTKRMCTANLIVTNHGAENFPYCSLAKDCSGSYKDPCKLQKLEFDRILCDVPCSGDGTIRKGHDMWRKWNSGMGNQLHLLQVNIAMRGIALLKVGGRMVYSTCSLNPVENEAVIAELLRRSGNSVELLDVSSELPELVRRPGLSTWKVQDRESWFQSHDEVPHNRKNVVFPSMFPASNSTEESHTVCGDVEVNINNMNSFSRNINIEETSKLNQDMDGVSVSPTKILECTSNIVSSKFPLHRCMRIVPHDQNSGAFFIAVLHKLSPLNGSQIKDTKIQHRLGTDRTIQFQKEPKPETRPYETTLTRRQHNVSEVDDTEVLGRGQKLGTDSQTSKDKNSSEVEIVSILAESGDRMELQKQSRWEGVDPVLVLNDEAVIKSIQSFFGIKESFPLEGHLVTRSPDNARRIYYVSKSVKEILELNSKVGGQLKIASLGVKMFERHRSKDPCPCAYRLSYDGLSLVLPSISKRILYASALEFHRLVQYRSISFAHFTDTRFGEQAASLTPGCCVVVLLEGNRRVDSICKDPSTIAVVCWRGKGTINVMVSPSDRKDLLERMAYRFG

SEQ ID NO: 48716 - protein, 104 aa, Zea Mays
MHSLNAVFLLIDTLLNNMPFPWYRMSFFVFWSCAYVTFQWVLHACGGVSWWPYPFLDLSSSGAPLWYLGMAIAHVPCFFLYWLIVKAKHTYFQRMFPHAYVRAT

SEQ ID NO: 48717 - protein, 216 aa, Zea Mays
MSLSPADGAAYWLRWQVLVCGALIALPTVAAAALLPRLRSSAPPLRAADLWVPCWARLHPGWLLAYRAVALAAAVALLARLVVARGITVFYFYTQWTFLLVTIYFAFATAISAHGCLVYSRKSLRKADESRGLLNADVENRDVSNSVSGERKTDETNMMMSYYEQIVNERRAGFWGRCMEIIYQTSAGATMLTDVTYWGLLVPFFYRDKFGLALLA

SEQ ID NO: 48718 - protein, 415 aa, Zea Mays
MRNKINLGSNQKVFPDAAAMANDSKQDDAFDLPSDDSDDNDFDPNMPEEHVVGKDEESSEEDEDGGSDSDDSDFLTCSDDSEPLIDKKVDDLRLPSEDSEDDDYDPAGPDSDKDVEKKSSSDESDFTSDSDDFCKEISKSGHDEVSSPLLPDAKGVVLPDSRRRQAERLDYKKLYDEAYGEASSDSSDDEEWSGKNTPIIKSNEEGEANSPAGKGSRVVHHNDELTTQSTKKSLHSIHGSVDEKPGDLTSNGSNSTARKGHFGPVINQKLHEHFKTQPYPSRSVKESLAEELGLTFRQVNKWFETRRHSARVASSRKGISLDKHSPQNTNSQVTASMEPKEPEGTVVEESNVCLNGGTTISKEAVSSKVGSRTPGSDVGGSKVDSAEDQNPGPDLAEKARQKAIQQELRKKKMGR

SEQ ID NO: 48719 - protein, 296 aa, Zea Mays
MATGAVTPPPLAGARRFPRGRSFLHRRLATSPMKDESVISTDGGNEETDTDSLHVARGLSHPGLSSSLSNKASVVPTPLLPSGQSDLRFNRLRPSIDESDCKYKRLFGCYVAREAVIDEEYWIAAWLRAEDQYENESGNRYVESFKRKFASKEFHALKKRCNTQHREKYICLVAVKNDDIRRTVLNSVVGTLDVCVRHPLYGEKFPEEPGKPSLHCRIYQPDQPKFGYVTNVCVAKYARRQGIASNMLLLAIDAAKLNGAENIYIHVHKDNLPAWRLYDQIGFKGRGWRPHVASGG

SEQ ID NO: 48720 - protein, 228 aa, Zea Mays
MATGAVTPPPLAGARRFPRGRSFLHRRLATSPMKDESVISTDGGNEETDTDSLHVARGLSHPGLSSSLSNKASVVPTPLLPSGQSDLRFNRLRPSIDESDCKYKRLFGCYVAREAVIDEEYWIAAWLRAEDQYENESGNRYVESFKRKFASKEFHALKKRCNTQHREKYICLVAVKNDDIRRTVLNSVVGTLDVCVRHPLYGEKFPEEPGKPSLHCRIYQPDQPKFGC

SEQ ID NO: 48721 - protein, 266 aa, Zea Mays
MDIKVTENGFCAVSNRRIDEGSNVEMSSVKAVANEEKSRGVPFDFESLYPLTQLPKEGDLIAYRLVELSSMLCPELSSFRVGKVVLYDPISLRIILLPVQEYPITTEENEDKDEPDMLVDLSPYKEDGSLEIEYSSLLDVRLLKGIEPVPGAFSTPLAETCNEVGSALAKGRPVTLHKNEGNIESQKSPLVANNTNGKSEKTVWEKNDEPGDEVDVQQNGWGTWKQNSTSAWSYRALRSSALGPTMALLRGKNNQRGKPPYRKKGK

SEQ ID NO: 48722 - protein, 565 aa, Zea Mays
MDGFTLPPFESTCIFRDNDIIRVKQKSCTKHIEHNDVHCIQDHEIIEKRSLPVDGKILAIQDKEDVCKHQEEEAHDDHQLEENATASHSTENNGTSLKRKRNDGVADIPESSKGQRLKVTNSGKHIDYSKKEQNGSKKLKLSVIDIEAKKATPQHETTTTLVEQQKSEGNYQTELKCEAKVTNYDAQSDTKKNVHGDSPIAADCPSSSNQDGLPVPSSNQNGSHVHFSSLKADEDESETSDEIVPVVVRPGHIRFEPAGREPDKSPAKELQGTFQWSGTLSKKKGQKWGINSSNKKNADVGYHAGIAGSNTEVNNLVMDIKVTENGFCAVSNRRIDEGSNVEMSSVKAVANEEKSRGVPFDFESLYPLTQLPKVGKVVLYDPISLRIILLPVQEYPITTEENEDKDEPDMLVDLSPYKEDGSLEIEYSSLLDVRLLKGIEPVPGAFSTPLAETCNEVGSALAKGRPVTLHKNEGNIESQKSPLVANNTNGKEHKLGKSEKTVWEKNDEPGDEVDVQQNGWGTWKQNSTSAWSYRALRSSALGPTMALLRGKNNQRGKPPYRKKGK

SEQ ID NO: 48723 - protein, 550 aa, Zea Mays
MDGFTLPPFESTCIFRDNDIIRVKQKSCTKHIEHNDVHCIQDHEIIEKRSLPVDGKILAIQDKEDVCKHQEEEAHDDHQLEENATASHSTENNGTSLKRKRNDGVADIPESSKGQRLKVTNSGKHIDYSKKEQNGSKKLKLSVIDIEAKKATPQHETTTTLVEQQKSEGNYQTELKCEAKVTNYDAQSDTKKLESRSARRKKIKRLMKQRGKLQIEKNVHGDSPIAADCPSSSNQDGLPVPSSNQNGSHVHFSSLKADEDESETSDEIVPVVVRPGHIRFEPAGREPDKSPAKELQGTFQWSGTLSKKKGQKWGINSSNKKNADVGYHAGIAGSNTEVNNLVMDIKVTENGFCAVSNRRIDEGSNVEMSSVKAVANEEKSRGVPFDFESLYPLTQLPKEGDLIAYRLVELSSMLCPELSSFRVGKVVLYDPISLRIILLPVQEYPITTEENEDKDEPDMLVDLSPYKEDGSLEIEYSSLLDVRLLKGIEPVPGAFSTPLAETCNEVGSALAKGRPVTLHKNEGNIESQKSPLVANNTNGKEHKLDGLGKK

SEQ ID NO: 48724 - protein, 399 aa, Zea Mays
MDATARPAIVIDNGTGYSKLGFSGNSEPSFTLPTVVAANESFLDQTELLSSANWIAQYNAGIMADLDFFIGDEALSRLRSSGLYTLRRPIRHGQVHDWDTMERFWQQCIFNYLRCNPEEHYFLLTDSPVSTPESRECTGEIMFETFNVPGLYISVQSVLSLSAGYAYLKSISDDDSDTVSDMTGVVVDIGDGAPQIVPVVNGYVIGSSIKSFPFSGSDVTQFVSQLLQERGELLPPEDSLDISRKVKEMYCYTCSDIVKEFKKHDRKPDKYIKHWSAVKPKTGVPYTIDIGYERFLGPEIFFNPEIYSADFSTPLPELIDNCVQSAPIDTRRALYKNIVLSGGSTMFKDFHKRLQTDIKKIVDDRVAATNARHRVEVSLLKSTWLPIQYRVTRFGSGGH

SEQ ID NO: 48725 - protein, 314 aa, Zea Mays
MVAVAAGRRAGGVGGRRRSGCGPGQAQQKLLAIAVAARFAEAVAPPSAEASRAGSGGCCVELLECLLGALSVNAAPPPAQHRRAVHSIRRRRPRGGGSADDRHADAPSGRIAGNGASASAAASLYTMQGRKGVNQDAMVVWENFGSKDDTIFCGVFDGHGPNGHLVAKRVRDLLPVKLSANLGKGEFKEISTSDVKSGTTKGVATEHRVEDTDASPGNEENGEYPEFFTALRASFLQAFYVMDRDLKAHRNIDCEFSGTTAVTVIKQGQNLIIGNLGDSRAVLGTRGEHNQLVALQLTVDLKPSIPNTTENKEK

SEQ ID NO: 48726 - protein, 571 aa, Zea Mays
MASGGEGAGSGESPPAASVEAAAGEATLHIRCANGSKFTVQTDLGATVGGFKEVVAGSCDVPAPQQRLIYKGRILKDEQTLESYGVETDHTIHLVRGVAPPAASSAPAAASSLASSTLSSVPAGGLGDLFPGVGAPGSGRSSGIFGPGFPELEQVEQHLSQNPNLMREIMNMPAMQNLMNNPDLIRNMIMSNPQMREIMDRNPDLAHVLNDPSVLRQTLEAARNPEIMREMMRNTDRAMSNIESSPEGFNMLRRMYETVQEPFLNATTMSGEGNTASNPFAALLGNQGSNQPGQGQPATYTPTIGSESTTGTPAPNTNPLPNPWSTNAGSAQGATRSSGNTRTGASGHVGGTGATGGLGGLGSPDLSSLLGGLAGSPRTGASGGLGGLGSPDLGNMLGGSPDVSLFSQMLQNPAMMQMMQSIMSDPQTMNQLLSFNPNARNLMESNPQMREIFQNPEFLRQLTSPETLQSLLGQLGQHQPNQGRNNSGSATGTPGNPSLDTLMSMLSGLGSGGGIGVPNTSNVPPEELYATQLTQLQEMGFIDTAENIQALLATAGNVHAAVERLLGNLGQ

SEQ ID NO: 48727 - protein, 234 aa, Zea Mays
MASWSWTSVHCSSYPLPGPSARFTPSLVSATTPALRRTRARGQLQRCLCSQYAGERQPPPPPPPQPEPDSPQQLERLFSNLNQTTMKHEPGSVTSAVFLVAGTTVGAGILAIPAVTQEAGFLASAVICILCWSYMVVTGLLVAEVNVNTMCELGSGGVSLVSMAMRTLGTFGVRTSCLSYLFIHYALLVAYVARSSNIITNSLGIPIWESATLFSLAFGGVCYFGSLLIRLEGS

SEQ ID NO: 48728 - protein, 199 aa, Zea Mays
MWFLFSVQIWRETCQKTAIVAGTAIPLALFLVWDGVILGTLPDLAGSSTVSDPLELLRSSNGIVGPIVEAFSFLAIATSYIGFVLGISDFLADLLKLPSGQNKPLPYVLTLFPPLVLSLLDPEIFFKALDFAGTYGVLVLFGVFPAAMSWSERYSDELEAPVPPIVPGGKFTLSAVMGGALLVIVPELIKDVMQLQGLH

SEQ ID NO: 48729 - protein, 733 aa, Zea Mays
MATSGKKHLNSVTLLFKLPYYTQWGQSLLIAGSEPALGSWNVKQGVSLSPVHQDSELIWCGSVSVVAGFTSEYKYYVVDDKKNVLRWEAGEKRKLVLPEGVKEGDVIEIRDWWQDASEALFFRSAFKNVIFNATEGVKKESQSVSLNKSLDPEDIVVQFVISCPRLVSGSTVIVTGSNPQLGRWQTQDGLKLSYVGDSLWKASCALRKSEFPIKYKYCQISQAGNSTLELGPNREVNVDLSSPKQSRYIVLSDGALRDAPWRGAGVAVPMFSIRSDEDLGVGEFLDLKLLVDWAVNSGFHLVQLLPINDTSVHGMWWDSYPYSSLSVFALHPLYLRVQALSDAIPVDVKEEIQQAKKQLDKKDVDYEAALSTKLSIARKIFNLEKEKVLNSSSFKQFLSENEEWLKPYAAFCFLRDFFETSDHSQWGRFSQFSKDKLDKLICEGTLHHDIIRFHYYVQYHLYIQLSEAATYARKKNVILKGDLPIGVDRNSVDTWVYPTLFRMNTATGAPPDYFDKNGQNWGFPTYNWEEMSKDNYGWWRARLTQMAKYFTAYRIDHILGFFRIWELPDHAATGLVGKFRPSIPLSQEELLSEGLWDFNRMSQPYIRQEILEEKFGSFWTVIAANFLNEYQKQCYEFKEDCNTEKKIIVKIKTSAEKSLWVEKEDNIRRGLFDLLQNIVLIRDPEDSTKFYPRSTWKTHQVLGTLMNTAKISSEDCIITIILFAKKISGAKMP

SEQ ID NO: 48730 - protein, 515 aa, Zea Mays
MDLPPLSHQALFAAVRSADAPAVRAVLADAEASATSLAALAAAQTDAGETALYVAAEAGSEEVVRLLLPLYDFEAATVRSRLDLDAFHVAAKQGHTGLCSVCDSSNTSPLYSAAVKDHLDVVNAILDTDDSCIKIVRKNGKTSLHTAARIGYHRIVKALIERDPGIVPINDRKGQTALHMAVKGKNTDVVEELLMADVSILNVRDKKGNTALHIATRKWRPQMVQLLLSYESLEVNAINSQNETAMDLADKVPYGESKTEIIEWLTEAGAKNARNVGKIDEASELRRTVSDIKHNVQAQLSENAKTNKRVTGIRKELQKLHREAIQNTINSVTLVATLIASIAFVAIFNLPGQYFQDVNSGGDIGEAEIAKLTGFRVFCLLNATALFISLAVVVVQITLVAWETGAQKQVIKIVNKLMWTACLSTGVAFISLAYVVVGPQHAWMAFTASAIGGPIMIGTFLFLAYLLLRPRFKFGEDRQRRIKRASGSKSFSWSIHDGFSDLEAFSDHEKRIYAL

SEQ ID NO: 48731 - protein, 301 aa, Zea Mays
MYLDANISMVQLLLSYESLEVNAINSQNETAMDLADKVPYGESKTEIIEWLTEAGAKNARNVGKIDEASELRRTVSDIKHNVQAQLSENAKTNKRVTGIRKELQKLHREAIQNTINSVTLVATLIASIAFVAIFNLPGQYFQDVNSGGDIGEAEIAKLTGFRVFCLLNATALFISLAVVVVQITLVAWETGAQKQVIKIVNKLMWTACLSTGVAFISLAYVVVGPQHAWMAFTASAIGGPIMIGTFLFLAYLLLRPRFKFGEDRQRRIKRASGSKSFSWSIHDGFSDLEAFSDHEKRIYAL

SEQ ID NO: 48732 - protein, 458 aa, Zea Mays
MADGGAASRGPPDGSPPAALLLLQQPLLHAYEARKDPAACGREAHGHGFGPDPDGAGFGGSPIFVRTCFNGLYGLSGVGLLSIPYALSEGGWLSLALLLLVAAVCCYTGLLLQRCMDASPAVRGYPDIGALAFGRGGRLAASAFLYAELYLVAIGFLILEGDNLDKLFPGTSLSLGLRGAALVVSGKQLFVVLVALVILPTTWLRSLGVLAYVSASGVLASAVVVVCVLWTALADGVGFRARGRMLNVSGLPTALGLYTFCYCGHAIFPTLCISMKEKKRFSRVLVICFAACTLNYASMAILGYLMYGDDVKSQVTLNLPEGKVVSKLAIYTTLINPFSKYALMVTPLSTAVEEKLLAAGRGGKSSRSVSVLVRTLLVVTTVVVALAVPFFGHLMALVGSLLSVMASMLLPCIFYLKIFGAARCGRAEVALVATIIVLGSVVLATGTYASVKKIVQDY

SEQ ID NO: 48733 - protein, 329 aa, Zea Mays
MMMTRAPMGPMEGAAVDEVVRRLVEGGRGGRQVQLSEAEIRQLCVDGKRVLLSQPNLLRIHAPVKICGDIHGQFVDLLRLFDLGGYPPASTYVFLGDYVDRGKQSLETICLLLAYKIRYPEKIFLLRGNHEDAKINRVYGFYDECKRRFNVRLWKIFSDCFNCLPIAALIDDKILCMHGGLSPEWTSLDQIKDIERPAEIPDYGLLCDLLWSDPSPDGEGWGESDRGVSCTFGADKLVEFLEKNDLDLICRAHQVVEDGYEFFAQRRLVTIFSAPNYCGEFDNAGALLSIDESLMCSFQILKPTDMGPPHARKQIPNKVYDLKASKLIT

SEQ ID NO: 48734 - protein, 86 aa, Zea Mays
MGRRKEHLERVRVEAYCWDVFKPVEMVEIDSMEKLDDAFRMASWCQKCIYLMPRMEKIAGQYPGWSQRSVIVYAQSVGLPVLLALP

SEQ ID NO: 48735 - protein, 737 aa, Zea Mays
MARWLQSAGLQHLATSSAAGAGGADYRGGMPGFGGAGAGSMLSSLLMQGYGPESIEEKQRLYTLLRGLNFSGESVPTSISEPYTPTAQSFGGGNPVEGFYSPELRGDLGAGLLDLHAMDDTGLLSEDVASEPFEPSPFMPKDIDDDDEDVIAGSQQASVDNYGVVTSEKETTARENNVAKIKVVVRKRPLNRKELSRKEEDIITVEDSSFLTVYEPKLKVDLTAYVEKHEFCFDAVLDEHVSNDEVYRETVEPIIPIIFQRTKATCFAYGQTGSGKTYTMQPLPLRAAQDMVRLLHQPVYRNQNFKLWLSYFEIYGGKLFDLLSDRRQLLMREDGKKQVCIVGLQEFEVSDVQIVKEYIERGNAARSTGSTGANEESSRSHAILQLAVKKHIIVKDTRRQRDRDANEAKNTKAVGKISFIDLAGSERGADTTDNDRQTRIEGAEINKSLLALKECIRALDNDQIHIPFRGSKLTEVLRDSFVGNSRTVMISCISPNAGSCEHTLNTLRYADRVKSLSKGGNTRKEQSTGPTTTSSRDSLSALSYSLPAEAEEIPNQVQEKRPVDTYRKGTENFISNPSVESDRNSFSTIPNYSNRGREENGAASGNDRESYDLKSSQPAYTSKPQLVQNSANTQEEEKVTKVSPPRRKAYREDKSDRQSNYMKKDNGPETSRVGYKMQQAKQLQQQQRPASASASSRQSEKESSCDDVEIDAILERRPSLQFTGRRSRILWRLCGKR

SEQ ID NO: 48736 - protein, 168 aa, Zea Mays
MAHWVSDSDGSDNFEWDSDGNGEEPANFNAAGAGSSALRSTNTDAPGPSTRVANGNGKAGPSASLVQKYMDMGFTEEIVRKAMKDNGDNGADSLVELLLTYQELGNDLKVDNGFASGCAPQTVDDSDDDDILENWDDEDADGGRSTRVANSIDDSEDEVIAMLVYVAC

SEQ ID NO: 48737 - protein, 126 aa, Zea Mays
MAKYNVVQKNKRQCNQDRKRAAHGEPGTGKLKQRTAPVSMSGKRKKKLERRLNRKQKEAAMIKALENNMGDVDMVSVEESSEAAKGKSQVKFSVKKNSRIQIKRLKGKGRKPKMQNHLPRRKLMPW

SEQ ID NO: 48738 - protein, 707 aa, Zea Mays
MRASSSRGRALVAKSSSTGSETMELEPSSEGSPLLVPRQKYCESTHQTRRRKTRTVMVGNVPLGSDHPIRIQTMTTSDTKDVAKTVEEVMRIADKGADLVRITVQGRKEADACFEIKNTLVQKNYNIPLVADIHFAPTVALRVAECFDKIRVNPGNFADRRAQFEKLEYTDDDYQKELEHIEKVFSPLVEKCKQYGRAMRIGTNHGSLSDRIMSYYGDSPRGMVESALEFARICRKLDFHNFVFSMKASNPVIMVQAYRLLVAEMYNLGWDYPLHLGVTEAGEGEDGRMKSAIGIGTLLMDGLGDTIRVSLTEPPEEEIDPCQRLANLGTQAANLQIGVAPFEEKHRRYFDFQRRSGQLPLQKEGEEVDYRNVLHRDGSVLMSVSLDQLKAPDLLYRSLAAKLVVGMPFKDLATVDSILLRELPPVEDAEARLALKRLVDISMGVLAPLSEQLTKPLPHAIVLVNLDELSSGAHKLLPEGTRLAVTLRGDESYEQLDILKDVDDITMLLHNVPYGEEKTGRVHAARRLFEYLQANGLNFPVIHHINFPETIDRDGLVIGAGANVGALLVDGLGDGVFLEAADQEFEFLRDTSFNLLQGCRMRNTKTEYVSCPSCGRTLFDLQEISAEIREKTSHLPGVSIAIMGCIVNGPGEMADADFGYVGGAPGKIDLYVGKTVVQRAIAMEGATDALIQLIKDHGRWVDPPAEE

SEQ ID NO: 48739 - protein, 547 aa, Zea Mays
MGSMGYSPSQSATAVTSFMGTAFLLALLGGFLSDAFLTTYTVYIASAFVELTGLVILTVQARTPSLMPPRCASPGAGGAACEPVSGAKKAVLLAGLYLTALGVGGIKGSLPSHGAEQFDERAPRGRKARSTFFNYFVFCLSCGALVAVTFAVWVEDNRGWEWGFGISSVAILLSVPLFAAGSSLYRNKLPTGSPLTTIAKVLAAAALARRRGGGGGGAQSSSNGAVIDRAPSPAGSADDMDEYCKSGDMEEISISDAASPAAEPSRELALLNRAVQCQPPRHGRRLACTVQEVEDVKVVLMVLPIFLSTIMLNCCLAQLSTFSVEQAATMDTRVGRLTVPPASLPVFPVTFIIVLAPVYDHIIVPFARRVTGTETGITHLQRIGTGLVMSVVAMAVAAAVEVKRKDVASRSGMLEDSGKPLPITFFWIAFQYLFLGSADLFTLAGLLEFFFSEAPPRMRSLATSLSWASLALGYYLSSVLVSVVNSATGRGGHRPWLQGASLNHYRLERFYWVMCVLSSINYLFFLFLAVRYKYRNAGVIKVMRTSL

SEQ ID NO: 48740 - protein, 270 aa, Zea Mays
MISRCVKLQRLWVLDCISDKGLQVVASSCKDLQELRVFPSEFNVAGAFTVTEEGLVAISSGCPKLSSLLYFCHQMTNEALTTVAKNCPSFIRFRLCILEPKKPDAMTGQPLDEGFGAIVRDCKGLRRLSMSGLLTDRVFMYIRMYAKYLEMLSIAFAGDGDKGMMDVMNGCKNLRKLEIRDSPFGDFALLGNVAKYDTMRSLWMSSCNVTLKGCQVLASKMPMLNVEIMNELDGSSEMENHGNLSKVDKLYVYRTTAGVRDDAPNFVQIL

SEQ ID NO: 48741 - protein, 226 aa, Zea Mays
MGVDYYKVLQVGRGASDDELKKAYRKLAMKWHPDKNPSNKKEAEAKFKQISEAYEVLSDSQKRAIYDQAGEEGLKAQVPPTGAGGPSGSSFYGGNASTFQFNPRSADDIFAEFFGFSSPFSTMGGMGGGAERGMRGSRFGMFGDDIFGSHPQFPGEASMHVPQRSQKVPPIENRLPCNLADLYKGTTKKMKISREVLDASGYKSFISCLLARNMMANASQLDYGHF

SEQ ID NO: 48742 - protein, 278 aa, Zea Mays
MDAINGELFKQAYKSSVDASEYLDRYQMYKLLKGPYDKEGACIIVTAVSNGVTSELWAEKVFGMYTSWARKQGYKVGLIEKIFSTSGHIQSATMEIESEYMFGTLSGEKGMHQMIYSSLENSDIDQALSARVDIIPLFLDRPVVLHLDDDDIETSPSPSVHKKGDRRNGVAVRVQHVPSGVTAESSGERSYFANKLKATSRLKAKLLLIARELKVSDIKTINRQAVEDKCNCGARRYTFGRQKLVHDLNTGIQLSDLNSVLEGDIEPFIRGRITSRQL

SEQ ID NO: 48743 - protein, 177 aa, Zea Mays
MGRGRGKVEVRRIENSVSRQVTFSKRRRGLAKKARELAVLCDADVALLVFSDKGRLHDFAAHGSMERILGRYERYLLCEDRDDVTQDYPEESQGNMSYDHIKLRSKLEAIKKSQRNLMGEQLESLTFREVQQLEHRIDSALRNVRSRKDHILLNSIQELRNKASMPNKEFTLTSSKT

SEQ ID NO: 48744 - protein, 328 aa, Zea Mays
MGKSKVLVKVHPEGKYVVDIDKSIDITKITPSTRVALRNDSYMLHLILPSKVDPLVNLMKVEKVPDSTYDMIGGLDQQIKEIKEVIELPIKHPELFESLGIAQPKGVLLYGPPGTGKTLLARAVAHHTDCTFIRVSGSELVQKYIGEGSRMVRELFVMAREHAPSIIFMDEIDSIGSARMESGTGNGDSEVQRTMLELLNQLDGFEASNKIKVLMATNRIDILDQALLRPGRIDRKIEFPNPNEDSRFDILKIHSRKMNLMRGIDLKKIAEKMNGASGAELKAVCTEAGMFALRERRVHVTQEDFEMAVAKVMKKDTEKNMSLRKLWK

SEQ ID NO: 48745 - protein, 300 aa, Zea Mays
MSANNLPAASTVVSMYKANGISAMRLYAPDQGALQAVGGTGISVAVGAPNDVLSNIAASPAAAASWVRNNIQAYPSVSFRYVCVGNEVAGGAAQDLAPAMENVHAALAAAGLGHIKVTTSVSQAILGVYSPPSAAEFTGEARGYMGPVLQFLARTGSPLMANIYPYLAWAYNPSAMDMSYALFTSSGTVVQDGAYGYQNLFDTTVDAFYVAMGKNGGSGVPLVVSESGWPSGGGVQATPANARVYNQYLINHVGRGTPRHPGAIETYLFSMFNENQKESGVEQNWGLFYPNMQHVYPISF

SEQ ID NO: 48746 - protein, 265 aa, Zea Mays
MAVRRRPAAAAAGDLPPQAPPADAAPTPAPDELVLRPPNLRVAAVAAVLFLAPFSYLSFVRYRLGADLQRSILKCGAMSLIGFCVALKLIPVAASYHLRRRMFGYDINKKGLPTGQIKVPEALGLVVGIIYLVIAIIFQQFHYAPDSIWLVEYNAALASVCFMILLGFVDDVLDVPWRVKLALPTFAALPLLMAYAGGTSIIIPKPLTPYVGLTVLELGLFYKLFMLLLAVFCTNSINIHAGLNGLEVGQTIVISAAVSLDCFCW

SEQ ID NO: 48747 - protein, 178 aa, Zea Mays
MASPSRLLPPTPPSAAQPRGPRDRLALPRLRCLAAAAASASPTDGAVLLERGGSAAVAVREFVTLDELRAAVRLRVRTFHEYADDSVGTEDHRKALADREFEALQDRISGKMINFRRVSCINGTVPLSPSLMSAEELCSMCKFVEDGKERLVVGSLDLNQCLWLPDELTGKRPGGLCA

SEQ ID NO: 48748 - protein, 161 aa, Zea Mays
MTKRSYMDAVIKGLKAVEDVDVELFGSNFRTNETLSSKLLDGVTKKKKIYVRLLLSIDRRETTSAALDTVNLAVEMMDQGVIGIDLSGNPVVGEWETYLPALQHAKNMGIPVTIHCGEVANRKEIQAVLDFCPQRLGHVCCLNDVEWKKLKSLMIPEVLLP

SEQ ID NO: 48749 - protein, 926 aa, Zea Mays
MCSTAVLLVRTGVVLVCLAALARAPSKVHAAAGTGDGLLAIPTNASLSHCPSWCGDVQISYPFGIGPGCFRQGFELTCDHTAPSPRLFFVSGNSSIQVTSVHIGISRVRVSAVGFNVTMSAGVDTYTQSWKAPPDNREIMERANTPYSACTGLGCCMIPIRGGQGITLKLGRLNSTIPHFGEALSRVKIIVSQYYEFVADDVYTSWVNTSNVDDMLFYIAIMDQPSCASAQSQENKNTYACSSESICDDDLPPVVSQGGYNCFCPGRQIEGVNPYIEDGCIAYYNPEAPSIRNCMRLCGNISVPFPFGIEEGCYANDNLRLNCTSNGTLILDRGYAQYHVTNLSLDDGLLMVTNMLNATSFNNMERVVITNYDGYYHNNFQPTYMAVVDGNYDFSQEDTTIKWVIANITCQKAMQNNATYACVSDNSICKDVMQGNIRDGYRCKCSDGFQGNPYLQNNCTDIDECLIPNKCNGICHNFDGGFNCTSCPHGKEYDPKNHKCVMSAKQRILIFGIVIGLVCGLGSISFALGAIVLTGKWKKGIQRRIRREYFKKNQGLLLEQLISNENATNKTKIFTLDELEEATNKFDATRVLGHGGHGTVYKGILCDQRVVAIKKSKIVEQIEIDQFINEVAILSQIIHRNVVKLFGCCLEDEVPLLVYEFISNGTLYDILHENIATKCLLSWDDRIRIATEASGALAYLHSAAAIPIFHRDVKSSNILLDDNFTVKVSDFGASRSLSLDETHVVTIVQGTFGYLDPEYYHTGSLTEKSDVYSFGVILVELLTRKKPIFINESGAKQNLSHYFIEGLQEGTLMEIIDSQVVEEADQEEINEISSLIEACLRSKGGHRPSMKEVDMRLQCLRTKRLRNKTHLLIEKGGEMEPLLCAEAQHPHERINPIYNEERLTIPMMSGCYSLEQELAAASSMIR

SEQ ID NO: 48750 - protein, 190 aa, Zea Mays
MATAISFPRAPLVTPRACTPRRLVHVSAARASPPRGGGRVGRRSPTVPAVAGASSSSSGLAPDTSVPAWDALGGVSVLAAGTGNAVALTDLWDSAEGVAVVALLRHFGCFCCWELASVLKDAMAEFDSAGAKLIAIGVGTPEKARILADRGWIFCVQKQRTVECKERRGRTGDRAPLDDVLNICCEVPAA

SEQ ID NO: 48751 - protein, 218 aa, Zea Mays
MVVLMAPAVEAVKETGTFQKVPALNERILSSMSRRSVAAHPWHDLEIGPGAPTIFNCVIEIPRGSKVKYELDKKTGLIKVDRVLYSSVVYPHNYGFIPRTLCEDSDPLDVLVIMQEPVIPGCFLRAKAIGLMPMIDQGEADDKIIAVCADDPEYRHYNDIKELPPHRLAEIRRFFEDYKKNENKEVAVNDFLPASAAYEAIQHSMDLYATYIVEGLRR

SEQ ID NO: 48752 - protein, 608 aa, Zea Mays
MNGTELWEVYNGNTVRLPWKLEEFVARSPYIRDSVVTIGSKVSTVFVVDSDSGEIIYRHSIPAVLNELEGPGIEGTPSKLNARTNYDSDNIMVLVRNDYSLSASDLGKHLFNWTRTSFSVKYNHPDIPCIRSEGLPLALPDSRSANVIVLKEGTPFISIHGSDALEPVQTPRKLPNTAGKSDIVLDDSQNQTYDGARSHVISADSEATETPTRNTYVWLFSFFPIFLVIGYLLSLTSASKSCRQFVIQLIKPFTRDKKSVDIRGRSEGSPKRRKTRKKDGLVNSPETLTASDKECSETGGSTEAPMENSALKDALGGRHIGKLYVSNKEIGRGSNGTVVFEGSYDGRQVAVKRLLRSHNDIAEKETQNLIISDHDPNIVRLYGCDYDSDFVYISLERCHCSLADLIQKHSYLSSGESVSNNEASFSIKSKISNVKGMDVELWTHDGLPSAQLLKLMRDVVAGLVHLHDLGIIHRDLKPQNVLISAGGPIRAKLSDMGISKHLQDDMTSVSHHGTGFGSSGWRAPEQLRHGRQTRAMDLFSLGCLIFYCITKGKHPFGEYYERDVNIANNRFDLFMVDYIPEAVHLISHLLQPNPEASICHAPSTLLEP

SEQ ID NO: 48753 - protein, 532 aa, Zea Mays
MLKKHNIKMECIIFREPGVHHNDVMEENDRLLHQFRNRSVAKVVQVDNPTSLLGALKTRNVLPVTVFRGDLEVNSNFKIKVWVYKKTAEEKFPTLKKYSDKAPPNDKFASHEVKVDYEYKSVVEPDKVVPPDQRIKGYLYGPQVIPVSNAEWEAVKFKPEKGVKLLGFTDRSSVPRHQFMKDVCLFIPEPGNMKASLAVSAIARAMHQMNKVAIVRCVWRQGQGNVAIGVLTPNISSVNNIQDSFYFNVLPFAEDIREFQFRSFSSLPSSSQPTEEQQEAADNLVKMLDLAPPGREVLKPEFTPNPILERFYSYLDLKSKQPDANVPPLERSLRRITEPDPDVVGQQTQLIQNLSKAFVLKDNPKKKKARTQDMLAYTGAGDQAKSVEDRVLENTHPSTENVVAIRDSNPVQDFEAMLAKRSSSTWTQKAIGDMQNYIAALLQNSSDGGNYQKALECFASLRKACIIEQEPQEFNQFLTKIYERLKEGDAAKFFQLLSSKNISLINKEEAPDSDVTEEMARSFYLKREKASQ

SEQ ID NO: 48754 - protein, 664 aa, Zea Mays
MHGVLLEVKNVCLTLVHKKLVYNRSDEVGIVLFGTKGTCNELAKDIGGYKHVTVIHDIKVVDEGTAQALQNLPLGSAPGDFLDSIVVGLDMVIRKFGITKGKRRLCLITGAQELLRDPPEGTKEDQVDTIANMLKKHNIKMECIIFREPGVHHNDVMEENDRLLHQFRNRSVAKVVQVDNPTSLLGALKTRNVLPVTVFRGDLEVNSNFKIKVWVYKKTAEEKFPTLKKYSDKAPPNDKFASHEVKVDYEYKSVVEPDKVVPPDQRIKGYLYGPQVIPVSNAEWEAVKFKPEKGVKLLGFTDRSSVPRHQFMKDVCLFIPEPGNMKASLAVSAIARAMHQMNKVAIVRCVWRQGQGNVAIGVLTPNISSVNNIQDSFYFNVLPFAEDIREFQFRSFSSLPSSSQPTEEQQEAADNLVKMLDLAPPGREVLKPEFTPNPILERFYSYLDLKSKQPDANVPPLERSLRRITEPDPDVVGQQTQLIQNLSKAFVLKDNPKKKKARTQDMLAYTGAGDQAKSVEDRVLENTHPSTENVVAIRDSNPVQDFEAMLAKRSSSTWTQKAIGDMQNYIAALLQNSSDGGNYQKALECFASLRKACIIEQEPQEFNQFLTKIYERLKEGDAAKFFQLLSSKNISLINKEEAPDSDVTEEMARSFYLKREKASQ

SEQ ID NO: 48755 - protein, 264 aa, Zea Mays
MAPRGHHLAEVALLASASADLAAAGAGEREGWLDDPAILPSLGPRARSLAVASAAHSVLVIVAVAGGGGGGVTVEPALGPDEGRISAVEWVPFAGEDDAEGEEGVSVVIGTDAGWLLFYSLAGDLLHKQSIYPAKILKLNFRERKENAWEDSGSDELSVVFPGVIARFDGADLQNVLKKAFQDVKSRLWKDKFEEQDAEDEETFGRIPFQIWNVNKFSSCADAAIVGLMPPPLLELQLLLYCWAVKSAPLLCHHSWRGCCSFSI

SEQ ID NO: 48756 - protein, 178 aa, Zea Mays
MAPRGHHLAEVALLASASADLAAAGAGEREGWLDDPAILPSLGPRARSLAVASAAHSVLVIVAVAGGGGGGVTVEPALGPDEGRISAVEWVPFAGEDDAEGEEGVSVVIGTDAGWLLFYSLAGDLLHKQSIYPAKILKLNFRERKENAWEDSGSDELSVVFPGVIARFDGADLQHFKM

SEQ ID NO: 48757 - protein, 420 aa, Zea Mays
MGNLDGTLGVDASNPTLQHGGTVIPDTQENDSSRGSNTLTRSTSKIPFVQGKTNDFSIINSLKNVRADVLRENTEAVFAACDAAHGRWAKLLGVRSALHPRLRLQEFLIIYNITEEFIAATEKIGGRLGYNIRGILHQQSKQFVDYQHNVRMTKIKAVLDQETWVAVDVPEEFQAIVLSLSSTYSSVNGMEMPSTDDNSKFSDHRSTSQEPTYSAKNIADNGKVTSGTGENKVEFTSQTENNVAGNLKSTLQTIVHGGVGYHMVNCGLILLKMLSEYVDISKCLPSLSLEVVQRVVEILKLFNTRTCQLVLGAGAMQVSGLKSITSKHLALASQIISFMHSLIPDIRRVLFLKIPEARKHLLMSELDRVAQEVTYLHRILSQTLLEVEVQTIFRQVVQIFHSHITEAFSKLEVNTPSGKE

SEQ ID NO: 48758 - protein, 738 aa, Zea Mays
MASPPPFDLCGDLDDDDIDEPVTAVPKDRHLPAAAPTPNGLNDHLLRFTRSLQRPTQNPNPSPNPPPPPPPAAAEEQVEKVKLAGRRRLCKLATTTTATQRVDEEEAEWDNQDDGESILDILDDLTTRFDSLSVQKPSTAARSRTQQLTPLPCAITVDDDLDDHSPDDVDAHAGASSPLQISSSDEARAPTRRSEVKIETDLVSSACTHYACDDVRGKGKNKGTTKDVGRLNRVSKASSFVDSYSDSDYDDCEEDQGTRTDYAVKQLRSKGFTRRPPNTPTFRNHGVSDDELGQEKENLGAVENNAEDVGWEKTEDFKMDPTGTAATSKPYKLPGKIFKMLFAHQREGLRWLWVLHCRGTGGILGDDMGLGKTMQVAAFLAGLFHSRLVKRVLIVAPKTLLAHWTKELSIVGLKEKIRDYSGPSTNIRNYELQYAFKEGGILITTYDIVRNNYKLIRGNSYNNSNDDDDEEGTLWNYVILDEGHLIKNNKTQRAQSLYEIPCAHRIVISGTPIQNNLKEMWTLFNFCCPDVLGDKQQFKIRYETAILRGNDKNATAREKHVGSNVAKELRERIKPYFLRRLKSEVVFDTGASEEKTLAKKNELIVWLKLTPCQRKLYEAFLNSELVHLALQPKASPLAAITILKKICDHPLLLTKKGAEGVLEGMGEMLNDQDIGMVEKMAMNLADMAHDDNALEVGQDVSCKLSFIMSLLRNLVGEGHHVLIFSQTRKMLNLIQIAS

SEQ ID NO: 48759 - protein, 445 aa, Zea Mays
MLPQATEQGLSNPTDILVEVSRTFGTKIYVDRKLDCFKALSLTAPEIITDDSSSRFQMVGFHQLHDRASKELAEARANLQPEPLFIRPSTQWYATCARSPKPSLTEAEQDELGIWHVCFSIHSSRDELEQALQLLQPHWVISTTPPCFAIELSYVKKHCFKTRLTADDPLWKIFRDPLGKSVSSPCSVLATQTDENNSNFVVDDDHSSSSSDGCTYLNVISTLELKFVPPQPPEEPDITLFGRARFASQAIDFMKEDYIALEEARACAPTDSVHGSSEEVETYSGMDFGVKQPPASQQDLMEVGDDVSFKKVGDDVDSCKHEVTSTQLEGFRVKSLPTVQSNMLVVSDQLERSEVVGESKLLKSTEDLNLTIVRSAERTDCQKEPLCYIGSSKCLNASLKRFYRSRNIPVPRPLPSLVKLMESTKRVKIQPNTNYTLLNSRHSLP

SEQ ID NO: 48760 - protein, 632 aa, Zea Mays
MPIDMPRGLPFAVDTWGSSSRSRRHRFLTHAHRDHLVGAGADIDGGGIVYATRLTLHLALRHFPQLGSWEFVEMEVGRTLVVDDPVGAFSVTTYDANHCPGAVMFLFEGQFGTILHTGDCRLTPDCVQNLPMKYITKKGNENICRLDFVFLDCTFSKCFLKLPSKDSAIRQVVLRAVVISCIWKHLHAPFVFLACDLLGHEDILVEVSRTFGTKIYVDRKLDCFKALSLTAPEIITDDSSSRFQMVGFHQLHDRASKELAEARANLQPEPLFIRPSTQWYATCARSPKPSLTEAEQDELGIWHVCFSIHSSRDELEQALQLLQPHWVISTTPPCFAIELSYVKKHCFKTRLTADDPLWKIFRDPLGKSVSSPCSVLATQTDENNSNFVVDDDHSSSSSDGCTYLNVISTLELKFVPPQPPEEPDITLFGRARFASQAIDFMKEDYIALEEARACAPTDSVHGSSEEVETYSGMDFGVKQPPASQQDLMEVGDDVSFKKVGDDVDSCKHEVTSTQLEGFRVKSLPTVQSNMLVVSDQLERSEVVGESKLLKSTEDLNLTIVRSAERTDCQKEPLCYIGSSKCLNASLKRFYRSRNIPVPRPLPSLVKLMESTKRVKIQPNTNYTLLNSRHSLP

SEQ ID NO: 48761 - protein, 563 aa, Zea Mays
MAAADRQLVVAVEGTAALGPYWSTIVAEYVEKIVRSFCASELPGQKLVGTPPELALVVFHTHGPYSAFDVQRSGWTKDVDAFLSWLSGILFSGGGFSEASTCEGLAEALKILQGNPNTTQGHQNHEAQKHCILVAASNPYPLPTPVYCLPTQSTDHKENIETSKEPSIADAETVAKSFAQCSVSLSVISPKQLPTLKAIYNAGKRNLRAADPSVDHAKNPHFLVLLSENFMEARTALSRPLHGNLAPNQTITKMDTAPAVTMPGPTSNGNSSVNAMAGRQPIVGGISTTSVKVEPTTMPPIVSAPAFSHVTPISNVASQGISALQTSSPSLISQEANMGNDNVQEHKPIINPVQQPIRPGGHGSLLNNLSQVRLMNSTSLGGGATSMGLPNMGATPIQVHMSNMISSGMTSTPSVISSMSGPGQPISTQQMVQSTALGSFGSNTPTVTGNSTIAVSSSLTNNQSSMGMGQSVQSVAQGGLVSGSQLGQGGIVANQNVMSTLGPTAISSTPAMMPTPGMVPQTGVNSLGVNNNSAMNMPITQQHANAQQPPPKELYLAKGKDSL

SEQ ID NO: 48762 - protein, 192 aa, Zea Mays
MASSASTTSGGDERPRAPHADACAGTAPPQAHVEWAASMQAYYAAGGQPYAWHAAQSVPYPTPEPVAVAEAKIKRKSSGALSGGCTSGSAGGSEGSSDKRDATHHKVLPSVRRRKSSGANVQGEPSQAATAQHAAAESRVTAKKRPATELSVSTPEIAGTSNVIVRPNLNIGMDLWTDSPVKAETSGQGEIN

SEQ ID NO: 48763 - protein, 310 aa, Zea Mays
MAKLKELLQKSENHICADCGASDPKWASANIGVFICVKCSGVHRSLGTHISKVLSVTLDKWSDSEVDSMIEVGGNSQANAIYEAFIPEGYQKPHSDSTQEEREKFIRSKYELQEFLKPSLRIVSHQPSDSGKHAGNASHSDGSKSQVGMIEFIGILNVKVIGGTNLAIRDMSSSDPYVVLTLGQQKAQTSVINGNLNPVWNEELKLSVPQQYGPLKLQVFDHDMVSKDDLMGEAEIDLQTMINAAAAFGDPELLGDIQIGRWLKSEDNALVRDSAVVVSGGKVKQGMALKLQHTESGELELEMEWMPLNV

SEQ ID NO: 48764 - protein, 327 aa, Zea Mays
MATASLALSLRLAPSSRPLSLRRRGAAGVTCRATTATFHQLDAGRYSVVGAQPSMEVVAKANHVTVMDHEMKSRREHFVPDPMRIPRTIMEQWNPQIADSLPDAFCGGWVGFFSYDTVRYVETKKLPFSKAPHDDRNLPDIHLGLYSDVIVFDHVEKKTHVIHWVRTDCYRSVDEAYEDGRNRLEALLSRLHCLNVPTLSSGSIKLNVENFGPVMQKSTMSSEEYKNIVVQAKEHILAGDIFQVVLSQRFERRTFADPFEIYRALRIVNPSPYMAYLQARGCILVASSPENSYPGTKEDNNQSSACWNHKKRQNKSRRQNFRTIAFE

SEQ ID NO: 48765 - protein, 71 aa, Zea Mays
MSASVPGCLLCSRQARMHPSSTARTFLYRPAMLTVMGVAVVCVCVGILLHTFPRVYAAPTFRWELLERGPM

SEQ ID NO: 48766 - protein, 341 aa, Zea Mays
MLVPKETILKQCIAQLESVYVVRILLINQLKEALVEQESKSEVLRSQLQVARSEAEHAIQLRQRFDGAVVSNGTGSNSSLLMITPTEQTAAMIQGSGVRLTSPQLQSLNPATSLAPTVSAVGDEPKRTAAAMADKLTSLSAPVQVLSSIFSSFVAEHGASLSSKNSGPASGELSGEPPGFQIEKRPRLEKTVQASDMGAPPFPVQVPQLQQQTGAAPTQLPTQINQAPGPFAPPLPSLLPPFLQQFGQSTGGMMGVGPFGMMSGSMPPPPPLPNIMPAGFPGPSGPPPPPLPPAQNQPQQQQQSPQAPQQSPTSAGFFQSSAGMGFFPPVQVQQSPSAQRQ

SEQ ID NO: 48767 - protein, 336 aa, Zea Mays
MTAMPHPRHRGAAKKPMWIIVLLSLVCVALMGAYVYPPRRYSACYFFASSVCTPFKDWLPAVARERTDEEIVSSVVIRDLLSMPMAMSKNPKIAFMFLTPGSLPFEKLWEKFLQGHDGRYSIYIHASREKPVHSSSLFVGREIHSEKVVWGRISMVDAEKRLLGNALEDVDNQFFVLLSDSCVPLHTFDYIYNYLMGTNVSFIDCFFDPGPHGTGRYTMEMLPEIEQRDFRKGAQWFAITRRHALLILADNLYYNKFKLYCKPAEGRNCIADEHYLPTLFNSVNENVHITSDDKKVVTQTPCMWNGTKRPCYLFARKFYPESLNNLLKLFSSYTSA

SEQ ID NO: 48768 - protein, 336 aa, Zea Mays
MTAMPHPRHRGAAKKPMWIIVLLSLVCVALMGAYVYPPRRYSACYFFASSVCTPFKDWLPAVARERTDEEIVSSVVIRDLLSMPMAMSKNPKIAFMFLTPGSLPFEKLWEKFLQGHDGRYSIYIHASREKPVHSSSLFVGREIHSEKVVWGRISMVDAEKRLLGNALEDVDNQFFVLLSDSCVPLHTFDYIYNYLMGTNVSFIDCFFDPGPHGTGRYTMEMLPEIEQRDFRKGAQWFAITRRHALLILADNLYYNKFKLYCKPAEGRNCIADEHYLPTLFNMVDPGGIANWSVTHVDWSEGKWHPRSYRAADVTYQLLKNITSVNENVHITSDDKL

SEQ ID NO: 48769 - protein, 73 aa, Zea Mays
MFLHALFMVQAMAALASSKEADWNAMRLREKELAAVKINPADVEIIASELEIAERTLREHKGDAVAAVRFLLR

SEQ ID NO: 48770 - protein, 257 aa, Zea Mays
MADELDELIGFLSDRNPQVRGAAADIVRGLTGGEDGLRALTARADSALPALLRLLASAGGSGSGEAAADSLVNLSQDAALAARLVALGAVDAAMDVVAKRGGEQPALARRLVMLLVNLTHVESGVAALLQVGDEKVQGLYVAKLVRSFCRSSSDSEEEDIFEYVASTLVNISKVEAGRRILLEPKRGLLKQIIRQFDSTNQLRKKGVAGTIRNCCFEADTQLLSLLSLAEYLWPALLLPVAGKKARCQYARIGSLLP

SEQ ID NO: 48771 - protein, 247 aa, Zea Mays
MADELDELIGFLSDRNPQVRGAAADIVRGLTGGEDGLRALTARADSALPALLRLLASAGGSGSGEAAADSLVNLSQDAALAARLVALGAVDAAMDVVAKRGGEQPALARRLVMLLVNLTHVESGVAALLQVGDEKVQGLYVAKLVRSFCRSSSDSEEEDIFEYVASTLVNISKVEAGRRILLEPKRGLLKQIIRQFDSTNQLRKKGVAGTIRNCCFEADTQLLSLLSLAEYLWPALLLPVAGKKLPD

SEQ ID NO: 48772 - protein, 217 aa, Zea Mays
MAFPTPASVFVDENQQINRGKRAAGSRTKGLKPSENPGNLERRALQDLSNFAKGTGTALKDRPITKEKSTQKQRSQNPVKILSDEDIKLCHEWAKDGVEGFHSTQNDSQKVDKDLLAKRVKKKVASVNSALRGWSDTVFDSLMFPAREVLYEPKVLELEPEILRDISWDLPSSVDGKAKLDEDCLAYDQLDQYPSLENNPVTFELRDEPAIPQLGVH

SEQ ID NO: 48773 - protein, 346 aa, Zea Mays
MPEKIVTAYQSVFDQHFDEDTALNKCKSTVSVLENLKKDIDLASTEGDPPASTMISDLQEQETILKHCIAQLGSVDAARISLINQLKEALTEQESKSEVLRSQLQVARAEAEHAIQLRQRFGGAVVANGTGSSSSPLLMSPQLQSLNPAPSLAPPIGAAGDEPKRTAAAMADKLASLSAPVQVEKRPRLERTVLASDMGAPPFSMQAPRLQQPVGSMPTQAATQMNQAPGLFAPPPPPPLPPLLPPLLQQFGQSAGGMMGMGPFGMMAGSMPPPPPMSSIMPAGFPAPSGPPPPPLPPAQTQPQQQQQSPPQPPAPQQSAGFFQTSAGMGYFPAVQVQQSPSAQRQ

SEQ ID NO: 48774 - protein, 229 aa, Zea Mays
MAYSGQRHAGVGSSSRPANGFKGAANSVEFLGREMLGMRLRDAKPDTDDEREMWSSSDVTDSSSNEAGHVIATTVHGRNGLPKQSVTYIAEHVVGTGSFGVVYQAKCRETGEIVAIKKVLQDKRYKNRELQIMHMLDHPNIIGLKHYFFSTTERDELYLNLVLEFVPETVNRIARQYNRMNQRMPLIYVKLYTYQICRALAYIHNCIGICHRDIKPQNVLVRYDFFSFL

SEQ ID NO: 48775 - protein, 490 aa, Zea Mays
MGLSGSGAVASIVFLGLCATVSCWPAPPPPEMLHESFAGKSEFRTVNRRRLSSCSNPSPYLSINVSSGGAPLPDEAFLTVTVAGVLRPDADDWVAMITPCSSSVSGCPLSGVNYVQTGDLAHLPLLCHYPVKAQYMKRDPGYLGCKTAACQKRDASGACSVRTCAATVTFHVINFRTDVEFVLFSGGFRTPCVLKRSGALRFANPASPLYGHLSSTDSTATSMRLTWVSGDGRPQQVQYGGGKSATSQVATFTRNDMCSSPLLPSPAKDFGWHDPGYIHTAVMTGLQPSQSYTYRYGSDSVGWSDTNTFRMPPAAGSDETSFVIYGDMGKAPLDPSVEHYIQPGSISVVKAVAKEIQTGKVNSVFHIGDISYATGFLVEWDFFLNLIAPLASRVPYMTAIGNHERDYAESGSVYVTPDSGGECGVAYESYFRMPAVSKDKPWYSIEQGSVHFVVMSTEHKWSEMSEQYKWMNQDLSSVNRSRTPWVIFIG

SEQ ID NO: 48776 - protein, 90 aa, Zea Mays
MPEWESSEGSGEFLQLAWSMRNGSDIANFSELRLTAHSGTHVDVLGHVFEHYYDACFNVDTLELAVLNGPALLVDVPRDKNITGWCTMVG

SEQ ID NO: 48777 - protein, 202 aa, Zea Mays
MILMNDQEEEYDGPPQKEIPSLIVWTLGGKNVYVEGSWDNWKSRKAMQKSGKDHSLLLVLPSGVYRYRFVVDGERRCLPDLPCETDAMGNAVNLLDVNDFVPESVESVVEFEPPLSPDSSYSFQAPEDKDFAKEPPALPAQLHLGVLNSQNSEESCARPQHIVLNHLFIEKGWGAHPLVALGLTHRFESKYVTLVLYKPIER

SEQ ID NO: 48778 - protein, 59 aa, Zea Mays
MVWTSLPGLVAFTKSFGSCGGYIVASKEIIQHLKHSCPAHLYATSMSPPAVQQENIKIA

SEQ ID NO: 48779 - protein, 258 aa, Zea Mays
MDCCICSPTASVYRLPRNSICAPCHEGAKAVIAFLNKDGERQEEDAGGHHHHGSALKSRGSTTQPHSAAKGMRDAWEQVKEMRGREEEAHRRAAFLAMAPWKERLHTDIVVKPGTGSPILAHKAILLAHDELSLLLAFLYTGNLLEDGPAVPPVPEAGGAAAARAARGGRQEVRRPVPAPGLRGAAGRGPGRLQRAADAGGRGPELQRGAQGARHGRGGGARPAGGVLARVLRPGHQERGPVRRDHPGAAGQDVHDDK

SEQ ID NO: 48780 - protein, 328 aa, Zea Mays
MFSGTGPSGGAAHSTSTGGGGGSPSDRGGPAPSASASVSTPASESTVARRLNGLDPHGDDAPSSQPATSKKKKRGARAVGPDKNGRGLRQFSMRVCEKVESKGRTTYNEVADELVAEFSDPNINIDSPDPDNSSAQQYDEKNIRRRVYDALNVLMAMEIISKDKKEIQWRGLPKTSMNDIEELKTEVNGLKGRIDKKNAYLQDLQDQLYGSGDAPSGGVALPFILVQTRPHATVEVEISEDMQHVHFDFNSTPFELQDDSFVLKAMALSGEEADCTQAPGANGGECSSTRNNYWHHHQQPQPPGPRVVRVPNSPPIPGILKGRVKHEH

SEQ ID NO: 48781 - protein, 489 aa, Zea Mays
MAAGRHGGYRDYEERERELDAEASRRSKEQHHHLGGRHRDVDRRRDGGRSRGGRDFANGHGRRRSPPPRSRLAGRLGDREPGEVLSGSASDDSGGRSDRGRENGVRSSSREGDMVAGTGISSPIKKRKFSPIIWDRDSPKPPHSGAARDKKSVESVPSELPPPPPLPQDHIPLSLSVEKSPMDVETTVGTESAEQLPEHEVNKVIEQEEDYPSPTMRNISTSRWAGANDDEEGGAAPMKKRSVSPADSSVPGQWKRASPEPGEVSGGRAMSRSSDSGKIGNDEKEDSEVDKDDYMDVDREHASDSGTENCMSDTDSDNEMCRPETPEPERPPHRCINMLQGCRSVDEFERLNKINEGTYGVVYRARDKKTSEIVALKKVKMEREREGFPLTSLREINILLSFHHPSIVDVKEVVVGSSLDSIFMVMEYMEHDLKGVMETMKQPYTQSEVKCLMLQLLEGVKYLHDNWVLHRDLKTSNLLLNNRGPQNCC

SEQ ID NO: 48782 - protein, 372 aa, Zea Mays
MVPTTTGADGDGERRVTASAVGGGDGGAAKSTSMGADVDDPASTTGTGGDGDAVGSPHSTTGSGTTAVHPWRTQKCMFCTCTRRSGMTCTGGSAASSPTANASNMASSTMCRTSRIWRMRMETITFTKCFVTRTSFTYMSPSDVAGNHHDPRRRRCLPVQERTEQAAGDTYDAMTARSHQADPSRFFPIPIPLYPSPHTQSTDSLGVGHSHRPRRPQPTSPPGDRMAERERKRKRAAEEWERRKRGRKREKERQVGWTSDPVEALGEDVMGRVMEFLDARSVARCTAVSCAWRGVAADNRLWAPMCTELMAGKAHIPRLTSIRTGSKLSTYSMVIMDGKRSRITKEDLCDHAWEYRFTILTLLVLSSTCFSR

SEQ ID NO: 48783 - protein, 171 aa, Zea Mays
MPARARWRLLALPLALLLVAGSAHGLVKPEAAAAPKPPVPKAISDLRDAIVKGLGFQAEGLKVSGFDVRDALVGHAVAYEFDIEVGRKVLPVRLLEDVSRWDFVDLPIFRSQADADDTALAEIRRTGTGSIVEPTLPPFQLAGPMELWIQNGDDVRLALPVRSPFCKNVGN

SEQ ID NO: 48784 - protein, 180 aa, Zea Mays
MASATGVSSSEMAVDHATGPGAVDKPRFDALTPNEMSGGRPQFRKVPVPQHRFAPLKRCWMEIYTPVYEHMKIDIRMNLKARRVELKTRQDTPDDVKTLRGEHLSRAIGRLSGKGGKTKYAIENSTRTRIVIADTKIHILGSFVNIKVARDSLCSLILGSPAGKVYSKLRAVSARLAERY

SEQ ID NO: 48785 - protein, 258 aa, Zea Mays
MLWNTTWGEDVIAILPWEEWWEFEVTKDDSNPQIALLPLHPDLRAKFNETAAWIYAKSMEGKPYGYHNMIFSWIDTISDNYPPPLDAHVVASVMTVWSKLQPEYAANMWKEALNKRLGTKGLDLSEIIVESEKRGITFDKLLSVPENDSWVYEDGQSASCVAFVLMMYKEAGLFDPITSSIEVTEFTIKDAYILNFFEDNSTRLPEWCNKDDDVKLPFCQIKGKYRMELPGYNTMKPYAHMNERCPSLPPDYNRTKGC

SEQ ID NO: 48786 - protein, 66 aa, Zea Mays
MMMVVGIDDSEQNFYTLKWAHCSTSSRQASCNSTALSSSPSSPLPPPVSALPAQVCESPIHVRIQG

SEQ ID NO: 48787 - protein, 272 aa, Zea Mays
MMYVRQQRAAKSMVHRPGSRLSRKLASVVSSSSPKRSSEKRRSSTYVVRDNTKEKPTYIMVPKREEHTQREKDVAGNSGDATSGGTSGSGQVAEFKRDKIVILKGRGRIDSNTPNGATQHSSTPIKNVPPSRSRQDQRLEASGKIIKTILSNKEARSSNPSEHEQEGHMFNTEKDKRPPRAFNPRTIVKDQVVENAERSHFDEKANHLHGSVPIGEKVERHARNRDRPDRGVWAARRYDKSTSAGSSHPSSSEFPQMQSHSGDNILQLADGM

SEQ ID NO: 48788 - protein, 254 aa, Zea Mays
MNGATMEIGAVAAMRYVKDGIKAAKLVMEHSEHTLLVGEKATAFAISMGLPGPTNLSSPESIEKWEKWKQNHCQPNFWKNVDPVVGSQGGLCQGYFESDNLLEPIKSNLKVVNRHNHDTISMAVIDKMGHIAVGTSTNGATFKIPGRVGDGPIPGSSSYGDDEVGACGATGDGDIMMRFLPCYQVVESMRQGMDPRDAATDAISRIARKYPDFIGAVFAVNKEGVHAGACHGWTFQYSVRNSSMQDVEVITVYP

SEQ ID NO: 48789 - protein, 321 aa, Zea Mays
MVVRGAPAIAIAAALALAVEVSDLDFIGTPEEAASFVSKKLEYLVSSRPTAVNLSDAATKLQTLVSKAAETAKDSKSIFQVYIEAAETMLVDDVADNKAIGSHGAVFLQRQLANSKKISVLTHCNTGSLATAGYGTALGVIRALHSGGVLEKAFCTETRPFNQGSRLTAFELVHEKIPATLIADSAAAALMKQGHVQAVIVGADRIAANGDTANKIGTYNLAISAKHHSVQFYVSAPVTSIDLSLPSGDEIVIEERSPKELLNSEGGLGKQVAASGISVWNPAFDVTPANLITAIITEKGVITKTDADGSFDIKGFLLPAK

SEQ ID NO: 48790 - protein, 633 aa, Zea Mays
MALNHLIFEQFCINYANERLQQHFNRHLFKLEQEEYVEDGIDWAKVDFEDNQDCLSLFEKKPLGLLSLLDEESTFPNATDLTFANKLKQHLNSNSCFRGERDKGFAVRHYAGEVAYDTSGFLEKNRDLLHMDSIQLLAKCKTFLPKMFASKMLVQPDDSMSVPYRSSAADSQKLSVAMKFKGQLFQLMQRLESTTPHFIRCIKPNNLQLPAIYEQGLVLQQLKCCGVLEVVRISRSGYPTRMTHQKFARRYGFLLLEDVASQDPLSVSVAILHQFNILPEMYQVGYTKLFFRTGQIGKLEDTRNRTLHGILRVQSCFRGHQARHHARERIRGVLALQTFIRGEKARQIYSSLLRKHRAAVILQSNLRCWLARRYFINVRKASVIIQSGIRGSLVRRCNGNIDLINVLREFESKQEAEGDQILIKASVLAELQRRILKAEATVREKEEENETLHQRLQQYENRWLEYEQKMKAMEEMWQKQMRSLQSSLSVAKKSLALHETPRMSDSSVDQSWESNGNHVSSGSQLVPRTGGREMSAGLSVIGRLAEEFEQRSQVFADDAKFLVEVKSGQADASLNPDMELRRLKHNFDSWKKDFSGRIRETKMILNKLGNGNESSPNSVKRKWWGRLNTSKFS

SEQ ID NO: 48791 - protein, 696 aa, Zea Mays
MKVNNENIVQKLTLAQATDTRDALAKSLYASLFEWLVEQINKSLSVGKRRTGRSISILDIYGFESFDKNSFEQFCINYANERLQQHFNRHLFKLEQEEYVEDGIDWAKVDFEDNQDCLSLFEKKPLGLLSLLDEESTFPNATDLTFANKLKQHLNSNSCFRGERDKGFAVRHYAGEVAYDTSGFLEKNRDLLHMDSIQLLAKCKTFLPKMFASKMLVQPDDSMSVPYRSSAADSQKLSVAMKFKGQLFQLMQRLESTTPHFIRCIKPNNLQLPAIYEQGLVLQQLKCCGVLEVVRISRSGYPTRMTHQKFARRYGFLLLEDVASQDPLSVSVAILHQFNILPEMYQVGYTKLFFRTGQIGKLEDTRNRTLHGILRVQSCFRGHQARHHARERIRGVLALQTFIRGEKARQIYSSLLRKHRAAVILQSNLRCWLARRYFINVRKASVIIQSGIRGSLVRRCNGNIDLINVLREFESKQEAEGDQILIKASVLAELQRRILKAEATVREKEEENETLHQRLQQYENRWLEYEQKMKAMEEMWQKQMRSLQSSLSVAKKSLALHETPRMSDSSVDQSWESNGNHVSSGSQLVPRTGGREMSAGLSVIGRLAEEFEQRSQVFADDAKFLVEVKSGQADASLNPDMELRRLKHNFDSWKKDFSGRIRETKMILNKLGNGNESSPNSVKRKWWGRLNTSKFS

SEQ ID NO: 48792 - protein, 120 aa, Zea Mays
MASVNPAVAEAEAEAVGRRDELSESLAELFTNVSLMVRGELQMNDRVSQEYSNYGDIAAGLRVFVEQLNEKNRGFEDYVSQIDAIDQQVTEFEAVVSMLDKHVALLEKKVKSAYHISTTQ

SEQ ID NO: 48793 - protein, 75 aa, Zea Mays
MHCFLSLLFCLCYEIIGELLFSKDMIQFSLIYGHSSNIDHEDSPFLTGKMIETLNMFFLRDAISSSPFTLVALLH

SEQ ID NO: 48794 - protein, 487 aa, Zea Mays
MGASFDHGEDGRLHLAREGGHSHNRIVHSADMTGREIERALLQAVHNDDNISLFGHHFAIDLLTCQKNGEIYCYGVDSIDIETQKVVRFISKVTLLASGGAGHIYPTTTNPPVATGDGIAMCHRAQAVISNMEFVQFHPTALSDEGLPIKPKTRRENAFLITEAVRGDGGILYNQSMERFMPMYDDRSELAPRDVVARSIDDQLKKRGEKYVLLDISHRPRDKVLAHFPNIAAECLRYGLDITRQPIPVVPAAHYMCGGVRAGLQGETNVKGLYVAGEVACTGLHGANRLASNSLLEALVFARRAVQPSIDLMVDADGDARPSLVARWARPTLPRSVLGDSVLSDIVGRTRQARMELQSVMWEYVGIVRSTGRLKQAEWRIGDLESEWEEFLFRRGWKPTTVGVEVCEMRNLFCCAKLVVRSALARRESRGLHFTEDFPYLEESRRKPTVIFPAAVQELTWSSKPLQRQLQADDNACSSSGWALGIR

SEQ ID NO: 48795 - protein, 475 aa, Zea Mays
MAGKQFPSPAHSRSASASSRRLLAAVAASLILLTASYFLLLSPSSHRSAPAILANPSATTSFLASLDRFLSDPHPSASAAAPVELDAAIRVQEDARLYGDPTWPAPAAGLLRVYVYEMPSKFTYDLLRLFRDSYRDTDNLTSNGSPVHRLIEQHSIDYWLWADLIALDSQRLLKSVIRVQQQEEADIFYEALKWVTDQPAWQRSEGRDHVIPVHHPWSFKSVRRSVKKAIWLLPDMDSTGNWYKPGQVYLEKDVILPYVPNVDLCDHKCVLETQSKRSILLFFRGRLKRNAGGKIRSKLVEELKSAKDIVIEEGSTGAQGKAAAQDGMRKSFFCLSPAGDTPSSARLFDAIVSGCIPVIISDELELPFEGILDYREIALFVSASDAVQPGWLLKYLRGINAKRIREIQSNLVKYSRHFLYSSPAQPLGPEDLTWRMIAGKLVNIKLQIRRSQRLVKESRSICTCECRVGNTTRML

SEQ ID NO: 48796 - protein, 629 aa, Zea Mays
MNGPSNFMPTPEQDVLDVKPLRTLAPMFPAPLGVNTFNHSTTPPLIFVTPSGQFQGGFGDWNNSAAKSFFAFSSKDARGGKADTFSDQNTGTGKAATFGDQDAFGSQNVFASDHSTGTGKAATFGDQDAFGSQNVATGVQDAAKGQTATDWTDVSANPNGPIDAIAISAYRSTQPNVISLDDDDDDDDDEPYAANKTSASGRKIKRPSHLSGYNVSDALVSDSSNSMKVKRPKSSHGKAAADNEHALLPPSEDPREIVEAVLMTFEALRRRHLQLDEAQETSKRADLKASAILMSSNIRANPGKRIGVVPGVEIGDIFYFRMELCIIGLHAPSMAGIDYMTAKFGDEDDSVAICIVAAGGYDNNDDDTDVLVYSGSGGNSKNSEEKHDQKLERGNLALERSLSRKNVIRVVRGYKDPGCLTGKVYIYDGLYRIHESWKEKTKSGIFCFKYKLLREPGQPDGVAIWKMSQKWVQNPLTRGSVLNPDLSSGAENLPVCLVNDIDSDEVPHHFTYTTQVEHLKPLSSVKPLQGCRCLSVCLPGDANCCCAQRNGGSLPYSSSGLLVCRKTMVYECGESCRCSFNCRNRVTQKGVRIHFEVFKTGNRGWGLRSWDAIRAGSFICECRVLVRGH

SEQ ID NO: 48797 - protein, 386 aa, Zea Mays
MEGHGVPKQFQGRFHVVPKHSDWFSPGTVHRLERQVVPHFFTGKSPGHTPEKYVMLRNKVIAKYLENPSKRLAFAECQGLVGSTSELYDLSRIVRFLDTWGIINYLAAGSVHRGLRMATSLLREEPTGELQLLTAPLKSIDGLILFDRPKCSLPVEDISRMAATSSNSEAVDFDAAFSDLDGKIRERLSESSCSYCLQPLPSLHYRSQKEADIFLCSDCFHDARYITGHSCLDFQRVDGDNDESENDSDKWTDEETLLLLEGIEKYNDNWDDIAGHVGTKSKAQCIYHFIRLPVEDCLLENVEIPNAPIPFRPQSNGYQCLDSNGSTSGAPVQNIQQGNELPFINSSNPVMSLVAFLASSIGPRVAASCAHAALSFLTRDEDSRKC

SEQ ID NO: 48798 - protein, 401 aa, Zea Mays
MEGHGVPKQFQGRFHVVPKHSDWFSPGTVHRLERQVVPHFFTGKSPGHTPEKYVMLRNKVIAKYLENPSKRLAFAECQGLVGSTSELYDLSRIVRFLDTWGIINYLAAGSVHRGLRMATSLLREEPTGELQLLTAPLKSIDGLILFDRPKCSLPVEDISRMAATSSNSEAVDFDAAFSDLDGKIRERLSESSCSYCLQPLPSLHYRSQKEADIFLCSDCFHDARYITGHSCLDFQRVDGDNDESENDSDKWTDEETLLLLEGIEKYNDNWDDIAGHVGTKSKAQCIYHFIRLPVEDCLLENVEIPNAPIPFRPQSNGYQCLDSNGSTSGAPVQNIQQGNELPFINSSNPVMSLVAFLASSIGPRVAASCAHAALSFLTRDEDSRLAIFVLFRVTKCFCSDT

SEQ ID NO: 48799 - protein, 110 aa, Zea Mays
MVHASELREPVQQVRAHFPGQAHLQGALVDDGGVPRRLRPLRLDCGEAGVDDPVRAGAGRRGVPVAGGHAARVRRQPLRVRGEAARAARQDVLARGKRMRRGHVASIARE

SEQ ID NO: 48800 - protein, 87 aa, Zea Mays
MASVIDGNGGSRLVVTELGHLKELAMQLEGHLGGSSPDLCKHLASQISSITDRSISLLITATSSSPHGGASDAPPFIRATTKKSLNY

SEQ ID NO: 48801 - protein, 345 aa, Zea Mays
MRPHAVGTGGGGVGRRKAGAAAAAASREWMVVPASGPARVEEAGKHAVMARTGLPARDLRVLDPLLSYPSTILGRERAIVVNLERVKALITATEVLLPNTKDPAFARFVRDLQTRVLASSSDQAAEFTDMEGESSNVASPFPLPSASKGHEMEMTKKTTAVVPEMTSSSSMPNLAIAKDGNTNVLPFEFRALEVCLESACRSLEDETSTLEQEAYPALDELTSKISTLNLERVRQIKSRLVAISGRVQKVRDELEHLLDDEMDMAEMYLTEKLTQQEISEASSRAEVDDPSQTEEDRDEDYRSEPDGSNDSFIGYKPNIEELEMLLEAYFVQIDGTLNKLSHGVR

SEQ ID NO: 48802 - protein, 255 aa, Zea Mays
MKRLVVVLALVLAAALGPATAPAPARAQLRRDHQAPPGPRPHSVTITEFGAVGDGRTLNTVPFQNAVFYVRSFADKGGAQLYVPRGRWLTGSFNLTSHLTLYLEEGAVIVGAKDSSQWLIVEPLPSYGQGLDLPGPRHQSLISGYNLTDVVITGNNGVIDGQGLVWWQWLRSHELNHSRPNLLEFLYSEDIVISNLTFLNSPAWSIHPVYCSNVKVHNVTIKTSLDAPLTDGIVPDGQMFYGDCEHCLYPASGND

SEQ ID NO: 48803 - protein, 624 aa, Zea Mays
MSHDTGAGVESLSLDLLAHALAAVRDPRDRKSCRLASRAFARAEAASRRAARVLRRDALPRALRAFPALSSLDLSACAGLDDASLAAALPEEPLPVRRVRLARASGVGWRGLDALVAACPSLEAVDLSHCVAAGDREMAALAAAAGLRDLVMDKCLGVTDVGLAKVAVGCPGLQSLSLKWCREISDIGVDLLAKKCPQLRSLDISYLKVTNESLRSLSTLEKLEDIAMVSCLFVDDDGLQMLSMCSSLQSIDVARCHHVSSLGLASLMDGQRSLRKINVAHSLHEIEACVLSKLSTIGETLTVLRLDGLEIFASNLQAIGSTCKNLVEIGLSKCNGVTDDGIVSLVARCRDLRTIDVTCCHLLTNAALAAIAENCRKIECLRLESCPFVSEKGLESIATLCSDLKEIDLTDCRINDAALQQLASCSELLILKLGLCSSISDEGLVYISANCGKLVELDLYRCSAVTDDGLAAVASGCKKMRMLNLCYCTQITDGGLKHVGGLEELANLELRCLVRVTGVGITSIAVGCSSLVELDLKRCYSVDDAGLWALSRYSQNLRQDVKMVHLSWVSIEGFEMALRAACGRLKKLKLLGGLRSVLSTELLLTLQACGCRVRWVDKPLVYKG

SEQ ID NO: 48804 - protein, 967 aa, Zea Mays
MDDSENNAPSTPGSPGFSTDRLPPNTTTSRGATDPSSYSDDDGEAEVDPHVLPDDDDPAAVAAPDEDEEGEDLFNDNYLDDYRRMDEHDQYESVGLDDSLEDERNLDEIMADRRAAEAELDAREVRTGATADRKLPRMLHDQDTDDDTNFRRPKRHRASFRQPSGPRTPRSDDDGDGATPSSPGRSHRGMSSGGDVPMTDQTDDDPYEDEFDEEDEMNMYRVQGTLREWVTRDEVRRFIAKKFKEFLLTYVHPKNDQGEFEYVRLINEMVLANKCSLEIDYKQFIYIHPNIAIWLADAPQSVLEVMEEVAKNVVFDLHKNYRNIHQKIYVRISNLPVYDQIRNIRQIHLNTMIRIGGVVTRRSGVFPQLQQVKYDCNKCGTILGPFFQNSYTEVKVGSCPECQSKGPFTVNVEQTIYRNYQKLTLQESPGIVPAGRLPRYKEVILLNDLIDCARPGEEIEVTGIYTNNFDLSLNTKNGFPVFATVVEANYVAKKQDLFSAYKLTDEDKAEIEKLSKDPRIGERIIKSIAPSIYGHEDIKTAIALAMFGGQEKNVKGKHRLRGDINVLLLGDPGTAKSQFLKYVEKTGHRAVYTTGKGASAVGLTAAVHKDPVTREWTLEGGALVLADRGICLIDEFDKMNDQDRVSIHEAMEQQSISISKAGIVTSLQARCSVIAAANPVGGRYDSSKTFTQNVELTDPIISRFDVLCVVKDIVDPFTDEMLARFVVDSHARSQPKGANLEDRVSTDVDDDPLAAARQADPDVLSQDMLKKYITYAKLNVFPKIHDADLDKISHVYAELRRESSHGQGVPIAVRHIESIIRMSEAHARMHLRSYVSQEDVDMAIRVLLDSFISTQKFGVQKALQKNFRKYMTFKKDYNELLLLLLRTLVKDAVHFEEIMAGSASRLTHVEVKLEDAQEYEIYDLKPFFSSACFRDNGFLLDEGRGIIRHPLICYRHTIDTWLVAFWI

SEQ ID NO: 48805 - protein, 589 aa, Zea Mays
MTQEPTSLLPIWARTPTTRRPKSRRHQLPIPSDAMEEARDHRLSSTAGRPFLSGFCAAALRRKPLGARASAAAAATGEGLVRQLGVLDLVLLGIGASIGAGIFVVTGTVARDAGPGVTISFVLAGAACVLNALCYAELASRLPAVVGGAYLYTYAAFNEITAFLVFTQLMVDYHIGAASIARSLASYFIEFLELIPLLKGQIPSWVGHGEEFFGGVVSINILAPVLLIILTAILCYGVKESSAVNTFMTTLKIIIVIVIVFAGVFEVDVSNWSPFMPNGFKSVVTGATVVFFAYVGFDAVANSAEEAKRPQRDLPIGILGSLIACVLLYVAVCLVITGMVPYTLLGEDAPLAEAFAAKGLKFITVLISIGAVAGLTTTLLVGLYVQSRLYFGLGRDGLLPSVFAEVHPTRHTPVQSQIWVGCVAAVMAGLFNTGYSVVSACVITLRWNDKGTSRRSLGSMSIWQEGVLSLVIVALCGFIVGLCYRFNYAIAFMVVAFLIAVAASFALQFRQVYVDPPGFSCPGVPLVPIISVFFNMVLFAQLHEEAWYRFVILSLIAVGVYAGYGQYNAVPSSSEHSTIGYHGIPSEAA

SEQ ID NO: 48806 - protein, 164 aa, Zea Mays
MERKKLGTGQSEQMNSLYRFWSYYLRDNFNEDIYKDFKKLALEDAAASYRYGLECLFRFYSYGLEKKFQPNVYEDFEKLTFEFYRNGDLYGLEKYWAFHHYRNPDIGPVDKLPELERLLREEFQTLEDFKAKEKARATTEKGTGISSSSVVVAASHSKAETKQV

SEQ ID NO: 48807 - protein, 870 aa, Zea Mays
MSSISILHRSCLRLGLSSGDMGYRLPPKEIQDIVDAPPLPVLSFSPNKDKILFLKRRALPPLSDIAKPEEKLAGLRIDGNSNTRSRMSFYTGISIHKLLDDGTLGPEKEVHGYPVGARINFVTWSQDGRHISFSIRVDEEDSKSGKLRVWIADVESGEARPLFKSPEIYLNAIFDSFVWVNDCTLLVCTIPATRGDPPHKPSVPSGPKIQSNESKNVVQARTFQDLLKDEYDAKLFDYYATSQLVLASLDGTVKPIGPPAIYTSVDPSPDDKYIMLSSIHRPYSYIVPCGRFPKKVELWTVDGKFIRELCDLPLAEDIPITMSSVRKGKRSINWRPDKPSMLYWVETQDGGDAKVEVSPRDIVYMENAEPINGEHPEILHKLDLRYAGTSWCDESLALVYESWFKTRKIRTWVLSPDKKDVSPRVLFDRSSEDVYSDPGSPMMRRTVMGTYVIAKIKKEDGNIYVLLNGMGATPEGNIPFLDLFDINTGSKERIWESDREKYYETVVALMSDKTDGELLLDQLKILTSKESKTENTQYYLQTWPEKNQVKITNFPHPYPQLASLYKEMIRYQRKDGVQLTANLYLPPGYDSSKDGPLPCLVWSYPGEFKSKDAAGQVRGSPNEFPGIGATSPLLWLARGFVILSGPTIPIIGEGDEEANDRYVEQLVTSAEAAVEEVVKRGVAHPDKIAVGGHSYGAFMTANLLAHAPHLFCCGIARSGAYNRTLTPFGFQNEDRTLWEATNTYVEMSPFMSANKIKKPILLIHGEQDNNSGTLTMQSDRFFNALKGHGALSRLVILPFESHGYSARESIMHVLWETDRWLQNYCVNGTSKVDSVSEADSKNKTLSASGGSAAREGLNPEELSSLPRSLL

SEQ ID NO: 48808 - protein, 216 aa, Zea Mays
MGLVGGVVGFCLGLPIGLAAAYFVYLRYFAAARRLQDPVIKPLRDLDSETLQATIPHIPLWVKSPDYERIDWMNKFIFDMWPFLDKAICKHINRATRPIFDQYVGQYGIESIEFGELTLGTLPPTFQGIKVYEMLEKELVIEPVIRWASTSNVTVNVKVQSFEVTVQLEDLHIMLTPRVILKSLVPSFPCFANLCVSLMEKWRYKEASWNLACKGN

SEQ ID NO: 48809 - protein, 320 aa, Zea Mays
MAIPGLYQYVQDQLSKQISNLYHWPKVIQIPILDGASGATKKPVGILHVKVIRALNLLKMDFLGKSDPYVKMRLSGERLPSKKTSVKMSNLNPEWNEHFRFIVKDPDTQVLELHMFDWEKVKMHDKLGMQVIPLRLLTPYESKLFTLDLVRSMNPNDPQNKKNRGKLIVELTFDPLREDNMSSDAEGNASVRRDADGGGGGVLLVSVENAEDVEGKRHTNPYAEVLFRGERKKTKVIRKTREPRWSEEFQFMVDEPPVEDKIHIQVKSKRRGLPFRNKESLGHVNINLVDVVNNGRINEKYHLINSRNGMIHVEIKWSTV

SEQ ID NO: 48810 - protein, 224 aa, Zea Mays
MKKLRHPNILLFMGAVTSPQRLCIVTEFLPRGSLFRLLQRSATKLGVRRHVHMALDIARGMNYLHHSSPPIIHRDLKSSNLLVDKNWTVKVADFGLSRLKRETFLTTKTGKGTPQWMAPEVLRNEPSDEKSDVYSYGVILWELVTQKIPWENLNSMQVIGAVGFMNQRLDIPSEVDPQWRSIILNCWESDPQQRPSFQELLERLRELQRRYAIQQRNAKNSVEE

SEQ ID NO: 48811 - protein, 560 aa, Zea Mays
MDSSGEELLKKIRELEVGQAQLKQEMSKLIPGAVERRRSQSVSPRRGAPVPPPTKAKAGPPGRLLSGGFEGGQRAWARGSASFPHSSPLHREGRATGAGNGSTSARLPERQYSRVLQSLGHSVHILDLDGRIIYWNQSAENLFGYPASEALGQDALMLLVDSGDHNVVNDIFRRISMGESWTGKFPVKSKQGDRFSAVATNTPFYDEDGSLVGIICVSSDSRHLEQIFCKPPTSARPQSESSRTSCDGSCSNTSRRINLLNRSPFDPQIPLQSTFASRITNLATKVTNKVRSRVSTDDYGIEREGGSGESHCSDRGAKEEPTSSGTNTPRGNAPHGPFSTDENSPGKSTNPSSDELEGKVGLHKFLSSKAEALLNKKGISWPWKVRENDGPDERNHVILLHGDQENVMNHQKVSDSSIAPDSQGAEHNLPSKNEASGSWSSYNNNSTSSASSTGSTNSSALYKVDHEADCLDYEILWEDLVIGEQIGQGSCGTVYHALWYGSDVAVKVFSRQEYSEDVILSFRQEVSLMKKLRHPNILLFMGAVTSPQRLCIVTEFLPRL

SEQ ID NO: 48812 - protein, 130 aa, Zea Mays
MKGDYHRYLAEFKTGAERKDAADSTLAAYQAAQDIAVKELPPTHPIRLGLALNFSVFYYEILSSPDRACSLAKQAFDEAISELDSLGEESYKDSTLIMQLLRDNLTLWTSDMQEDGGDEMRDANKPDEEQ

SEQ ID NO: 48813 - protein, 80 aa, Zea Mays
MTSLVSPNFSFLMKCLRLFKKKRFSQLFCTTAALMLLQVIDHIWTVLVFFTALHIGFSVLRVCFFLILPFLLCATLQIKT

SEQ ID NO: 48814 - protein, 585 aa, Zea Mays
MYRASNFIPDPNQVLLDANPLSATTNGVSYTGTSGNGAIDATPISAYKTRSSISLDDDDDEPYSGNQGLASERKARRGRPPGSGRDGSNGKLKRPKPTYKNFVAGKELVFLSSTSDPREFVESVHMTFEALRRRHLQMDETQDASRRADLKAGAIMMASNIRANSGKRVGTVPGVEIGDIFYFRMELCVIGLHAPSMGGIDYMTTKFGKDEDSVAICIVSAGGYENEDDDTDVLVYSGQGGNNRNTEERHDQKLERGNLALERSLHRKNEIRVVRGFKDPFCLTGKIYIYDGLYKIHESWKERTKYGVNCFKYKLLREPGQRDGAALWKMTQRWIDNPATRGRVLLADLSSKAEILPVCLVNEVDHEKGPVHFTYTNQVKYLRPLSSMKKLQGCGCQSVCLPGDASCACGQHNGGDLPFSSSGLLSCRKPIVYECGESCNCSTNCRNRVTQKGSRLHFEVFRTTNRGWGLRCWEPIRAGSFICEVSTYVSPDEFEPLPVKISAKNMGNVSRFMNHSCSPNVFWQPVQYDHGDDGHPHIMFFALKHIPPMTELTYDYGVAGAESSGSGSRRTKNCVCGSQNCRGLF

SEQ ID NO: 48815 - protein, 233 aa, Zea Mays
MGTYGYCAPEYAMTGQLTAKSDVYSFGVVFLELITGRKAIDNTKPHGEQNLVAWARPLFKDRRKFPKMADPSLQGCFPMRGLYQALAVAAMCLQEQAATRPFIGDVVTALSYLASHTYDPNAPAQHNRSNSSTPRVSRGGGSNDQRRLRSSNHHSPDLRREVTTASRYDDEVSRANSGTGSGRRSGLDDADMSGSQLGSPAHTGRKRGSPRTSESQHAIAEAKTYGENSRGRK

SEQ ID NO: 48816 - protein, 154 aa, Zea Mays
MAQEAAPARPVGPTRLVYFDDMGALHHSSATVLSVHQEEGGRVAVVLDATVFHPQGGGQPADTGVISAGGARFLVEDVRAKDGVVFHYGRFEGTEQGCGTVFKEGGTVSLQVDAERRSFNSRLHSAGHLLDICVHNVGLFHLEPGKGYHFPDGS

SEQ ID NO: 48817 - protein, 363 aa, Zea Mays
MASPAGGESPAKPVLLHGDLDLWILEARLLPNMDMFSEHVRRCFAACRPPSSCGTKHPPPAAAGRRHHHHHRNIITSDPYVTLSVSGAVVARTAVIPNSQDPVWEERFAVPLAHRAADLEFQVKDNDTFGAQLIGTVAVPADRVVSGDEVEDWFPVIGTNGKPYKPDTALRLRFKFQPIADNPAYRHGIAGDPDHRGIQDSYFPLRHGGQLTLYQDAHVREGDLPEIELDNGKTFQHNACWEDICHAILEAHHMIYIVGWSVYDKVRLVREPSPSRPLPEGGDLTLGDLLKFKSQEGVRVCLLVWDDKTSHDKFFIKTGGVMATHDEETRKFFKHSSVICVLSPRYASNKLSIFKQQLMTLNL

SEQ ID NO: 48818 - protein, 446 aa, Zea Mays
MAAMTHLNTGFSKILTQYSKMITITLHFRIDGPAAYDVLTNFEQRWRKATKWRDRFRRVSHWKDDALIKLERISWILSPSPNVPNNHPSLWVSKEEDHENWHVQVFRSIDSGSLKGFPSDCKAASKLNLVCRKNLVIDKSIHTAYVRAIRSAQHFIYIENQYFLGSSYAWPSYVNSGADNLVPIELALKIASKIKAGERFAVYVVIPMWPEGVPTAASVQEILFFQAQTMEMMYKIIADELKATDNKDMHPEDYLNFFCLGNREEPPSNGSPESEKSTDKSAAALASKYRRFMIYVHAKGMIVDDEYVILGSANINQRSLAGSRDTEIAMGAYQPHYAWSTKNGHPHGQVYGYRTSLWAEHLGTVDDRFKDPSSLECVRFVNQIAVENWQRFTAEEMSTLQGHLLKYPVKVEADGKISPLSDQECFPDVGGKILGAPTSLPDSLTM

SEQ ID NO: 48819 - protein, 159 aa, Zea Mays
MIKNLMHEGKLVPSDIIVRLLLTAMLQSGNDRFLVDGFPRNEENRRAYESVIGIEPELVLFIDCPREELERRILHRDQGRDDDNVDTIRKRFQVFHDSTLPVVLYYDRMGKVRRVDGAKSADAVFDDVKAIFTQLLTTQASQGGNASSRRSNPPLCSVL

SEQ ID NO: 48820 - protein, 186 aa, Zea Mays
MSQAGAFPPGKKITVVFVIGGPGSGKGTQCSKIVRHFGFTHLSAGDLLRQQVQSDTEHGAMIKNLMHEGKLVPSDIIVRLLLTAMLQSGNDRFLVDGFPRNEENRRAYESVIGIEPELVLFIDCPREELERRILHRDQGRDDDNVDTIRKRFQVFHDSTLPVVLYYDRMGKVRRMAPNPLMQSLTM

SEQ ID NO: 48821 - protein, 225 aa, Zea Mays
MTSSRQMELHYINTGFPYTITESFMDFFEGLTYAHADFALMDGFQDQGNPYWTMMHTNSYKTDGGRRTWDNTTPVNNVDSANVVLQGGEAPRTTANTTSEDCIQQVHQSPGSPQVVWQDNIDPDNMTYEELLDLGEAVGTQSRGLSQECISLLPITKYKCGFFSRKKTRRERCVICQMEYRRGNLQITLPCKHVYHASCVTRWLSINKVCPVCFAEVPGEDSLRQ

SEQ ID NO: 48822 - protein, 364 aa, Zea Mays
MLQLQPPGFLPIPRRRVTARGRRARPVIAFNSQWKIPDVDTDAVRERVRSWMSLARGAIADAGRAAREGGRHKEEPEGGKKKQRKEVTVEEQAFVAVPEVTVEPRVPQGWLSLDAVVSIEQFARLNGLTGRQVQRIFESLAPEHLHNDARSLVEYSCFRYLAKDNSDFHPNLKELAFQKLIFVTMLAWEDPYNEDSSPLSSLDNYSVLGRLVGEDAFARIAPAVAGVADVSTAHYLFRALVGAEKGLSFDLWTTYLAELLKVHHGRQTHQTGDNFLYDEKVLCIGSSKKRPVLKWEENTAWPGNLTLTDKALYFEAIGLSGTKKPMRLDLTNQNSRAEKTKVGPFGSKLFDSAVSVSSGSILLL

SEQ ID NO: 48823 - protein, 1769 aa, Zea Mays
MAFFSNSGSKADSEGYNLNEKADDDGIHESIRDGNDGLNSRQWNLNEKAEDAYHSEAEQYESGQSGLYASRQHVQRGGRSSGGPWGTNFLKDSRSKQTAKEVASNSGRGMDAANSHDDMDGSREDDELNRANGEVPAEEMLSDDYYEQDGEDQIESLHRGGMKQSSCSTSGGAAKSGSRQMKKMSKYNAYDNDEYNDENDDDSDADEDDPADMDFEPDGETDKATDKDKFMDSENSDGDDDDDLELSDDEDDFVENRRQPKRLKIVATKTSKGGQLPMPVQPKRGVSHSDEEYFSGKDSDVPSDSDFKHIPKKPDRLHQKPVGRSDVAPISSHNELRTSGRRRTVKKISYAESEESDDSEEKSNKRQKLIKEEPEEEDGETIEKVLWHQPKGVAEEAIRNHRSAQPTVASLTSDFDQQWDELEFYIKWKGQSYLHCQWKILSELQSVSGFKKVINYTKRVSEEQRYKRALSREEVEVERIFADRVSKADGDDLVPEYLVKWQGLPYAESTWEKDTDIDFAQDAIDEYKAREAASAILGKTVDFQRKKSKASLRRLDGQPEWLKAGKLRDYQLEGLNFLVNGWRNDTNVILADEMGLGKTIQSVSMLGFLHNAQEINGPFLVVVPLSTLSNWAKEFRKWLPNMNVVVYVGNRASREMCQQHEFFSDKKGGRHVKFHTLITTYEVILKDKAVLSKIKWNYLMVDEAHRLKNCEASLYTTLLEFSTKNKLLITGTPLQNSVEELWALLHFLDPVKFNSKDSFVERYKNLSSFNETELANLHKELRPHILRRVIKDVEKSLPPKIERILRVEMSPLQKQYYKWILERNFQNLNKGVRGNQLFQLAHLGIECNLAVSDLDWNNVTILSHLLLLGQAVPHLLLLAQEVSHLAVHYLSNWSMGKATRQDLAVVSLLNIVVELKKCCNHPFLFESADHGYGGDSIGDRNKVERIVMSSGKLVLLDKLLVRLRETNHRVLIFSQMVKMLDILAEYLSLRGFQFQRLDGSTRADLRHQAMEHFNAPGSDDFCFLLSTRAGGLGINLATADTVIIFDSDWNPQNDLQAMSRAHRIGQQETVNIYRFVTCKSVEEDILERAKKKMVLDHLVIQKLNAEGRLEKKESKKGGPIFDKNELSAILRFGAEELFKEDKTDEETKRNLESLDIDEILERAEKVETKGGEGEEGNELLSAFKVANFSSVEDDATFWSRLIQPDPADIVQETLAPRAARNKKSYIEDPQLDKNNNRKRRAVETQEKPRRLSGRTVETVNSLPLVDGAVAQVREWSFGNVPKKDASRFVRAVKKFGNATQIGLIVDDVGGVLAKVPHEAQIELFDLLVDGCQEAVKENTDIKGTVLDFFGVAVKAYELLARVEELQFLAKRIARYKDPIKQYRIQLPYKKPQWSASCGWTETDDARLMVGIHWYGYGNWEKIRLDPKLGLTTKIAPATLGERETFLPRAPNLDNRASALLQKEYAKFSGKSLKVKGNTRQTVNNDSNSGVRSMRGRQKDVPEKDDNKPNKDDIQKRRVIVEAEAREEGEISESEAETRYRQDKEEKWLEWCSEVLDEEQETLKRLDRLQNTSVNLPKEKVLSRIRKYLLIIGDKIGEVVRQHSESYRQSRMVMRLWNYVATFSNMSGEQLHDLYMKLSQDQLEGGVGPSHGGNFTSIPPNKGGNSNQLHPSRNQRPTRSLQYNSESFHNESSGSSEAWKRRRRADTDNQFDTQPLCQPPIMTNGNRLQESSSSAGILGWGPVEIRRYGNERPKRAVHPSHFPTGHGPLL

SEQ ID NO: 48824 - protein, 1700 aa, Zea Mays
MAFFSNSGSKADSEGYNLNEKADDDGIHESIRDGNDGLNSRQWNLNEKAEDAYHSEAEQYESGQSGLYASRQHVQRGGRSSGGPWGTNFLKDSRSKQTAKEVASNSGRGMDAANSHDDMDGSREDDELNRANGEVPAEEMLSDDYYEQDGEDQIESLHRGGMKQSSCSTSGGAAKSGSRQMKKMSKYNAYDNDEYNDENDDDSDADEDDPADMDFEPDGETDKATDKDKFMDSENSDGDDDDDLELSDDEDDFVENRRQPKRLKIVATKTSKGGQLPMPVQPKRGVSHSDEEYFSGKDSDVPSDSDFKHIPKKPDRLHQKPVGRSDVAPISSHNELRTSGRRRTVKKISYAESEESDDSEEKSNKRQKLIKEEPEEEDGETIEKVLWHQPKGVAEEAIRNHRSAQPTVASLTSDFDQQWDELEFYIKWKGQSYLHCQWKILSELQSVSGFKKVINYTKRVSEEQRYKRALSREEVEVERIFADRVSKADGDDLVPEYLVKWQGLPYAESTWEKDTDIDFAQDAIDEYKAREAASAILGKTVDFQRKKSKASLRRLDGQPEWLKAGKLRDYQLEGLNFLVNGWRNDTNVILADEMGLGKTIQSVSMLGFLHNAQEINGPFLVVVPLSTLSNWAKEFRKWLPNMNVVVYVGNRASREMCQQHEFFSDKKGGRHVKFHTLITTYEVILKDKAVLSKIKWNYLMVDEAHRLKNCEASLYTTLLEFSTKNKLLITGTPLQNSVEELWALLHFLDPVKFNSKDSFVERYKNLSSFNETELANLHKELRPHILRRVIKDVEKSLPPKIERILRVEMSPLQKQYYKWILERNFQNLNKGVRGNQVSLLNIVVELKKCCNHPFLFESADHGYGGDSIGDRNKVERIVMSSGKLVLLDKLLVRLRETNHRVLIFSQMVKMLDILAEYLSLRGFQFQRLDGSTRADLRHQAMEHFNAPGSDDFCFLLSTRAGGLGINLATADTVIIFDSDWNPQNDLQAMSRAHRIGQQETVNIYRFVTCKSVEEDILERAKKKMVLDHLVIQKLNAEGRLEKKESKKGGPIFDKNELSAILRFGAEELFKEDKTDEETKRNLESLDIDEILERAEKVETKGGEGEEGNELLSAFKVANFSSVEDDATFWSRLIQPDPADIVQETLAPRAARNKKSYIEDPQLDKNNNRKRRAVETQEKPRRLSGRTVETVNSLPLVDGAVAQVREWSFGNVPKKDASRFVRAVKKFGNATQIGLIVDDVGGVLAKVPHEAQIELFDLLVDGCQEAVKENTDIKGTVLDFFGVAVKAYELLARVEELQFLAKRIARYKDPIKQYRIQLPYKKPQWSASCGWTETDDARLMVGIHWYGYGNWEKIRLDPKLGLTTKIAPATLGERETFLPRAPNLDNRASALLQKEYAKFSGKSLKVKGNTRQTVNNDSNSGVRSMRGRQKDVPEKDDNKPNKDDIQKRRVIVEAEAREEGEISESEAETRYRQDKEEKWLEWCSEVLDEEQETLKRLDRLQNTSVNLPKEKVLSRIRKYLLIIGDKIGEVVRQHSESYRQSRMVMRLWNYVATFSNMSGEQLHDLYMKLSQDQLEGGVGPSHGGNFTSIPPNKGGNSNQLHPSRNQRPTRSLQYNSESFHNESSGSSEAWKRRRRADTDNQFDTQPLCQPPIMTNGNRLQESSSSAGILGWGPVEIRRYGNERPKRAVHPSHFPTGHGPLL

SEQ ID NO: 48825 - protein, 162 aa, Zea Mays
MSGRSGSGSNLNGGAGGRGGRKLRLWVVRPVPDVAPVGAVRPSAAAGGVGAGAAGGGRPVCGARRAARVRRRLRPPPRAQPGRHRAVLLMVLRLFLRLFLFFFLFLLGPSLSFTRNDLEALVHSSDWCTGFICSRPAAGLSFLSSRVDWCTRSPSKVVLFAM

SEQ ID NO: 48826 - protein, 465 aa, Zea Mays
MQPGPTSPPHESPSPPHEVTPQEEPATLPLPGEEAQPQGQADDGDAVKAAAGAREDRNDRSGATASARGRKRRRRGGTSSTSPSPFPSPAAAAGTTRGVVMVKRDLLARCMTCPLCRRLLRDATTISECLHTFCRKCIYQKFDDEEVECCPVCKIDLGCTPTEKLRADHSLQDVRSKLFPFKRKKINAEEVSSSISLPTKIKERSISSLVVDTPKVKPTGLTGRRTRAVARKAAAVATATVTLHELRPVIEDPVKKEIDSCDSHPHDSNLPASSSKAPQIRRQISPNVEASNRSSNKDTEGDSNDELADKSELWRPLNCLVEAANRTKSFRSSSQSPVVKGEQPNGSTSSTFASKAKARENLEKSKIQDDKKDVPMPPVLPKRRAQGTARKKRDRLQAPTDVKPDAAVAQNAKKFSSIWFSLIASFDQQGDPPLPQIPSHYLRIKRKYPCFIYPKIPHAKAQSSK

SEQ ID NO: 48827 - protein, 204 aa, Zea Mays
MTMMAPHPQPLPLPQPPAPFGDTTLTKVFVGGLAWETHKDALREHFERYGDILEAVIISDKLTGRSKGYGFVTFKEADAAKKACEDATPVINGRRANCNLAALGAKPRPPPHILRPSPPATPAPHAPALPSQHQPTPAIAVGSRGVSPVPWYYHPSTTPPPPAAHHYAHGAHQQYHGVLPFYPAAAATYGGAGDRLQLKARGDR

SEQ ID NO: 48828 - protein, 1155 aa, Zea Mays
MGKQAAVVLAVNGKRYEAAGVDPSTTLLEYLRTQTPVRGPKLGCGEGGCGACVVLVSKYDPATDEVTEFSASSCLTLLHSVDRCSVTTSEGIGNTKDGYHPVQQRLSGFHASQCGFCTPGMCMSIFSALVKADKAADRPAPPAGFSKLTSSEAEKAVSGNLCRCTGYRPIVDACKSFAADVDLEDLGLNCFWKKGDEPADVSKLPGYDSGAVCTFPEFLKSEIKSSVEQVNGAPVPVSDDGWYRPKSIDELHRLFQSESFDENSVKIVASNTGSGVYKDQDLHDKYIDIKEVPELSVINRSNKGVELGSVVSISKAIEVLSDGNVVFEKIADHLNKVASPFVRNTATIGGNIIMAQRLQFPSDIVTVLLAAGTTVTIQVVSKRLCLTLEEFLQQPPCDSRTLLLSIFIPYWSSDGITFETFRAAPRPLGNAVAYVNSAFLARTSVDAASRDHLIEDTCLVFGAYGTDHAIRASKVEDYLKGKTVSSTVILEAVRLLKATVKPSEGTTHPEYRISLAVSFLFTFLSSLVNNESTKVNGPNGSCSNGATNGALEHSPEKHLKFDSNDLPIRSRQEIFLTDEYKPVGKPIKKAGAEIQASGEAVYVDDIPAPKDCLYGAFIYSTHPHAHVKAINFKSSLASQKVITVITAKDIPSGGQNIGSTFPMMGDEALFADPVTEFAGQNIGVVIAETQKYAYMAAKQAIIEYSTENLQPPILTIEDAIQRNSYFQVPPFLAPKPVGDYNKGMAEADQKILSAEVKLESQYYFYMETQVALAIPDEDNCITIYSSTQIPEVTQNVVAKCLGIPFHNVRLISRRVGGGFGGKAMKAIHVACACAVAAFKLRRPVRMYLDRKTDMIMAGGRHPMKVKYSVGFKSDGKITALHIDLGINAGISPDVSPMLPPAIIGALKKYNWGNLAFDTKVCKTNVSSKSAMRGPGDVQGSFIAEAIIEHVASALSVDTNTIRRKNLHDFESLVVFFEDAAGEASTYSLVTMFDKLASSPEYQRRAAMVEHFNRSNKWKKRGISCVPITYEVNLRPTPGKVSIMNDGSIVVEVGGVEIGQGLWTKVKQMTAFGLGQLCPDGGESLLDKVRVIQADTLSMIQGGFTGGSTTSETSCEAVRQSCVALVERLKPIKENLEAEAGTVEWSSLIAQVRISL

SEQ ID NO: 48829 - protein, 171 aa, Zea Mays
MASSSAAESSSRLSDRARRSALGLRFMVLLMHVLFVGAVFILDPTLDWRIHGEPWYIGLYGVLVLLTLVQYFYTAGSCPGYVIDVMRAGSMMHATFVNTAALSKQSNSRNGNINSPTSRAQLQKLSTMTPTSSWAQMVMDLYPPGSSSRDWTCTYCRIVQVFLYPHALNVL

SEQ ID NO: 48830 - protein, 131 aa, Zea Mays
MSTYPPPTGEWTTGLCGCFSDCKSCCLSFLCPCIPFGQVAEVLDKGMTSCGLAGLLYCLLLHAGVAVVPCHCIYTCTYRRKLRAAYDLPPEPCADCCVHMWCGPCAISQMYRELKNRGADPAMEVFGGCEA

SEQ ID NO: 48831 - protein, 163 aa, Zea Mays
MLIKCRLPVVLVPVYPVRTGGRGLGQGHDILWSGRPPLLFAAACRGGCGPVPLHLHLHLPSQAPGGVRPAAGAVRRLLRPHVVRAMRHLPDVPGAQEQRRRPGHGMGSALEKDDYGSCTNARHDALTTATRSPSKPGLRVAYMHSLCVMWLCQQVNGSESMSG

SEQ ID NO: 48832 - protein, 770 aa, Zea Mays
MPNHIHFSYTGEAVYVDDIPAPKDCLYGAFIYSTHPHAHVRSINFKSSLASQKVITVITAKDIPSGGENIGSSFLMQGEALFADPIAEFAGQNIGVVIAETQRYANMAAKQAVVEYSTENLQPPILTIEDAIQRNSYIQIPPFLAPKPVGDYNKGMAEADHKILSAEVKLESQYYFYMETQAALAIPDEDNCITIYSSTQMPELTQNLIARCLGIPFHNVRVISRRVGGGFGGKAMKATHTACACALAAFKLRRPVRMYLDRKTDMIMAGGRHPMKAKYSVGFKSDGKITALHLDLGINAGISPDVSPLMPRAIIGALKKYNWGTLEFDTKVCKTNVSSKSAMRAPGDVQGSFIAEAIIEHVASALALDTNTVRRKNLHDFESLEVFYGESAGEASTYSLVSMFDKLALSPEYQHRAAMIEQFNSSNKWKKRGISCVPATYEVNLRPTPGKVSIMNDGSIAVEVGGIEIGQGLWTKVKQMTAFGLGQLCPDGGECLLDKVRVIQADTLSLIQGGMTAGSTTSETSCEAVRQSCVALVERLKPIKESLEAKSNTVEWSALIAQASMASVNLSAQAYWTPDPSFKSYLNYGAGTSEVEVDILTGATTILRSDLVYDCGQSLNPAVDLGQIEGCFVQGIGFFTNEDYKTNSDGLVIHDGTWTYKIPTVDNIPKEFNVEMFNSAPDKKRVLSSKASGEPPLVLAASVHCAMREAIRAARKEFSVSTSPAKSAVTFQMDVPATMPVVKELCGLDVVERYLENVSAASAGPNTAKA

SEQ ID NO: 48833 - protein, 919 aa, Zea Mays
MPLRLDIKRKLAQRSERVKSVDLHPTEPWILSSLYSGSVCVWNYQTQTMVKSFEVTDLPVRSAKFIARKQWVVAGADDMFIRVYNYNTMDKVKVFEAHTDYIRCVAVHPTQPFVISSSDDMLIKLWDWDKGWVCTQIFEGHSHYVMQVTFNPKDTNTFASASLDRTIKIWSLGSPDPNFTLDGHSKGVNCVDYFTGGDRPYLITGSDDQTAKVWDYQTKSCVQTLEGHAHNVSAVCFHPELPIIITGSEDGTVRMWHSTTYRLENTLNYGLERVWALGYMKGSRRVVIGYDEGTIMIKIGREVPVASMDSSGKIIWAKHNEIQTVNIKSVGADNEIADGDRLPLAVKELGSCDLYPQSLRHNPNGRFVVVCGDGEYIIYTALAWRNRSFGSALEFVWSTDGEYAIRESTSRIKIYSKNFQEKKSIRPSFSAERIFGGVLLAMCTNDFICFYDWAECRLIRRIDVNVKNLYWADSGDLVTIASDTSFYILKYNRDVVSSHLDRGGSAGEEGVEDAFELLHEINERVRTGLWVGDCFIYNNSSWRLNYCVGGQVTTLFHLDRPMYLLGYLANQSRVYLIDKQFNVVGYTLLLSLIEYKTLVMRGDFDRANDVLSSIPKEQYDSVARFLESRGMLEEALEIATDTNYRFDLAVQLGRLEIAKAIATEVQSESKWKILGELAMSSGKLEMAEECLLHAMDLSGLLLLYSSLGDAEGINKLASVAKEQGKNNVAFLCFFMLGKLEECLQLLIESNRIPEAALMARSYLPSKVPEIVALWKKDLQKVNSKAAESLADPNEYPNLFEDWQIALNVEAAVASKRSIYPSAEEYMIHAERSNESLVEAFKNMHVHEEMVPDDNEDTVHEVIEDGGVESQEDAVEVDAEDDGVEESQDEAVEVEAEGSSDGAVLVNGNSSEEQWVLTEQ

SEQ ID NO: 48834 - protein, 51 aa, Zea Mays
MLSLRSVSGSNSSRGIAAVVGVGPRLGSAVARKFASEGYTIAILSRDLVSK

SEQ ID NO: 48835 - protein, 492 aa, Zea Mays
MSALIEYLSSEYGSTFALARVFAFLSGAPDYGAGVLDTRRYGEQYASKGVDADLALLPEQIPFYRDLAAVAVQSGVCIDIFAVTDEYTDLASLKFLSIESGGSLFLYASTDDSTVPQDIYRLLSRPYAFGCVLRLRTSSDFEPGNSYGHFFPDPQYENVQHIICCDSFATYAYDFEFAHNDGFSRHTDPAVVQIAFQYSVIEPVKETSGNGSQPSASYKFCLKRRLRIRTLQYRPTNNISEIYDSVDPEVVLHILVHKVILESLDKGVREGRHQVHAWLSLLAARYNQALSSDVRPLSSIDIDFSQCPQLQTIPQLVFALLRSPLLRLHEEGVHPDYRIYLQCLFSALEPSSVAKAIYPVLISYSSPDKQAFPRHTLSHAALIMSESPIFLLDTFTNLIVYYSSTADPSVPFPPPHDCLLRKTINGLKQDRCITPKLTFIHGGKDDSTLFESYLIEEQDVDGSGLTTGSGFVAFRESVRNVAGEIIQEEIGS

SEQ ID NO: 48836 - protein, 419 aa, Zea Mays
MALRAVELRRFLLRRIGGGEAALPPLAWRGRPASTSAPADDELAGKSAYEVLGVGETSSSAEIKASFHRLAKETHPDVAAAAGSRRFLQILAAYEILSDSQRRAHYDSYLRSQRRVVGKHPRPSQFVYPSGSGSGIVVPRESNVVEWLKWYRLTIDDIVTKKRVATGSGYFERLESELYTAIHAAYYGPDVDSMDVLPDCFEAEERSAYETSELLHLVSGRDLFGIVTVTDSVKELSDVCREKLVPSGCRSSEFTHVVSRNANKNSISMNPVDMNKQEMRYENDVPSSDSFKDIELQICGKLVATATRSPNCDCIDKSDLEEDHIHVYLVPNANISDLTHGKLLLGTITGLATTGEEGSCCVYDGHNIKTHIIMKHRTLMVKHMHWYQVGDTVSPCECRCSRARLPPSRNMDALKTMVR

SEQ ID NO: 48837 - protein, 431 aa, Zea Mays
MALRAVELRRFLLRRIGGGEAALPPLAWRGRPASTSAPADDELAGKSAYEVLGVGETSSSAEIKASFHRLAKETHPDVAAAAGSRRFLQILAAYEILSDSQRRAHYDSYLRSQRRVVGKHPRPSQFVYPSGSGSGIVVPRESNVVEWLKWYRLTIDDIVTKKRVATGSGYFERLESELYTAIHAAYYGPDVDSMDVLPDCFEAEERSAYETSELLHLVSGRDLFGIVTVTDSVKELSDVCREKLVPSGCRSSEFTHVVSRNANKNSISMNPVDMNKQEMRYENDVPSSDSFKDIELQICGKLVATATRSPNCDCIDKSDLEEDHIHVYLVPNANISDLTHGKLLLGTITGLATTGEEGSCCVYDGHNIKTHIIMKHRTLMVKHMHWYQVGDTVSPCECRCSRARLPPSRYTIFTMLLVRPCCTHAGYTFLY

SEQ ID NO: 48838 - protein, 1881 aa, Zea Mays
MASGSSRPQIDQFFPAKKRRPSSRKGESPRPGTQHESPGGAKGSLEGYLVRSPCNRAVAAASVVPVGSPRGGDPGARRSLSAAMDVDVGSSASVAAAAGDGADFDLRRSTADFLSHSCSAILPLRGDCDYSEQCQMKQKRSASQSFLVPCDNDYVKKQRVAHCGGFEALKESVEGEHIKVGFSLAPVETLKSVSRNSLTSPGEEFWNAAIELADGISAQADKVRGRPEFDAAEDKSSCAVAAFFKTLPRSGRDELDCQNTVGSNDTHHIEKLSNKVESLAVNCQHIISSPLPVKQLDFFHEDDIKVSGSKFETKGSYETCNAQADRVPLKGSGRLEKENLMDPVDVLKRSAINLHTDSAAMRCQGVFKSTTEGKVHPTQEAERDSNLIRRDLNQPTHNENKSLAAYSNNRKTWIDSKSKVASQEVEASTPTSSIPLKDHSKISSWLPPDLCAIYMKKGISELYPWQVECLLVEGVLGKRNLVYCASTSAGKSFVAEVLMLRQILSTGNMAILVLPYVSICAEKAEHLEQLLEPLGRHVRSFYGNQGGGSLPKDTAVAVCTIEKANSLVNKLLEDGRLSELGVIVIDELHMVGDQHRGYLLELMLTKLRYAAGEGTLQSCSGEVSSSSSGKIASHGLQIIGMSATMPNIAAVADWLQAALYQTDFRPVPLEEFIKVGNQIFDKDMNVVRVLPKVADHGGKDPDHIVELCNEVVLQGHSVLLFCSSRKGCESTARHVAKFLKLPSVGTTDVSSEFSDAAAAIEALRRCPAGLDPILGETLPFGVAYHHAGLTVEEREIVESCYRKGLVRVLTATSTLAAGVNLPARRVIFRQPKIGRDFIDGTRYRQMAGRAGRTGIDTKGESILVCRPEEVKRVTGIIRSNCPPLESCLSEDKNGMTHAIMEVVAGGIVQTANDIHRYVRCTLLNSTRPFDDVVKSAQDSLRWLCHKSFLEWNHETKIYSATPLGRAAFGSSLNPEESLVVLDDLSRAREGFVLASDLHLVYLVTPINVDLEPDWELYYEKFMQLSSLEQSVGNRVGVIEPFLMHMAHGASIPFRARPERNTGLSNKSAQAAGNTLVSEHTIRVSKRFYVALMLSRLAQEIPIADVCETFKVARGMIQALQENAGRFASMVSAFCQRLGWNDLEGLVSKFQNRVSFGVRAEIAELTSIPFVKGSRARALYKSGLRTPVAIAEASIPEIAKALFESSAWSGQGDSGLRRMQFGVAKKIKNGARKIVLEEAEAARVAAFSAFKSLGVEVPQFTAPPLAAIEEYPTHDTIDQAKLNKLASGTHSRDDKNMNTCSDYATPRASTYSLRKDTSPAPSIQMKENAGLSKNVQITRQGASSSLSTEIADGSSRDVAEKGPVHAYNFPGGFDCFLDQWSTASNFFFDVHFIKRSMKPSLNLFEVFGLAVCWEKSPIYYCNFPKDLVTTGNNNIKEMWGNFQRRWEKIADIMKQKSVQKMTWNLKIQIQALKSPYISCQRLERFHLDHKMLDKVEVLNNSYMLLSPVSVYNGLDICLLAWVLWPDEESRAVPNLEKFVKRRLHSQEAAAANRDGRWRNQMHKAAHNGCCRRAAQTRALYTVLKKLLTQNLSVLVETIEAPLVNVLADMELWGIGADMDACLRARHIITKKLKELEKEAYRLAGKNFSLNATADIADILYTHLKLPVPKGCEKGKLHPSTDKQSLDHLRYIIHGNWLQTSTATGRLSMEEPNLQCVEHVVEFDTGKSDKDYSSISVDDHHKINARDFFIPTKENWLFITADYSQIELRLMAHFSKDHMLVELLKKPDGDVFTMIASRWAEKEEALISSKERENTKRFIYGILYGMGANSLAEQLQCSTEEAAQKIQSFRRFFPGVSSWLHEVVLSCRQKGLVSKCNKGPQYR

SEQ ID NO: 48839 - protein, 2128 aa, Zea Mays
MASGSSRPQIDQFFPAKKRRPSSRKGESPRPGTQHESPGGAKGSLEGYLVRSPCNRAVAAASVVPVGSPRGGDPGARRSLSAAMDVDVGSSASVAAAAGDGADFDLRRSTADFLSHSCSAILPLRGDCDYSEQCQMKQKRSASQSFLVPCDNDYVKKQRVAHCGGFEALKELDDNVASMKQCINHHGGSEAVEESVEGEHIKVGFSLAPVETLKSVSRNSLTSPGEEFWNAAIELADGISAQADKVRGRPEFDAAEDKSSCAVAAFFKTLPRSGRDELDCQNTVGSNDTHHIEKLSNKVESLAVNCQHIISSPLPVKQLDFFHEDDIKVSGSKFETKGSYETCNAQADRVPLKGSGRLEKENLMDPVDVLKRSAINLHTDSAAMRCQGVFKSTTEGKVHPTQEAERDSNLIRRDLNQPTHNENKSLAAYSNNRKTWIDSKSKVASQEVEASTPTSSIPLKDHSKISSWLPPDLCAIYMKKGISELYPWQVECLLVEGVLGKRNLVYCASTSAGKSFVAEVLMLRQILSTGNMAILVLPYVSICAEKAEHLEQLLEPLGRHVRSFYGNQGGGSLPKDTAVAVCTIEKANSLVNKLLEDGRLSELGVIVIDELHMVGDQHRGYLLELMLTKLRYAAGEGTLQSCSGEVSSSSSGKIASHGLQIIGMSATMPNIAAVADWLQAALYQTDFRPVPLEEFIKVGNQIFDKDMNVVRVLPKVADHGGKDPDHIVELCNEVVLQGHSVLLFCSSRKGCESTARHVAKFLKLPSVGTTDVSSEFSDAAAAIEALRRCPAGLDPILGETLPFGVAYHHAGLTVEEREIVESCYRKGLVRVLTATSTLAAGVNLPARRVIFRQPKIGRDFIDGTRYRQMAGRAGRTGIDTKGESILVCRPEEVKRVTGIIRSNCPPLESCLSEDKNGMTHAIMEVVAGGIVQTANDIHRYVRCTLLNSTRPFDDVVKSAQDSLRWLCHKSFLEWNHETKIYSATPLGRAAFGSSLNPEESLVVLDDLSRAREGFVLASDLHLVYLVTPINVDLEPDWELYYEKFMQLSSLEQSVGNRVGVIEPFLMHMAHGASIPFRARPERNTGLSNKSAQAAGNTLVSEHTIRVSKRFYVALMLSRLAQEIPIADVCETFKVARGMIQALQENAGRFASMVSAFCQRLGWNDLEGLVSKFQNRVSFGVRAEIAELTSIPFVKGSRARALYKSGLRTPVAIAEASIPEIAKALFESSAWSGQGDSGLRRMQFGVAKKIKNGARKIVLEEAEAARVAAFSAFKSLGVEVPQFTAPPLAAIEEYPTHDTIDQAKLNKLASGTHSRDDKNMNTCSDYATPRASTYSLRKDTSPAPSIQMKENAGLSKNVQITRQGASSSLSTEIADGSSRDVAEKGPVHAYNFPGGFDCFLDQWSTASNFFFDVHFIKRSMKPSLNLFEVFGLAVCWEKSPIYYCNFPKDLVTTGNNNIKEMWGNFQRRWEKIADIMKQKSVQKMTWNLKIQIQALKSPYISCQRLERFHLDHKMLDKVEVLNNSYMLLSPVSVYNGLDICLLAWVLWPDEESRAVPNLEKFVKRRLHSQEAAAANRDGRWRNQMHKAAHNGCCRRAAQTRALYTVLKKLLTQNLSVLVETIEAPLVNVLADMELWGIGADMDACLRARHIITKKLKELEKEAYRLAGKNFSLNATADIADILYTHLKLPVPKGCEKGKLHPSTDKQSLDHLRDQHPIIPLIKEHRTLAKLLNGTLWSICSRAQLCTQSQRYIIHGNWLQTSTATGRLSMEEPNLQCVEHVVEFDTGKSDKDYSSISVDDHHKINARDFFIPTKENWLFITADYSQIELRLMAHFSKDHMLVELLKKPDGDVFTMIASRWAEKEEALISSKERENTKRFIYGILYGMGANSLAEQLQCSTEEAAQKIQSFRRFFPGVSSWLHEVVLSCRQKGFVETLLGRRRVLTKITAGNSKEKAKAQRQAVNSICQGSAADIIKVAMIRVHSIITNRTSAADSTDEVTRKFSELGGQCHLILQVHDELVLEVDPCMVAQAGRLLQICMEEAASLLVPLRTKIKVGKTWGSLEPFHPEPCLMQMVNVSWMPMFHDMQGPGRRLNNFQYAPTGDLGDSVWCSSVEPSLLCLQSSVIADRM

SEQ ID NO: 48840 - protein, 568 aa, Zea Mays
MRKYVVQPAHMWWPGTLVQVSLFQALHEKKDESAKASRQISRSKFFVVVLACSFAWYAVPGYLFPTLTSISWLCWVFSKSVTAQQLGSGMKGLGLFAFTLDWSTVSSFLFSPLISPFFATANIFVGYVVFVYVIMPMAYWGFDLYSAKTFPIFSSHLFMSNGTEYDVKSIVNNQFELDRQAYDRNGKVNLSVFFALTYGFSFATIASTITHVGLFYGKEIYHRFKSSQREKPDIHTRLMSKYSEIPAWWFYSLMALSIAVSLILCTVLKREVQLPWWGLIFACGMAFLFTLPISIITATTNQSPGLNVITEYAMGLIMPGSPIAVVCFKVYGYMSMSQAVAFLSDFKLGHYMKIPPKSMFLVQFVGTIVAGTINIGTAWWLLGSIHGICSDSLPPDSPWTCPNDRVFFDASVIWGLVGPMRIFGPGGNYGAVNWFFLIGAAGPVIVYALHRVFPSQSWIPLINLPVLFGATASMPPATAVNYNSWLLVGTIFNFFVFRYRKRWWTRYNYILSAGLDAGVAFMGVLLYFSLTMQNKSIDWWGTAGEHCPLAKCPTAKGVDLGDGVCPVF

SEQ ID NO: 48841 - protein, 230 aa, Zea Mays
MANAADDPMADEAGVEDAFTQEINHSYVPRYHVLSWMETVEGMVAGVASLPPVYLILNRDLLETGWGWKRLVPYRPGYVELHVFKKYLGDYFDHNREAFLCAEQKPDPFGWIVAEKSALIAAAKSCLKMEKALLRYCASFLTPDDKRLILRIKDQAKQMIQSEGDQSLIVTICLECIAKEAELMYNYLPCDFDTTEEVAVCNKVRRSALNLMLYKGSESAVAAGAMMVCS

SEQ ID NO: 48842 - protein, 779 aa, Zea Mays
MADVLSVESKSVDLSRDSWVRMKLGIYKGDLAKVVDVDNVRQRVDVKLIPRIDLQALASKLEGRDIVKKKAFVPPPRFFNIDEAREMHIRVERRRDKESGEYFEWVDNLKFKDGFLYKSVSTKSIHKSNIQPTFDELEKFKKPGDDMNGDMASLSTLFANRKKGHFMKGDAVIVIKGDLKNLEGWVEKVEDETVHIRPKISDLPKTLAFNEKELCKYFKPGDHVKVISGVQEGATGMVVKVEGHVLIILSDTTKEHIRVFADHVVESSEITTGITRIGDYELHDLVLLDNLSFGVIIRVEAEAFQVLKGVPDRPEVVLVKLREIKSKIERRSSAKDRSNNIISAKDVVRVVEGACKGKQGPVEHIHKGMLFIYDRHHLEHAGFICAKAQSCLLVGGSTGGRRGNGMDTADARLDALRSSASILQSPGRLPPRGPNMNYGGRFGGGRGGRGYDALVGKCIKIKSGPYKGYRGRVKEVTGALVRVELDSLMKIVTVKRDDIADTPTVATPFREPRYSLGGETPMHPSRTPHHAYQTPMRDPGATPIHDGMRTPMRSRAWAPMSPPRDNWEDGNPATWGSSPAYQPGTPQARPYEAPTPGSGWANTPGVSFNDAPTPRDNYANAPSPYVPSTPVGQPMTPNSASYLPGTPGGQPMTPGNAGMDMLSPIIGGDGEVAWLLPDVLVNVLRGGDDGPGVVREVLGDGSCRVALGSSGNGDVVTVLANEVEVIRPKKSDRIKILNGNFRGYTGKLIGIDGSDGIVRLDETYEVKILDMVILAKLAT

SEQ ID NO: 48843 - protein, 166 aa, Zea Mays
MLVSNLNLYLQDVALPKSKYEEDVFINNHTSVWGSWWKDHQWGYKCCKQTIKNSYCTGLAGIEAAEASADLMKANMARKEAAEDEPVQHEEKRLATWGTDVPQDLVLNEKKLEESLKKETARRKEEKDERKRKYNVKWNDEVTAEDMEAYRMKRIHHDDPMKDFLN

SEQ ID NO: 48844 - protein, 927 aa, Zea Mays
MELLSGGALAWQQYRALLRKNATLTWRNRRSAALQLFSSLVFIFLIFCIDRAVRSRFSSTTAYRNVPDPEALVAPPIPPCEDKFFIKSPCYDFLWSDGGSARIRGLVDAIRRNNPGRPIAPEKVLGFRTPDDVDAWLFQNPMRCPGALHFQDINATQIKYGIQTNSTPVARRGTYEDPTFKFQIPLQVAAEREMARLLIGDPNFSWTVGFKEFAHPATETFSTIAQAGPTFFLAIAMFGFVFQISALVAEKELKLRQAMSTMGLYESAYWLSWFTWEAFLTTLSALFTVLFGMMFQFDFFLHNNFGILFLLFFLFQLNMLSFAFMISTFVAKAASATTVGFAIFIIGFLTQLVTTFGFPYSSDYKKLYRTLWSLFPPDLFAKALNILGKATATPEDKGFSWNQRGECPSFETDCVITIDDIYKWLISTFFLWFVLAIYFDNILPNVNGVRKSVFYFLMPSYWTGKGGKMEEGGLFSFFGSSRPADDATPTDEDVLAEQNLVKEQAANNAVDPNVAVQIHGLRKTYPGTFSIGCCCKCSKSKPFHSVKGLWVNLEKDQLFCLLGPNGAGKTTTISCLTGITPITGGDAKEHMELFASIKGLHPAAITSVAEESLAKVKLSQVTNARAGSYSGGMKRRLSVAIALIGDPKLVFLDEPTTGMDPITRRHVWDIIEEAKKGRAIVLTTHSMEEADILGDRIAIMAKGKLRCIGTSIRLKSKFGTGYIANVNFSGNGHMQSPNINSNTEAPVNPNIEAVKWFFKERLDVNPKEESRTFLTFVIPHHKEPLLTRFFGELQDREGEFGISDIQLGLTTLEEVFLNIAKQAELETSTAEGTLVTLNLSSGTTIQIPKGARFVGIPGTETEEHPRGIMVEVYWDQDENGSLCISGHSDEMPVPVHAELRRPPSLSRRASMDRGRPVGYMIDLNQVP

SEQ ID NO: 48845 - protein, 962 aa, Zea Mays
MELLSGGALAWQQYRALLRKNATLTWRNRRSAALQLFSSLVFIFLIFCIDRAVRSRFSSTTAYRNVPDPEALVAPPIPPCEDKFFIKSPCYDFLWSDGGSARIRGLVDAIRRNNPGRPIAPEKVLGFRTPDDVDAWLFQNPMRCPGALHFQDINATQIKYGIQTNSTPVARRGTYEDPTFKFQIPLQVAAEREMARLLIGDPNFSWTVGFKEFAHPATETFSTIAQAGPTFFLAIAMFGFVFQISALVAEKELKLRQAMSTMGLYESAYWLSWFTWEAFLTTLSALFTVLFGMMFQFDFFLHNNFGILFLLFFLFQLNMLSFAFMISTFVAKAASATTVGFAIFIIGFLTQLVTTFGFPYSSDYKKLYRTLWSLFPPDLFAKALNILGKATATPEDKGFSWNQRGECPSFETDCVITIDDIYKWLISTFFLWFVLAIYFDNILPNVNGVRKSVFYFLMPSYWTGKGGKMEEGGLFSFFGSSRPADDATPTDEDVLAEQNLVKEQAANNAVDPNVAVQIHGLRKTYPGTFSIGCCCKCSKSKPFHSVKGLWVNLEKDQLFCLLGPNGAGKTTTISCLTGITPITGGDAFIYGHSVRSTVGMSNIRRMIGVCPQFDILWDALTAKEHMELFASIKGLHPAAITSVAEESLAKVKLSQVTNARAGSYSGGMKRRLSVAIALIGDPKLVFLDEPTTGMDPITRRHVWDIIEEAKKGRAIVLTTHSMEEADILGDRIAIMAKGKLRCIGTSIRLKSKFGTGYIANVNFSGNGHMQSPNINSNTEAPVNPNIEAVKWFFKERLDVNPKEESRTFLTFVIPHHKEPLLTRFFGELQDREGEFGISDIQLGLTTLEEVFLNIAKQAELETSTAEGTLVTLNLSSGTTIQIPKGARFVGIPGTETEEHPRGIMVEVYWDQDENGSLCISGHSDEMPVPVHAELRRPPSLSRRASMDRGRPVGYMIDLNQVP

SEQ ID NO: 48846 - protein, 134 aa, Zea Mays
MANAGGGAAEEGEWLKVAQLRALVQEDHRAKEVDNLTLRRFLRARGHNVDKAAAMLLKFLRWRAEAAPGGGTVREEQVRGELEQDKIYMGGVDRTGRPIIVGLLAKHYSANRDMAEFKSTSTTWPFFLHQSKCV

SEQ ID NO: 48847 - protein, 414 aa, Zea Mays
MSKIRHPEFRYKTEFQSHEPEFDYLKSLEIEEKINQIKWCQATNCALFLLSTNDKTIKFWKVQEKKVKKVSEMNLDRSTAPTNGSPGGTGYLRPSLSNGNVLKPGGLPLLRLPVVTTQETSLAASCRRVYAHAHDYHINSISNNSDGETFISADDLRINLWNLEISNQSFNIIDVKPTNMEDLTEVITSAEFHPTHCNTLAYSSSKGSIRLVDLRQSALCDNHSQIFEQHEAPGSRSFFTEIIASISDIKFSKDGRHILSRDYMTLKLWDVKMNSGPVATFQVHEYLRPKLCDLYENDSIFDKFECCQSGDGLRVATGSYSNIFRVFGCRSGSSEATTLEATRNPTRRQVQTTSRATRSLSTLTRAVRRGGESTGIDANGNSYDLSTKLLHLAWHPSENLIACAAANSLYMYYA

SEQ ID NO: 48848 - protein, 160 aa, Zea Mays
MICVVENNFCASRRGGVRCLAILNVVFAVIFGLMAIILGSTLLALGSTCSVPLFWCYEITAWGLVVLYGGTAFFLRRKAAVVLDESDYSTHNVGLEMLESKMEVTPEMQRRITDGFKQWMGSSLLSSDDEEEASDDYLEHDVPSPTALGQQHQHEHDRET

SEQ ID NO: 48849 - protein, 261 aa, Zea Mays
MADPAEENVVSPPPTPAAPAVGASDSPLQPVADGASTEKVSAPAPEVRSRGFRLLGEDTSVHKSLGGGKRELSAAADVLLWKDKKTSAVVIGGATVIWVLFEVLDYHLLTLISHVLIGVLATLFLWSKATTFIKKSPPDIPVVQVSEDLVVNVSRALRNDINRALHLFREIAMGHDLKKFLGVIVGLWVLSGVGSSCDFLTLTYIAVLMLHTVPILYDKYQDKVDHVAGRAHTEALKQYKVLDAKVLSKIPRGAVKSKKQN

SEQ ID NO: 48850 - protein, 563 aa, Zea Mays
MEQTSFLFQQASAVGFSHSRILRTVVQHACSRFPSLLPCNNAWTALSRKLQPSKQVEAIHKGTSRQKVFVIFGGDTSERQVSLMSGTNVWLNLQGFDDLDVTPCLLAPAHGYFSSHDQDFSDSSREVWTLPYSLVLRHTTEEVHAACVEATEPERVEITKRLRDQVMNELGSALSKHDWFAGFDIAYEQPIKYSLQQWIDHVKETEAVVFIAVHGGIGEDGTIQTLLESAGVPYTGPGPIASRTCIDKVASSLAVDHLASYGIRIIPKDVRATEEVLNSSLVDIWNELKAKLETETVCVKPARDGCSTGVARLCCPKDLEVYTNALRRKFQHLPANCLSRAHGVIEMPVPSPESLIFEPFIETDEIIIANKLEDGSARHLVWKGENDWLEITVGVVGKRGEMHSLNPSITVKESGDILSLEEKFQGGTGINLTPPPATIMGEDALQRCKKSIETMANALGLEGFSRIDAFVNVRSGEVLLIEVNTVPGMTPSTVLIHQALAEEPPVYPHSVARSSCTSEQSRSNPPRTSSQTNTSGPQYGKLAIQVSWNINSQTYQVFITSLI

SEQ ID NO: 48851 - protein, 560 aa, Zea Mays
MPEAARARGLREPAGEGEAEQEDEFYESLDRILSSSCSSASASDDDADHRRRRSRRHHLLHQHQHQHQPLSSAYDVWISEPTSVEERRRLLLQRLGLASDPPPRRSPSPPASTPASPPAPPEEPRSGAGLGSPPLTRNPSSSGGEQQCRIRNLDDGTEFEVGEVHEEEVVREVGTGRHLTFEEFELCVGRSPIVHELMKRTTTAASASASNHAAPAASKPRRKPGGGWLRGIRQLAGTVAYGRRGADDGDKEKEKEKKEREARRLSSATDDSLDGAGSRDVRRVQVRQYGKACKELTGLFMTQELAAHSGSVWCINFSLDGRYLATAGEDRVIHVWEVSEGDRKGELLGEGSLAKENGGGCSPFLTFLGNDSPEIAALSFTCADMDKKRRLRKQSNRKSVGSDHLVVPECVFGFRDKPVCSLLGHAADVLDLSWSKSQFNPVDDNFFISGSLDEKVRIWSVRDRKIEDWNDLHEMVTAACYSPDGQVAMVGSHKGCCHIFDTSEKKLLYKSQIDLRIRKKKSGQKKITGFQIQEYVLLTAMNLFTSLKGFGTRVAKSQLL

SEQ ID NO: 48852 - protein, 752 aa, Zea Mays
MPEAARARGLREPAGEGEAEQEDEFYESLDRILSSSCSSASASDDDADHRRRRSRRHHLLHQHQHQHQPLSSAYDVWISEPTSVEERRRLLLQRLGLASDPPPRRSPSPPASTPASPPAPPEEPRSGAGLGSPPLTRNPSSSGGEQQCRIRNLDDGTEFEVGEVHEEEVVREVGTGRHLTFEEFELCVGRSPIVHELMKRTTTAASASASNHAAPAASKPRRKPGGGWLRGIRQLAGTVAYGRRGADDGDKEKEKEKKEREARRLSSATDDSLDGAGSRDELAAHSGSVWCINFSLDGRYLATAGEDRVIHVWEVSEGDRKGELLGEGSLAKENGGGCSPFLTFLGNDSPEIAALSFTCADMDKKRRLRKQSNRKSVGSDHLVVPECVFGFRDKPVCSLLGHAADVLDLSWSKSQYLISSSMDKTVKLWDITTSTCLKTFSHTDYVTCIQFNPVDDNFFISGSLDEKVRIWSVRDRKIEDWNDLHEMVTAACYSPDGQVAMVGSHKGCCHIFDTSEKKLLYKSQIDLRIRKKKSGQKKITGFQFAPGSSSEVLITSADSRIRVVNGDEFVHKFKGLRNTSSQISASVAPNGKYIICASEDSHVYVWRHDNSSHPSRNRITVDVTNSYEHFHCHGVTVAVTWPGAEARGSFGSRSSRHSDSDGAVNSGRDIPAENSQHNSDAGTSRHPGDRASTSWPDEKLPSAKSSPGHCSSDLCIGAMDVQRRSAWGLVIVTAGRGGEIRVFQNFGFPVQV

SEQ ID NO: 48853 - protein, 595 aa, Zea Mays
MPEAARARGLREPAGEGEAEQEDEFYESLDRILSSSCSSASASDDDADHRRRRSRRHHLLHQHQHQHQPLSSAYDVWISEPTSVEERRRLLLQRLGLASDPPPRRSPSPPASTPASPPAPPEEPRSGAGLGSPPLTRNPSSSGGEQQCRIRNLDDGTEFEVGEVHEEEVVREVGTGRHLTFEEFELCVGRSPIVHELMKRTTTAASASASNHAAPAASKPRRKPGGGWLRGIRQLAGTVAYGRRGADDGDKEKEKEKKEREARRLSSATDDSLDGAGSRDVRRVQVRQYGKACKELTGLFMTQELAAHSGSVWCINFSLDGRYLATAGEDRVIHVWEVSEGDRKGELLGEGSLAKENGGGCSPFLTFLGNDSPEIAALSFTCADMDKKRRLRKQSNRKSVGSDHLVVPECVFGFRDKPVCSLLGHAADVLDLSWSKSQYLISSSMDKTVKLWDITTSTCLKTFSHTDYVTCIQFNPVDDNFFISGSLDEKVRIWSVRDRKIEDWNDLHEMVTAACYSPDGQVAMVGSHKGCCHIFDTSEKKLLYKSQIDLRIRKKKSGQKKITGFQIQEYVLLTAMNLFTSLKGFGTRVAKSQLL

SEQ ID NO: 48854 - protein, 278 aa, Zea Mays
MEAEYPHQQAAPSYSTTATVFWPYATRRRKRAEDGSDLSLASDMDLDADAQRAADKLKAVSEELGHEIRVFSSENFALQPSKLPSADHEEGDDFYELQPADYYNLISNRMGELSKMLKTRKMREAELAAQRAKRTKAVMRVRFPDGYILEADFLPSERIHSLVDLLMKVLARPDLPFYLYTVPPKKRILDTSQDFYTSGFVPGANVHFSYDLPEDDLKAGPFLREGILSLDGLSLLLKPASQPDDSRMNSSTHQSGASQSDPVPTTNKKPGRPKWLKR

SEQ ID NO: 48855 - protein, 640 aa, Zea Mays
MALLLPPPALSTTPPFLSAPRPARLPCLRCTRTTTATSSVSTCPPASTSSPSTSSPVASDGAVGRKSKNKSRPLKPSFEEQALRRWSARAPSQRASVPWEQPQQQSPLPPSLPHRAGRGSGDAGDQKRSGGGSSATLRSIVDYFAGGSSDDEGVRVEEGACDTTAVPDQAAREQDDGSHFRPSYLLGSHPFSAPWIHREESTNDRGVSGPVAEEEERLDIRDASDDELGLVDEDKEETDNGEELLTGGLEDEFYDDYATPTMNSSYGVDLSVDKDAYGSRFDRSMMQSSVNTIVKTLRNSMEESDPNATVELSNAEDFVQKLGPALLPWEREEEDDEAFSGGRAVRRSNTELAERSIPEPELRRLRDTALRMKERIKVGPGGVTQDIVESIHRKWKVDEVVKMRFEGPPSLNMKRTHDLLEDRTGGVVIWRSGRSVVLYRGMNYNFQCVQSYAKFIEIDSGKGVSDANSAVLSHDGHNLQASRADGMKSLTSTGNFSLESSETFDIDNFLDQLGPRYKDWSGRGPIPVDADLLPGVVHGYKPPFRVLPYKIKSTLRDKEMTTLRRLARQTAPHFALGRNREHQGLAAAMVKLWEKSAIAKIAIKRGIPNTCNDRMAEEIKEECSCQGTRSSLSSTGAMIS

SEQ ID NO: 48856 - protein, 523 aa, Zea Mays
MNYNFQCVQSYAKFIEIDSGKGVSDANSAVLSHDGHNLQASRADGMKSLTSTGNFSLESSETFDIDNFLDQLGPRYKDWSGRGPIPVDADLLPGVVHGYKPPFRVLPYKIKSTLRDKEMTTLRRLARQTAPHFALGRNREHQGLAAAMVKLWEKSAIAKIAIKRGIPNTCNDRMAEEIKKLTGGVLLSRNKEFIVFYRGNDFIAPKVRQVLVEKQEQAITQQDEEELARLKASASIITIPKDIKGPLVAGTLAETTEAKSRWGKSVNDKQREEEMKHLSLLKHTSLLKNLKRKLILAKTKVAKAEKALAKVQEFLTPAELPTDLETVTDEERFLFRRIGLKMRAFLMLGRREVFDGTVQNMHLHWKHRELVKIVVRGKSFAQAKHIAISLEAESEGVLISLDKTTKGYVIIFYRGKNYRRPQIMKPRNLLTRRQALARSIELQRREALKHHISSLQGKISKLQSQLVQTKVASEKHDLKLLQTVEDDFSSSDDDVEDDGEEAYLQTYSSADEEDAEDDANEYI

SEQ ID NO: 48857 - protein, 243 aa, Zea Mays
MAWIWMVLAAGAVLLWAISLGRVLSSAAPSCVPSSPQFMPPLSGDRRSRNVLLVVAHPDDESMFFAPTILFLKSKGHSIHILCMSRGNADGLGDTRKEELYHACVSLKIPHEQVKVLDHPKLQDGFHEKWDHGLVAELTMEHVQLWAIDTIVTFDSYGVSGHPNHKDVHHGICKFLHTNRQGNVEAWELASLSILRKYSGPIDIWLSSLTSFAWTKQPIYTLVNSSPSRSYEAMAAHRSQWVW

SEQ ID NO: 48858 - protein, 291 aa, Zea Mays
MRGGGAGPTAAFMSDEPPPADAEEVEENSGAEEEDEETVVEQDDDELELGLCLGSKQQQQQHPPPCRILTARDLQPRSLSPDSSVSSSSPAAGAGTAAPSKRAKADAAPNSPGTVASGHPQSFGVVGWPPIRTFRMNSLFNQAKENASEAGAKKPIVEPDMQEDKEESKKGRTVGWVKVNMEGDIIGRKVDLNAHRSYKTLASALELMFMKPSIGLCTSSSSKTLKLLDSSSEYQLTYEDRDGDWMLVGDVPWEMFVGSVKRLKIMRTSDAKGPRFQGSHRPTAACTRGRT

SEQ ID NO: 48859 - protein, 409 aa, Zea Mays
MFLSPDESKVSGLVNTLKEKKIGIVAHFYMDPEVQGILTAAKKQWPHIQISDSLIMADSAVKMAEAGCDYITVLGVDFMSENVRAVLDQAGFNKVVVYRMSSEPIGCSLADAASSCEYTHFLREASRCYPSLHVIYINTSLETKAHAHELVPTITCTSSNVVPTILQAFSQIPNVNVWYGPDSYMGANIADLFQRMATMSDEEIAKIHPDHNRKSLSSLLPRLHYYQSGNCMVHDMFGHEVVEKIKEQYCDAFLTAHFEVPGEMFSLAMEAKQRGMGVVGSTQNILDFIKDHVMGALDKNVDEHLQFVLGTESGMITSIVAAVQELLHFYSSQERANIKVEIVFPVSSDAISKTSNGSHHVGSSMATDLDNLTIVPGVSSGEGCSIHGGCASCPYMKDTSRKISCRGWV

SEQ ID NO: 48860 - protein, 436 aa, Zea Mays
MDAAAAASLLPRAAASSLLPRRVLSPLHVSRSGLLPRQSSFLAARCAHSRAPPPHPPLPRADCDDAAAKAHPRLRLRLLAEEFRALPSDADRARRLLSLAAALPRLPEPDRAQGNRVMGCVARVWLVARCNASTGWRMWFSADSDSDLSRGYCACLVAALDGAKPEDVLAVDPADPDLAPLGAGTTAAWSRASTWHNVLVGMQKRARTAIAAREGRHPGKPFPSLVIARDGAVSAQGSYAEAQAMFLSPDESKVSGLVNTLKEKKIGIVAHFYMDPEVQGILTAAKKQWPHIQISDSLIMADSAVKMAEAGCDYITVLGVDFMSENVRAVLDQAGFNKVVVYRMSSEPIGCSLADAASSCEYTHFLREASRCYPSLHVIYINTSLETKAHAHELVPTITCTSSNVVPTILQIYFREWLQCQMKKLQKFIQTTTENL

SEQ ID NO: 48861 - protein, 603 aa, Zea Mays
MDAIKSHAKKVDLVDETLRPPLVPSEKHNAFRVRNVASRCKTDLADATKIRRCTSPSLGQTSAIEGTPAPKRAQSADRRRPTPSTPPSKVSTPSTPVSRSITPVRDTTRDLHKSSKRIASTKAPDGLWPAMRNLSSSFQSESVAAPTTRNDKVVTALDCSKGQVSVLTERKRSPFRRKNIGEHCENAQPSEEPPKRLIEQHRWPAMIAGQAPKNLMSRSIDLSDKANIPVASSNTSRGLSPRKTPSVRPVPSSNTSRGLSPRKTPSVGPVPSSNTSRCPSPMKTPSVEASVKLSNQSLDEVARSLAIQSSRKDDKVDSQTIERSKSLSRPNRTVTFPVPILQRSSSPSRALPATSSTSRAFQSPSRTRPSTPCQSQSVGAIQSSVPSSLINYMVDARKGKKNASQIENIHQVRLLHNRHLQWLFINAYAEDALSFQKATVENTMYNVWRNTVNLRDSVNMKRIMVQHFQQELRLYNILKEQIAYLEQWPTLERENSISLLGATEALKASTLRLPVTLGAKANTIALKNAVSSAVDVMQVLGSSVCCIHSKITDSTSLVSELSVIAGQEKIMLDECRELLATAAKLQLRQSHGMMACGGSQTGP

SEQ ID NO: 48862 - protein, 254 aa, Zea Mays
MACRAKVVGQVERVDGESLSYAEFVRRFMAPNRPVVLTGLTSSWRAHKDWTLSGSGDLRRPNLGFFTQNFPSSLVQVDDCSSSDFTDQKRLEMSMQEFIDHWVGGPHCGSSDGDRDGSLLYLKDWHFVKEYPDYIAYTTPTFFVDDWLNMYLDSHPIHRDSDIANHKNEINCSDYRFVYMGAKGTWTPLHADVFRSYSWSANVCGQKQWLFLPPSQSHCIFDRNMRSSVYNLHDVSEKQFPEFNRMARMHSRAE

SEQ ID NO: 48863 - protein, 172 aa, Zea Mays
MITITYLLSAFLLINDTVDPNFWTIRPLSDMMVRAATDDVRFLLSIYAKMMEKLSKVSLWRLAVRSELYCRCFCLSDNQFADWSPLPPVPDDIEADVYVPEADILSVLDVPPGKMGRVIGRKGSTIMAVKECCKVEIHIGGAKGPPDRVFIIGPEKEVRKAEAIFRGRMLEF

SEQ ID NO: 48864 - protein, 177 aa, Zea Mays
MRYLWMPHLADDVDTIAAANDDDEDHHHHLRLLVLHHHQAQHLQQAAAAAGGAANDLAAGAYDVRQLHALPSSGMAATSSSDSLASESYDDGGLLFANLRAGEMLMDGGDWAAQQEADQGLWPPPPPPPSDLDQSVVQAAGAGAGQFQDMELSGWVQGFSESITDNFWALEEIWKMQ

SEQ ID NO: 48865 - protein, 96 aa, Zea Mays
MRASSSSGSRRTRPPPRPSPRKKQLRRNLTQLSPRRGQRKAVTDSSCLYDCSCTTHWFLCALLNRKRSIIKQTLNEAKRAFECNLSRSAALQPHSE

SEQ ID NO: 48866 - protein, 653 aa, Zea Mays
MECNKDEAQRAKGIAKKKFEAGDLQGARKFALKAQTLFPALEGVDQMIATFDIYLASEGKVAGEKDWYSILSVPMNANDEKIKKQYRKLVLQFHPDKNKSVGAEGAFQMVQEAYTVLSDRTKRAVYDQKRNVRTFQQRTAQSGKASTVPGASNGFYNFAANAATASKRTVNKQTVGSATHAPSAPSTATRAPVAKPDTFWTSCNKCKMNYEYLRVYLNNHLRCPSCRQPFLAKEVQKPPAGNVVQDSNISGANQNTTTNRNLRWGPFSRAAGAASATASSAAAAQAANVVHQTYEKVRREREEAQAAATREEALRRKYNPLKRHASMSGNANLGPGDATSGKKTRTMTKDAEVGSSSTISSPGANFFRVPGVNISFSNNIGAYEFQGVDGGPNWKPRPLIRLSLVKTFSQMDLRGLLLEKTKTELKNKLTVIKSKTSQVASEKASKKIAVKENGGDNEALGPEDPTANKDSHDSEQIGSNTSTDAENEDDDPLSYNVPDPDFHDFDKNRTEECFQSDQIWATYDDEDGMPRYYAFIQKVLSLKPFKLRISYLTSRANSEFGPSNWVSSGFIKTCGDFRIGKYESCDIVNMFSHQMKWDKGPRGLIKIYPQKGDIWAVYRNWSSDWDEDTPDNVLHAYNVVEDVRRRSCKCPQR

SEQ ID NO: 48867 - protein, 156 aa, Zea Mays
MRCINESMRLYPHPPVLLRRAIVDDVLPGNYKVKAGQDIMISVYNIHRSPEVWDRADEFIPERFDLEGPVPNESNTDFRFIPFSGGPRKCVGDQFALLEAIVALAVVLQKMDMQLVPDQKINMTTGATIHTTSGLYMNVSLRKVQQEAELALSESK

SEQ ID NO: 48868 - protein, 104 aa, Zea Mays
MSVLCFFFFFLKKHDYCMPHGFRYCLNQDIFLKKHFGDAIDQSFKTCLGRTNMPKASGLKRSGRRLRKWTKGVIIKDKANWTLVQQNLKLTRRRLRDWKSMLLL

SEQ ID NO: 48869 - protein, 340 aa, Zea Mays
MACLAPQFKWAPSAAAHMPSSSSSSSYSRCSALRVHCAVTSAAVVEDRTNGSAAQLRLAYAAPAIQRNFEATLASEALLNEEAVVAAAAAEAVALARAAAEAAQEVVQIVQRNNHQPVIRPKKCVDNYLANEILRTEMRSSSPDMYANNPLMEYLDSYGIMDAEDELDAYAQYTENIAVKSARQSERKARRTRAAIKASTTLHASQKVALSSKKKRSKGSSSSMNPLGSLWKMTGRRLLTAKEEVEFSEGIQDLLKLEAIQAELIEYNGGQPTFSQWATAAGVDEKTLRKRLNYGIYCKNRMVTSNVRLVISIAREFEGPGMDFYDLIQVFCYRKECRAL

SEQ ID NO: 48870 - protein, 112 aa, Zea Mays
MFSSQKVLHGARLLASPFQLLPLPAWHLFNLSSLSLSLSLSLSFCYSHFTDDNSANWSISHIFKYIYIYGANTGEVVGVVVIMHKLTVAATWIGEGDRSTENGIICQVHVRT

SEQ ID NO: 48871 - protein, 159 aa, Zea Mays
MSLAPSIPSIKVKVGPVSVAPPHRACRSFAVVRSSKAEGPIRRPAAPPLSPPPKTPALSTPPTLSQPPKPAAPPTSSESTPPSPQPKAAVATAPAAALQRPLAGAVTLEYQRKVAKDLQDYFKKKKLDEADQGPFFGFVPKNEISNGRYLDLHGRRTTL

SEQ ID NO: 48872 - protein, 183 aa, Zea Mays
MATAPVTSSMATNSTCVRLPSMPLRRAPAIVSFASRPWSTAMTSCTGLSRHSDVVAAAGHQKLMGSLNNNEGLMFGVVVARFNEVVTNLLLQGALETFERYSVKAENITVVSVPGSFEVPITAQKLGKSGKFDAILCIGAVIRGDTTHYDAVANSAASGVLNAGLSAGMLFSVLPYHVSCSTG

SEQ ID NO: 48873 - protein, 169 aa, Zea Mays
MSEQRTTEYIEGKYGKFGVDRVWHDTATPFKQVLQEFEDWLGNHNLWKKEQGGSLNRGAFVTCGNWDLKTKVPEQCKVSKINLPTYFMEWINLKDIYLNFYNRRATGMMTMMRELQLPIVGNHHLGIDDSKNIARVVQRMLADGAVIQITAKRQSATGDVRFLFKDRIR

SEQ ID NO: 48874 - protein, 212 aa, Zea Mays
MTTSGAPKRPSFKRSSPGKKSRLRTRRVAAGGREGEAEAEAAGTSALARALLPASVGLDAVPPVGRALPRDFFEVDALDLAPRLLGKLLRRDEVVLRITEVEAYRPNDSACHGRFGITARTAPVFGPGGHAYVYLCYGLHMMLNVVADIEGVGAAVLIRSCSPVSARRGKWKSVALDNYVIRRNIGGVDHLCPQISTTMHSPCRFQLKAEKS

SEQ ID NO: 48875 - protein, 390 aa, Zea Mays
MANGGHSIARPDGHNLMGNKDNVNIQVDDNMTSGGEASIEPSVHVQLGENDRWERGVNMGHGLHRMNRAMRGKLPVVIPEGRIRPVAPLVAAKFSTECNIAVRNHVPVYKHWKDYKNHNGMFNLFTDKLSAKFDINTNDAPVQKACSQMMKNAIRQQRYRLKKKFFDPFPLHLVTKTSPIRSMSNEEWNDLVEYWKSPKRMETSQKNKDNRSKVKFHQTTGSRSYMVHVENLGDKNIGQEPDALDLFKECHYSRKKKCYTSTVQQAITQMDNKRSATTEGEKSMSATEVVANVLAENTKKNLFLQNVGIQNVGPRSSLRNIEAQLEVEKRANSDLKSIVDAQHEQLDALLKQMQETEENRIREQEEVKKKQAEMETKMQLVLSQIHSRLR

SEQ ID NO: 48876 - protein, 432 aa, Zea Mays
MPVPKPMERKQAAYSNLDERYAIQGEKYQGQQYSHIYFTRLHHMRNLLHALVPSWKPQLPVLGLEEGKDCIIVGTLYKHMKLKPSILDEYAKERSAIPLVKPHNFMHPDDHLILEDESGRVTLAGAIPPAAFVTGVVVALHGKETSAGNFLVEDVLEAGLPPQSALSSAEEDKYVVFISGLSVGSDTFNPLQFQLLIDHVTGHLGDENEQSIASNIVRIVVVGNSVHISPRFVNGQTVPSKDQSRIAEPIKELDIMLTQLVASLPVDMMPGCHDPANFSLPQQPLHRCLFSGASTYNTFSSCSNPHQFELDSVQFLGTSGQNIDDLYKYSDAKDKLEFMERTLRWRHLAPTAPNSLGCYPYTDKDPFLVESCPHVYFVGNQDKYETRLLEGQEKQKVRLISIPRFSESGVAVMLNLRNLECSTLSFSTSFDA

SEQ ID NO: 48877 - protein, 868 aa, Zea Mays
MQKHSGLRSLEGFRSLVGSTSTAMKVANPRPSPDTGGISYGSFANLKITAEKLVKEQASVKTDLEMAHVKLRRATEQINIIEGKLQQALNENAKLKVKQTEDSKLWQGLDSKLSSTKTLCDQLTETLQQLASQTEQAEEDKKFFEEMLGKNSKALDEFNCLLRDLSTKLEYAEQKIISGRQEMLQIKQEKEEMDRSYKGQLYSNDTTIKEKDSLIKQLEGSLDDNKSRLIYLDSRLQCMEQELKLKDDVCISLKGNLASSESEKNSLELMNKGHILEIKKLCQDNKDLNELFSSFMVKVTELDKEHASMSSHVSRLISSFERFYEMAQEEKMLMARSSKDKFEHLQSQYVDLTSENNALKTEIEELKSRLIELQRTQEIVMVQHVEECQVAEDKIRRLESEAEVSASNINQLEKLASELQGRIQKLLEDSTFAENHKQELLQKILKLESDNQELLGQMQSIMEEKSNNAESLHGEITKRDQQVDTLENQINQLRSVLDEKEQLYLCSVQKEKTLEEQKLQVEALLSATECKLSDAKKQYDLMLEGEKIELSKHLKELSLKNDQAINEIRKKYELEKIEITNAEKEKAEKLIREIENKCNEKISQNKHDSQRYLICLKEEHGTTVARIQQDNEHKESTLRAYHKEELQRIQSQAENEMRERLSLLRKEHEVQIKSLRMHHEEECQRMQEELELQKSKVEEKQRALLQLQWKVMGESQRVDQEVNSKKEYSVSSIRRSDPYGRKEQEVQLVSPETNRKDVNLPGILQSPISNMLRKVEKVSQDIPKHRKVTHHEYEVETANGRITKRRKTRSTVMFGEPNSQKPLHNTTDKDVKKLKKVPTRSRAHPANIGELFSEGSLNPYADDPYAFD

SEQ ID NO: 48878 - protein, 937 aa, Zea Mays
MKGAQDKRHRKKQDLQVLGPFPGCLGRMINMLDLSNGVVATKMLTEKAHRDAYAFAVSPAGKDRSNTFKMAINPPAQTEDKQRDSQTRRNFPTKRSNSPTKRTGAMPVKMLMEQDMWKERRPDEEPLNVVARLMGLHEPPGQQSNFPLGRQLDKKYQCGGFEENYWNLKSKKESKCHQNQKAGPRHQHTWNGSGDQPSRISSSQSMHQENETCEKRMSIVREKFAEAKRLATDEKLLHSKEFQDALQFLSSNRDLFLEFLDEPNPLLSSNRYEFQPVAPPSEVKQITILKPSEPAKRKDSIFVGRQLFSDGDGGESERNRYRRHQSSDVSPANSNLSEPTKIVVLKPGFPSSHDSRIARSSLSSAEDSEDESMMAVDETMCSRRLAKEITWQMRMRLKDRQDEESMLSCEYPDFYIGDDSFSKSEVEIPKEMCGETSGELEFGTPTSGRSWDFLSRSGSPFSASCSSQASHRREPSVVREGKKKILERLSMVSSTVNIEEEMEGRRSTGTLGDMLTISKVKDQEEIGAETLGSPAPELEPEEPFSCLPRSRSLPLSLSYGVAESNGITSGTHEAEKERIRKSSSFREKVSSLFSKNKKSTREKVDPSVSNRLKHGGAVTTGDVKEICNHLALDNLQKQHTCLNTDEKNTVQGLVTSSCETNSAADIPAKDISSISSLGVPGIFGGLQDEPSPVSVLDGPFICDNNRRLLYSSENFITSSPQALSRSPLIGSFSRSLSWEDPPLEVMSPNSLRLSRLFSKADEDLDSLTFIQKLVHSRGTGRESCILADPLDPSLLEKISDYEEDGIKFGKRRPKQRLLFDAVNEALIELASMAELAAYPWGRSCSSEHGDCKNGSSSNSAAEEIWRVIRNWSILEKYPPGEAIERNLLLEMILKREVAEAASADTTRLETFDLNTTVCAMVLDGLVEETVVDLTNYC

SEQ ID NO: 48879 - protein, 1012 aa, Zea Mays
MELLPAPFPSFLPRPHQLPLSRPCHGRLQEPITAAFAQAPPLALPFQEATRRSSSSHTPRPSTRPCPPAQRPTTTHPLPPPLPPGPSPSSGSTGSERLIVSETKLITVHSCAGRLGDARKVFEGMACRDLLAWSAMIGAYAIRGLYEEVVALAVAMVREGVIPDRFLITRILQACAYTEDLELGTAMHSLAIRRGFMAEGARDVPVGNSVLAMYVKCGELGRARAAFDMMGQRDLCTWNSMIFGCCRSNEWEEARRLLDDMRRQGTEPGLVTWNTLVSSYARSGELDVAMEMLEQMEESGVAPDVVTWTSLVSGFVHGDRGGEALWCFARMRLAGVEPNGMTIASAISACASLRLLSQGMELHCHAIKVGSVNNVLSGNSLVDMYAKCGEIIAAKRVFDEIPEKDIFSWNSMVAGYAQAGYCGKAYELFCEMESLGVRRNVITWNIMISGYIRNGDDERAFELFQMMESCGVKRDTASWNALIAGSVHNGHSDRALRIFWQMQSLLVRPDFITILSIIPAFANLAGFWKVREIHACIYHNNLEMDGKIANALINAYSKSGDLAGACAVFDRHSSRNIISWNCIILAHLLHGSPSEALDRFCEMKQEGVRPDHTTLTAVIKAYGLQGKVSEAKRIFHNMTHDYNIIPDLDHYTAIVDLLGRSGSLQEAYEFIGNMPLIPNLAVWEALLTAATIHGNARLANLTARELSSLDPSDPRIQRLVFNYWGLTGKSVDVPLMTVYNGGRELEDVDSCSVEIKNNVYLFSTGDNLALESTVAELKLIMIQIRMSLLNISNETNAEEEKEELSGIHCEKLAIAFAISNSPPFRSIRIIKTLRMCSHCHIFAKLVSEKYERQILIKDSNCLHKFEDGKCSCEACATLDDYLLKSYYKTTSLIAASTRSAVDDIHIPDFTQSAEQLGKTVGSDLAKGNLTAPVIFALQDEPELREIIDSEFSETDSFAAAIDLVHKSCGIRRARELAREKGDLAIQNLQCLPRSDFRSTVESMVKYNLERIE

SEQ ID NO: 48880 - protein, 243 aa, Zea Mays
MATSSDGGGDQRRLLSIPKEGERIIAPTRRPDGTLRKAIRIRAGYVPQEEVAIYQSKGALMRKSGPDVPPGYDPALVADAKPKTKAAKRNERRKEKRQQASLANDKGKSMNIEGTDAGETDKVLSSKTDKQKDSVESVTKQMSGIAISESHAMPSTNTINNSQPESSAPDIDKKIRALKKKVYSCSFLRLHIFYEKKMNIRLAEAQVQGDPEKLKSETLEKIKKIDGWCMELKLLEDSRAPAA

SEQ ID NO: 48881 - protein, 129 aa, Zea Mays
MISLHRVQVALQLLVVVTGSSAPDTRTITIGSNYAHTSNQPPPPGTTLWKRDAGNTAAPSSLTSPSFWLIIRFQNEILQMRYEPNRALVRLQYTQTNKTKHTEQSPNPKDKLRGGSGAFACKRRQVNYS

SEQ ID NO: 48882 - protein, 137 aa, Zea Mays
MRHLTYSSDHVGAWQGREGSGQRRRQASPQGSPRQHPGHHEAGDPEAGEEGRREAHLGAHLRGDPRRAQDLPRERHPRRRNLHGARPPQDRHRHGRRLRPQAPGSHPLRIRRLRGATAAGGRGKSLGSRSRNREYSG

SEQ ID NO: 48883 - protein, 119 aa, Zea Mays
MLVYERLYHGSLDKLLFGRSDGHFMDWSKRLKVALGAARGLAFLHDEGPFQAMYNEFSTLNIQIDKGFTAKLSGYGCVGFNTEEISNAPVQTIRWRPWRRVYSLSLSIAATSRGWTVPK

SEQ ID NO: 48884 - protein, 191 aa, Zea Mays
MSSPAEYYKSLPPISKAYGTLCFFTTVLVRLHILNPLFLYLYYPRVFKKFEVWRIFTSFFFLGPFSINFGIRLLMIARYGVMLEKGAFDKRTADFLWMMIFGAISLLVLSVIPQLNTYVLGLPMVSMLVYVWSRENPNAQINIYGILQLKAFWVSWLDIYTTTLQCCTLSPPERTTSRLRNGYIRLLLDSE

SEQ ID NO: 48885 - protein, 283 aa, Zea Mays
MLRCHTPPQCARAPLRHHGRWESPPAAAPAVVVRCARGAPQVSGIEAASPGHAAVTAALAKAEGGDARPSLAERLRLGNLLEDGLSYKESFIVRCYEVGINKTATVETIANLLQEVGCNHAQSVGFSTDGFATTTTMRKLGLIWVTNRMHIEIYKYPAWGDVVEIETWCQEDGRIGTRRDWILKDLANGEVIGRATSKWVMMNQNTRRLQRVSDDVRDEVFMHCPKAPRLAFPEENNGSLKKIPNLSDPAEYSRLGLVPRRADLDMNQHVNNVTYIEYTSRYN

SEQ ID NO: 48886 - protein, 478 aa, Zea Mays
MAYPAAPHTSAAFLASFATPLPARRASPPTRRRAVSVAAIATTTTCVFADAPRGIKEEQADSGAQAAAAAAARRDVSPDTVASIILGGGAGTRLFPLTRTRAKPAVPVGGCYRLIDIPMSNCINSKINKIYVLTQFNSQSLNRHIARTYNFGEGVGFSGGSVEVLAATQTAGESGKKWFQGTADAVRQFLWLFEDARLKCIENILILSGDHLYRMDYMDFVQKHVDSGADISVACVPMDESRASDFGLMKADRNGHITDFLEKPKGADLESMQVDMGLFGLSPEFASTYKYMASMGIYVFKADVLRKLLRGHYPTANDFGLEVIPMAAKDYDVQAYLFDGYWEDIGTIKSFFEANLALTDQSPNFYFYDPVKPIFTSPRFLPPTKVENCKVLNSIVSHGCFLTECSVEHSVIGIRSRLEPGVQLKDTMMMGADYYQTEAERLSELSVGKVPVGVGENTKIRMCKKQTGQLKDITFVLG

SEQ ID NO: 48887 - protein, 705 aa, Zea Mays
MVNQVHVVGEGLIGRTLISGEHQWISDDIPFSFSQISDEDNLGLCQGYTWWQHQFLSGIKTIAVVPMPAFGVAQFGSMQKFLDQVKGATFLMESLSWSPSTKDAQKDAFMYNPQFQLDSSTTREGLPRTKAEPENSRLENAISIDSLKNFAITSNGLNPHVVAMPVNSKSISTVKLIQSDSNLRYNNISENAQQFKSAKQPDSSWASAATCFSNLTNLQRIERGLSCTPNKLRHCLQSEKSSGFLDSYSSIVSTDAELKCTLFDNATPFVQSDVIQEVGTSGSTRACGLHELPNEIWAEIASGEMKPVIKEVNENNGFLESTAFDPVMNDWWGDTALLAGNTSHLSATTMNSVSGQASSEQLSIEDRGLFSESVFEELLGFDGNVGPVMDSTEPLAGFVSGCHLPRYNLQGSLSVCKAQVPPLILPSGSCTSENVVMGSSKEAPVSLQNLSMDDCGSLNTASSKISQVKKPEGEKVVKKRARPGESTRPRPKDRQQIQERVKELREIVPNSAKCSIDALLDRTIKHMLFLQSVTKYAEKIKQADEPNMISKDNGSVLNDNSHGVVLKDNPSGGSNGGATWAYEVAGQTMVCPIIVEDLAPPGQMLVEMLCEERGFFLEIADTIRGFGLTILKGLMELRDGKIMARFLVEANKNVTRMDIFLSLVQLLQQNSRNRSSDQLVKVMNNGIPSFVDHQQSPASIPVWPC

SEQ ID NO: 48888 - protein, 434 aa, Zea Mays
MVYVPEGQFLSRIGPTEFLKDLEMFVGVDAVQEWKKLLDAVIPMSAAAMALPPLSIRGDLGIISTAVGRYTPSLLKSFIQMGPQGALGATKLLRPFKEIVDSLELKNPFVRNWIDLLCFLLAGVKSDGALSAEMVYMFAEWYKPGCLLEYPLGGTGAIIDALVSGIEKFGGRLALRSHVEKILIENGRAVGVKLQSGQVIRAKKAVVSNASMWDTLDLLPPDAVPKSYEDRVKATPQCESFMHLHLGFDAENAREDLGIHHIVVDDWNKGVDGEQNVVLISVPSVLSKDLAPPGKHILHAYTPGTEPFSLWEGLDRKSAEYRRLKEERSEVMWKAVELALGPKFSREKCDVKLVGTPLTHRRFLRRNRGTYGPAIKAGEATFPGQATPIPQLFCCGDSTFPGIGVPAVAASGAIVANTLVPVSQHSELLDAVGI

SEQ ID NO: 48889 - protein, 386 aa, Zea Mays
MALPPLSIRGDLGIISTAVGRYTPSLLKSFIQMGPQGALGATKLLRPFKEIVDSLELKNPFVRNWIDLLCFLLAGVKSDGALSAEMVYMFAEWYKPGCLLEYPLGGTGAIIDALVSGIEKFGGRLALRSHVEKILIENGRAVGVKLQSGQVIRAKKAVVSNASMWDTLDLLPPDAVPKSYEDRVKATPQCESFMHLHLGFDAENAREDLGIHHIVVDDWNKGVDGEQNVVLISVPSVLSKDLAPPGKHILHAYTPGTEPFSLWEGLDRKSAEYRRLKEERSEVMWKAVELALGPKFSREKCDVKLVGTPLTHRRFLRRNRGTYGPAIKAGEATFPGQATPIPQLFCCGDSTFPGIGVPAVAASGAIVANTLVPVSQHSELLDAVGI

SEQ ID NO: 48890 - protein, 391 aa, Zea Mays
MSAAAMALPPLSIRGDLGIISTAVGRYTPSLLKSFIQMGPQGALGATKLLRPFKEIVDSLELKNPFVRNWIDLLCFLLAGVKSDGALSAEMVYMFAEWYKPGCLLEYPLGGTGAIIDALVSGIEKFGGRLALRSHVEKILIENGRAVGVKLQSGQVIRAKKAVVSNASMWDTLDLLPPDAVPKSYEDRVKATPQCESFMHLHLGFDAENAREDLGIHHIVVDDWNKGVDGEQNVVLISVPSVLSKDLAPPGKHILHAYTPGTEPFSLWEGLDRKSAEYRRLKEERSEVMWKAVELALGPKFSREKCDVKLVGTPLTHRRFLRRNRGTYGPAIKAGEATFPGQATPIPQLFCCGDSTFPGIGVPAVAASGAIVANTLVPVSQHSELLDAVGI

SEQ ID NO: 48891 - protein, 150 aa, Zea Mays
MHRVFFDLETRWCARKLGSWFPLHHFSSLKHTFQLSSDKDSDRRRHAPPRRRPCPLLLRKHRRCLSHERQREGARGGALGEPRDPPRGRPAEGRAGEADLGRAGGGAEARLRVPAGVRHGGSGARRGAWSCLVAAWSNRVGEFRSPPAFG

SEQ ID NO: 48892 - protein, 110 aa, Zea Mays
MGRSRATAAAATSRPRRNPKPKPDSPFLSPLASLSATPRIRTRKGAIRRGGPSHASSSPGSSPTGLNVRFLSSPGSASPSKPKPKLRPKTKPVSIWQMKLTRSTRRCLII

SEQ ID NO: 48893 - protein, 81 aa, Zea Mays
MTTLRCFRSCSFLFAFPCSSLRVWETTLHVSRTNVAMCPRPRRFCQMSYVLCKLMRISFRIVDNIISVFRQLCEDCLVFLV

SEQ ID NO: 48894 - protein, 468 aa, Zea Mays
MEMMKERFSKLLLGEDMSGSGKGVCTALAISNAVTNLCATVFGQLWRLEPLPPEKKAMWRRELDCLLCVSDHIVELVPTWQTFPDGTRLEIMTSRPRSDLYINLPALRKLDNMLLEILEGFRDVEFWYVDQGICAPDCDSSASYRRTFHRRDDKWWLPVPHVPHGGLREATRRQLEHRRDCASQILKAAMAINSNALAEMAVPVSYLDSLPKNGRAALGDVIYRYITSDQFSQDYLLDCLDLSSEYQALEIANRVEASIYVWRRKGGGGARSSWGIVKDMVMDTEKRDLLAERAEALLMSLKQRFPGLTQTSLDMSKIQYNKDVGKSILESYSRVLESLASNIIARIDDLLNVDELSKQPADSIPSAGADAKVACKSNGSKQATAVPASGTPYATAYATPSFSPAQLSSPSKIGRALLVDRRSHHVAGAKRATASAADRAGVEVVKGMVVDGSSAIFDIIPIAVPAKI

SEQ ID NO: 48895 - protein, 334 aa, Zea Mays
MADWASIQTDILGIIIKKLPIPDYIRFRAVCTSWNNVCKDVSYCPRVDPWLMLPPNQNPLGAQFFCIPERKNQSIRLPNTASLFESVWAPVGSSNGWLIYFSHTYGTMQLVNPVSGKHIQLPPIGRRTFSKAKLLEISERNFIVAVLYGDEKGYKITRKGSSNWSSVESKFILDDIIKHGGRLYTCDMYGTVEMWAEPPRAWPDEEVTHRWRFRCLIETPAGDLVRVKRLCQNKFAVWILDKASSSWVGTENIGDLALFVSHYNSFCFPASGQPNLKANCIYFIDIYNNLCAFNLEHGTKELVQTLTIGRGQGRNDYHRWPERDQVLWFIPSLK

SEQ ID NO: 48896 - protein, 111 aa, Zea Mays
MDKHLKALAPVYVGTKFIKLDAENAPFFVAKLAIKTLPCVILFKKGIAVDRLVGFQDLGSKDDFSTRALENILKMKGIIDEKKKDDDDDDEESESKNRRIRSSTAQDSDSD

SEQ ID NO: 48897 - protein, 244 aa, Zea Mays
MGVIVLGLFTVIGIFYSVLVATMVGQRIWQRHYHILAKRMLTKEMVAKDKAQAAPASHDEVDLDELMDDPELEKLHAERIAALKKEVEKREVLKRQGHGEYREVIEGDFLGEVTGSERVICHFYHREFYRCKIMDKHLKALAPVYVGTKFIKLDAENAPFFVAKLAIKTLPCVILFKKGIAVDRLVGFQDLGSKDDFSTRALENILKMKGIIDEKKKDDDDDDEESESKNRRIRSSTAQDSDSD

SEQ ID NO: 48898 - protein, 226 aa, Zea Mays
MTPLASPPPPVLPTSLHAALIQNQVPGLSAKDSAGNQHPPSYHPPARTIILGFSKGGVVVNQLVTELSRWGASGSTNQAAAADVPRPAAAGPGPPPHPTQNDLLLLGAPTRSSDDLLSSISELHYVDAGLNRAGAYVADRAVIGRIREHVVRAGDKSLRFALHGTPRQWCDPSRPWIREEKDAMVQVLADEARRSEGRLVLSEKLYFEGRPRSLLMHFEVLEAMDI

SEQ ID NO: 48899 - protein, 200 aa, Zea Mays
MDSEAVQHGLLPLSACPPTANSCAHYSRGCSVVAPCCGQAFGCRHCHNDAKNSLEVDPRDRHEIPRHEIKKVICSLCSKEQDVQQNCSSCGACMGKYFCKVCKFFDDDVSKGQYHCDGCGICRTGGVENFFHCDKCGCCYSNVLKDSHHCVERAMHHNCPVCFEYLFDSTKDISVLQCGHTIHLECMNEMRAHHHPVWSL

SEQ ID NO: 48900 - protein, 154 aa, Zea Mays
MWNITGGVENFFHCDKCGCCYSNVLKDSHHCVERAMHHNCPVCFEYLFDSTKDISVLQCGHTIHLECMNEMRAHHHFSCPVCSRSACDMSATWRKLDEEVAATPMPDIYQKHMVWILCNDCSATSSVRFHVLGHKCPACSSYNTRETRAACPRI

SEQ ID NO: 48901 - protein, 95 aa, Zea Mays
MAATAGGGGGGGAKAAVTEQIAQAVRSTSNLLQLMEQSSPAQVHLAKLPKNLLEKASFAKNTEHVLHQLPQVISSLDAYMDRSLQSSCQTWRTLS

SEQ ID NO: 48902 - protein, 262 aa, Zea Mays
MAKKKEKAVNVSGKPRHSNDVNRPNDKKGAGGGAGGGSRSAATVRRLKMYKTRPKRDRAGKVLRNDFQSKELPNTRIEPDRRWFGNTRVVGQPQLEMFREELQSRLSDNFSVILKERKLPLSLLQDHQKQAKAHLLEVEPFEHAFGPKGKRKRPKLTALDYESLLKRADDSQDVFEQKYASSKLPREEEEDGLRDLVRHTMFEKGQSKRIWGELYKVIDSSDVVVQVLDARDPMGTRCYHLERHLKENCKHKHLVFLLNKDG

SEQ ID NO: 48903 - protein, 79 aa, Zea Mays
MLPAPQTVSGGPPSYICRLSGKSDVDWSFWLEANSSESLRVDVAVLDQYLVDSTKKLKSLFPSWADLTAFTTFFSTYHL

SEQ ID NO: 48904 - protein, 589 aa, Zea Mays
MDAGAGATAIRVPYRHLRDAEMELVSLNGGAPGGDTGPPPPPPKDQPRSRADRTKLVLACMVAAGVQFGWALQLSLLTPYIQTLGIDHAMASFIWLCGPITGFVVQPCVGVWSDKCRSKYGRRRPFILAGCIMICAAVTLIGFSADLGYILGDTTEHCRTYKGSRFRAAIVFILGFWMLDLANNTVQGPARALLADLSGPDQCNSANAIFCSWMAVGNILGFSAGASGEWHKWFPFLTTRACCEACGNLKAAFLVAVVFLLLCMSVTLYFAEESPLDPKDTQGLSDSAPLLNGSRDAAHASNEPNNERFPNGHVGLNNVSANNNTEEFTNVNSNTEKGGVFNDGPGAVLVNILTRMRHLPPGMHSVLLVMALTWLSWFPFFLFDTDWMGREVYHGDPNGDLSERKAYDNGVREGAFGLLLNSVVLGVGSFLVDPLCRMIGARLVWAISNFTVFICMMATTILSWISSDLYSSKLHHIIGANKTVKITALVVFSLLGLPLSITYSVPFSVTAELTAGTGGGQDSSVAWSRSMGRSVWRREYPGVRLGFGLLPGSRCARSSQAAKAVQLVPICRVPWIWLMLMPKTPPSAM

SEQ ID NO: 48905 - protein, 56 aa, Zea Mays
MHICQCDDGIGNADAPDITEPWFVWLSALHPWRHVRADTLLECKLIRTERAYSTCV

SEQ ID NO: 48906 - protein, 119 aa, Zea Mays
MHNNDFYAKEKLLKSMRDCDPSSLRHWIFQAPLQHYTALMDLQDYSENGTVTVVYRVILKGTDGEAYRDATGTTQFHEGRREDAVAAAEEAAFSKACAWFGFGLYLYHQDESHYDDHFH

SEQ ID NO: 48907 - protein, 79 aa, Zea Mays
MHNNDFYAKEKLLKSMRDCDPSSLRHWILWQRKFQAPLQHYTALMDLQDYSENGTVTVVYRVILKGTDGERCHGHNTVP

SEQ ID NO: 48908 - protein, 1093 aa, Zea Mays
MLHYRRTWVRSFNPFKIEISVKDLQNILTTTQDMILRCFDMAVRLLANKESRKPKEEIINNRKHYMDMRFWRMVGFGKLPKYHQDPTTEELAKTLDCWPSMNYYITGCRYVLMPWKFNGCHALFVIDHVKKHVTFIDFTPTQDWCKHMPYKRFNTSYLVLQAMAMWGNDRRLKFVGDNIGVFVDQNGKLIQDGRIIWLDTPASVVIHKPYAVARLPRHVEFYANNVTIDYGEFELSILRARLLLQLLVVMVVVAPFLEELGPPLLKCLNDYGSEISKCQFYLDMLNECRRGGVCLSFSSNWDYSWHEQEFCNVGDDACLILWDARTGIAPPVKLAGTNPAALERKACRPVLCLLLLPPAGLEEGREGGVHLRGGFGVWRGSEGRRGAMARKHGWQLPAHTLQIVAITVFFLLLVAFYVFFAPFLGKQVLEYIAIGVYTPVALAVFILYIRCTSINPADPGIMSKFEDGLIKIPTNGSGIEGMNLPQKANNATGTNSPTSTCRSSLDGHSNQRGSSIGEANMNLGSQLPKKRSSCWLLGGLLCAIFVKEDCRKTDDSELQANGEEALFCTLCNAEVGKFSKHCRSCDKCVDGFDHHCRWLNNCVGRKNYFTFLALMAISLIWLAIEFGAGIAVIVLCFVDKNASRNIQDKLGNGLTRAPFAVIVGIFTLLSLVACIPLGELFFFHIILIRKGITTYDYVVAMRAMSEAAPEDEEGANIIYSPSNSATTGFSVGSSLGLHHKGAWCTPPRIFIDQDEMIPHLEPGMVPSTVDPDAAGYAERANRAKKAVKISARSLAKLDKNEVMKAAAKARASSSVLRPIDARRGHEADVISSDNASVRSGMSGDYSGTKESNIEMKLSPLQNSYPQSLASQDEYDTGTPTASSLSSPVYIHKLASHSQFSAAPRPAPPERFVPAMVRPPVPTTQITNPGIPRPAVPTTQITNPMFQSATSYVRENRRASVIWDQEAGRYVSVPAQTRMGSGVDLPARNPRFLTNPSGEPSSHVRSVVPGNASSSAMPSGQPSERLTYSGQSIFFGGPMLSTPGVGANRNEADARARPEGSRDPNALCEKARTGSGSSPIFAPGAFQRNPPFDK

SEQ ID NO: 48909 - protein, 936 aa, Zea Mays
MELSKLHDGFIVEDVLTIKAQVQVIREKTDRPFRCLDGHYRRELIRVYLSNVEQVCRRFIDERRSKLSRLIEDKLGWSSFSGFWLAMDPSVRRHMTREKTETILKVIVKQFFIEKEVTSTLVIDSLYSGLKALEYQSKNKKAIPKLTETDARSTPMVLIDQDMFVLADDVIFLLERAALDTLPHQHLPTKDDKSSQNRTKDGNSGQEFSKDSIERDDRRLIELGWKTLELFSLAHIFSRIQVAHQEAVALKRQEELIREEEEAGLAEIELKAKRSAAEKEKRAKKKQAKQKKNSRKGNKGKSGKSNINKEIIMDHSHSDDRILDDFCGQIEEMPLNADNPEEVSDISDSRDDNSDMLHVDIEDRESSPVNWEIDASETQTTIPGSSEVQNDHAGKRTSTVDDSSSSCSSDSVPSVTVNGSYKGGAWTSVRSSSNRGNNRRNKDTEARAGFAQGGSCSSHNGFIGSGSNASGHSKERHEPEDDKVVLQRKQHAQWNIDIISSSKSRMAESSFSSVSSIKKQPQPNFLLESTNSLNHRGSEASGTVTSTTTAGASSTPATQLVLNKGPVSSAATQNEKPLPLQVLVPSKSEVQKQASLTGSATTEAVSVSRPLTAPQVPAAKQSAPVTSTAQNAPFLSRSMSAVGRLGNEPSANAPSFVPRSRTYRNAMMEKSSGGGSCFTHQQGSSEQAVAPWQSMFTSQPFIRPSETLSWKEETLLRSGFTFGTVKPESLNPYQGREENSQQASSNSSDCAPSSSNIRSEIEKLNLSGRPRSKQLLSEISTRFTPYQPQGLVADEFPHLDIINDLLDEEQSDRRRVLQPDFVQQSYMPHGASTPDYGEPYLFDQSEQYFDEEPPRFYSPLSSAPRRLRDLSYSHFDLPSHSSSSQFDDLMMSQWPYSRTDISMPSFGSDTSGYPYQVWDLANGSSRYPSYRPANGH

SEQ ID NO: 48910 - protein, 624 aa, Zea Mays
MDHSHSDDRILDDFCGQIEEMPLNADNPEEVSDISDSRDDNSDMLHVDIEDRESSPVNWEIDASETQTTIPGSSEVQNDHAGKRTSTVDDSSSSCSSDSVPSVTVNGSYKGGAWTSVRSSSNRGNNRRNKDTEARAGFAQGGSCSSHNGFIGSGSNASGHSKERHEPEDDKVVLQRKQHAQWNIDIISSSKSRMAESSFSSVSSIKKQPQPNFLLESTNSLNHRGSEASGTVTSTTTAGASSTPATQLVLNKGPVSSAATQNEKPLPLQVLVPSKSEVQKQASLTGSATTEAVSVSRPLTAPQVPAAKQSAPVTSTAQNAPFLSRSMSAVGRLGNEPSANAPSFVPRSRTYRNAMMEKSSGGGSCFTHQQGSSEQAVAPWQSMFTSQPFIRPSETLSWKEETLLRSGFTFGTVKPESLNPYQGREENSQQASSNSSDCAPSSSNIRSEIEKLNLSGRPRSKQLLSEISTRFTPYQPQGLVADEFPHLDIINDLLDEEQSDRRRVLQPDFVQQSYMPHGASTPDYGEPYLFDQSEQYFDEEPPRFYSPLSSAPRRLRDLSYSHFDLPSHSSSSQFDDLMMSQWPYSRTDISMPSFGSDTSGYPYQVWDLANGSSRYPSYRPANGH

SEQ ID NO: 48911 - protein, 915 aa, Zea Mays
MIGGGKSLWNCQNYMMALLLRMFLPSKPKFKLSVCRRFIDERRSKLSRLIEDKLGWSSFSGFWLAMDPSVRRHMTREKTETILKVIVKQFFIEKEVTSTLVIDSLYSGLKALEYQSKNKKAIPKLTETDARSTPMVLIDQDMFVLADDVIFLLERAALDTLPHQHLPTKDDKSSQNRTKDGNSGQEFSKDSIERDDRRLIELGWKTLELFSLAHIFSRIQVAHQEAVALKRQEELIREEEEAGLAEIELKAKRSAAEKEKRAKKKQAKQKKNSRKGNKGKSGKSNINKEIIMDHSHSDDRILDDFCGQIEEMPLNADNPEEVSDISDSRDDNSDMLHVDIEDRESSPVNWEIDASETQTTIPGSSEVQNDHAGKRTSTVDDSSSSCSSDSVPSVTVNGSYKGGAWTSVRSSSNRGNNRRNKDTEARAGFAQGGSCSSHNGFIGSGSNASGHSKERHEPEDDKVVLQRKQHAQWNIDIISSSKSRMAESSFSSVSSIKKQPQPNFLLESTNSLNHRGSEASGTVTSTTTAGASSTPATQLVLNKGPVSSAATQNEKPLPLQVLVPSKSEVQKQASLTGSATTEAVSVSRPLTAPQVPAAKQSAPVTSTAQNAPFLSRSMSAVGRLGNEPSANAPSFVPRSRTYRNAMMEKSSGGGSCFTHQQGSSEQAVAPWQSMFTSQPFIRPSETLSWKEETLLRSGFTFGTVKPESLNPYQGREENSQQASSNSSDCAPSSSNIRSEIEKLNLSGRPRSKQLLSEISTRFTPYQPQGLVADEFPHLDIINDLLDEEQSDRRRVLQPDFVQQSYMPHGASTPDYGEPYLFDQSEQYFDEEPPRFYSPLSSAPRRLRDLSYSHFDLPSHSSSSQFDDLMMSQWPYSRTDISMPSFGSDTSGYPYQVWDLANGSSRYPSYRPANGH

SEQ ID NO: 48912 - protein, 184 aa, Zea Mays
MSREQPSPAPAQRRFIAIPSFSSSGCRSHSSVDVVDTARHAGNGKKPHPQGAVPGGASAGGKGESLVARLLRGFKNLSQIFAVYEDEEEEEEREMVIGLPTDVKHVAHIGWDGSTSTTSSLRSWNRAAPPPPASSSSSAPAAAAPKEQEQYPLPLPALSMQQFELAMAAQAGGGGGGAAHRRHS

SEQ ID NO: 48913 - protein, 566 aa, Zea Mays
MADEALDQPPDAAPSPSLAPATPPAPATSSPAALLRPRREAFEHGLLPIPKLIFPEGMLAQTLAQLKEKLAASVPDGRVRAAALAEALQIPQEQAALALGTLAAVLPAEDPVLGDGAMDGAAADIRDVLLFLYIQSYKRLVPRSAHKDSPAVADVWPSTSAFDGYLSALSPIQLVRSNSRRFMPSQADEEIHQLSFLQKHMANILTLLADSVEGEGDDSLVLTMETFEHLGFLVQFSEGTSLSQAATFFANSDPDMPAVPVPAAQVLDWMSQNIAFSLEYSSERSVAKESNQQTMSDLDVTMAEANTSHSRNSTPSANPAYYRNVTFVEGFSKTSVVKHASDVKGNSIKVLNCHDSVIYILAPLKYATVYGCSDATVVLGAVGKVVKVEHCERVHIIAAAKRICIANCRECIFYLGVAPFNTCYPQLQDHMMQVGVDPSVNKWDQPFVLGVVDPHDSLSHPAGVADVKAESATCLDPDLFTSFLIPSWFGDEGQEPINCNPFPLPEIYEAFQSKKRSALEDIQKMIRELQLDENRKRELAAALHAQFKDWLYASGNIRQLYCLQGD

SEQ ID NO: 48914 - protein, 247 aa, Zea Mays
MFRLMPRANAILDCSPISAAGHCTPQIHRPISASQFMDDLRAEENVYHHLEAPPESQGNFVNEPSLRSVLSDPLSGAFLEDAMVLPCGHSFGGLMLKKVLELARCSICNGDVDEASLFPNLALRAVATVVKMEDDRRLFHNAALRKRRKEVTEHMDAQRRNGSSKDSIELGLEAESPRAFKGVQYPFVGNKRTPDKFVGKEAVVTSQCLNGWYLVKAVDSGESIRLQYRSLRKAGELQVQALLQSRR

SEQ ID NO: 48915 - protein, 954 aa, Zea Mays
MEGTAAEVGGAGADAAGDVQIKGAKENAQPTAAQQQQPSGSEALEMPATPLQRDIDWSEHFSFFTSLGGFGGSSDGARGLTSVGLSNSESRPDSVAQRGLDHDTEERVEELTLKNCINTGIQPEVSAGGSTSSRDRPTRIKGLWGNFTRIARRTSDLASRENTALSSGDIANLRAGDASSMEKLATSLASNIISRNNNASGNEAPMSHVGYVNNEFMMCSQQILLSPWSNQDNALKVSSFSNRILNRMRSKTVAPSSRVLRSPLQIKSKGKGVVCQGAREEIQVQANARPRDPLDKIPTIPSSIHDCMARVDHMLFSTGGNVTKSHSEGSSLRELIKPGWQTMTKFEKMHLFKQIIDLVDKCHAQGFTLQHLRPSYFMVLSSNQVKYIGSYTTQDLPTSIKQEVAREDLVNRKRTFGQRIDHQESNDHGNLTLKYQKVDEQGSVAIRQPANTFWTDKICDNQNEDVNRGVLRQENFSHTAREGFKLVEPYGSNISCAQHVSSSATQQPAFELRNLEESWYKSPEELSQFKGTFPSNIYSLGVLLFELFCCSETWEVHCAAMSNLRQRILPPNFLSESPKEAGFCLWLLHPDPCSRPKAKEILGCDLINGGQDLSLLDEAPVSIGEDDTESSLLLNFLSQLKEEKAMQSAKLSAELGSLQTDITEVDKRHSARMRLSLDDTDVLPSSSALSGASVSALQGALLSGLLPASYKSSIYEERVMRNLVQLENAYYSMRSSLDTCETNVIKRPDNEALRARENFHQLHSDSDAKDEKTDRLGCFFDGLCKYARHNRFEVRGILKNADILNSPNVICSLSFDRDEEYFAAAGVSKKIKIFEFDALLNDRVDIHYPLIEMPSKSKLSCVCWNNYIKNYLASTDYDGTVQLWDASSGQGFTQFTEHRKRTWSVSFSDVDPTKLASGSDDCCVKVWSINQKCGQCMLCTILSILLPHASFWFS

SEQ ID NO: 48916 - protein, 287 aa, Zea Mays
MASPAGDLSLLSSPHRAPGQTPIVARARGPDGRLGVGCPVSVVRPPNHHTLPPDYKHSASPHSVASSPSAFLSWPTSSRRRRQERRRHNDDDGASSAATAAGTAAGVRGHHAHQGVRGRPGVGDPRGRPPRALPALRRHPRGRHHLRQAHRPLQGLRLRDVQGGGRSQEGVRGCHPRHQRPSRQLQPRLPRRQAEAPAAAARPPSLAPARARASLSSPAHASHRGGIQERVAGAMVLPPLHDAPSAAAGRAPAVPRRAPVLPRRRHLRVLPELRHGPELQYAVEWSG

SEQ ID NO: 48917 - protein, 75 aa, Zea Mays
MWLAGQQMEDLAPNLFLMVSKCIINKRTILEALTDSRWIQDLRGVLSWEVFMEITLLWKLSKGLTCSPALPDRHF

SEQ ID NO: 48918 - protein, 190 aa, Zea Mays
MKLAEPLDGPIMQRYCSLAKESSMWLSLGGFQEKGPDDSHQYNTHVLIDDTGKVRSSYRKIHLFDVDVPGNMVYKESRFTAAGDTIVAVDSPFGRLGLTVCYDLRFPELYQILRFKHQAQVLLVPSAFTKITGEAHWEILLRARAIETQCYVIAAAQAGKHNEKRESYGDSIIIDPWGTVIARLPEKCGC

SEQ ID NO: 48919 - protein, 294 aa, Zea Mays
MDLWERARAFAGEAANWSQELSAEATKRSSALVSETAKKSKEIFSETASKSLEIAAEATKQADLLAGQIKHLASDIPVPSIPPIPAIPPIAATASSEPDAAELERYGITDDLREFVKDMTISTFRDFPLQDEPEMSDVPTVSNVRQDLSEWQARHATLVLSAVKEISKFRYELCPRYMKERKFWRVYFLLVNSYIAPFEKKSLEELKVKAEEEKRDSQKQASQASTTFEPKDTKAPIKTSSTNPEHDLDVFLLGDLGSDDEGPVDDDDDLDEDFDKIDVTTDVELQGDPIAIKM

SEQ ID NO: 48920 - protein, 400 aa, Zea Mays
MEPRRISASPRPCSGRRVVARKRPRQEAVVSSVRKLQRREISSRRDRTFTMSAAQERFRNIQLQEEFDTHDPKENASLLPYLRKRSKIIEIVAARDIVFALSQSGVCAAFSRETNRRICFLNGSPDEVIRSLFYNKNNDSLITVSVYGSENFSALRCRTTRIEYVRRGQPDAGFPLFESESLKWPGFVEFDDVNGRVLTYSAQDSTYKVFDLKNYTLLYLVSDKNVQEIKISPGIMLLIYARTSSSVPLKILSIDDGTVLKSFSHLLHRNKKVDFIEQFNEKLLVKQEGENLQILDVRNFQLTEVSRTEFMTPSAFIFLHELQLFLTFRNRAVSVWNFRGELVTSFEDHLLWHPDCNTNNIYITSDQDLIISYCKADSTDSTSEENGLLVIFFWFFFTAS

SEQ ID NO: 48921 - protein, 434 aa, Zea Mays
MEPRRISASPRPCSGRRVVARKRPRQEAVVSSVRKLQRREISSRRDRTFTMSAAQERFRNIQLQEEFDTHDPKENASLLPYLRKRSKIIEIVAARDIVFALSQSGVCAAFSRETNRRICFLNGSPDEVIRSLFYNKNNDSLITVSVYGSENFSALRCRTTRIEYVRRGQPDAGFPLFESESLKWPGFVEFDDVNGRVLTYSAQDSTYKVFDLKNYTLLYLVSDKNVQEIKISPGIMLLIYARTSSSVPLKILSIDDGTVLKSFSHLLHRNKKVRNFQLTEVSRTEFMTPSAFIFLHELQLFLTFRNRAVSVWNFRGELVTSFEDHLLWHPDCNTNNIYITSDQDLIISYCKADSTDSTSEENAGSINISSILSGKCLAKINTGNSNACKERKKAWKFRNTVSEALEDITALYYDEDRDEIYTGNRHGLVHVWSS

SEQ ID NO: 48922 - protein, 445 aa, Zea Mays
MEPRRISASPRPCSGRRVVARKRPRQEAVVSSVRKLQRREISSRRDRTFTMSAAQERFRNIQLQEEFDTHDPKENASLLPYLRKRSKIIEIVAARDIVFALSQSGVCAAFSRETNRRICFLNGSPDEVIRSLFYNKNNDSLITVSVYGSENFSALRCRTTRIEYVRRGQPDAGFPLFESESLKWPGFVEFDDVNGRVLTYSAQDSTYKVFDLKNYTLLYLVSDKNVQEIKISSVPLKILSIDDGTVLKSFSHLLHRNKKVDFIEQFNEKLLVKQEGENLQILDVRNFQLTEVSRTEFMTPSAFIFLHELQLFLTFRNRAVSVWNFRGELVTSFEDHLLWHPDCNTNNIYITSDQDLIISYCKADSTDSTSEENAGSINISSILSGKCLAKINTGNSNACKERKKAWKFRNTVSEALEDITALYYDEDRDEIYTGNRHGLVHVWSS

SEQ ID NO: 48923 - protein, 107 aa, Zea Mays
MFGCWVFIAQYIHTVIGSEICYFKNGVCQGSAFKDIPGGRYFPAASLYTMPNEPNCVVKFNFGPDFEFFPQDFGSLPVPQPMSEVTHQALEVKNEGPTENGIAEKTS

SEQ ID NO: 48924 - protein, 261 aa, Zea Mays
MSTGLSQLSGGVGGDRGSSSSAGPHHQHSHHPPPPPPPKILLAKPPLPHASSSGADDDGGTGVAGGRARQAPQPGSLSLVSDAWEAHTDKILPYLTENNDFMVIGVIGPPGVGKSTIMNELYGYDASSPGMLPPFPTQTEETRLMGKHCTTGIDIRISNERVILLDAQPVYSPSVLIDMMRPDGSSTIPVLNGEPLSADLAHELMGIQIGVFLASVCNIVLVVSEGMNDLSMWELMLTDMAVMQKAEWQKAEWMFQYIYAG

SEQ ID NO: 48925 - protein, 444 aa, Zea Mays
MVRSYVDKPNCIILAISPANQDIATSDAIKLARDVDPSGDRTFGVLTKLDLMDKGTNAVDVLEGRQYRLQHPWVGIVNRSQADINKNVDMLSARRKEKEYFESSPEYGHLAHKMGAEYLAKLLSQHLEAVIRAKIPSIIALINKTIDEIEAQLDRLGRPIGGDAGAQLYTILDMCRAFDRVFKEHLDGGRPGGDRIYGVFDNQLPAALKKLPFDRHLSMQNVRKVISEADGYQPHLIAPEQGYRRLIDSSLSYFKGPAEASVDAVHLVLKELVRRSIAATEELKRFPTLQSDIAAAANESLERFREDGRKTVLRLVEMEASYLTVEFFRKLPTEPEKAADKNTPVSDRYQDNHLRRIGSNVSSYINMVCETLRNTIPKAVVHCQVKEAKRNLLNRFYAHVGSKEKQLSAMLDEDPALMEKRDALVKRLELYKSARNEIDSVAWK

SEQ ID NO: 48926 - protein, 333 aa, Zea Mays
MDSILEVLAQDDMLNAKELVQWENGLSFNDIAARQGIRIRRHCRPTASLKEIEEELGAPLNILEKIIWDKEIEVAEGHAKKPLEEVIQAATKAPPSRDFYGALEAAYKRNGVPALIAEVKKASPSRGVLRENFNPVEIAQAYEKNGAACLSILTDEKYFQGSFDNLEKVRSSGVKCPLLCKEFVIDKWQIYNARSKGADAILLIAAVLPDLDIRKFLQICEELGMTALIEVHDEREMERVLKINGVKLIGINNRSLETFVVDTSNTKMLLEKHGDIIREKGILVVGESGLFTPDDVAYVQNAGVSAVLVGESLVKQECPGRAIVGLFGKELLH

SEQ ID NO: 48927 - protein, 301 aa, Zea Mays
MLLKGLSFCHKKWVIHRDMKPNNLLIGADGQLKLADFGLARMFGSPRRNFTHQVFARWYRAPELLFGSKHYGSGVDIWAAGCIFAELLTRRAFLQGSSDIDQLGKIFAALGTPKSSQWPDMVYLPDYVEYQYVAAPPLRTLLPMASDDALDLLSRMLTYDPKARISAQQALEHRYFSSLPAPTRPSQLLRSRWKGDQGNNKMPDLNLQHGPLVLSPPRKLRRVIAHEWMEGMHRADKVDEHPSGMRHTDDMPSQKSSRIPMSVDVGALFGTRPAPRPTLNSADKSRLKRKLDMDPEFGFAE

SEQ ID NO: 48928 - protein, 169 aa, Zea Mays
MSLSVGGARTSLLPSSFTASSSRPRFLALPLHRRSHGSLTSLPAACRRRLRVRMARTESTGVTIGFRAPDFELPEPLTGKLWTLDDFEGNSALLVMFICNHCPFVKHLKKDISKLASFYVEMHCRKDLVLLPYRPTQLGRIPRMAQIAWLKKQSCSNILSHIFTMSLKR

SEQ ID NO: 48929 - protein, 337 aa, Zea Mays
MVNVVKGLKIYEDVFTTSEIMKVADFINEIRQAGRNGELSGETFIFFNKQMKGNKREIIQLGVPLFQPTTEEANCHTEPIPLVLQAVIDHLVLWRLIPESRKPNSVIINFFDEDEHSQPYFKPPHLDNPICTLLLSETTMAFGRSLVTDSNGNYKGPLTLSLKQGSLLVMRGNSADMARHVVCTSSNRRVSITFARVRPSTPVDLSPLPSPTKALTPWQPQPATASQVPAPACMTQKPPVSGAIIGYAPTPQTVLAPAAWGMAMRAPVMMVAAAPARPMVMASLGTGGGNISKWMSRSGTGVFLPWTVGPKRYNKHLPPRIQKRRFSAMMSPIEAQG

SEQ ID NO: 48930 - protein, 321 aa, Zea Mays
MTTAAGMPGSPVGSAAAAGGPAAPEVAAMDAVIGWFRGEFAAANAMIDALCGHLAQIGGGGGAEYDPVFAALHRRRANWFPVLHMQKFYPVTDVNAELRRVAAARAAAGPCCYSEEEVASTVIHDPMEDLPSEAEPEPRPEHQQDPIHQDPAPEAEEADGTVINPALECHEEADAGADSSGDSSERKAPSTEDDTVPDGHHTDQGSQGEHILPESYPICSDHEECIARPERIKIQKGFVAKESVKGHMVNVVKGLKIYEDVFTTSEIMKVADFINEIRQAGRNGELSGETFIFFNKQMKGNKREIIQLGVPLFQPTTEEAN

SEQ ID NO: 48931 - protein, 411 aa, Zea Mays
MGKHSAESGVSMLLHGDLDIQIIEAKCLPNMDLMTERMRKCFTGYGACSNDCGKSEPPHPDMRKIITSDPYVSVCLSGATVAQTRVIANSENPKWDEHFYVQVAHSVSRVEFHVKDNDVFGAELIGVASIPVEHIMPGDLVGGWFPISGQYSNPMKPSPELHLSIQYKPIDTNPLYKDGVGADGHQSVGVPNAYFPLRKGGKVTLYQDAHVPDNFQPHIEMDDGRTYEQNKCWEDICHAIIEAHHLIYIVGWSLYHPVKLVRESTKPVPNGNPVTIGEILKRKVQEGVRVIVLLWDDKTSHDKFLLKTVECRMVSCIHMMRKLENISDIQVSIVCCLLAMPATNLAFSSSRFGYCFSLVTYMYAELLVSSYHVLFLIFSVGSLSFHIHCDSLNILCIVFQNVNLHFELMEF

SEQ ID NO: 48932 - protein, 217 aa, Zea Mays
MFLNRSSHGGHWFTSDMEDISEIFRVADKDKSGTLTVKEIQDILDDIYVRYPQVQLYLKSKQMNGIADLVRSAKGDAEKESVELNIEEFKKALSLVDSQVKFLPATAQVASQQGQYLARCFNKMKDAEENPEGPIRIRGEGRHRFRPFRYRHLGQFAPLGGEQTAAQLPGDWISIGHSSQWLWYSVYATKQISWRTRMLVVSDWTRRFIFGRDSSCI

SEQ ID NO: 48933 - protein, 106 aa, Zea Mays
MSGLGIFLCASICPQGGSPLFFAPSSICPVYFHMSCLNTKLITSQLIICSPSKQGANKWANFYPNPQPVTGQLAEEPHLVWAKSVYQPLKHQKSPDSIIISSGTHP

SEQ ID NO: 48934 - protein, 157 aa, Zea Mays
MAEAAAEKLVCVTGAGGFIGSWLVKELLQRGYVVRGTARHPEDPKNAHLLALDGAQERLSLYHADVLDYMSLCRAFSLCHGVFHVASPVSNDPNLVPVAVEGTKNVLNAAADMGVQRVVFTSSYGAIHMNPNRSPDQTLDEGCWSDPEFCKQTQMQG

SEQ ID NO: 48935 - protein, 730 aa, Zea Mays
MSLNRLKETLHACSSSSSEPRTQPRSPQHPARLPRRPPKTSLSQQLLRLEAAASSSSFFSSRPLQLPPAPRPPIEKPREDVEPPSSEDEDERKSRPIIRRCLHPPPAAALESRGPYEPLVLSLPGEHPVVQVPPSINCRLLAHQRDGVRFLYNLYRNNHGGVLGDDMGLGKTIQTIAFLSSVIGKGNGHGQSTNKGKMTGPVLILCPTSVIRNWENEFSEWAEFSVAVYHGPNRDLVLGKIENQGLEVLITSFDTFRIHDKVLCGISWELVVVDEAHRLKNEKSKLYTACLGITTQKRFGLTGTIMQNKIMELFNLFDWVVPGCLGDREHFRAYYDEPLKQGQRLSAPERFVQVADARKKHLVSILREFLLRRTKEETIGHLMLGKEDNIVFCKMSDVQKRVYRRMLQQPDIQILINKDVRCSCGSPLPQVECCKRTEPDGVIWSYLHRENPEGCSICPFCLVLPFLVKLQQISNHLELIKPNPKDELEKQKKDAELAAAVFGADIDLVGGTAKSENFMGLSDAENCGKMRALERLLSLWTGQGDKILLFSYSVRMLDILEKFLIRKGYCFSRFDGTTPMNARQSLVDEFNRSPSKQVFLISTRAGNLGVNLVSANRVVIFDPSWNPAQDLQAQDRSFRYGQRRHVTVFRLLGAGSLEELIYSRQIYKQQLSNIAVSGKIERRYFEGVQELDPKCYFFISASNSALMAFFQSSNCRHLELQTCLEVHRWW

SEQ ID NO: 48936 - protein, 521 aa, Zea Mays
MGLGKTIQTIAFLSSVIGKGNGHGQSTNKGKMTGPVLILCPTSVIRNWENEFSEWAEFSVAVYHGPNRDLVLGKIENQGLEVLITSFDTFRIHDKVLCGISWELVVVDEAHRLKNEKSKLYTACLGITTQKRFGLTGTIMQNKIMELFNLFDWVVPGCLGDREHFRAYYDEPLKQGQRLSAPERFVQVADARKKHLVSILREFLLRRTKEETIGHLMLGKEDNIVFCKMSDVQKRVYRRMLQQPDIQILINKDVRCSCGSPLPQVECCKRTEPDGVIWSYLHRENPEGCSICPFCLVLPFLVKLQQISNHLELIKPNPKDELEKQKKDAELAAAVFGADIDLVGGTAKSENFMGLSDAENCGKMRALERLLSLWTGQGDKILLFSYSVRMLDILEKFLIRKGYCFSRFDGTTPMNARQSLVDEFNRSPSKQVFLISTRAGNLGVNLVSANRVVIFDPSWNPAQDLQAQDRSFRYGQRRHVTVFRLLGAGSLEELIYSRQIYKQQLSNIAVSGKIERRYFEG

SEQ ID NO: 48937 - protein, 576 aa, Zea Mays
MALRRVASVLLRTRLRGPVTSPARKALVHPLQAPPRRQFSPRPPPPVPFAAAAAADAAEEAFEAARSTNDMLAAFSRLEATVPANDKRLALACLKLGQHLEASGSADTSRVLALALRCLGILEASPNASTPSSASDAVSLAMALHLAGSASFDLSRFHDALSFLSRALRLLAPLLPETGVAFEVGEEPGGFDVRPVAHAVRLQLANVKTALGRREEALADMRACLDLKESILPPGSRELGVAYRDLAEAHATLLDFKQALPFCQKALELHESTLGKNSVEVAHDRRLLGVIYTGLEQHEQALEQNEISQRVIKSWGAASPDLLLHAEIDAANINIALGKFDEAVSVLKNVAKQVKKDSETRALVFISMAKALANQEKAGDTKRCLEIACDILEKKKFATPDKVAEMYIEVSSLFETVNELEKAISLLKKSLGMLERMPQAQHLEGNVAARIGWLLLLTGKVSEAVPYLEDAVERMKDSFGPKHYGVGYVYNNLGAAYMEMDRPQSAAQMFALAKEVMDVSLGPHHSDTIEACQSLANAYNAMGRGGGEELLCSGQQAACLSNLQNNQLYYFKVALL

SEQ ID NO: 48938 - protein, 731 aa, Zea Mays
MGYTYTPTYYSGLQDTIASLCKSILPSFRVGRRLTADQAAARRHAEQLKWQQESFHRILHLAALHREGIAPASDVAAFRGTMLAALVAPPQHLEQPAVLRDKLLFLQELLYAKCVSAAEYNASKAPLVQRLAAFGVIVDCPDAEVSAEEWSEIDLRDPPPPATAAASDKPKHKAFVTPWKSRSKKDQDVNSSASRPPLAPVDHNNATNAPVFMTESSPSETVPSGKAEKGKRRHLAGMFHSGGSGTENKEPAGEEGVVEKETVRGKKKSSWGFDGIKKWTKAGACNSGEAAATGEQPQHVPPRSSYSECQLEASPMAASGPDAKRAKTRLHSDTDNDSASELLRDKVLVENTKKELSRIQAELSSTNRNLNFSNQQMEAISTKLPVDKSDLKSYFPKAWCDQHGDGVITAAKEGFKQHVEEMEKQRDITGSEGWATFEDIDLDDNFNPRAFSRHQPDSAFADVLETNLSSMQSASTRGRQRSCDVTKQVPVADTWAPVPWRCGPRRRLARSSLHDMAASVLQAERHLLLLGSGRNRPLLRMLPPRVLFPHRRRSWPRAVRVSPGDGEGAGGFASAVEKRSIPGIVEEEGYGARGEELEGDVAGALEQRWPPWDGLAERYKLIGATSLAFVICNMDKVNLSVAIIPMSHQYGWNSSTAGLVQSSFFWGYALSQLPGGWLAKLFGGRKVLEVGVVTWSLATAIIPVVAGFMPGLVLSRILVLEKVFHHQLLQI

SEQ ID NO: 48939 - protein, 142 aa, Zea Mays
MFLSLIGLWAVWKFHDERKIDHLYTLHSWLGLTCFIFFSLQWAAGFWTFWYPGGSRSGRAFLLPWHVFFGIFIYVLAIATSVTGLLEKSIFMQSAKMIERFSTEAMFMNSLGMLLVLLSSLVILALVSPGPSMIDTYRGSSE

SEQ ID NO: 48940 - protein, 664 aa, Zea Mays
MAYDLPFTLFVLLFLVLLQTPSSSWRPADDDDASVSRSAFPMEGDVAWVVQVSDLHISTYNPERAAELALLGTALRAIRPHLLLVTGDITDAKNQQRTSSRQDEYEWITYKKTIDAIVGSGGIDKSRIFDIRGNHDTYGVPYRGGKLDFFSTYSVNSQFKRLSTISSILLQGDRSYQFLGIDDTMNVGIRFPANLFGHSTDKRIEAVNSELQYWTNHSNVPVTKVVFGHFPMSFTASSEKGQRYESVLAGQSISAYLCGHLHAKVSKQLWRYHEIRTTEDHKSSFWEWELGDWKDSRLMRILAIDGGAVSFIDHTLKHALQTSILITYPTDSRSMNMLDSEKWSMRNDINVLIFSHQFISNVFVLDSHGVKISSEQRPFSVEGKMAIPTSPWTNYLLFEVQWEGMYQVLLWSNLAFTIVLLFIPKLLYHFVRRSSSYQRWAVSIPSSSIQQRKPYFWLVWFLMEGTRSKPFWFSMVTYVLWLIEMPWFWGHATSENGEIAQMYLSGWSVPIHDGGLTGNKLSNPDVLVITLPFLYLVLVPVIVLTYGLFAEKATVFLQHRRRVVYSLDSTNVHAESPRLLPVAPRASLMKFADKMVSMVIQFCGSWTRRALLLACLITAAIHLKLCSKLMSAYGTVPVALSPPLTWIPLLLLGGAAYCTVLHAD

SEQ ID NO: 48941 - protein, 440 aa, Zea Mays
MPSPMARIFHRHLLLAVVTLAVAASLLRPAAAVRPFVLVLSGEDFLKDPAAHPSLPSADSDDDDGWDDFADDSPAADPLLSPSSWAPLLDPTISLPSGDETDSPADALFVAGTRAMLSAASDGDDAAFTTAAAQIEASAEAGHPGAQSALAFLTGAGMTRPASRSLAFLLHKFAADAGDLQSKMALAYSYFRQEMYEEAVILYAELAEAALTSSLISKEPPVIEPIRLHSGTEENKEALRKSRGEDDEDFQITEYQAQRGNAANMYKLGLLYYYGLRGLRRDYGKAFHWFSKAVEKGETRALELLGEIYARGAGVERNYTEAYKWLALAAKQQHYSAYNGLGYLYVKGYGVEKKNLTKARELFELAAENKEAGGHYNLEHVISCFMQLMLGNQKLFIRWRSCSRKALVLRGISIWQQCCTSLLLRGDPGVHCPDGLWSLI

SEQ ID NO: 48942 - protein, 349 aa, Zea Mays
MGEHIHSLELKLTELEKFPERVRAMDNELIRSDSQCWLLMEEVRCKEEELQKAASQIEKLESTALDSQCEIESLKLDLTNLEQRLFDAERFSQHAGEHKAQFDKLLGEHELQLHEAQKTIHQLVWENKQLKELLPVRAPKQSPPGSGWKVNKTLENGVHAECESGDVILENMAKRNEESELLIEQLKEELREQKLKAKEDAEDLTQEMAELRYQITGMLEEEYKRRSCIEQAAIKHIQELETQVSKEKTKLSGALKRLQESHELARTQAMEIKKLKAALERLNSVTNLGTVCKSCSCGFSAMLVELSNCSIEGPSGSARSLNSNHIDEKSQNQALIEWRPREASDDDGG

SEQ ID NO: 48943 - protein, 153 aa, Zea Mays
MLFSRSPAATNQPLVPSRRTLLLSPCPRAGATPAPVADAALLPGGLRAESLPRHVAVVMDGNSRWARARGLPSAAGHEAGRRALEEVVRLSRAWGVRTLTAFAFSHENWSRPKVEVEFLMGQFERAIRESVAEFLRGPREKPRRPRGTTRSST

SEQ ID NO: 48944 - protein, 193 aa, Zea Mays
MSIQIKFLDFWLSFMAVVGTFIYMATIDEVSKRAMHTAVFILTALLAATGATRSANIGIVIAIGSVGLLMGWLLEFSTARRFICWPSRINLNMPQSWPSLRTLFQITLEMVNKRFRWIFLLLGFMTLSFAAISWKLESNNNYWIWHSIWHITIYTSSFFFLCSMRVSTRNSSPESNYELTRQDSMPRSEPRET

SEQ ID NO: 48945 - protein, 436 aa, Zea Mays
MDFAADIDLQRERLKGIPRNKLAIICLMNSNPPIPDISDSYLDNLLSNSLPDGPFGNSNIINQPNLVQCIPFQKNTTLVLTNDQVSPGVWYIGYFHGLGPARTQSKMISRGKAHLVSTRITVRGCATSAFWGPYCNQTVDMIGCSQPSIDNNSRNLLDLKAERRNSLYTREHNRRINILSRPNGLVEQEVASNATTLVRMENSISCSISNDSICIRQGDMKFYFLDVVNLALQFKITATNFGALGPSLICYLRHNAFPQRDLHDYSGDISHDPLVVKLPNIGRWYIAIETVNKTQTNVTASTPVLDTTCFSLKWQLTGCLNGKTGTNCSWEAYGLHRVPKRSPSVPFESYYVPTDGTASLEDSHFYLEQFLSNSSHEQFAWTYFFLDVPQGSAGALIHVQLKSDKDLNYELYSKYGGLPSNDTWDYYASRTSSRMP

SEQ ID NO: 48946 - protein, 229 aa, Zea Mays
MSTTKVKRRVGKYELGRTIGEGTFAKVRFARDTVTGEAVAIKILDKEKVLRHKMVEQIKREISTMKLIKHPNVVRIYEVMGSKTKIYIVLEFATGGELFDTIVNHGRMREDEARRYFQQLINAVDYCHSRGVYHRDLKPENLLLDSYGNLKVSDFGLSALSQQIKDDGLLHTTCGTPNYVAPEVLEDQGYDGAMADLWSCGVILFVLLAGYQMQNLHFHHGHLFLPRGC

SEQ ID NO: 48947 - protein, 430 aa, Zea Mays
MLSRGICGGGGHGGKGGDGFYKGNLAEGGAIYGNADLPCELGSGSGNDSTELSTAGGGIIAMGSWEYSLPSLALYGSVESNGGSYTNGSVGGPGGGSGGTILLFVHTLSLAESSVLSSVGGFGNAGSGGGGGGRIHFHWSNIPTGDEYVPVAAVKGSILASGGVSKGLGYSGGNGTVTGKACPKGLYGTFCKECPLGTYKNVTGSSKSLCFPCPPGELPHRAIYINVRVLSGGSVLFFGGHGCHELASVLGTLSNVEGFAFQRDVSYTAFLDRVHGEEVALNKLGLWRVPHPWLNMFVPRSRIADFDRGVFKGILQGTDIVGPLIVYPLNKSMWDDGMSAATPSEDVFYAVSLLFSSVAPNDLARLQEQNRRILRFCDLAGIQYKTYLARHTDRSDWVRHFGAAKWNRFVEMKNKYDPKRLLSPGQDIFN

SEQ ID NO: 48948 - protein, 140 aa, Zea Mays
MEAEEDAERLLRHTEKRAFAAFKKAAILADSTPAVPVALRVEPKPKSDIRQQDLLKNIVGIKPKRPKVSSPSQPPDSNKPKHTEEDPVGELSPSRNPLGPSHGTVNPDHTAPRLDEPTEVKQQNRAGSLLGLAYESSDEE

SEQ ID NO: 48949 - protein, 150 aa, Zea Mays
MGSTSSMLTQYDIEEVQDHCNHAFSQQEIVSLYHRFCQLDRNGGGFVSADEFMSVPEFAVNPLSQRLLRMLDGLNFKEFVAFLSAFSPRTSLQEKIEFIFRVYDTDCNGKVAFDDILSILRDLTGSFMTEQQRQIIGNSELKMEVEVPID

SEQ ID NO: 48950 - protein, 220 aa, Zea Mays
MAAAALRSSARRLLRLTPAPSSALFAASRPTARVAPLSRPIAALSGGNNPISWKLRRFFSSNEKHLPAISDPEIEAAFKDLLAASWNELPDSLVAEAKKAVSKATDDNAGQEALKNVFGAAEACEEFSGTLVTLRMALDDLCGLTGENVGPLPGYIEDAVKAAYNRYMTYLESFGPEENYLRKKVETELGTKMIHLKMRCSGIGSEWGKQNKYAFGLIPG

SEQ ID NO: 48951 - protein, 95 aa, Zea Mays
MKIWGFTWIAFILITGCSSATMCILLGLSYNFLTCISFHCVEHKITPCKTSRRGIWEVYDWLACTFNDICMHQLGQRLFAKSEYPTSIDLQFPVS

SEQ ID NO: 48952 - protein, 162 aa, Zea Mays
MDRIVGSKYKLGRKIGSGSFGEIYLATHVDTYEIVAVKIESSKTNHPQLLYEAKLYNALQGGTGIANIKWCGIDGDENILVIDLLGPSLEDLFVYCGRRFSLKTVLMLADQMVYVIDFGLAKRYRDSATNRHIPYRENKNLTGTARYASRNTHLGIVFLGRA

SEQ ID NO: 48953 - protein, 248 aa, Zea Mays
MDRIVGSKYKLGRKIGSGSFGEIYLATHVDTYEIVAVKIESSKTNHPQLLYEAKLYNALQGGTGIANIKWCGIDGDENILVIDLLGPSLEDLFVYCGRRFSLKTVLMLADQMITRIEFMHSKGYLHRDIKPDNFLMGLGRKANQVYVIDFGLAKRYRDSATNRHIPYRENKNLTGTARYASRNTHLGIEQSRRDDLESIGYVLLYFLRGSLPWQGLKAATKKQKYDKISEKKLSTPIEFLEACLSRIV

SEQ ID NO: 48954 - protein, 518 aa, Zea Mays
MKLRRVAVRKKMEVVQQDDEALVKLENAGIERSKAVDSAVLGKYSIWRRENENEKADSRVRLMRDQMIMARIYSVLAKSRDKLDLYQELLARLKESQRSLGEATADAELPKSASDRTKAMGQVLSKARDLLYDCKEITQRLRAMLQSADEQVRSLKKQSTFLSQLAAKTIPNGIHCLSMRLTIDYYLLSPEKRKFPNSENLENPDLYHYALFSDNVLAASVVVNSTIMNAKEPEKHVFHLVTDKLNFGAMNMWFLLNPPGDATIHVENVDDFKWLNSSYCPVLKQLESAAMKEYYFKADRPKTLSAGSSNLKYRNPKYLSMLNHLRFYLPQVYPKLNKILFLDDDIVVQRDLTGLWEVDLNGNVNGAVETCGESFHRFDKYLNFSNPNIAQNFDPNACGWAYGMNMFDLEEWKKKDITGIYHKWQNMNENRLLWKLGTLPPGLLTFYKLTHPLDKSWHVLGLGYNPTIERSEIDNAAVIHYNGNMKPWLEIAMIKYRPYWTKYINYQHSYIHGCKISQ

SEQ ID NO: 48955 - protein, 94 aa, Zea Mays
MPPWPCAPGAPAHTPSTADAWTPGPRAPPSSVQRWEETKNHAAVCTQRRCLRTATRQPNGGQQTAERQRKEPSPLHLHVHDAEWSLKICSPAPS

SEQ ID NO: 48956 - protein, 260 aa, Zea Mays
MVNQPNGTFELIQDESKAGACLWITKRRGMEYWPTPEEQRKYMVNPNKSKRMLTNNIYPSIRMPEFFEKIVVHTLSHNFRNATRLERVQLRFPIKAHSALVKIIYAGVNASDVNFSSGRYFSGNPKETASRLPFDAGFEGVGIVAAVGDSVSHIKVGTPVALMTFGSYAEFTEVPAKHLLPVPRPDPEVVAMLTSGLTASISLEKAGQMTSGQVVLVTAAAGGTGQFAVQFLGTYFGSLYFYWIEQWARYSSLLGHGWRN

SEQ ID NO: 48957 - protein, 182 aa, Zea Mays
MYHCFCSTGGKCLSVEYTDKVGEIAKSHGLKLHIDGARIFNASVALGVPVDRLVKAADSVSVCLSKGLGAPVGSVIVGSKAFIDKARILRKTLGGGMRQVGVLCAAAHVAVRDTVGKLADDHRKAKALAEGLKKIEQITVDSASVETNMVFFEVMDPRISPDKLCQVLEQDNVLALPANSKR

SEQ ID NO: 48958 - protein, 394 aa, Zea Mays
MVTNVVDLRSDTVTKPSDAMRAAMAAADVDDDVLGADPTARRFEAEMAALLGKEAALFVPSGTMANLVSVLAHCDVRGSEVILGDASHIHVYENGGISTLGGVHPRTVPNNPDGTMDLARIVDAIRNPDGALLYPTTRLICLENTHANSGGKCLSVEYTDKVGEIAVNHGLKLHIDGARIFNASVALGVPVHRLVKAADSVSVCLSKGLGAPIGSVVVGSEAFIDKARILRKTLGGGMRQVGVLCAAAYVAVRDTVGKLADDHRKAKALAEGLKKIKQLTVDSSSVETNMVFFDIVDPRISPSKLCQVLEQRNVLAMPASSKSVRFVIHYQISDSDVQYALTCVEKAVEELLKGGTKLEHLTNEGGCQQQKAHHRHRARFPERCCPCAERHQPT

SEQ ID NO: 48959 - protein, 137 aa, Zea Mays
MACPAQSMLSASGCILLRSKPRASSSHVRGGIIGGGCSSRPFQLTCNASSSPSPPSPAPAQEDPDCNDEECAPEKEVGSLRAEWLAEERTQVVGTFPPRKRGWTGLVEKDTAGQTNIYSVEILRPLVSRRVRRPLAV

SEQ ID NO: 48960 - protein, 267 aa, Zea Mays
MQSDISRLEAKIERMDAQLAAKDRELATLTRTEAKNTAALKSQIDKLQQERDEFQKMVIGNQQVRTQQIHEMKKKEKEYIKLQEKLNQVLMEKKKESSRSGMEIMNLLQVDAYEVKKQELMQENADLRALLRSMQMDMRDFLNAPNGSSQSTVTDNGRQESGSPQSPLGGKTDVFDLPFHMARDQIEESLRTKMTSIKARMTQLQDAQKGAEVTSEATDRELELEAQLVEARSIIQEQACIMSKHFKSDKPRRHSGLDGEREASAEV

SEQ ID NO: 48961 - protein, 274 aa, Zea Mays
MQSDISRLEAKIERMDAQLAAKDRELATLTRTEAKNTAALKSQIDKLQQERDEFQKMVIGNQQVRTQQIHEMKKKEKEYIKLQEKLNQVLMEKKKESSRSGMEIMNLLQKEGRQRGTWNGKKNDNDYYKMIVDAYEVKKQELMQENADLRALLRSMQMDMRDFLNAPNGSSQSTVTDNGRQESGSPQSPLGGKTDVFDLPFHMARDQIEESLRTKMTSIKARMTQLQDAQKGAEVTSEATDRELELEAQLVEARSIIQEQACIMSKHFKSDKPR

SEQ ID NO: 48962 - protein, 391 aa, Zea Mays
MSSSARFDLRASSHQLQPPPSHASMSSDGGAFANAENLEHCARYLNQTLVTFGFPASLDLFATDPVSIARTCNCIYALLQQRQRDIEFRESTNDQRQRMQSDISRLEAKIERMDAQLAAKDRELATLTRTEAKNTAALKSQIDKLQQERDEFQKMVIGNQQVRTQQIHEMKKKEKEYIKLQEKLNQVLMEKKKESSRSGMEIMNLLQKEGRQRGTWNGKKNDNDYYKMIVDAYEVKKQELMQENADLRALLRSMQMDMRDFLNAPNGSSQSTVTDNGRQESGSPQSPLGGKTDVFDLPFHMARDQIEESLRTKMTSIKARMTQLQDAQKGAEVTSEATDRELELEAQLVEARSIIQEQSFYRQCMKGGPSAAVEPTVCNRKVPDSSPILCG

SEQ ID NO: 48963 - protein, 85 aa, Zea Mays
MPRCQDTNFKFNVGLDAGRETSYCILQWNVLLEYMFGKEQLQLSLCFWWTGLYLLADVRIACTVCSCRLQPCLEYTVGFPPRAMG

SEQ ID NO: 48964 - protein, 148 aa, Zea Mays
MIGNESFPASLLDLPAVVESYKTYDDSVLIKTADVGQMIMVREENDPAPEGVEYKHGLTPPMRDARRRRFRREPDLNAELVNQVEKHLISIMHGVSVNQNASATGGEEGGDRKKPPVARAAKQPGVQEPAANGEEADPERSDSDDSDN

SEQ ID NO: 48965 - protein, 282 aa, Zea Mays
MEATYLWEDDDDRFSVENIPLYDSADDEPTSINKEILVSSDGMVTQYSNISRVQSTENPGNTGTNEFAPIIVDELTSSNGLAPMNVEPLTVSSNEFTPSNAMPMVARLVENGSTGYSAQDTHDASQNSAPKAANHANQTGPQNNSNHSALVPVKPAPKRRGRKPKRVVHKQLDIPDICDRLTSSVACEEILYCEEVKNQAVSEIDALYDEIRPAVEEHERDSQDSVSTSLAEKWIEASCRKYKAEFDLYAAVLKNVASTPLRSKDDVGPREQNGLKYLENGS

SEQ ID NO: 48966 - protein, 331 aa, Zea Mays
MNLPIVMYHIGVLWQTSPFLTPKYTSKGKVTCLNASAGNKTYLAPLMGQLAAYCLAETVLLCCHWTSRISTACLFRQSLMQMEIFGCSLVDCLKYFTVVEHLDNYRCDRCWHIIAAKYLSLRSEVDEEKVSKLQSCVDYGTCSCRDMFPLESLPCSSSSRATKQLIISQCPKILCIHFLRASVGLDGEPIKHQGHISFPLLLNLSPFTGGASSAGPLAMNAQRDGQQALHLYRQLNMQANADVSSSSSSPPQLSRSKLYGLAAVVEHYGKCGGGHYAVYRRVASNPDPDDPGKPVAGLGKRWFYISDGYVSEVPEEDVLRAEATLLFYERL

SEQ ID NO: 48967 - protein, 713 aa, Zea Mays
MAAGGELSPSPVPPASPIKHSRSPDDAQPDASPKRRKRHHHRRHHHHRRHRHADSPVPVAADEEVEEGEILEDATAASAMEVDAESAAPEAFLAPEHFGNGADTDSNTDATKMQAPALPTLPSSEDGRRSLHDAPESERGDILSSDVEDNKGHERRQRQNRSKSPKSRREKERRHKDDHHTSSSKDYHSRNHSRTSPYSRHQSEAHSRDLYLRYREKGDYTNGSRANLRDGSDHESNDRNGKSGRHTTRTHGSERERSSSHGIHDRHGDRYSDRRASQERHRDDRIYRDKIDSLEAAPRHRERSRSHSRSDPRENTRLRDQSRERERRSGSSRHRDHDSKRDTSKDRHRESDRVNSAHERDRGREARDREWHRVKGSETHRAKEGRDKVSDNDRHRDSTRSKYSVSDGYKERTRSGEKGRDADHKNRKFEEMKENSLKEEDEEEYQEKIEQQLAMQEEDDPEKIKEEARRRKEAIMAKYRQQQSQKEDMESKPSGNDEEVRAMDGNEAIHQKDDIDSSFMGNVEAENKHDSSEVFDGKTGFNVGRSPAHNYASTSTGAFTDERTIGVSGLGEGSPKSERSADMFCDDIFGESPTGIRKLGKDDGLHIERNALHDNWDDADGYYTYRFGELLDGRYEIIAAHGKGVFSTVVRAKDLKASKDDPEEVAIKIIRNNETMYKAGKQEVSILEKLASADREDKRHCVRFISSFIFSSP

SEQ ID NO: 48968 - protein, 113 aa, Zea Mays
MVMVSGGGGNAWAKEMTLRRRIASIFNKTQEHFPTLKDYNDYLEEVEDMTFNLIEGIDVEEIEAKIARYQQENAEQIYLSRAKRAEDLAAALKASRMNPVKAEANDTLRNPIV

SEQ ID NO: 48969 - protein, 304 aa, Zea Mays
MVGDFSEDNRSGINHSLHRISAIRNRKAQIIGLTCRVGRAISGSAEMIRDLVVSGGSILVIGPPGVGKTTLIREIARILADEGKKRVIIVDTSNEIGGDGDVPHSGIGRARRMQVPKVTMQHNVMIEAVENHMPEVIVIDEIGTELEAMAATTIAQRGVQLVGTAHGVTIESIIKNPCLQMLVGGIEDDAPKRKPSLEEIDALEEARLAIEYIVIPGGEPVELLPRCSEIVARQLELVESYQLLAETFGSDSNSRLQILPMKITKRGSSKDNGASKPTKQTGSDLIVSENGGGSSFSRLPFLPK

SEQ ID NO: 48970 - protein, 459 aa, Zea Mays
MVGDFSEDNRSGINHSLHRISAIRNRKAQIIGLTCRVGRAISGSAEMIRDLVVSGGSILVIGPPGVGKTTLIREIARILADEGKKRVIIVDTSNEIGGDGDVPHSGIGRARRMQVPKVTMQHNVMIEAVENHMPEVIVIDEIGTELEAMAATTIAQRGVQLVGTAHGVTIESIIKNPCLQMLVGGIESVTLGDEEAKKRKVQKTILERKGPPTFLCAVEMISKTECRVHHRLDATVDAILAGKPPKFEARKMHNKSTEFEMPLVIPDREYEIESLPLYQEVMVTRSLSSDGNFSDDFAASRQTKSKSMPSEDNFGDNFVYTRKAKGNKPVHGKSLVQVYTYQISEADILQVATMMGFDDELDVTDDIGAADVILASSSEMKQNPWIHNVAKYHKLPIFVVKTNTMAQIVKAIRMIVGRDNTSSSKQPEVMEGEIEIEDDAPKRGSSCNRVHRYSRWGAS

SEQ ID NO: 48971 - protein, 355 aa, Zea Mays
MSTLALALVAVLGFLWICLLSRKKSIGGNYVKMDKQTVPDGAKLVTYQWNLPYSSSEIIRRLELLDEEDVVGCGGFGTVYRMVMDDGTSFAVKRIDLSRESRDRTFEKELEILGSIRHINLVNLRGYCRLPTAKLLVYDFVELGSLECYLHGDEQEEQPLNWNARMKIALGSARGLAYLHHDCSPGIVHRDIKASNILLDRSLEPRVSDFGLARLLVDSAAHVTTVVAGTFGYLAPEYLQNGHATEKSDVYSFGVLMLELVTGKRPTDSCFIKKGLNIVGWLNTLTGEHRLEDIIDERCGDVEVEAVEAILDIAAMCTDADPGQRPSMSAVLKMLEEEILSPCMSELCYEQHLEL

SEQ ID NO: 48972 - protein, 419 aa, Zea Mays
MAKRLGDAISIICRGTGDVELFEAFLQDFVECAGFLDYFKAVWLPRLGAWITVLKATALASAQVASAIESYHHLLKLRLLNEADESVYWRADWLVDKLGTKVHSYYWLDEFSGKNSFSRYWRSEWSSGPNPWCQGMQIPDSDVVIEGNYASVVSQKNKEKSHVVLNPGSEFALCDCSWSMKGNLCKHVIKSAKVCRDRGLALPSLAMFHYYQALANLVHCPPSDTLISDHAMALAVSVKTQLDAVLCAVNGSSSIRPGFQDPQSTSKTREAEIEEANSENGVCTSQPQPGAGDDEDQAIRTGKRRKLGDASGDTEDGSIYQDSLARKKCKSGEASGDDEEASTEEGSRACESRKPGEASTNNEEVSIGQGSRDHEKRKSGEPPGNEGTSATQATEPSETETSQATNGLVRSLLPSSECT

SEQ ID NO: 48973 - protein, 160 aa, Zea Mays
MDVIWEYQGLHAAKPAEIESEDILLEMERLVCEDIREEVIRKQLEALDEEDAYLAQSVLDHMQLNDIEAAETAKLWCPVCKQGDLRETRNLIYCTLCNLRLDLGEDKMTLEFLRERLANAHMDHFDRGCKSAPKFCLQTMFGLTALYIQCAECSTFDIVV

SEQ ID NO: 48974 - protein, 268 aa, Zea Mays
MDSTGPMRVSIKAHRPDWKSEVIGWRMGAPGFRSIGRMVWRRRTTFVVTLRTNCLRRVRKDRNDLLWKIRKQGLPGNVMEKVRSAVRSVISDEVEKLKQSNTENEDQEMDVIWEYQGLHAAKPAEIESEDILLEMERLVCEDIREEVIRKQLEALDEEDAYLAQSVLDHMQLNDIEAAETAKLWCPVCKQGDLRETRNLIYCTLCNLRLDLGEDKMTLEFLRERLANAHMDHFDRGCKSAPKFCLQTMFGLTALYIQCAECSTFDIVV

SEQ ID NO: 48975 - protein, 242 aa, Zea Mays
MGAPGFRSIGRMVWRRRTTFVVTLRTNCLRRVRKDRNDLLWKIRKQGLPGNVMEKVRSAVRSVISDEVEKLKQSNTENEDQEMDVIWEYQGLHAAKPAEIESEDILLEMERLVCEDIREEVIRKQLEALDEEDAYLAQSVLDHMQLNDIEAAETAKLWCPVCKQGDLRETRNLIYCTLCNLRLDLGEDKMTLEFLRERLANAHMDHFDRGCKSAPKFCLQTMFGLTALYIQCAECSTFDIVV

SEQ ID NO: 48976 - protein, 307 aa, Zea Mays
MDSSELHILALQRVKQVEPENASKILGCILLEEPDNQDMLQLAYGNDAEVHAKISHAKAMLDAIVACCSSSPAFGYHYWPPVPNKAQAEEYALQPQHYSGGGCYYASENALIYNGGGPPRSRLSSTRRPCHYFIKGICKNGQSCHYSHHRQEAQVCSGALEKLELEIIELLKSRHGQPLSIASLPTLYGDRPHGQHYVVLAEDAGRYKELMSRGERGGDMGSSSHQFVWFGARREDPMAGETDVWLRELPQSGDGEHHTHDAHPTFHRRIKGPGQTLHREIQVHRTLSSEGASSLRRHGHGHGHERR

SEQ ID NO: 48977 - protein, 411 aa, Zea Mays
MALELFGTFFPSSEKTPVGDKHVSIRLAVILHLCTAALQNVSQSTSFFEKLFYCFWWGLQNLSSLGQNMKTSTNTLENLFAVFVSTSGLVLFALLIGNVQTYLQSASVRIEEMRVKRRDTEQWMAHRLLPENLKDRIMRHEQYRWQETRGVDEEGLLKNLPKDLRREIKRHLCLSLLMKVPMFENMDEQLLDAMCDRLKPMLYTEGSCIIREGDPVNEMLFIMRGTLESTTTNGGQTGFFNSNVLKGGDFCGEELLTWALDPTSASNLPGSTRTVKTLSEVEAFALRADDLKFVATQFRRLHSKQLQHTFRFYSQQWRTWAACFIQAAWHRYCRKKLEEALYEKEKRLQAAIVSDGTTSLSLGAALYASRFAGNMMRILRRNATRKARLQERVPARLLQKPAEPNFFAEDS

SEQ ID NO: 48978 - protein, 643 aa, Zea Mays
MAGREERYVRFHDWKSEQSVSVISDRVVSEKGHNIFGLLKDRTAGAFSFLGNSSHSEALNKLGLGEKSKTKVLDPQGPFLQRWNKIFVISCLFAVFVDPLFLYVPVIDGGNNCLYLDKKLETTASILRFFTDIFYLLHILFQFRTGFIAPSSRVFGRGALVKDTFAIAKRYLSTLFLVDFLAVLPLPQVFVLVVLPKLQGPEIMKAKIVLLVIIICQYVPRLLRIIPLYLQITRSAGILTETAWAGAAFNLIIYMLASHGFGALWYILSIQREDTCWRQACINQTGCDPTSLYCGSLGQNMKTSTNTLENLFAVFVSTSGLVLFALLIGNVQTYLQSASVRIEEMRVKRRDTEQWMAHRLLPENLKDRIMRHEQYRWQETRGVDEEGLLKNLPKDLRREIKRHLCLSLLMKVPMFENMDEQLLDAMCDRLKPMLYTEGSCIIREGDPVNEMLFIMRGTLESTTTNGGQTGFFNSNVLKGGDFCGEELLTWALDPTSASNLPGSTRTVKTLSEVEAFALRADDLKFVATQFRRLHSKQLQHTFRFYSQQWRTWAACFIQAAWHRYCRKKLEEALYEKEKRLQAAIVSDGTTSLSLGAALYASRFAGNMMRILRRNATRKARLQERVPARLLQKPAEPNFFAEDS

SEQ ID NO: 48979 - protein, 178 aa, Zea Mays
MDEMKSTNTSIAPEVEVHPGFSPSRFVKVFMQGEVVGRKINLATHQNYASLSFALKRLGNNYSMPSCELNGLVNNEVDGASDDNNFILFYDTMDGDRLFVGEVPWEIFVISVKRIYIVRVPQEQENDNGEEEDRENGEDNAAVSATALDGDDIPANDDDDDVVDDGDATATTPADGGF

SEQ ID NO: 48980 - protein, 92 aa, Zea Mays
MCTREGMFRQHWMIAPPLSNLEGLMSLDDFDDAEGGSKLERFSRETLDPSLSWKDVEWLKSITSLPILLKGIVTAEDGVQEKSCFSNIGMAG

SEQ ID NO: 48981 - protein, 160 aa, Zea Mays
MNVANHHMELVCEVKEVSNMKFFRLDNSKVLSWLCCKVYDLKEVFPKLGKNYAAQTEKEKLKEAVQMIREYLKDEPWLALLCKKLQLDINAITVDATTKTAEASVYADSCPAPALPSESKTANGGAKSSKGRPAKKAKTEVGSKNIKDMFRRVTRSGSGS

SEQ ID NO: 48982 - protein, 289 aa, Zea Mays
MANASKHLQPSSQAGNDKKYQGTLVASPAKAISPKCVNRIVPSKQLILGGGSIGHVASFLIKVVALEAVRRVSKTRCPFIWNSVQALQILVYPPFSWIQRWAPLGFLVQGIQKLSMPLLFLSVTTTVSELSSKHDDEPDNNTEHSETPSETNELASTSGTSDAADGTKEIVQENWLVLLFRELEKQGITLPERFTEDELRRFYVAANGDFQSLLSSVKKTIHWRETFHILTLQELDRWSHLVFWHGFDTMLRPCLVVRLGLACSSIPPHDRPRFGQAVEGQTWCSDESC

SEQ ID NO: 48983 - protein, 493 aa, Zea Mays
MYLGVFAGPVFCLCFCFEAMANASKHLQPSSQAGNDKKYQGTLVASPAKAISPKCVNRIVPSKQLILGGGSIGHVASFLIKVVALEAVRRVSKTRCPFIWNSVQALQILVYPPFSWIQRWAPLGFLVQGIQKLSMPLLFLSVTTTVSELSSKHDDEPDNNTEHSETPSETNELASTSGTSDAADGTKEIVQENWLVLLFRELEKQGITLPERFTEDELRRFYVAANGDFQSLLSSVKKTIHWRETFHILTLQELDRWSHLVFWHGFDTMLRPCLVVRLGLACSSIPPHDRPRFGQAVVSQIDHGVVNLINEEDSRITVLLDCHGISPFRFPMQMMRSFITVVQENYPNRLGVLFVIRLPPVVRVIAQTFLQVLKPATKQKLRFEGDSYKKALAEFLQAVPAFLGGKCSCPRCESPRDDSVIQAGEGSKKQPRLVSVDDGLPVTDLDFDLDEEIPSPYSCENAIRAAIIGLLMVCIFVAFLAGMIDPASVPASA

SEQ ID NO: 48984 - protein, 268 aa, Zea Mays
MATEMVLLCRFVAFVAALACLLRPGAPVELHRKLSGWSDDAGATWYGAATGAGSDGKLDARPDADGRTARVNFGPIFFIPPAWEKKEFLTNPSPGPGPGTCTPFFLFLFCCCIVGGACGYQNAVDQPPFASMIAAGSPSIFLNGKGCGSCYQGAVQLERDGHRVQGGRRLERELLGGADRVRVRRRRAQVRGAHAARARRRGGVDADAAVVGRGVEVQLRRHPAGALLRPPHVRLRQDGRRQRRHPRGVDARRHVPLGRQLQQLTMAE

SEQ ID NO: 48985 - protein, 123 aa, Zea Mays
MVDRRLGSDYSQEQALRLLDVALLCTSIQPTQRPRMSSVVKMLCGEIPVEIVPADDDLSEDLRLNIAQSRQSIDNSQTNWSQYSVNNSQTNWSETLSSDRSVLPHSSKDSGYLPSSSSLSVKL

SEQ ID NO: 48986 - protein, 332 aa, Zea Mays
MSAAAADWLPSASVTASGRPVLSAGEVERNLLPLVDLEPEENPRLAPLRACLLALTSHRLIFLHEPSRSARGLPLATVVHAYPPHRRHSHNPLRSLFSAPSSSSSSQHHRIRLQISMPPVRSEVIAIVVTCKADVDVFFGRLLEAIRARAWEVTPAAAPSSGTSVAEGAAPTEDIAIRMPVVGVSGILRMEQESWENAGQNLQDAFQDLNALMSKAKEMMQLAEKMRLKLLMNSSTESNSNDEEMGSKQDMQDLLLSVGIVSPVTKETAGALYHQQLSLQLADFVRIPLEKAGGMMALVDVYCLFNRARGTELISPEDLLQACSLWEKVDVC

SEQ ID NO: 48987 - protein, 215 aa, Zea Mays
MEALVGRYWGLGGRRCGACGGSPAAAHCRTCPGGAYLCGGCDAGHARAGHERVWVCEVCECAPAAVTCRADAAALCAACDADIHDANPLARRHERVPVQPIGAAADPAAEKAALLFGLAAEGKDGGDAAKVVVDASKLDLLFADDVVDPFLAQDFARFPHADSVVPNDGSNCGAAVDFDFGGGVAVAAKQPSYSSYTAASLGHSARRRRSAWSQT

SEQ ID NO: 48988 - protein, 669 aa, Zea Mays
MDPDQVADAGVQHDDLGGSATSANGCFDGGSDDGWGRALLRLGWDLSRKAVIAGVAATAAPVVAPPLLVLSLAGLALSLPFAAYLASLAATDRLMGALLPAPRTTQPYCGCDLEDDEFLDPSEAPGAEATALDHWRDTEDDAIMEENESFVPLPLSRQPRFSEEPITSSSTDVEDKMAEGESLSRGLGHESLVLDNKEGTIMEDTEYITMEAPPRGSDVFGSAVPVLRGEDDMVQRAVEAPLTAKESVQELSVSDSEDRTQDDKCKDAESSKEILSLSVDITESSDFPVPGNEGIVVQRGNGETISVRKSGQDSHSTEIGDEMEGHKTEEEIPLHDANVSESSVLDDTVLEERKIEGDVTVGMAVKEVTIYTDPCTGEVAGDQVDSIAIALPAESELMQASNVDDVINAALTEGIVLDIGDTSTEGTEHYGEGGVSTAVSVVTVDDVAETVSSRSPAVSVIGDDMTSVKSRPDADSSDQTTGYDALRSKEFREKECVKTEESKTVPTESTSPPRIIQVSRSPAPDGQSRVEDEAAVGSVLEGAANNTDDLATPRAVVVALQSSISAGESEPPSASDRVEYKPANEGFRRNAIAEDTDNYTEEQMREQLDALRTITGYRPTPSLTLEAELVGLYVFVGVEPPVGSGSREDSDLSDLSAKLRLLKSIIGVE

SEQ ID NO: 48989 - protein, 313 aa, Zea Mays
MPKESKKEVATERRSPPKLHRSSPTPARTSPTKLSPAAKQNGNSGPVSSVSTVKKRVSETISWDSLPTSLINSGKAVVRRKNIALIVAAEAQREAAAAAYLVKGLGIFSEIRESSEVDPQAAITKFFELHRLIVQQSAVWKAYTPEPSKESRPEKEKPSRKASASHHHQNKAGTRDTAKNPEGAQGSEKTEWAREDGFKEICRSWIVLRKESRSWFLSFLEDALESGFMSEGQTTKNTRERVRGQPKPKGGDGRIAVLLSQLKETSNWLDQLLQDEADTSADGLAETVDQLKQKVYKCLLGTVETAASALGGR

SEQ ID NO: 48990 - protein, 557 aa, Zea Mays
MSVVGFDLGNESCIVAVARQRGIDVVLNEESKRETPAIVCFGDKQRFIGTAGAASSTMNPKNSISQIKRLLGRKFSDPELQRDLASFPFRVTEGPDGFPLVHVRYLGEERTFTSTQLLAMVLSNLKGIAEGNLNAAVVDCCIGIPVYFTDLQRRAVLDAATIAGLRPLRLFHETTATALAYGIYKTDLPENDQLNVAFVDIGHASMQVSVVGYRKGQLKMLSHTYDRSLGGRDFDEALFKHFAAKFKEEYKIDVYQNARACIRLRVACEKLKKVLSANPEAPLNIECLMDEKDVRGFIKREEFEQISASVLERVKGPLEKALAEAGLTTENVHFVEVVGSGSRVPAIIKIITDFFGKEPRRTMNASECVARGCALQCAILSPTFKVREFQVNDGFPFSIALSWNGDSQNAPQQTLVFQKGNAIPSTKALTIFKSSTFEVDVLYVDPDNSQIPQKISTYTIGPFQTSNGEKAKLKVKVRLNIHGTVTVDSMLEEDVEVPVSSANEAPNDTMKMDTDDVPSDPAAGSDVTMQEQPPAAGNGAQDNEEKSVSMETDAKVW

SEQ ID NO: 48991 - protein, 169 aa, Zea Mays
MVMKFMLLPWKPELVFTGLSIMGVNPKNLKFNSHVDLWDSIQNNEYFSSEGLWDVFKQLRIYKTPDIETPNYLILKRTAHYEVRSYAPFLVVEAKGDKLTGSSGFNNVTGCIHPDSSANEQRLGQFTSSKYSSYFAEGRRRHCCSEKIQWTTKRRNCAPEGEGSALPVT

SEQ ID NO: 48992 - protein, 238 aa, Zea Mays
MVMKFMLLPWKPELVFTGLSIMGVNPKNLKFNSHVDLWDSIQNNEYFSSEGLWDVFKQLRIYKTPDIETPNYLILKRTAHYEVRSYAPFLVVEAKGDKLTGSSGFNNVTGYIFGNNASSEKIPMTTPVFTQASDNTLSDVSIQIVLPMNKDLDSLPAPNTAVTLRKVEGGIAAVKKFSGRPKEEIVLQKEKDLRSQLLNDGLKPHPGCLLARYNDPRTKSFLMRNEVLIRLIDFTLEL

SEQ ID NO: 48993 - protein, 500 aa, Zea Mays
MKSYRARFQKIYDSCMCANAPIFTGIEQLPQFSHLQELIGLTATDSVELGDIVDPPVIRTATSILPLGWTGLPGGKNAEPLKVDIIGHDLQMCTLFQAQINGNWYSTVIETLPSATSYSPNGELQPTLQKMRILVGQPLKQPPNYISGDFMIPVMAGADSTPDFGFESFFEDKDCCKGLSGFLIYGTSDFVTVRKEVHVRTRRVRLLGLEGAGKTSLLKAMLGQVKERNSTVLECIHVDLHGKGISNGLCYIDSTTVNLQELPLEVGRFKEELLLGLHDISRKTDLVIAVHNLAHRIPQYQRSNTSQPQPALSLLLDEAKALSIPWILAITNKFSVSAHEQNRLISSAMEAYQVSPEMTKVVNSSPFLMPSARNSLQQIRSATGKLKKDPANRSGYLPVNFGLSSFQRKDIVMHVEGVSSLRQLVHQVVLNNEETAFEELARERLLKELASEKAASLQVKQKPRKRDGSVTAAAVGASLGAGLGIVMAVIMGAASALRKP

SEQ ID NO: 48994 - protein, 688 aa, Zea Mays
MAGLLQILLYSRRLEVMEASGERPRGNNREHLVLGVGPVQKSFWRLSKLVPLEGVRKSLSAIQKQTNVFGKAPSQLDSYLQSKVDESEEPPQSLEIQESSQGIALTPLSDKDGGNTEDNNRTEKINASEAGGSKRWSRVPSLPSYVPFGELYLLGDSSVNTLSDSEYSKMTSVQSVISELRERLQSHSMKSYRARFQKIYDSCMCANAPIFTGIEQLPQFSHLQELIGLTATDSVELGDIVDPPVIRTATSILPLGWTGLPGGKNAEPLKVDIIGHDLQMCTLFQAQINGNWYSTVIETLPSATSYSPNGELQPTLQKMRILVGQPLKQPPNYISGDFMIPVMAGADSTPDFGFESFFEDKDCCKGLSGFLIYGTSDFVTVRKEVHVRTRRVRLLGLEGAGKTSLLKAMLGQVKERNSTVLECIHVDLHGKGISNGLCYIDSTTVNLQELPLEVGRFKEELLLGLHDISRKTDLVIAVHNLAHRIPQYQRSNTSQPQPALSLLLDEAKALSIPWILAITNKFSVSAHEQNRLISSAMEAYQVSPEMTKVVNSSPFLMPSARNSLQQIRSATGKLKKDPANRSGYLPVNFGLSSFQRKDIVMHVEGVSSLRQLVHQVVLNNEETAFEELARERLLKELASEKAASLQVKQKPRKRDGSVTAAAVGASLGAGLGIVMAVIMGAASALRKP

SEQ ID NO: 48995 - protein, 211 aa, Zea Mays
MEYSSSEDEGLVGDFIDAEDNTFTKNIDQGTGVMASQIHGDDPSVGSMPPVIGNELLMAADVLAKNDEPRMGMEFDSDAAARAFYNAYALCFGFGIRVARSRSERRKGVEVLVMKRFVCLKEGHHRKKKPVEPSNKKKRKRLSIRDGCPAMMEVVRRGPDRWVITKLVLEHTHVIVSADRAREVQLHRLSGKFQEHENQLQEDGIFIRLDF

SEQ ID NO: 48996 - protein, 329 aa, Zea Mays
MEYSSSEDEGLVGDFIDAEDNTFTKNIDQGTGVMASQIHGDDPSVGSMPPVIGNELLMAADVLAKNDEPRMGMEFDSDAAARAFYNAYALCFGFGIRVARSRSERRKGVEVLVMKRFVCLKEGHHRKKKPVEPSNKKKRKRLSIRDGCPAMMEVVRRGPDRWVITKLVLEHTHVIVSADRAREVQLHRLSGKFQEHENQLQEVRRNVFGDTNAQGLFNYFKKMQSDNSSFFFSIQVDSKNYVSNAVWVDARARMAYTYFGDAVYFDTTCSQNENMLPFAAFTGVNHHGDTVVFGCALILDRTESSYGWIFETWLTAMDNGASCLDARRD

SEQ ID NO: 48997 - protein, 230 aa, Zea Mays
MAMPPKPGDPPQRSPARSPNLNLPCPLPPVPGGAPPPPQQQPGAGLPPPRVGHHRRARSEVAFRFPDDLPGGGGGGFDEIGSEDDLFSTFMDMDKIAGADRDRAAETSSPPRPAKHRHSVSFDGFGMGAAAGGPGGQQDGGGGMFGEVMEAKKAMSSEQLSELAAIDPKRAKRIIANRQSAARSKERKARYITELERKVQTLQTEATTLSAQLTLFQEVGMEVVVVQGRR

SEQ ID NO: 48998 - protein, 288 aa, Zea Mays
MCVEEPKDAERFGFGDPGVEEPAKFPLAQVFDGHGGKDAAHFVCDNLPRMIVEDSDFPLQLEKVVRRSFMQIDCQFAETCSLHRASSSGTTALTAMVFGRSLLVANAGDCRAVLSRCGTAVEMSMDHRPCSLSEKLRVESLGGYVDDGYLNGLLGVTRALGDWHLEGMKGAGETGGPLSADPELKMTTLTKDDEFLIIGSDGIWDVFSNQNSVDFARKRLQEHNDVKLCCREIVEEAIRRGATDNLTAVLVSFHLEAPPRIRVDRPGRVERSISAEGLNSLRILLGRQ

SEQ ID NO: 48999 - protein, 86 aa, Zea Mays
MYLITRYLQFFDTFFLNTQEGESACAITGVVKKGTYMSDICVNCHKVHLLLNVDHMENTVPHMFAFISLHMSLKLLYFLPSLKDFS

SEQ ID NO: 49000 - protein, 517 aa, Zea Mays
MEAVRGDGRWCVVTGGRGFAARHLVTMLLRSGEWRVRVADLGPAITLDRDEEEGFLGAALREGQAVYVSADLRDKAQVARAFEGAEVVFHMAAPDSSINNFHLHYGVNVDGTKNVIDTCIRCKVKRLIYTSSPSVVFDGVHGIFNADESMPYPDKFNDSYSETKADAEKLVMRANGREGLLTCCIRPSSIFGPGDKLMVPSLVAAARAGKSKYIIGDGNNYYDFTYVENVAYGHVCAEKTLSSEDGAKIAAGKTYFITNMEPIKFWEFMSLILEGLGYERPSVKIPVSVMMPVAHVVEWTYQKFAKYGMKVPQLTPSRIRLLSCNRTFSCSRAKEQLGYEPLVSLKDGVKRTVESYSHLQAQNHRSISKASIFLGNGNLAKTVLWEDAKQTVTVLLLLAVIYYHLFTCGYTFITAMAKLLSLTALFLFIHGMLPSNLFGHKVEKLEASNFHITQVSLSLLVVSILSSMSSQAAFKIGTALVFTGFKAYEKWEDSIDSMVGDACTILLHFGSAKESSS

SEQ ID NO: 49001 - protein, 149 aa, Zea Mays
MRIREPKTTALIFASGKMVCTGAKSEQQSKLAARKYARIIQKLGFPAKFKDFKIQNIVGSCDVKFPIRLEGLAYSHGAFSSYEPELFPGLIYRMKQPKIVLLIFVSGKIVLTGAKVREETYTAFENIYPVLAEFRKVQQCVNLSANKSR

SEQ ID NO: 49002 - protein, 348 aa, Zea Mays
MKALILVGGFGTRLRPLTLSFPKPLVDFANKPMILHQIEALKEVGVTEVVLAINYRPEVMINFLKDFEDKLGITITCSQETEPLGTAGPLALARDKLADGSGEPFFVLNSDVISEYPFAELIKFHKSHGGEATIMVTKEATGRVERFVEKPKIFVGNKINAGIYLLNPSVLDRIELRPTSIEKEVFPQIAADQQLYAMVLPGFWMDVGQPRDYITGLRLYLDSLRKKSAARLAAGAHVVGNVLVHESAKIGEGCLIGPDVAIGPGCVVEDGVRLSRCTVMRGVRIKKHACISNSIIGWHSTVGQWARIENMTILGEDVHVCDEVYSNGGVVLPHKEIKSSILKPEIVM

SEQ ID NO: 49003 - protein, 337 aa, Zea Mays
MTRIANKLIQLGNSNNTIQAHLQENNDWVEWQTNVLVKRNEVENVYHWACGRPTSLHDRGRDSDDDDFRDRDYDVAALANNLSQAFRYGIYSNDDIEEAQGSLERDDEDVYFDDESAEVVISSLRLGDDQDSSLFTNSNWFTFDGERGIDDRLSASVPSSSPNSLETSLEAEEADDGKVIGTEDEMETVYLGNGSAEEVKDVAECNEQPNCCTEDERLKNTEGIERHPDVSNHYTDICTNEAASAAAESSAPSVEIVAKKTVDEPSEAERTVDEPAESSLDSSVSIPLPAPVNGSEPANSEASSEQVAHDTDVQQPVKEAPDEDVNAKKTDVAKASE

SEQ ID NO: 49004 - protein, 190 aa, Zea Mays
MPLPPLLPRLYPTPPPLRAGDRGNAVPLSPGRRRPALLAVVRAKRKDEASFTDRILDYIEGGPKLRRWYGAPDLLPKDGAAEDEEDESQDIEESRDAVLVTNGDSEIGQMVILALILKRARTKALVKDKRTTEEAFGTYVECMVGDIGDKSFTKRALRGVRAIICPADDGFFSEPIDLKGVQHIVLLSQK

SEQ ID NO: 49005 - protein, 305 aa, Zea Mays
MPLPPLLPRLYPTPPPLRAGDRGNAVPLSPGRRRPALLAVVRAKRKDEASFTDRILDYIEGGPKLRRWYGAPDLLPKDGAAEDEEDESQDIEESRDAVLVTNGDSEIGQMVILALILKRARTKALVKDKRTTEEAFGTYVECMVGDIGDKSFTKRALRGVRAIICPADDGFFSEPIDLKGVQHIVLLSQLAVYRNSGGLQAIMNSKLKTLAEKDEEVVLASGIPCTIIRTGSLQSTPGRERGFDFTEGIASKGRISKEDAATICVEALNSIPLKTHIFEVANGKEKVIDWKAWFEEQTKREEEIQ

SEQ ID NO: 49006 - protein, 160 aa, Zea Mays
MTVNREAYPSIAIAFSKIYRTDGIGGLYAGLCPTLVGMLPYSTCYYFMYETIKTNYCRAHKKKSLSRPELLVIGALSGLTASTISFPLEVARKRLMVGSLQGKCPPHMIAALAEVIQEEGAKGLFRGWAASSLKVMPTSGVTWMFYEAWKDLLLSSRLHA

SEQ ID NO: 49007 - protein, 145 aa, Zea Mays
MDLGQMKSTNFSAGERDPLKSIDNFFPKKRKEEKNVIFYLLSCSSPWPPPLSFPSVEGASFPSSPQQPYPFPGLRLRPGRLSSPVASPRRRRGAGQPRAGAEGARFLADACRSNADKIDKKRRRIHGILIMVFEGGTFATGTKGI

SEQ ID NO: 49008 - protein, 94 aa, Zea Mays
MMFSSSLSVVEFYFLHRFPLPFAGYLIFISILAGFWGQCLVRKIVHVLKRASLIVFILSSVIFVSALTMGVVGTQKSISMINNHEYMGFLNFCE

SEQ ID NO: 49009 - protein, 356 aa, Zea Mays
MHDHGGLGVISLVQPPGVAPDQGGARHRLQARVALPAHAYARHNHRRRAQRHLPILANHCPHYNPLRTSSRSFYKGILMWREESRILMETRGREEQSKSTCAASDVVIDPSYGEPLLTQPQPKKSAWETFMFNLRWKNILVLMSVWSLFLVLQVLKNNSKSCSSFYWVINVLQVPVAVSVFLWEAMQLCRESHARRMNGNLECVCEASIEWSPAQLIFCAFCGLLGGTVGGLLGSGGGFILGPLLLELGCIPQVASATATFVMMFSSSLSVVEFYFLHRFPLPFAGYLIFISILAGFWGQCLVRKIVHVLKRASLIVFILSSVIFVSALTMGVVGTQKSISMINNHEYMGFLNFCE

SEQ ID NO: 49010 - protein, 209 aa, Zea Mays
MQPSMEFGHYVRLATHVNFRTFVKSAGIDFYPLGGDPRVMAQYMTKNKGFFLAAPTEIAIQRKQLKEIIFSLLPACTEPDLDTGTPFRAQAIIANPPAYGHLHIAEALGAPLHIFFTFPWTPTNEFPHPLARMPQSATYRLSYLILDLIVWWGSRGFINDFRKKLNLPPIAYFSTYHGSISHLPTGYMWSPQLMPKPKGHKIFLVHMQS

SEQ ID NO: 49011 - protein, 275 aa, Zea Mays
MNTMPSVFGHSKSTATTSGTIKGQDNVFVRSYSDRLLKCDLTLDMLSENEKIKITERLVKIQNDGTVEVDVTRSALVASELSEIDAFGCVPHDIEEVTPGITKSVPKLKIAILVVGTRGDVQPFIALAKRLQEFGHYVRLATHVNFRTFVKSAGIDFYPLGGDPRVMAQYMTKNKGFFLAAPTEIAIQRKQLKEIIFSLLPACTEPDLDTGTPFRAQAIIANPPAYGHLHIAEALGAPLHIFFTFPWTPTNEFPHPLARMPQSATYRFGGAPGDS

SEQ ID NO: 49012 - protein, 331 aa, Zea Mays
MGINGEEWEETVLGDGVGRRKGGAEASGLVASSSFAEGMGEFVLRSMDARFSGSVDDDEYVSSRQPVFGHSKSTATTSGTIKGQDNVFVRSYSDRLLKCDLTLDMLSENEKIKITERLVKIQNDGTVEVDVTRSALVASELSEIDAFGCVPHDIEEVTPGITKSVPKLKIAILVVGTRGDVQPFIALAKRLQEFGHYVRLATHVNFRTFVKSAGIDFYPLGGDPRVMAQYMTKNKGFFLAAPTEIAIQRKQLKEIIFSLLPACTEPDLDTGTPFRAQAIIANPPAYGHLHIAEALGAPLHIFFTFPWTPTNEFPHPLARMPQSATYRGIHK

SEQ ID NO: 49013 - protein, 167 aa, Zea Mays
MLSVSIEVPGEEPYHFQPRLFSKIIPEKCKYQVLSTKVEIRLAKAEQVTWTTLDYSGRPKAIPQKISTPAETAPRPSYPSSKSKKDWDKLEAEVKKEEKEEKLEGDAALNKFFRDIYKDADEDMRRAMDKSFRESNGTVLSTNWKDVGSKTVEASPPDGMELKKWEI

SEQ ID NO: 49014 - protein, 265 aa, Zea Mays
MLRETNLSPPSHRAVLALAAAPLPRLPPAPAALSPAPPAMGLLTSAELNYLVFRYLQESGFIHAAFTLGYEAGIHKCGIDGNAVPPGALITIVQKGLQYIELEASSDENYDEVERDFALLEPLEIITKDVEELQQIVKRRKIERSQTELEKDKGKEKERNEEHERRPCGEREREQHEKEKEQVRDKDKSEKDRDHDKEKEKERERQHAERTDKVKHEDDSLVGAGRWGMNTKEDLEEASISFMVSLAVVPGNILRREACCKLNAP

SEQ ID NO: 49015 - protein, 320 aa, Zea Mays
MRGRRLGGLLGGGGGPTPMDVSTTVQEISNTDVTVLEGHSSEVFACAWSPTSSLLASGSGDSTARIWTIPYGPCGSDMQPYSPGVHVLKHFKGRTNEKSKDVTTLDWNGEGTLLATGSYDGQARIWSRDGDLKQTLFKHKGPIFSLKWNKKGDFLLSGSVDKTAIVWDTKTWECKQQFEFHSAPTLDVDWRNNNSFATCSTDNMIYVCKIGEQRPIKAFSGHQSEVNAIKWDPTGSFLASCSDDWTAKIWSMKQDKCIFDFKEHTKAQEQTILISSCFWLAHLLIQPSSFGKLSRDAFCTACPVIGNQCILLHLALTAST

SEQ ID NO: 49016 - protein, 459 aa, Zea Mays
MANRRVLYMTLKTWFAHILKSQIVSFWLCPQPIRTLLLLMQSRFHGEVDPKGERTFGVLTKIDLMDKGTDAVDILEGRSYRLQTPWVGVVNRSQQDINKNVDMIAARRREREYFASTPEYKHMASRMGSEYLGKMLSKHLEQVIKSRIPGIQSLITKTIAELETELNRLGKPIANDAGGKLYTIMEICRMFDGIYKEHLDGVRPGGEKVYHVFDNQFPVAIKRLQFDKQLSMENVRKLITEADGYQPHLIAPEQGYRRLIESCLISIRGPAEAAVDAVHAILKDLVRKAINETHELKQFPTLRVEVGNAAFESLDRMRDESKKNTLKLVDMECSYLTVDFFRKLPQDVEKGGNPSHSIFDRYNDSYLRRIGQTVLSYVNMVCSTLRNSIPKSIVYCQVREAKRSLLDHFFTELGAREMKQLSKLLDEDPAVMERRTNLAKRLELYRSAQSEIDAVAWSK

SEQ ID NO: 49017 - protein, 65 aa, Zea Mays
MEDKLRNLGCKVIGKKTIEVEMDLTKAKSERYLWGNNTAAMNSDKKQQFTLGLAPVSKETSVSVS

SEQ ID NO: 49018 - protein, 207 aa, Zea Mays
MAQPQQRVYQAWKGDNRFFFGGRLIFGPNVKSLGVSVALIVIPVAVFCVFVAHHLRHQFHAYDAGYAILVIAIVLTIRVLLLLLTTAARDPGIVPRASHPPEDIHYDNLSLTDTPGILQFPCVKEVIVNGMPVKVKYCETCMVFRPPRCSHCSICNNCVERFDHHCPWVGQCIGKDFIHISSALIRPHTKIFGTGRMAGLMSMIKGV

SEQ ID NO: 49019 - protein, 260 aa, Zea Mays
MAQPQQRVYQAWKGDNVLLLLLTTAARDPGIVPRASHPPEDIHYDNLSLTDTPGILQFPCVKEVIVNGMPVKVKYCETCMVFRPPRCSHCSICNNCVERFDHHCPWVGQCIGKRNCRYFFLFVVSSSLLCIYLFVISALYIKFLMDGDYPTVWKALKHSPASLALMIYCFISLWFVGGLTGFHTYLISTNQTTYENFRYRSDGRLNVYDQGCLSNFQEVVCAKIEPSKHKFRAHIQEEVRGPLANRAGETEEEQVGGPRA

SEQ ID NO: 49020 - protein, 410 aa, Zea Mays
MVLEVGTAVGIRTTSTWAAGPAARRRSRGQVVSFALAPASSRRVRHRCRAMQQHEEEQERPPTVRAVTIPFADLRVPDRDLGDKIEEGLGPHGLGIVTIADVPEFPELRKRLLRLAPRIANLPEEVKKQLEDPDSRYNFGWSHGKEKLESGKLDTFKGSFYANPVLDVPTTDDVLVSRYPSYCRPNIWPNDNLPELEIAFKDLGKLMMEVGLMLAHHCDRYVMRQGVGSYDGDSLEQTIARSRCHKGRLLYYFPRQFSKQTDFDSVSSWCGWHTDHGSLTGLTCGLFTKNSMEVPCPDSAAGLYIRTRDNQVVKVVFDEDQLAYQIGETTEILSRGYLCATPHCVQAPSSENASNVDRSTFALFMQPDWNEKLKFPSEIPYHQELIPPNGTLTFGEYSERLVDKYYQTTT

SEQ ID NO: 49021 - protein, 573 aa, Zea Mays
MVKSWLKTASGLKKQQFDIQQQALKLTANSMYGCLGFSNSRFYAKPLAELITLQGREILQNTVDLVQNNLNLEVIYGDTDSIMIHTGLDDISRAKAIAGKVIQEMCKLKKDGLTKNASIQVNKKYRCLEIDLDGIYKRMLLLKKKKYAAIKVALDGSLRENIERKGLDMVRRDWSLLSKDIGDFCLKQILSGGTCDDVVESIHSSLVQVQEQMRSGQIELEKYVITKSLTKAPEDYPDAKNQPHVQVALRLKQNGYSGCSAGDTVPYIICSQQDSDNAHSVGIAQRARHPEELKRDPDKWMIDIDYYLSQQIHPVVSRLCASIQGTSPARLAECLGLDSAKFQPRLTESSNQDTSMMLLSVIDDEDERYRGCEPLRLSCPSCSGTFDCPPVSSLITSASATSVSDPIEGKDATANFWRHMRCPRCLDNTVESKFSPSMLANQMKRQADNFISLYYKGLQMCDDEGCKYSTHSVNLRVMGDSERGTVCPNYPRCNGRLVRQYKESDLYRQLSYFCYVLDATRCLEKLDQKARLPFEREFVAVGQTIKLALLEIQKIRDRCAFGWVQLKDLAVSI

SEQ ID NO: 49022 - protein, 196 aa, Zea Mays
MAAPPSRSRGDYDHLIKLLLIGDSGVGKSCLLLRFSDDTFTTSFITTIGIDFKVRTVELDGKRVKLQIWDTAGQERFRTITTDIRNWIRNIEQHASDNVNKILVGNKVDMDAKRVVSTAQGQKLADEYGIKFFETSAKTNRNVEQVFFAMARDVKQRLTETVAAAAEPPTIQISRPDPDQADAASSRRWSSSCCNT

SEQ ID NO: 49023 - protein, 431 aa, Zea Mays
MKRLPILVVPVLLLLLSISFFLFRPTTPPVLSSRQAFEPDRRLRVYVADLPRAFNYGLLDRYWSLRAADSRIQASSDPDHPPPHDHPPYPENPLIKQYSAEYWLLASLRAAATAPAAVRVVADWREADVVFVPFFATLSAEMELGWGTKGAFRKKDGNEDYRRQREVVDRVTSHPAWRRSSGRDHIFVLTVDSKSSSKNSSRVIQHTQVSLLKDVIVPYTHLLPTLLLSENKDRRTLLYFKGAKHRHRGGLVREKLWDLLGNEPDVIMEEGFPNATGREQSIKGLRTSEFCLHPAGDTPTSCRLFDAIASLCIPVIVSDEVELPFEGIIDYTEISIFVSVSNAMRPKWLTSYLRNISKQQKDEFRRNLARVQPIFEYDTSYSSSRGSTSIDGAVSHIWKKIQQKLPMIQEAIIRDKRKPDGVSIPLRCHCT

SEQ ID NO: 49024 - protein, 314 aa, Zea Mays
MLNLCEGDKVLKLLMEDWECARSMVGPSITRGVTKEISIVSWDDIGGLKDLKKELQKVVEWPIKHAAAFSRLGIPPVRGVLLHGPPGCSKTTLAKAAAHAAQASFFSLSGADLYSKYVGEGEALLRRTFQKARLASPSIIFFDEADAIAPKRTGPGGNSSGNATVGERLLSTLLTEMDGLELATGIIVLGATNRPNAIDAALLRPGRFDKVLYVPPPDVEGRHEILRIHTRKMKLGEDVDLWKVAECTELFTGADLEGLCREAGMAALREDISASLIHDAHFQAARSSLSPSLTKAVVDEYSKVDINDPSSRKH

SEQ ID NO: 49025 - protein, 375 aa, Zea Mays
MDHNSMQFEALPESWNDISEMVQLQALDRSFLFPGEQVPILACLSASKQDVQVISPFRIAAVMSKNGTSMQNFTNKSSPVSANGHDNGAAGESGYQDVEPNGEASPSGHDILETQSLLQMEDHKQQIEHVLRRFRESNFFVRIAESVEPLWSKKSVTSTTMADERSDNQGNSKSSRSNVYNTISDKGVFDGNTSGGVARDVVKCYSLQNGDIVVVLQVNVSVNKLEDPVLEVLQFEKTSSVQTPNNIRPPPISESQEFMPEKPAKTPDIINDGQLSFRGVPLEPERYSNIAPTHAKDIVVFIDAITIVFEEASKGGAPLSLPIASIEVGHGHSLPNLALSNYVLKGTEDQQSCTSGLITPNDDRCYFKYSYTKGW

SEQ ID NO: 49026 - protein, 380 aa, Zea Mays
MEAALVERLEAAVARLEAAVASGASLASAAPRDLDAPEARLDPAIVAYHEFVAEAVGRLTAAAEKIGGKVLDATKVLAEAFAVAKDLLVQAKQLQKPASMADAQGFFKPLSDVIAKATAMTEGRRPDYFNHLKSVADSLPALAWVAFLGKDCGMSFPTAHVEESWQMAEFYNNKVLVEYRNKDPDHVEWAKALKELYMPGLRDYVKKHYPLGPVWGPAGSAVVSQPKPAAPTPKAPAVKAAPPPPAPPAAPLFSTEKSPKSSKPKEGMSAVFQEISSKPVTAGLRKVTDDMKTKNRAERSGVVSSAATPAAAPEKTSRAGSFSFKSGPPKLELQMGRKWVVENQVGKKTLAIDDCDSRQSVYVYGCKDSVLQVNGCCSSF

SEQ ID NO: 49027 - protein, 1034 aa, Zea Mays
MADGGRMKGVQSAGGGAGDDEEGNEEVREEPELALSLGRRVWHLPPRQEAAPRSLNWTPVLPEWNPDAAGSSQGVERALGGQSISSLGFHDMFGGILDDPQAGGSMEVGWGKLNEEDEDRDLQNKRLRVRHFGEENPLHSGASATPFGSESSFLPISDECVHLKLSRFPEHELEFGLSLFANDGSESPRDANNEQVDDAENSGGRNSVDVGIRMDLSDDFLHMIFSFLDQKDLCRAGVTCKQWRSASVHDDFWKCLKFENTSVSLENFVNICRHYQSVTELNLHGVINAETLVLEAIMFLRHLKTLTMGKGQLGESFFQALAECPLLTALTVNDASLGSGIQEVTVNHDGLRELHILKCRALRISVRCSQLQILSLRRTGMAHVSLNCPQLLELDFQSCHKLSDNAIRQAATACPLLAKLDMSSCSCVTDETLRDIASSCPSLSVLDASNCPNISFESVRLPMLIDLRLLSCEGITSASMAAIAYSRLLEALQLDNCSLLTSVSLDLPHLKNISLVHLRKFADLNLRSPVLSYIKVSRCSALHRVSITSTTLQKLVLQKQESLSSLSLQCHNLIDVDLTECESLTNAVCEVFSDGGGCPMLRSLILDNCENLSIVELNSSSLSCLSLAGCRSMTLLRLSCPNLQHVNLDGCDHLQSAAFCPVGLESLNLGICPKLSVLHIEAPNMSILELKGCGVLSKASINCPRLTSLDASFCRQLVDDSLTCMSEACPMIEHLILSSCLSIGIDGLSSLHCLHKLTLLDLSYTFLDNLKPVFNSCLQLKVLKLSACKYLSDSSLDALYREGALPLLVELDLSYSSIGQNAIEDLLACCTNLVNVNLNGCTNFQELVCGSDDSSCVDMPVDFCAPSSAIKSEEIRSGFDMSQSFNVKLELTGGAESLIAPRLSNLQLLRQEAAPRSLNWTPVLQEWNPDAAGSSQGVERALGGQSISSLGFHDMFGGILDDPQAGGSMEVGWGKLNEEDEDRDLQNTNIKSGQALSLELLYIVPKHCRYIARHGILGARGNDILFFQSIHVAE

SEQ ID NO: 49028 - protein, 59 aa, Zea Mays
MAMSAGRGLLVLFFSAAVVAELASAANGPFLSDSVFQSSAGSTGRSLLQAKNKSTIARR

SEQ ID NO: 49029 - protein, 88 aa, Zea Mays
MCIDNVQLHQPLWQVSTRSVFQRVQRRQDGAFLRRCPPEGQFHCKQWLSRPKQLACVDYCLERGSSVVLLNYSSIHFPQRWCVTTVEA

SEQ ID NO: 49030 - protein, 493 aa, Zea Mays
MEVHADVDGSGVPLAVLLKRELCNQKVERPDILFGEANKSKKGEDFTLLLPRCHRTTGEGGGSGGGENAGGGDDDDTISVFAIFDGHNGSLAAIYTRENLINNVLAAIPPNLTSEEWTAALPRALVAGFVKTDKDFQTKAARSGTTVTFVIIDGWVVTVASVGDSRCILESAEGSVYFLSADHRLDANEEEVERVTASGGEVGRINIAGGAGIGPLRCWPGGLCLSRSIGDIDVGEFIVPVPHVKQVKLSNAGGRLVIASDGVWDALCFQEALNYIRGLPAEAAANRIVKEAVTSKGLRDDTTCIVVDILPPEKLSPPLKRPGKGVIKTLFRRRPSDEMSEDQMDRGCLEPDVVEEIYEEGSAMLARRLNINYPSGNMFKLHDCAVCQLEMKPGEGTSVHGNMPKHSRVDPWGGPFLCSSCQLKKEAMEGKLHSRNSQFDVRPMPNSRVTLRALLHIEFKLWQPLFSAARMSSLLFWPRQQDSQYGSHLYRRS

SEQ ID NO: 49031 - protein, 153 aa, Zea Mays
MEVHADVDGSGVPLAVLLKRELCNQKVERPDILFGEANKSKKGEDFTLLLPRCHRTTGEGGGSGGGENAGGGDDDDTISVFAIFDGHNGSLAAIYTRENLINNVLAAIPPNLTSEEWTAALPRALVAGFVKTDKDFQTKGWSVLQQVVVKLGE

SEQ ID NO: 49032 - protein, 974 aa, Zea Mays
MVSGHIFHCRKNSWPAEEYVGRTALQLLDFDGGAPPEQAWRRRLNSHANILKEFSVTFMEAMRMMSLGLRLWSYVREEASHGRKAPIDPFTKERCKPSASQGVPLGGMGSGSISRGFRGEFKNWHIIPGLCESSPVMENQFSIFVSRDGGNKKYSSVLAPGHHEGLKKNSDSGISSWDWNLSGQHSTYHALFPRAWTVYDGEPDPDLKISCRQISPFIPHDYKDSSLPTSVFVYTLVNTGRDRAKVSLLMTWANSIGGFSHNSGGHYNEPFIAEDGVSGVLLHHKTAKDNPPVTFAVAACETQNVNVTVLPVFGLSGENHVSAKEMWNTMLQNGHFDRENFSAGPSMPSSPGQKLCAAVSASTWVEPHGRCTVVFALAWSSPKVKFQKGCTYNRRYTQFYGTSEKSAVNLVHDALTKYKLWEEEIEKWQNPILKDERLPEWYKFTLFNELYFLVAGGTVWTDGQPPAIDEKKSPGFNHQKSSKRGTKDTNQGSVKDRHVNLAVEQVPHGGYMANGDDHSVSKFAAVHGSEMQEQINGLKSEEPIPYLISKDGPEHVGKFLYLEGVEYIMWNTYDVHFYASFALLDLFPKIELSIQRDFANAVLYEDRRKVKFLADGTSGIRKVKGAVPHDLGTHDPWHEMNAYNIHDTSKWKDLNPKFVLQIYRDFAATGDMQFGRDVWPAVCAAMDYMDQFDRDGDGLIENDGFPDQTYDAWTVHGISAYCGCLWLAALQAAATMAHRLGDRHFAEKYKLKFIKAKAVYEAKLWNGSYFNYDSGTSSNSRSIQADQLAGQWYAASSGLPPLFDEHKIRTALQKIFEFNVMKVKGGRMGAVNGMTPKGKVDETCMQSREIWTGVTYAVAANMLLHGMEHQGFTTAEGIFTAGWSEEGYGYWFQTPEGWTTDGHYRSLVYMRPLAIWAIQYAVSPPKAILEAPKVNLMDRIHISPHMVRAISEISIRKVAPDNRCFPSSAFHCEC

SEQ ID NO: 49033 - protein, 543 aa, Zea Mays
MAWWSGKVSLSGLQDIAGAVNKISESVKNIEKNFDSALGLEEKRDDEEASGSRTSNSDGIGFFNPVMAFMGHNGEEDGTEVSEKPQFPKDLSVEEENHSTPTKKQTSEVDHSEVSVTTFPEQPSKSEEAHSISNESPVSKADVSEQSITPQTPAHPSVAEEKLDGCTEALASKVGDDEASETSQSPGHPSTVEENQDHQYSKHSCPSDEAEPNQLRESAGDLPDGSAFSSPIKIDKSGDTETGESIDTGKEDTSDGNASQSQPAESMLASSDNITEVEDKIAQEYNVPKELSSPQENCDTVDKVTRLEVKLHDGNIDTKKSEEESNKMEAGEVSVVVQEDNVMEQPEDLMSKSITAAHDSHSQNESVVSLTDVPAGLGGVGPADNFTEEEKIARITDFQIVDSVVSVGELEKLRREMKMMEAALQGAARQSQSKADEIARLMNENEQLKSTIDDLKSKSSEAEMDALKDEYHQRVATLERKVYALTKERDTLRREQNKKSDAAALLKEKDEIINQVMAEGEELSKKQAAQEATIRKLRAQLDS

SEQ ID NO: 49034 - protein, 207 aa, Zea Mays
MQGITKALRLHGRQLRHAVLQHMNMNKGIFSWATLISRIQSESPAVIIPHMGLENITVNEILRAKGEAEAGAVYWCSTAHLVHEAVQHMAAHNVGALVVLKSGDMNQLAGIVTERDFARKILLPGRPSQQTRVEDIMTEEDKVITVSGRTNILRAMEVMTDKRIRHVPVFDDKVVGMISIGDVVRTIVDQQHQEVKQLKKYIRGDYY

SEQ ID NO: 49035 - protein, 965 aa, Zea Mays
MRIAFLVLLVLSLFLLPNGIGKSLAARPSVVNIGSILRLNSTTGGVSDVAIRAAVEDINSDPTVLNGTTLHVQTRDTNCDDGFLGMVQALQFMETDVIAIIGPQCSPIAHIISYVANELQVPLMSFASDATLSSIQFPFFVRTMPSDLYQMAAVAAVIDYYQWKIVTAIYVDDDYGRNGIAALDDELTARRCKISFKIGFRSNAKKSDLLNLLVTVSNMESRVIILHTGSEPGLKLLSLANGLNMMGNGYVWIATDWLSAYLDANSSVSAETINGMQGVLTVRPHTPKSKVKSNLVSKWSSLSKKYNHSDLRTSAYGFYVYDSVWTVARALDAFFDDGGRISFTNDSRLRDETGGTLHLEAMSVFDMGNKLLNKIRNVNFTGVSGQVQFNAQFELIHPAYDIISIIGNGMRTIGFWSNYTRLLSTVLPEDLYSKPPNTSLANQQLYDVIWPGETAQRPRGWAFPSNAKELKIGVPNRFSFKDFVSKDNATGSMKGYCIDVFTQALALLPYPVTYRFIPFGNGTENPHYSQLVQMVADNDFDAAIGDIVITMSRTKAVDFTQPFIESGLVILSPIKKHITNSWAFLQPFTLGMWCVTGLSFLVVGVVIWILEHRINNDFRGSPRQQIITIVWFSFSTLFFAHRENTMSTLGRGVLLIWLFVVLIIQSSYTASLTSILTVQQLDTSIRGLDDLKNSDYPIGFQVGSFVEEYMIKELNISQSRLKALGSPEEYAENLKLGPKKGGVMAIVDERPYVELFLSTYCKIAVAGSDFTSGGWGFAFPRDSPLQIDLSTAILTLSENGELQRIHDKWLKTGDCSTDNAEFVDSNQLRLESFMGLFLICGAACVLALLIYLGITIRQYLRHEQPEKEREGWKWDIPFLVPFQASTCAFFMDNDDDDYEAAVVGAPFRTLHSSSTLPWLPPPCLPEPCTAARSPRLRRATLRRRPSPPAPSPGGEQPCGSSPPGS

SEQ ID NO: 49036 - protein, 276 aa, Zea Mays
MGGGAVNDHFPGASDPLLPTKRDGDGDEDDAGASAFHEFDGASFAGAVFNLSTTIVGAGIMALPATMKVLGLVPGLVMIVLAALLTDASIELLVRFSRAAGARSYSAAMADAFGWWGRRLLQVCVVINNVGVMIVYMIIIGDVLSGSTSGGEHHYGVLEGWFGIHWWNGRLFVLLVTTLCVFTPLACLKRIDSLSYTSTISVALAVVFVIITAGIAVIKLIGGQIPMPKLFPTVSDLASVWELFTAVPVLVTAYVCHYNGIHKVLPRSGTKFWRSS

SEQ ID NO: 49037 - protein, 229 aa, Zea Mays
MPRFGTPPARNELESCLDDWSSHSSSAGNPNIPYVVVSKSSIVTAVCKEILGCYRKLLGIPDLLNQPNMSILKQLLQTLQPTENFDDVLSEFQSSLGPCNVDYLYCGECKMLEDIMDSVSSFSYLLSSDVLITIQSIVNSVVVLLDKSGEPNGKNIHMGCSKAIISFLRKRLGYSAHKLLSADFPSEDVGKGWQSKGDLIQKILQIYLRNSDSTSDLLAEIGRELPKMV

SEQ ID NO: 49038 - protein, 823 aa, Zea Mays
MRGGGGRQPSYAASDGADADAAAVPAASRKMVQSLKGILADRSEGEIYATLCDCGMDPDIAVERLISQDTFHEVRRKRDKKKETKVNQETRPRPFQKSIYGGYKAGSDRSGRGGFKGPAKKEPELHASINSSALDVNTSATSETFSATGNVAQADAKNTFQPPSQVKHGWGGVPGRPSMAEIVKMGRPQAKVGSRSVASSIVMPAIGDSAIPNTPNLAPNEYNQTVFASEVGHGAADKLPNVADEVHSVSKDASSLDMLPSAEGTDVEAPSMSANMQGSSTPDANEDDVEKDTNLEEGNTESLTTPGQVSASGKGIHSEYTELVSHLDEGSMEKTDDFQLDALSFEHNLTDLNGDVSTTTTQFDHLTLLDGPKLSDENPAVIIPGHLQVSNADCAHLTFGSFVYGTLDASLTTKPLESHGDIVTIPDDDYDQSEGRIHDDESKVTLAPAANEYVTSTSNSNVENLDITSVQQSEVTRSNFLDVTSNTEYNLSSPPDYATSSAALQDSTSQSYLQENRQFQSISPLPSFMQIQNGLMSPAIPPLREFDPAFSLLLTNPPIMHGTTSSSMSSATVSTQPQENANPVGLPNPQLTQSQPSTSIAPGPPLPQHLLHPYAQTTLPLGYASMIGYPSLPPSYAYLPPAAFQQPYMNSGMFLHQAAAAVPNSSVKYPLPQYKSNIALASLPQPGSLLSSYVGGFGTANNMPGNFPLNQSTTSATATLGFDGTVPSHLEDGNQFVCLQQNENPAMWMHGAGSRGMPPLAASTMYGYQGQSHQTGLRQGQLPSQYGSALGQSQPGLGPEHRNPSDSNLSGAAQANQMWPNSY

SEQ ID NO: 49039 - protein, 822 aa, Zea Mays
MRGGGGRQPSYAASDGADADAAAVPAASRKMVQSLKGILADRSEGEIYATLCDCGMDPDIAVERLISQDTFHEVRRKRDKKKETKVNQETRPRPFQKSIYGGYKAGSDRSGRGGFKGPAKKEPELHASINSSALDVNTSATSETFSATGNVAQADAKNTFQPPSQVKHGWGGVPGRPSMAEIVKMGRPQAKVGSRSVASSIVMPAIGDSAIPNTPNLAPNEYNQTVFASEVGHGAADKLPNVADEVHSVSKDASSLDMLPSAEGTDVEAPSMSANMQGSSTPDANEDDVEKDTNLEEGNTESLTTPGQVSASGKGIHSEYTELVSHLDEGSMEKTDDFQLDALSFEHNLNLNGDVSTTTTQFDHLTLLDGPKLSDENPAVIIPGHLQVSNADCAHLTFGSFVYGTLDASLTTKPLESHGDIVTIPDDDYDQSEGRIHDDESKVTLAPAANEYVTSTSNSNVENLDITSVQQSEVTRSNFLDVTSNTEYNLSSPPDYATSSAALQDSTSQSYLQENRQFQSISPLPSFMQIQNGLMSPAIPPLREFDPAFSLLLTNPPIMHGTTSSSMSSATVSTQPQENANPVGLPNPQLTQSQPSTSIAPGPPLPQHLLHPYAQTTLPLGYASMIGYPSLPPSYAYLPPAAFQQPYMNSGMFLHQAAAAVPNSSVKYPLPQYKSNIALASLPQPGSLLSSYVGGFGTANNMPGNFPLNQSTTSATATLGFDGTVPSHLEDGNQFVCLQQNENPAMWMHGAGSRGMPPLAASTMYGYQGQSHQTGLRQGQLPSQYGSALGQSQPGLGPEHRNPSDSNLSGAAQANQMWPNSY

SEQ ID NO: 49040 - protein, 104 aa, Zea Mays
MMNKNNRRNSQELCVLSVCVPIRIPLNQLPEHVEGLSKTVINCFFHGMQKKEGTLYTITLGFTCFYDILTLEHQILGIEMGESCLLLCTIIECSMDCSCNPFQL

SEQ ID NO: 49041 - protein, 239 aa, Zea Mays
MPCWRSSHVTGVHFLVDAILAKAHLRGANIPNFSIKHALLPCIYPLSKPETPERVRKQLPAMATADRVAATFLSSFPTHHPRPFSSVSLVTNPVLPVSLRAAVTGGPRLASRLRVHRVGAAVAQLPTTNPEVASGEKKIRWSSRAVRSFAMAELEARKMRYPTTGTEGLLMGILVEGTSGAAKLLRANGTTLLKVREEAANVLGKSEMFYFSPMHPPLTEAAQRALDWAVNEKLKSGGI

SEQ ID NO: 49042 - protein, 362 aa, Zea Mays
MDMERRLLWPWSWRPRPAHPGGAPLLWFQGHHPRILMEACPRGGWASRTASRLTLEMIMSSKLPLETGQYLGECKGHEGTIHEISFSAPSSPQVICSCSSDGTVRAWDTRNFKQISLLRGGVSQEMFTFAFGGSNGSLLAAGSNAQVKFTPDQQSKLISAAVDGLICVFDTDGDIDDDNHLLSVMNAETSVAKVGFFGNKYKKLWCLTHIETLSVWDWNDGARELNIEDARSLATDRWNLDHVDYFVDCHYSVPDDRLWLIGGTTAGTLGYFPVRNDHDGPIGSAEAILEGGHTGVVRSVYPSSGIHGRLGQNRGIFGWTGGEDGRLCCWRSDEIAETNKSWISSSLVWKQQKKTKNRHQPY

SEQ ID NO: 49043 - protein, 227 aa, Zea Mays
MPAPARLPSGRRISKDVRGACMRVGGVVDENALGSSSVAASHRARFLQRAGSRAETAVDLGPDSEDGSKRRSLATTMFCVAKQGADATALQAGLNWACGQGRANCAPIQPGGPCYKQNDLEALASYAYNDYYQKNFATGGSCGFNGTATTTTSDPSSGQCVFTGSSMAGGGTPAASAPSGLSPPSSFTPGIGSPSNTLIPLDGAESLVSSVWSAICAPLLALPLFFL

SEQ ID NO: 49044 - protein, 392 aa, Zea Mays
MCPTKPGRPAQAAAGSGEKSWREQAVAASSLRPVDLDRGTNGWASPPGDLFHLRARGYFSCGGGKRGKAPSAAEWLLRPAGVDWLRSHARLDHVLARHDNRVAAAFRRARLRNDPTAHFLLAVNLQVPGRPDAYSAVFYFAAEAPIAPDSLLGRFVQGDDAYRNARFKIANRIVNGPWLLRATVGNYAACLLGRALTCRYHRGVDYLEIDVDIGSSAIASAILHLALGAVTSVTIDMGFLVESQSEEELPERLFGAVRIARMEMGAARYVELPPNEAMPETVCSGRAGAGFRVSSGKVVNHSRQQDRAGGKVGRSMSCPERERGGNRCKVRGCSAERNHPPVGARAVARKGRVTRHIRRSSWCHYHEWHTSFTKYSSTPAWLEQLSCSHPHT

SEQ ID NO: 49045 - protein, 690 aa, Zea Mays
MWSHPFTRLEFSGISAVDYAPIFSFHGLIPELAASLMAICEVFGCLSPSVSWTLRTGEEISAHTVFSNAFILLLRLWKFNHPPLEYCIMGDGAPVGSQLTPEYLLLLRNSQVLSSSSLSKQRNGQRQSQVSTSHPSSGNPIFMDSFPKLKLWYQQHQACLASTLSGLAHGTPVRNNVDSLLNQMFRKANKGGTSIGSLSGSSSISNSSSPGGDDSHLWPQLPAWEILEAVPFVVDAALTACSHGRLFPRELATGLKDLADFLPASLATIVSYFSAEVTRGVWKPASMNGSDWPSPSVNLSMVDEHIKKIVAATGVDVPKLVTGGSSSGTLPLPLAAFVSLTITYKLDKASECFLNLAGPALENLAASCPWPSMAIVAALWTQKVKRWSDFLIFSASRTVFHHNNDAVVQLLRSCFAATLGMSSTSVCSCGGVASLLGHGYCPGGFSPVAPGILYLRIFRCIKDCSILAEDILSLLMLSVKDIAETTVPRQRPDKLKKTKYGMRHGQVSLSAAMTQVKVAASLGATLVWLSGGTALVQSLIQEMLPSWFLSAQNLDQGGASGGVVYKLGGHALAYFAVYSGMLAWGIDQTPVSRRRERVMRSHLGFLASALAGKIFLGCDLSLWRAYVSGFLGLVVECTPCWVQEVDLRVLKRLSSGLRHWGEDELAVALLRRAGPEAMGTAAEMILGREL

SEQ ID NO: 49046 - protein, 465 aa, Zea Mays
MVNTWGYSTINFFAPMSRYASAGGGPVAASKELKQMVKAFHNSGIEVILDVVYNHTNEADDVNPYMTSFRGIDNKVYYMLDLNNSAQLLNFSGCGNTLNCNHPVVKELVLDSLRHWVKEYHIDGFRFDLASVLCRGPDGSPLDAPPLIKEIAKDSVLSRCKIIAEPWDCGGLYLVGRFPNWDRWAEWNGKYRDDIRRFIKGDPGMKGVFATRVSGSADLYQVNNRKPYHSVNFVIAHDGFTLCDLVSYNSKHNDANGEGGRDGCNDNYSWNCGIEGETNDLNVLSLRSRQMKNFHVALMISQGTPMMLMGDEYGHTRYGNNNSYGHDTHINNFQWGQLEERKDGHFRFFSEMIKFRHNHPILRRDRFLNKNDVTWHENRWENQDSKFLAFTIHDHSSGGDIYLAFNAHEYFVDAVIPPPPHHKSWSRVVDTNLESPKDIVPEGVPFTGSGYRIAPYSSILLKAKP

SEQ ID NO: 49047 - protein, 305 aa, Zea Mays
MAQRWRSRARWDSDLDEDGSPPFRQPRRGGSDEEDDEVGNEDLSLEIIARAQRKRRWASCGGVTGFANLLSVSSGDDEDAVVELAEADEPRRKQKKRQHWKQRKRQRKEATAAAAAAAAVDEEEKEVGTTQEEQIGTAESVLTEDGVDAPTSHSMFLRKLLRIPRYFDPGETLLETCFNCSEEGHVAANCPMGKRKKPCFVCGLFGHNAKQCKQGQDCFICKKGGHMAKDCPDKHKRNDHQSTLCIRCGETGHDMFGCANDYPPDDIEQIRCYACNQKGHLCCSDFFDNSLEQAIYIGTSVTGMC

SEQ ID NO: 49048 - protein, 291 aa, Zea Mays
MGKRKKPCFVCGLFGHNAKQCKQGQDCFICKKGGHMAKDCPDKHKRNDHQSTLCIRCGETGHDMFGCANDYPPDDIEQIRCYACNQKGHLCCSDFFDNSLEQGCAKQRREASAVTTPTLCFKCGEEGHFARGCTKNAKSDGPKGWSSPHSQRKGRWKNDGKSPSHIRRKEKWKKDSSARSAPHDACTTSKSNSPSFEERMGASNHKSKWRGGWTGDDDLPSKKYKPNGWGSPATPKRSYTNHQYLSGGGDYFTPQSSRRHNHGTASPGARKHRFSSSIFAASNTHVRFKRS

SEQ ID NO: 49049 - protein, 104 aa, Zea Mays
MVAAEATDLQLRLVEPFLNEVRARALMYFNYSGYKLQHHPLEHLSGILMIEESELESLCGICGLEITRSEGTKAFVPKQTSFNLPTSMPQSNGIYVSREFERLI

SEQ ID NO: 49050 - protein, 442 aa, Zea Mays
MARPRKPPPPSPPKAAAPSIADALLLATVCMVGLPVEVRVRDGSAYAGVLHTACVDAGYGVVLKKAKKIANGKGDVNLSLGSFVDTLVVCPDDLVQVIAKGLSLPLKGVCKPLDSNVVAASGSLKPQISHANDPKMSNKTKNMSPLMQAEKCTSVGQEKNTSVKRNGQDNGITTSLSSSTRHVGACLSNNWDSRSGSMVPKVDVITSSASAVPVVASGVKPSQPVNNSVAKIVTSSKTAAKEFKLNPSAKVFSPSFASSRQVLAAAAPVDTYYISHSAPEVPMGVPVYEPKSVSGVSPLSNKVYCSNLSPANYAISPQYVPSIMGHNASRLDPSRIGTPYHPMQVMAGKFSPVVYVQPGPQDAMHGTTVGFQGWPCPLLLNSYQASMQKFQGNPPVYLAPPVMATGNLPLVVPSPASLVQPFEAIHPIMVPAASSMVPGKYM

SEQ ID NO: 49051 - protein, 195 aa, Zea Mays
MVPKVDVITSSASAVPVVASGVKPSQPVNNSVAKIVTSSKTAAKEFKLNPSAKVFSPSFASSRQVLAAAAPVDTYYISHSAPEVPMGVPVYEPKSVSGVSPLSNKVYCSNLSPANYAISPQYVPSIMGHNASRLDPSRIGTPYHPMQVGATYTTPSPQPVMAGKFSPVVYVQPGPQVSDSQLLFALRLEVDKYQE

SEQ ID NO: 49052 - protein, 553 aa, Zea Mays
MEAGSDFAPRGNDKEGHCGNNCEGCCTGAETFFPLRNYGINVCGEGGEYETLTLDCPLFRKPDSSDRIGDGSAVQESSSCVYEVDEVTTHDDVGEKQALSPAVDAYTNVDLCISKTGNNLRSMSCWIQDPSRASEGLKADLIAVLSRIENQLKEEGLGWVNVLYVHLYISSMKEFGLANEVYVSFITEKKCYLGVPSRSTIELPLVQAGLGKAYVEVLVSNEVVKRVLHVQSISCWAPSCIGPYSQATLYEDILYMAGQLGLDPPTMKLCLGGPRAELELALQNSEAVANAFSCSIYISAIHFLVYCSAQLTSSEKEEIEQTLKSSYITRLDRSKGGSYPTVLYVFASDLPKGARVEVKPILYVPSTDDWVAAEETETGVPLPAPSKTWTDCTAPYSALRDSCCQVHTTGGRICSAVVSITDDIASKICSAAGQLHHGEENLKIMARFCAFQIAKTLADNRFSWDSVTMLRLYYSVDLAVAADAVSGAFSEALAELAQDNPSMRTDVPFYNVVPVAGAGRSACANDIMACELLASNVSSAKSIPAEPFAVTPA

SEQ ID NO: 49053 - protein, 116 aa, Zea Mays
MAKLYVQAFPPADLNKNTEWFMYPGVWTTYIIIVFFSWLLVLSVFGCTPGTAWTVVNLFHFAITYHFFHWKKGTPFADDQGMYNTLTWWEQMDNGKQLTRNRKFLIVVPVVLFQEY

SEQ ID NO: 49054 - protein, 497 aa, Zea Mays
MVKIVKKKPDLSVREKILSLIDTWQVAFGGPSGKYRQYHAAYQELRAAGVDFPPREENSVPLFTPPQTQPLRHPHLYTPPGQSYEDAAIQASLQSAPPASALSLSEIQSARGIVDVLDEMLNALDHRHPEGVREEVIVDLVGQCRSYQSRVMDLVNSTGDESLLFQALGLNDELQRVVQRHDDIAKGIPPGTGAPLPASGNVNQGTAPPRPTAVSFSPLLNVHEDDEPEDEFSVLSRRSARDGAVAQNNVPSAPRNERSYPSPLLPPPPASKRPVYTEASSVDYLSGDSYKSEKVSDDFINPTAPANISTSSHSKAEAHPPPSYGGRPDRVSDDFINPTAPSFSAPSRPTNEEPARPSVKRQESLPDDDFINPTALPGFSSSSATKESGEDLPKAPWEAQAAAGSLPPPPARYGQRQQYFEQNVYSGGSNEGGYNGLTTQTEGLSLNPRSSENERSAARPAASRPAKPEDSLFKDLVDFAKTKPSSPSKPANSRRTR

SEQ ID NO: 49055 - protein, 972 aa, Zea Mays
MGGKYRAARTKRWWRGLAAAGWVLTAVVCSAVMHWTLRRDSMDRAEERLVSMCEERARMLQEQFGVTVNHVHAIAILISTFNFEKSPPAIDQDTFAKYTARTSFERPLLNGVAFAQRVFHHEREMFESQQGWVMNTMQREPAPPQVEYAPVIFSQDTVSYLARIDMMSGEEDRENIFRARTTGKAVLTNPFRLLGSNHLGVVLTFAVYRPDLPADASVEQRVEATIGYLGGAFDVESLVENLLSKLAGNQDIVVNVYDVTNASDAMVLYGPSSLDEQVPFLHVSMLDFGDPFRKHEMRCRQKLPMPWSAITNPLGTFVIWMLLGYSIAAAYSRYDKVTEDCRKMEELKTQAEAADVAKSQFLATVSHEIRTPMNGVLGMLDMLLGTDLTMTQKDYAQTAQMCGRALITLINDVLDRAKIEAGKLELEAVPFDLRSLMDDVVSLFSSKSREKCIELAVFVCDNVPKVVIGDPWRFRQILTNLVGNAVKFTERGHVFVRVCLAENSNVEANQVLHGAMNGKGGRVESTTNGAFNTLSGFEAADRRNSWQYFKLLLSDKESLLDDLEGENSNQSDSNHVTLAISIEDTGVGIPLQAQDRVFTPFMQADSSTSRNYGGTGIGLSISKCLAELMGGQISFTSHPSVGSTFTFSATLKHSYKDISVDSSRSLTEALPTAFKGMKAILVDGRPVRSAVTRYHLKRLGILLQVVNNMNAVVKAFPGQNGATGSREKASILFIESDFWRPETDVQLLNHLREQKNGQLSDGHKVVLLVTSEADKDKYGSIFDIVMCKPIRASTIASSIQQLLKVEIAERKDNQNRPSFLRSLLVGKNILVVDDNKVNLRVAAAALKKYGANVSCVESGKDAISLLQPPHRFDACFMDVQMPEMDGFEATGQIRQMELKANEERKNKLASIEGSTTAEYHLPVLAMTADVIQATYEECIKSGMDGYVSKPFDEEQLYQAVSRLVVGTTDSAV

SEQ ID NO: 49056 - protein, 371 aa, Zea Mays
MFCDDIFGESPAGVRKSGKGDGLHVERNALHDNWDDADGYYTYRFGELLDGHYEIIAAHGKGVFSKVVRAKDLKASKDDPEEVAIKIIRNKETMYKAGKQEVSILEKLASVDREDKRHCVRFISSFMYRNHLCLVFESLNMNLREVLKKFGRNIGLKLTAVRAYSKQLFIALKHLKNCKVLHCDIKPDNMLVNEAKNVLKLCDFGNAMLAGMNEVTPYLVSRFYRAPEIILGLAYDHPLDMWSVGCCLYELYTGKVLFPGPSNNAMLRLHMELKGPFPKKMLRKGAFTMQHFDQDLNFHATEEDPVTKTAVRRLILNIKPKDVGFLILNSPGEDPKMLSSFKDLLDKMFILDPEKRITVSQALSHPFITGK

SEQ ID NO: 49057 - protein, 329 aa, Zea Mays
MRAGAAARGDSPRAMSAAATPRHRLGVALLLLLVLGGADAKAHSYEDALRKSLLYFEAQRSGRLPHSQRVTWRHHSGLTDGLEQGVDLVGGYYDAGDHVKFGLPMAFTVTMLSWSLIEYGADVAAAGELGHALEAVKWGTDYFVKAHTRPDELWAEVGDGDTDHYCWQRPEDMTTSRQAYKVDRDHPGSDVAGETAAAMAAASIVFRDSNPHYAHLLLHHAQQVRSTRYSSHGTVFVAIWFVQVYYSGKKNMGWKCAGLVVAAVRVRYGVPNFGLLRSSTCLSAGCCVCCCSQARRACRRVLPFTCVVSGRPLSFLRGTCQVVSTTFFR

SEQ ID NO: 49058 - protein, 709 aa, Zea Mays
MPRDQMVTNGFGAKRDNAGAKKSPQQIQRLEKFYSDVQYPKPEEMGEYATCVGLTYSQVRIWFKERRRKERRMEMGAIGSQMERQFSARSSGPRCSSSSSFCNQAPIYDISRSESDTWGMSTAGEESKILSQVLFPKDYILSKIFRKDGPPLGSEFDPLPQSAHGCIRDTTCHHSSENQRTVKKRKIIESTNQRSDVYENTAPVRKHGIGKGLMTVWHAMYSHNVKCQSGRNFIDETGCLRSLRPFDDFDGLEDRDNGRKTQNQGMTRKKIVKRSKVLVNRKKVPCKRVTGPKVHPPMACHLSVDESESLELQTELVTLVDDEELELSELQTGPNPLRCSAHLSSSGRHDCPLCKDLLAKFPPQSLKMKKLFSTKPWESSPEMVKKLFQIIRYVYTHFGSIDVHPFIFDEFVQAFHDKDSSLLGEVHVGLLKLLLLKAEIGSDGVFVPRSSKDCRFLSFLNFVREQEFDANVWIRSLNALTWVEILRQVLVASGFGPKQHLLNQEFFNKEKNQMAKYGLRPRTLKGELFALLSKAGSCGLKVSVLAKSSEIIDLNVSSPLELEQLISLALSSDITLFEKIAPSAYRLRVDPQIKGEEDSMSDSDDSGSVDEDEDASRSDDGSDGSQKLKFLENESRLARRKEKNAHGSPNKCSEIDESYSGEKWLLALMEGEYSDLSIDEKLDCLVALIDVVSGAGSVPRLEKPVQKVE

SEQ ID NO: 49059 - protein, 1056 aa, Zea Mays
MPRDQMVTNGFGAKRDNAGAKKSPQQIQRLEKFYSDVQYPKPEEMGEYATCVGLTYSQVRIWFKERRRKERRMEMGAIGSQMERQFSARSSGPRCSSSSSFCNQAPIYDISRSESDTWGMSTAGEESKILSQVLFPKDYILSKIFRKDGPPLGSEFDPLPQSAHGCIRDTTCHHSSENQRTVKKRKIIESTNQRSDVYENTAPVRKHGIGKGLMTVWHAMYSHNVKCQSGRNFIDETGCLRSLRPFDDFDGLEDRDNGRKTQNQGMTRKKIVKRSKVLVNRKKVPCKRVTGPKVHPPMACHLSVDESESLELQTELVTLVDDEELELSELQTGPNPLRCSAHLSSSGRHDCPLCKDLLAKFPPQSLKMKKLFSTKPWESSPEMVKKLFQPTYIDWRINPDRLSGFGPKQHLLNQEFFNKEKNQMAKYGLRPRTLKGELFALLSKAGSCGLKVSVLAKSSEIIDLNVSSPLELEQLISLALSSDITLFEKIAPSAYRLRVDPQIKGEEDSMSDSDDSGSVDEDEDASRSDDGSDGSQKLKFLENESRLARRKEKNAHGSPNKCSEIDESYSGEKWLLALMEGEYSDLSIDEKLDCLVALIDVVSGAGSVPRLEEPQRVLHNVPRVHPPQSGGKIKKSTKNLCQYSDESLNGSGSLDCCHQGQSGRRKNQDYTTDPGRNDLPIAAHGPQVVLLGSDRRYNSYWLFLGPCREDDPGHRRVYFESSEDGHWEVIDSPQELLSLLSILDSRGTREAHLLTSMEKRQACLFEAMKKHVEGGKAARLPASSDSYCSQTSSGDGTSPKTSSVDGASSVSDIENTSVPTSLKDSNLDSSSAVVIESGRGGDEKISMWERLQAFDKWIWTSFYSILTAVKSGKKSFKESLLRCGSCHDLYWRDEKHCRICHSTFEVGFDLEEKYAVHVATCREPELSHEVPNHKFLPSQLQALKAAIHAIEASMPEAAFTGSWMKSAHKLWVKRLRRTSSLPELLQVLVDFVGAMDVDWLYKSSSARLRTNLDDIIVDFQTMPQTTSAVALWVVQLDALIAPYLDNAMARQLVNAR

SEQ ID NO: 49060 - protein, 129 aa, Zea Mays
MDDYAREMMELKTLVTRTLEKKGVLAKIRAELRASVFEAIEEEDRVMENDDGGNPALLGSCNDRAKQLHASPSECNLPKDFWKNELKDFSNKSGAEGSRSAESGPLLLDVLEEFVSSKDGRQEDDEFRI

SEQ ID NO: 49061 - protein, 146 aa, Zea Mays
MDDYAREMMELKTLVTRTLEKKGVLAKIRAELRASVFEAIEEEDRVMENDDGGNPALLGSCNDRAKQLHASPSGRLLTALVCEYLEWAQLSHTMKVYLPECNLPKDFWKNELKDFSNKSGAEGSRSAESGPLLLDVLEGYLKYEKR

SEQ ID NO: 49062 - protein, 184 aa, Zea Mays
MLQPPLLRLHPDQQPHRHGRRHLAHLRLQRRPVRHQPARLEGPEPRQLVAGVRLRRAGGVLAVAAVQPPGVAREHGAVRRRGGEHARVGVAHGHADGQRTLRRGRLRPGLLLPEPGGGGLGQQPGAARRRLPRHRRPPQLLRHPGRRQRRLGELLLLRRAGQERQVHLASSSYSSSSSRLGPLT

SEQ ID NO: 49063 - protein, 308 aa, Zea Mays
MPMKHRRLQSLNLEAETQENVEQHEDVQDPQPELTIGFPEGEAPTRNKSFKIIWQNGVVREVFRNFRTAELWDLKGGRVLVETDKNGIPNQWSESILSSYLGELAQNSSFAPLHIPRWDNKLFKGPKERIIKDVEKKFIYSSETKWSTRDWILKTVNKRWRDYKSDLKKQYFNPDKRSFDQIEKDVPDGVNENQWSFLLGIWCSEAHQKLCRTNAESGKKQRHPHTSGRKSHARLKKEMVMALSVILFPFWSHYENKMILSDCVLLHRKTRRKEASLKLIFGTSLIRRGMGTMSIKMCKHLWVRPSMN

SEQ ID NO: 49064 - protein, 179 aa, Zea Mays
MEHLEQKVKEASNTIREKDLMLSKLQILIGTADRAALEEELEEAAASIDQLETELERHLQEKLEAEIQCLLMLKASQNWQVRAEDRVALEEHRALSAGDKTRMLLKLRETESKIVMLKEQVDKLEVREKELNRTTEVLKMQSRTFRASLFGLVQLVMLCLSLKVFFARVSAPFDEAVPT

SEQ ID NO: 49065 - protein, 411 aa, Zea Mays
MDPTNIGAASYYVTGQTRWGVSNVGKFNEAPNGSYTIDSSEQFQNALDSQLFQTARMSPSSLRYYGIGLENGNYTVELQFAEFAYPESPTWQSTGRRVFDIYIQGGLKEKNFDIRKTAGGKSYVAVYKKYNATVSKNFLEIHLFWAGKGTCCIPTQGYYGPMISALSVTPNFTPTVRNGVPKKKSKAGAIVGIVIGASVLGLAALAGIFMLVQKRRRAAQQQEELYNMVGRPNIFSNAELKLATDNFSSQNILGEGGYGPVYKGKLPDERVIAVKQLSQTSHQGKSQFVTEVATISAVQHRNLVKLYGCCIDSSTPLLVYEYHENGSLDRALFGDSGTILDWPTRFEIILGIARGLTYLHEESSVRIVHRDIKASNVLLDTDLTPKISDFGLAKLFDEKKTHVSTKIAGTL

SEQ ID NO: 49066 - protein, 92 aa, Zea Mays
MMQNQGMGTPSVQQSESSGSEPYRFRTLTGLFDATEQVHHFEYSGVCMLAADEPACVEQALSQDCWKRAMEVELKLIQENQTWEIADLPRDH

SEQ ID NO: 49067 - protein, 881 aa, Zea Mays
MDHGLYAPQHGWENNSASNGYGAINEPDFRSGGSYNGRRSVDEGFPRDSYGRGAYCQDTHDRNMYAPPPSVGGIWSQPRRNHDEEYATARDHRSRPDFGVDRSKRIGSRESAEFHGEFEDRYHSSNQSRDDSYERDHEYGHYDYDSDHERGRRDSSWKRRDSCESKRERSGLSREREESPYMRHSRSRSHGRDDRSRSWSRSRSPRARSHGRNQRDGLYDDNRFDRRREYDWDDRRHGDSVAPSATVVVKGLSMKTNDDDLYQILSQWGPLRSVRVIKERNSGMSRGFAFIDFSTVEAACRMMEATGKSGLQIDGRNVFFQYSSKPTGVMGGSSPGQENLTRPTYGPRTVAALCDWICSICGCMNFARRTSCFQCNEPRAEDALPADATGSSPHFGRKGSELGPTHVLVVRGLDENADEEMLRYEFAKHAPLKDIRLVRDKFTHVSRGFAFVHFHSVEDATKALEATNGITLEKNGQVLRVAYAKSTHGPASGGSQSNSLAAAAIEAASFAQQYDAIGWAPKEYNPDDKQNSNFESQKDDGSGTAQSGFVWDEKSGYYYDSASGFYYDGTTGLYYDSNSGVWYSYDQQTQQYVPCTDQSNTKAAGETSSENMISDSICGKKVVISAPAATIKQNKKTSLPDAVQAAANAALAAEKREKEKAKEIKLASKSSLIANKKKMNNVLAMWKQRNQEGQAARIVIDDKEPPNSDDRFNHSHSGTGFSSKSKPNFEFENAMDNSVRQGIASTQMLDSDVKPRPVSNSLGTTVMGVIRGSTRGVIKSDTTFHALSDAGSTDSRTTIITRSNGLMTSPVELVTPAPYKTDVSALVSNTSSGVSGSGKRRFSEAPGQSQYRDRAAERRNLYGSSLRTDAVGLDSSKNTLS

SEQ ID NO: 49068 - protein, 948 aa, Zea Mays
MDHGLYAPQHGWENNSASNGYGAINEPDFRSGGSYNGRRSVDEGFPRDSYGRGAYCQDTHDRNMYAPPPSVGGIWSQPRRNHDEEYATARDHRSRPDFGVDRSKRIGSRESAEFHGEFEDRYHSSNQSRDDSYERDHEYGHYDYDSDHERGRRDSSWKRRDSCESKRERSGLSREREESPYMRHSRSRSHGRDDRSRSWSRSRSPRARSHGRNQRDGLYDDNRFDRRREYDWDDRRHGDSVAPSATVVVKGLSMKTNDDDLYQILSQWGPLRSVRVIKERNSGMSRGFAFIDFSTVEAACRMMEATGKSGLQIDGRNVFFQYSKPTGVMGGSSPGQENLTRPTYGPRTVAALCDWICSICGCMNFARRTSCFQCNEPRAEDALPADATGSSPHFGRKGSELGPTHVLVVRGLDENADEEMLRYEFAKHAPLKDIRLVRDKFTHVSRGFAFVHFHSVEDATKALEATNGITLEKNGQVLRVAYAKSTHGPASGGSQSNSLAAAAIEAASFAQQYDAIGWAPKEYNPDDKQNSNFESQKDDGSGTAQSGFVWDEKSGYYYDSASGFYYDGTTGLYYDSNSGVWYSYDQQTQQYVPCTDQSNTKAAGETSSENMISDSICGKKVVISAPAATIKQNKKTSLPDAVQAAANAALAAEKREKEKAKEIKLASKSSLIANKKKMNNVLAMWKQRNQEGQAARIVIDDKEPPNSDDRFNHSHSGTGFSSKSKPNFEFENAMDNSVRQGIASTQMLDSDVKPRPVSNSLGTTVMGVIRGSTRGVIKSDTTFHALSDAGSTDSRTTIITRSNGLMTSPVELVTPAPYKTDVSALVSNTSSGVSGSGKRRFSEAPGQSQYRDRAAERRNLYGSSLRTDAVGLDSTGHYPSRKGPSEIGSMPFPPGVGERSNGEIGNNENYEVITADSAIDESNVGNRILRNMGWQEGLVSSCPTYFSV

SEQ ID NO: 49069 - protein, 533 aa, Zea Mays
MAEWSNSVRPIQWRCHWLELRMRELSSQISKYDKELALIKKQNELQQAASKANGTMSESMQIHKGHGNSIMKRRKRKRHEDSVDASLYINKHQILSYYHDKQNKGVQTGDLLVDDDCGTVDGSISGGLDTTTLLDSEDYDMICEQHALQDILLTIDGLQSRVHLLQDRLSKAHSEGENLAFSGADTDVRVAGKRQRTQKHSFSNTKSRHTKPQKRKNLNILLKDDDDGQALAGGPALADGETDVHMIGASRSTEERSGECNHSRDKAITVDLLLGTGNSITNSDIGDLYNVNTDDVLIANQAAVEACQQFHEAKHLPSGSPSKDKIISAPAEMKNNSPPVEVKNTCGPVKIESLCSPVEGENTSDPALEQESFLEKSPSRQPVSPGNKQELKPKKRRKKKGSLFTKKQRKVDSRTPDAKEKTEGTPSDVAEETESPLSGATGPGTMRSCCAGKKRKSGNEPADANKTGKPSSAVKKQKTENPTAAANATKKRATEKKLESASASQKLQVEKAVLVAVNSRRSQRVRKPKVFAD

SEQ ID NO: 49070 - protein, 626 aa, Zea Mays
MDTKDEGDGGSKNQNSVVVVKSEVVCTNGGPLVVGTELVKYEGGDTTECSSSFGDTCSGFEGEADNGEPEVNSSLSAHANGVGPSKPPRRKKVMAEWSNSVRPIQWRCHWLELRMRELSSQISKYDKELALIKKQNELQQAASKANGTMSESMQIHKGHGNSIMKRRKRKRHEDSVDASLYINKHQILSYYHDKQNKGVQTGDLLVDDDCGTVDGSISGGLDTTTLLDSEDYDMICEQHALQDILLTIDGLQSRVHLLQDRLSKAHSEGENLAFSGADTDVRVAGKRQRTQKHSFSNTKSRHTKPQKRKNLNILLKDDDDGQALAGGPALADGETDVHMIGASRSTEERSGECNHSRDKAITVDLLLGTGNSITNSDIGDLYNVNTDDVLIANQAAVEACQQFHEAKHLPSGSPSKDKIISAPAEMKNNSPPVEVKNTCGPVKIESLCSPVEGENTSDPALEQESFLEKSPSRQPVSPGNKQELKPKKRRKKKGSLFTKKQRKVDSRTPDAKEKTEGTPSDVAEETESPLSGATGPGTMRSCCAGKKRKSGNEPADANKTGKPSSAVKKQKTENPTAAANATKKRATEKKLESASASQKLQVEKAVLVAVNSRRSQRVRKPKVFAD

SEQ ID NO: 49071 - protein, 274 aa, Zea Mays
MGVGSKTKPCTKFFSTAGCPFGSNCHFLHNFPGGYLAVSKMTNLGGPPVPAPPGRMPMGPGGPDGPPSPALKTRLCNKYNTAEGCKWGSKCHFAHGERELGKPLQMDNSMGAPPMGPGPNGHFMPPPMPIPDMVPHSTFGASATAKISVDASLAGAIIGKSGINTKHISRVTGAKLAIRDNEADPNHKNIELEGTFDQIKHASAMVTELIVRISGKVPPQAKNNPGRGPGSHAGGPASNFKTKLCENFNKGSCTFGDRCHFAHGESELRKPAAA

SEQ ID NO: 49072 - protein, 60 aa, Zea Mays
MSEGQWTPRWLTIEQKMLQKKWMLIRTRMNAVFVETKHNIITAFSTGQKLGELSHCSSCL

SEQ ID NO: 49073 - protein, 140 aa, Zea Mays
MQTEARVGMAAATMDGTGAAASAARRYTTQQQQQQQLQHHQPQLGTVPHLLAGGVAGAVSKTCTAPLARLTILFQVQGMHSDVATMRNTSIWREASRIVYEEGFRAFWKGNLVTIAHRLPYSSISFYAYERYKNMLVLDC

SEQ ID NO: 49074 - protein, 376 aa, Zea Mays
MIWNESAGESLLQIQLLTALRTFVSSLGFQSPLSYHMLIPILQSGINIDSPDALNLLEDSVLLWEATLSNAPSIVPQLLDLFPYLVGIMNRSFDHLEVTMKIIEDYIIFGGSEFLKSHGASLANIIDTIVGNVNDKGLLTALPIVDLLIQIFPLEAPPLISSALQKLTFISLSQDDGQNPSRTTVRASSGAILARLLVMNTNFSAQLLSEPALLASIQQAGISVNNNLLFSLVDMWIDKVDDANAIQQKEYAMALSVILTLQVPQVIDKLDDILSVCTTVIIGSREVKTDDDTSGDITSSSWIGNDGSGYSNTSSKELRKRQVKDSDPIKQTSLEMVLRENLKACAVFHGDAAFNAAIGRIHPSSFAQLQQALNTA

SEQ ID NO: 49075 - protein, 112 aa, Zea Mays
MPSMWYCFAPYDCPHSVSSALAMPSCMQMHIAPGRTPTTRTCWNRAVVDQSTPGCLAIFFAEEGKKKPPPRPRGKKRKQQPREQLEHDCWDRHEMSSRRRQALLIPMFFFSI

SEQ ID NO: 49076 - protein, 691 aa, Zea Mays
MHCRPCPSQLSLVFLLLLSLAPIISALPFPEPALPMACSGLRLSLPAAVLALLLLPSALASEPLNPEVQALIAIRQGLVDPHGVLRSWDQDSVDPCSWAMITCSPQNLVIGLGVPSQGLSGTLSGRIANLTHLEQVLLQNNNITGRLPPELGALPRLQTLDLSNNRFSGRVPNTLGRITTLRYLRLNNNSLSGPFPASLAKIPQLSFLDLSFNNLTGPVPLFPTRTFKDRDRGGGSGQVKGCWRAAADRRRDKPGRLLPCALRRVLLPLAAKAPAHGGAALLRSRHHPRAGRLRPGGRRRRWRGGGGGAAGERAPVRAAGAAGGHGRVQRQEHPGQGRVRERVPRPPRRRHHGGREAAQGPQRVGRGPVPHGGGDDQPRRAPPPAAPGRLLRRLGRAPPRLPLHAQRQRRVAAAREAGAGLGDAEADRGGRRARAAVPARAVRPQDHPPRRQGRQRAAGRAPRGRRGRPGPGQAAGPRRLARHHGGARHRGPHRARVPLHGAVVGEDGRLRLRDPAAGARHGPARAPARQGLRRPAQPEGRHAGLGPGPTLRQDRGGRDGAGGAPLHAVPAVAPAQDVRGGPDAGGRRPGREMGGHEPAGRGRGGAVPRRARLRPPQRLQRLRLLQRLPRQRQQPQQRRSAVDRHGGGDGAVRTKVASKQPLPLGGKSHSLDMIASNSKFRCSESFKKNYR

SEQ ID NO: 49077 - protein, 161 aa, Zea Mays
MMTVSTSCYMCRFLVRAPPLKSRSAVRCPSAAPPGASGATSTSKTQDPVENQKLCAYLVEKAVNRLPPGAENILGIFDLRGFRVENGDLQFLKFLMDVFYYYYPKRLGQVLFVDAPFVFQPMWQVVKPLLKSYASLVRFCDAETVRKEYFKEETVPPDFRD

SEQ ID NO: 49078 - protein, 449 aa, Zea Mays
MDAEVISAGILREALDAGAVRMRDVKTQIGISTAHLLHDSLRIKHAPSKLDVLDDEGASTLRRFILSYYDIRAVILELGMKLDMMRHLDYLPKYLQQIKSLEVMKIYAPLAHAVGAGNLSLELEDLSFRYLFPHSYDHVDQWLRSQEGDCKAIINLYKEQLLQALQADNELRRIAQDISIQGRYKSRFSTMKKLVKDGRKPEEVKDILGLRVILEPRCGGNSSDWGPRACHRTHEIIQAMWKEIPGRTKDYITHPKRNGYQSLHVAIDVSEPGKVRPLMEVQIRTKEMHRFAVGGEASHSLYKGGLTDPGEAKRLKTIMLAAAELAALRLRDLPGSDHVVGNCKNPAFCQLDKNGDGRISIEELTEVMEDLGAGGEDATELMHLLDANSDGSLSSDEFESFQRQIEVMRNLEDDDNHYRKILKEKLHTIDSAGLIHVYRKELSDKLLVG

SEQ ID NO: 49079 - protein, 202 aa, Zea Mays
MASPKSFVDSFVDKTEKRYNQNMSPAIPKDKWRKGSQWVVLIRKHAEVVVGDKNVLKVFRRHCKMVVTKSLFRRRPNARQLGFTFRRKQILKGVAQQEHDCIPDEHYVQTLFSIKGLEDELERRTLTYTSWNQSSNPKDKMTWHPMKFEYDTSSPEHINAIKRIDHVNYQMEHRTEWCQCNAVATETWSIRVLTATRMRLDS

SEQ ID NO: 49080 - protein, 244 aa, Zea Mays
MQLDVLLFCCCVPLYNFSSIYTYLMASPKSFVDSFVDKTEKRYNQNMSPAIPKDKWRKGSQWVVLIRKHAEVVVGDKNVLKVFRRHCKMVVTKSLFRRRPNARQLGFTFRRKQILKGVAQQEHDCIPDEHYVQTLFSIKGLEDELERRTLTYTSWNQSSNPKDKMTWHPMKFEYDTSSPEHINAIKRIDHVNYQMEHRTEWCQCNGTSAPCFLFARKFSYSAAMHLLEQGAIGTPKSAQLMINF

SEQ ID NO: 49081 - protein, 75 aa, Zea Mays
MAYMFVHDGLVHRRFPVGPIADVPYFRRVAASHKIHHMDKFGGVPYGLFLGPKELEEVGGLDELEKELARTRRAI

SEQ ID NO: 49082 - protein, 270 aa, Zea Mays
MAAAMTSFVAKNPLLAAAARRRAPPLAGRALPFSPLASTRAPRRTVTCFVPQDTAAPAAPVPALDEEARAAAARRVAEKEARKRSERRTYLVAAVMSSLGVTSMAVAAVYYRFSWQMEVGMEFWARWAHRALWHASLWHMHESHHRPREGPFELNDVFAIVNAAPAISLLAYGFFHRGIVPGLCFGAGLGITLFGMAYMFVHDGLVHRRFPVGPIADVPYFRRVAASHKIHHMDKFGGVPYGLFLGPKELEEVGGLDELEKELARTRRAI

SEQ ID NO: 49083 - protein, 205 aa, Zea Mays
MGSVGVGCGSPDEEQQTEGSGPLPPPAVCVTGSTGYVGSWLVRTLLRRGYRVHATARDTGKALQVLAVVEEGRDRLRVFRADMGEEGSFDAAVTGCVALFHVAASMDLHVSPAHQDNLVCIIFIFLWFKQRHLDGPTRESATGLTVDTMKELPTFRLGRRVHRAIDHPRLLLFHETSVVGHRYMPGLGKSMPRPAGRHINHTTRF

SEQ ID NO: 49084 - protein, 169 aa, Zea Mays
MVRALRLGGRAAAAARWCTCRRAAVALCVANLVAALLVARALYAPGSFAFAPKRGELKYSREQMRWVEESIRIRRAAEPVELIEAVKKLRKAFTREEKTRKGLPLELKQKVSLEILQRLHDLGEGSNTTEQQEAVEAWRVGKLKDMRSASSKNLSNFGLSSEDSTSLGV

SEQ ID NO: 49085 - protein, 262 aa, Zea Mays
MWRRILWPEFQVLWFNSVLNRSSEWGTHSIHWYFTSALPRSMIVAYPLCMVGALLDRRIVPYMFPVFLFVVLYSKLPHKELRFIIGSIPMFNVSASLTASRLYNNRKKAGWNLLFILMLGAFLVSLGYSTVTFMASYNNYPGGYALKALHEADSSVKEKMVHIDAFTAMSGVSRFCENEYPWRYSKEEEIPIEEFEKRNFTYLLNEHRSIGGYQCLFAVDGFSRVKLTPQIPPLSLVKEPKVFAHGNTRDPDILSLSWPGCP

SEQ ID NO: 49086 - protein, 338 aa, Zea Mays
MLTPSAGIPPPSLSAASSPSTSYSLLYLPRRCRRLPVPRASSSFAPKRSAPVPTTTLPPEAPSTSAAVEAPAPFSVTAPGTYRGGEDPLVSKLRTQLGVIHPLPAPPISRSVVGLFALFFFVGAAFDKLWTLRKRRRAERELKVNGSWPQVPTPSFSLFLEKDLQRKESVEWVNMVLGKLWKVYRTGIENWIVGLLQPVIDNLHKPDYVNRVEIRQFYLGEEPLSVRNVERRTSRRANDLQYQIGIRYAGGARMALALYLKFTKVPVVVPVWVRDFDIDGELWVKLRLIPTEPWVGAVSWAFVSLPKVKFELSLFRLFNLMAIPVLSMQDRSLCCHDY

SEQ ID NO: 49087 - protein, 346 aa, Zea Mays
MLTSFAWTWCLSPPAIPVLSMFLTELLTEDLPRLFVRPKKIVLDFQKGRAMGPVSGSVASDIIQNVATDLIQEGNKDFVGELSVTLVDARKLSFVLFGKTDPYVVMIIDDQVIKSKKNSQTTVIGLPGEPIWNQDFHMLVANPRKQKLTIQVKDSIGLTDITIGTGEVELGSLKDTVPTDKIVTLYGGWGLFGKREAGEVLLRLTYKAYVEDEEEEDEAVRSEIGAGYASDEDVLDYVSGMSKGTDFVGKERETFMDLLAALLVSEEFQGIVSSETGSSSREGEQAGSGPEGTDSVTVPTSAAAADTEASTVPNSSTDTALVWLAAITSVMVLVSSNLGGSGYFNP

SEQ ID NO: 49088 - protein, 172 aa, Zea Mays
MELVARVHLRLRAGILSPTKGALEARAVAAGGGLVDDPVPPDPLACGLTRCSLNPQIYDGWTKCPGNSTVPVHTHCRPALCCCRIPTVSLCFVVLAYWGSLSCCRSCAIILSMVDLSFSLYTVDSTRGLPEAEFPLLRCDVPGHKQRCRLSLLCKDEGCLCFVIEKKTLRLR

SEQ ID NO: 49089 - protein, 495 aa, Zea Mays
MRRPIARGEPKVQTLALAPPSAAAPTKMGAHRRQPSSHRRVAGALTLLAASALALLLLASRRVPPTYGVIIDAGSTGSRVHVLAYRSTAGLPQLDWARMASMKATPGLSSFAADPRGAGLSLAPLLEFARRRVPRESWGETEVRLMATAGLRLLDSAVAESILQSCREVLRGSGFQFQDEWATVISGAEEGIYAWVAANYALGTLGGDPNDTTGIIELGGASIQVTLVTGEPVPPKFSHMLKFGDVSYNLYSHSFLHLGLNVAYESLHDLLSSPGLRSMATHLISQAKYKDPCTPRGFTRIAGSAKLPVGVLEPKVEYRPFAHSAGNFSECRSAALTLLQKGNEGCTYHECRLGAAFVPELEGKFLATENFYHTSKFFGLSSKPFLSDLMVAGEKFCHGDWSKIKNKYSSFDDGQLLLFCFSSAYIIALLHDTLKMPLDHKRIDVVNQIHGVPVDWALGAFIVQTTMNRTEWRKPRLKTIYDMEKGRYIITRVSQ

SEQ ID NO: 49090 - protein, 430 aa, Zea Mays
MRECISIHIGQAGIQVGNACWELYCLEHGIQADGQMPGDKTIGGGDDAFNTFFSETGAGKHVPRAVFVDLEPTVIDEVRTGTYRQLFHPEQLISGKEDAANNFARGHYTIGKEIVDLCLDRIRKLADNCTGLQGFLVFNAVGGGTGSGLGSLLLERLSVDYGKKSKLGFTVYPSPQVSTSVVEPYNSVLSTHSLLEHTDVAVLLDNEAIYDICRRSLDIERPTYTNLNRLVSQVISSLTASLRFDGALNVDVNEFQTNLVPYPRIHFMLSSYAPVISAEKAYHEQLSVAEITNSAFEPSSMMVPKDVNAAVATIKTKRTIQFVDWCPTGFKCGINYQPPSVVPGGDLAKVQRAVCMISNSTSVVEVFSRIDHKFDLMYAKRAFVHWYVGEGMEEGEFSEAREDLAALEKDYEEVGAEFDEGEDGDEGDEY

SEQ ID NO: 49091 - protein, 340 aa, Zea Mays
MAPLRMESPAGQLLSQILHTHPHLLPAAAEQQLELLQTDREAEKNKDKESDAGDKLAPTGVDLVLYRRIAQVKEKERRRTLEEILYALVVEKFVEAGVSLVPALSRSIDSSGRVDQWAETVEGRLQRLHSPEAYEMIENHLALILGQRQSDATIAAISKLRVGQVYAASVMYGYFLKRVDQRFQLEKTMKSLPWGSEEEDGALYQVMTTDSMPSAQSSSSHPEMGSWTAAPDFNAGGPSESIKPCRLRSYVMSFDPDTLQRYATVRSKEAFGIIEKHTEALFGKAEIVVTPGGTVGSSKDEHIRISFAGLRRLVLEAVTFGSFLWDVESFVDSSYHFVTS

SEQ ID NO: 49092 - protein, 388 aa, Zea Mays
MIWCDYAAICSFCISGLGRQQLTSRTRRRSSVVRASWSPSESLPPSSSMAPLRMESPAGQLLSQILHTHPHLLPAAAEQQLELLQTDREAEKNKDKESDAGDKLAPTGVDLVLYRRIAQVKEKERRRTLEEILYALVVEKFVEAGVSLVPALSRSIDSSGRVDQWAETVEGRLQRLHSPEAYEMIENHLALILGQRQSDATIAAISKLRVGQVYAASVMYGYFLKRVDQRFQLEKTMKSLPWGSEEEDGALYQVMTTDSMPSAQSSSSHPEMGSWTAAPDFNAGGPSESIKPCRLRSYVMSFDPDTLQRYATVRSKEAFGIIEKHTEALFGKAEIVVTPGGTVGSSKDEHIRISFAGLRRLVLEAVTFGSFLWDVESFVDSSYHFVTS

SEQ ID NO: 49093 - protein, 440 aa, Zea Mays
MVATPVEYSTNEIIDGSMVNTVEGLKVYEGLLNVTEANKILSLVNETRASYRRGGLEARQKVIIAKRPMKGHGREIVQLGVPIIDGPPDDENLRETRVEAIPGLLNDLFDRLSQQEIIPFKPDYCVIDIFNEGDYSHPHQSPSWYGRPLCTLCLTDCDMVFGRYISGEKGDHRGPLKLSLATGSLLLMQGRSIDCAKRAIPATRKQRVILNFGKSVARKHIPAESAWSTPLTPPMPWGQSSRPVNGSRHPQSPKHYGYAPISGVLPAPPVGAHHVPPSDGMQPLFVAPAPISAAAIPFTPTVPLQNTSAAWIQEVTPRPAPPRFPGPGTGVFLPPGSGHPLPHQMMPASHGHGEPNSPQGSSAYLHSKVNGKETSNGNLSPKNSPRKTSCTAEEKPECNGSLNGGGGSADEKSTVGMEQQNGVQKNVGSSKVQPHGHATE

SEQ ID NO: 49094 - protein, 60 aa, Zea Mays
MVVRIRLARFGCRNRPFYRVMAADSRSPRDGKHLEVLGYYNPLPGKDGGKRMGLKFDRVK

SEQ ID NO: 49095 - protein, 233 aa, Zea Mays
MGFNRILTNGAPIGLFFGGSLFLYNRRVNRYFRRDGHTWRRKKDGRTVGEAHERLKVGNVDALSCYYAHGEQNPSFQRRCFWMLEPAYEHIVLVQYREVDVVRNYSSQLSNGLPEPLSSLGYPNAICGNQYHSSSSGASECSESHQSYSNLSSVTEVSSYSGNKEYTKNDGGLLSIPEVGHTCLQQNRTDNGNSKNKSGLNIALKKIAEQLSLGEDDDDYIFSNQAHSVGGVC

SEQ ID NO: 49096 - protein, 111 aa, Zea Mays
MLHVPTFCREPASSASGRAASGMSSDEKNQRQRDARVLMPPPRSLAPNRGRHADKRAISSSSSTSNSTSGESFKNRRVPNRPADNNSNLSSNSDVHKPRRKRRHKKKRKLA

SEQ ID NO: 49097 - protein, 100 aa, Zea Mays
MPPLQVPSYYNIPGQATPGAFVPNPANASFNATSQSPHAQFPGLYHPQQPPSIVSPHPMVHQQVPSAIGPNVGVGVAAPGPQVGAYQQRQIGHMNWRPSF

SEQ ID NO: 49098 - protein, 248 aa, Zea Mays
MIISFPVWFSFATALLFYREGSHDSLSETLSKEPTAESISDVSLVQRAAFYLSWVLCPSNDDQCEMLSNNILEISHSWARNNKKCLSYQITMNHRRKLQIPTAAKSEKFHVPINTAAALIAERWALIGAYLIFIWLDVVEDMSSLIFGCEDRCHRSVSQLRNKTAPYPAQGSRFARLAPNPDTQDHQLRIYQANGLPSSLNTLLVLVLVSSRYMVLGNEERIVYSERCTFPLLVLVETPEHKWTAVCR

SEQ ID NO: 49099 - protein, 300 aa, Zea Mays
MRKILVIYIGICIFEVSQTVERYGRHSYDMLYAVAKTIVLSPNYQCLFLLPYYKEEGEIVSRMGTIAAELINHPSYHVLPSDDSNPPRLLLWHLDPSIIRLDLSVMLKEGFELCARTSQCIGIIGTRHSSQAYAMRNIHRFGAEISLFTCLLPKPSKKLACNTNWTLILYMIISFPVWFSFATALLFYREGSHDSLSETLSKEPTAESISDVSLVQRAAFYLSWVLCPSNDDQCEMLSNNILEISHSWARNNKKCLSYQITMNHRRKLQIPTAAKSEKFHVPINTVSSLVKEFDDSCVPV

SEQ ID NO: 49100 - protein, 318 aa, Zea Mays
MCRAGAASLSIRSAMHCFRFASWERDADERRESAAAATTGRSLSARSNGSTTSTDRDVRRSASECSLKASELSSASSLGRGRQLSLSQRPPNTLRVFTFQELKSATRGFSRALMLGEGGFGCVYRGTVRSALEPRRSLDVAIKQLGRKGLQGHKEWMTEVNVLGVVDHANLVKLIGYCAEDDERGMQLLLVYEFMPNGSLADHLSSRSPRPASWAMRLRVALDTARGLKYLHEESEFKIIFRDLKPSNILLDDNWNAKLSDFGLARLGPQEGSHVSTVDASAPRTTYGASASCSLSSLQAGDLWTETGQEASRISWTG

SEQ ID NO: 49101 - protein, 686 aa, Zea Mays
MAPSLSKPLLRLSPQPPCLHCLSTPFSSLSPPKTSIARAHERPRRGLQLVCPCERAVFLSRTVAPVRGLRRWGGGGGFVGPEIPGQGEMKYVLVTGGVVSGLGKGVTASSIGVVLKACGLRITSIKIDPYLNTDAGTMSPFEHGEVFVLDDGGEVDLDLGNYERFLDIKLTRDNNITTGKIYQSVIDKERKGEYLGKTVQEWIERVAKIPVDGKEGPADVCVIELGGTIGDIESMPFIEALGQFSYRVGPGNFCLVHVSLVPVLNVVGEQKTKPTQHSVRGLRGLGLTPNILACRSTKELEENVKEKLSQFCHVPAANIITLYDVSNIWRIPLLLHEQKAHEAILKVLNLERMDSIAREPKLDEWIARATIFDTLHDTVRIAMVGKYTGLSDSYLSVLKALLHASVDCHRKLVVDWVASTDLEDSTAIEAPDSYKTAWNLLKGAGGILVPGGFGDRGVQGKILAAKYAREKNVPYLGICLGMQIAVVEYARHVMNLTDANSTEFDPNTKTPCVIFMPEGSKTHMGATMRLGSRRTFFKIADCKSSKLYGNVTYVDERHRHRYEVNPDMVPEFENAGLQFVGKDDTGRRMEIIEIPNHRYFVGAQFHPEFKSRPSKPSPLFVGLIAAASGQLDRVLQDRCTGHAVSEKHVLSNGSYTPAIHQNGHPKKLPNGLSNGTYYGNGNGVHA

SEQ ID NO: 49102 - protein, 212 aa, Zea Mays
MSGSSPATVAFRKCCQFRKSSLAKKLHPDTNKGDADAERKFQEVQRAYETLKDEQKRSLYDQVGPDQYEKTASGGGGTGFEGGFGNPFEDIFGGGGGGGGMNDFFRNIFGDRDFGGRDVKVALELSFVEAVQGCSKTVTFQTSVTCEICGGAGVPPGTTPETCLSCRDIHANRAIQDAINLHKMWWFWENCEGILQGMQRKQSCAWKEISPP

SEQ ID NO: 49103 - protein, 249 aa, Zea Mays
MDGGAGFPGTQPVSRSPEDVFRDYRARQAGLIRALTTDVEKFYVMCDPEKENLCLYGLPNETWEINLPAEEVPPELPEPALGINFARDGMDEKDWLSLVAVHSDSWLMSVAFYFGARKRLFTMINNLPSIYEVVTGTAKKEPKEKTPKSNIKTNKSGSKPSRHAEPNSRVPKMPPPKDEESEEEEGEPQEDQESALCGACGLGYDDFWICCDLCETWFHGKCVKITPAKADHIKQYKCPSCTGSKRAKV

SEQ ID NO: 49104 - protein, 455 aa, Zea Mays
MLTVPSSPLSPTNGGSVKIVQMTPITSAMTTAKWLREVISSLPEKPSSKLQQLMSSCDRDLTNAVTERVSIVLEAIFPTKSSADRGGSLGLNCANAFDTLWADARKMEASKLYYRVLEAICRAELQNSNVNNLTPLLSNERFHRCLIACSAELVLATHKTVIMMFPAVLESTGLTSFDLSKIIENFVRHEETLPRELKRHLNSLEEQILESMAWEKGSSLYNSLIVARPSVASEINRFGLLAESMPSLDDLVARQNIHIEGLPATPSKKRAAGRDDNADPRSPKRPCNESRSTVVEHNLQTPPPKQCHMVLTSLKAKCHPLQSTFASPTVSNPVGGNEKCADVTIQIFFSKILKLAAIRIRNLCERIQYMEQTERVYNVFKQILDQQTTLFFNRHIDQLILCCLYGVAKVCQLELSFREILNNYKKEAQCKPEVFLSIYIGSRNHNGQPSLSWCH

SEQ ID NO: 49105 - protein, 73 aa, Zea Mays
MRPSLCCAPLFLLLLLHLAFARPLFPLPSKTKNEEKKPIQTFRPYNIAHRGSNGEIPEETAAAYMIIRYRLLQ

SEQ ID NO: 49106 - protein, 146 aa, Zea Mays
MRPSLCCAPLFLLLLLHLAFARPLFPLPSKTKNEEKKPIQTFRPYNIAHRGSNGEIPEETAAAYMRAIEEGADFIESDILASKDGALICFHDVTLDDTTDVAKRKEFANRRRTYEVEWFNVTGWFVGIYYMLIYTGTLFTYNMLAV

SEQ ID NO: 49107 - protein, 66 aa, Zea Mays
MEDVVKFVFGVSGNVIALFLFLSPVPTFWRIIRRKSTEDFSGVPYSMTLLNCLLSACFRSLDSTMK

SEQ ID NO: 49108 - protein, 240 aa, Zea Mays
MSSLSSSSFPQAYVLEDHQEEVDGGFLGGAVQHDTPQLPLVSLVRAAVRVPEQHAGVDDQRRGRGDRGRVRGDLPGVRVQPADAAADAGPGVGGLGGVRRRGAGVDAGAARTGPEAHVRPRRHRLLHLHVRLAALHHEAGGEDQERGVHAVPAVAGRVPVRHVLVRLRPARPGPLRRDSQRVRELSGRSAAGLVRHLPRQQQRRQAAGRRRRGDGLRRQEQQEGRRRRRRQGGPPGLAWS

SEQ ID NO: 49109 - protein, 557 aa, Zea Mays
MARRRMRRGGGGGGGGGGGVVDVVRVRRLLLLSLTCCSSIWPGGRIFAAADTDPNDLNVLNTLFTSLNSPGQLTGWQANGGDPCGQSWKGITCSGSGVTKIQLPNLSLTGNLAYNMNNLGSLVELDMSQNNLGGGGQIQYNLPNMKLEKLNLAGNQFGGNLPYSISTMPNLKYLNLNHNQLQGNISDVFSNLYSLSELDLSFNSLTGDLPQSFTGLSSLKKVYLQNNQFTGNINVLANLPLETLNVANNHFTGWIPSQLKKINSLQTDGNSWSTGPAPPPPPYTAPPPPPNHWNADGSSSSSSSGGRSGIGGGGVAGIIISLLVVGSVVAFLVIKRRKRKAAMKEHFEQHQPFTSFPSNEVKDMKPVYEATTVDIESLASPASVNLKPPPKIERNKSFDDDDDFSNKLVAKKSNITPINATVYSVADLQMATDSFSFDNLVGEGTFGRVYRAQFNDGKVLAIKKLDSTVMPFQSSDDFAELVSNISKLHHPNLNELVGYCMEHGQHLLVYDFHRNGSLHDLLHLSDEYSKPLSWNTRIKIALGSARALECWTCKLYS

SEQ ID NO: 49110 - protein, 165 aa, Zea Mays
MKKAIEEERFEDAAKYRDELKILAPHSLLKCSSDATTLGIRVQVRSVYIESRSQPLKGQFFFAYRIRITNSSQRPVQLLKRHWIVTDGNGRTENIWGVGVVGEQPVIFPKTGFEYSSACPLSTPNGRMEGDFEMKHIDKAGSSTFNVAIAPFSLSILGDDNDVLL

SEQ ID NO: 49111 - protein, 822 aa, Zea Mays
MQQHENGTGPVIDSSLFSSYTPASSIGNYQGQHATQNKSFYPVNQHNGPLILNGSSDMLGTNGRANQTDLPSWNSVIELDEPGQMPHLQFPVPSDQGATTEGLGVDYLTFDEVYSDGLSLNDIGAAGTHGKSYLQFSSATGDLSATENSLPQQNDGSLEEAAIGYPFLKTQSSNLSDILKDSFKKTDSFTRWMSKELPEVEDSQIHSSSGGFWSTGEANDIIEASSHEPLDQFTVSPMLSQEQLFSIVDFAPNWTYVGSKTKILVAGNILNDSQITERCKWSCMFGEVEVPAKILADGTLICYSPQHKLGRVPFYITCSNRLACSEVREFEFRPTVSQYMDAPSPHGETNKVYFQIRLDKLLSLEPDEYQATVSNPSLEMIDLSKKISSLMASNDEWSNLLKLAVDNEPSTADHHDQFVEKLIKEKLHVWLLNKVGMGGKGPSVLDDEGQGVLHLAAALGYDWAIRPTLAAGVNINFRDVHGWTALHWAAICGRERTVVALIALGAAPGALTDPTPDFPGSTPADIASANGQKGISGFLAESSLTSHLQALNLKEANMAQISGLPGIGDVTERDSLHPPSGDSLGPVRNAAQAAARIYQVFRVQSFQRKQAAQSEDDKGGMSDERALSLLSVKPPKSGQLDPLHSAATRIQNKFRGWKGRKEFLLIRQRIVKIQAHVRGQQVRKHYRKIVWSVGIVEKVILRWRRRGAGLRGFRSTEGSVESSNGGTSSSSIQDKPSGDDYDFLQEGRKQTEERLQKALARVKSMAQYPEARDQYHRILTVVSKMQESQAMEEKMLEESAGMDFMSEFKELWDDDTPIPGYI

SEQ ID NO: 49112 - protein, 78 aa, Zea Mays
MPAFSGVLGAIPPEPPQPPPASAASKPLATRATSCLAPTAVRPPSPPPVRLLFFARLLPFSIDHLLHYTQDATVHAAC

SEQ ID NO: 49113 - protein, 532 aa, Zea Mays
MELLGLREHHARTLLIHYRWDVERIFELLDQKDRDRLFSEAGIPLQYTRNAGPTSSAEVTCNVCYDDVPPSAASEMDCGHSYCNDCWTEYFIVKINEGQSRRVRCMAPKCNAVCDEAIIRKLVTARHLYIAERFERFLLESYIEDNDTVKWCPSTPHCGNAIRVKGDIYCEVECTCGCQFCFNCSLRAHSPCSCMMWELWIKKCRDESETVNWITVNTKPCPKCHKPVEKNGGCNLVACICGQAFCWLCGGATGRDHTWSTISGHSCGRFTDDQTKKTEQARRDLYRYMHYHNRYKAHTDSLKQEAKLKNEIQGKISISENKESKIKDYSWVINGLNRLFRSRRVLSYSYPFAFYMFGDEIFKDEMTPEERELKQNLFEDQQQQLEFNVERLSGFLEKDFQLFTDDEVMDTMKHVINLSNVVDRLCKQMYQCIENDLLYPLRTPHNIAPYKSKGIDRASELNISWDPGEQSSQSTKHSQDEHRNKQASNISGKRTHELHGSSSSNKRERVDVNGGGGALFDLNVPAEVVDKI

SEQ ID NO: 49114 - protein, 83 aa, Zea Mays
MHLDALLSGVYEMIWMEDWRNAHGPGKLWHVALNFANWRPDVDHFGTRVKPPVWSARNKTDGEGKKVSGDKSQRLITVLFVFE

SEQ ID NO: 49115 - protein, 236 aa, Zea Mays
MSGEPGSSIPHRNGCVSVHGSWSFIFKNYVCMPGEMNPVPQFTTGTVEQKLAATPESRLPIAITCRGTSTPAATMSSGKRSFFAPKKKATNPFDSDSDDDKPQQRPARASSVPPPDEQRGSSSLFGAGDRGGLFSSAANHHYRNDFRDAGGLEGQSVQELEGYAAYKAEETTRRTRGCVRIAEEMRDTASKTLVTVHQQGQQIHRTHMMAVDIDQDLSRVTIAFSNFFRLRCGISL

SEQ ID NO: 49116 - protein, 1291 aa, Zea Mays
MAVAKIKAHQPSVVLVEKSVSRYAQDLFLEKNISLVLNIKRPLLERISRCTGAHIVPSIDCLSSEKLGRCDLFHVEKYVEEHGTAGEGGKKMLKNLMFFEGCPKPFGCTILLKGANGDELKKVKHVLQYGVFAAYHLALETSFLVDEGATLPELPLKSPIIVAFPDKPSSADRSISTIPIIPIPSASPPNSCLQAFGLQNDDLTFDGTKRMEQTALGVPYEQTASVQINSQNGHITGFLDMVPQSSVGPLFQQSDIHCPDGTGGVNRKMNLQGSLPGTTRNVLVNDFSHSVSTAHPTNLVSAKGDGSLAKNPEIGDKIADKPAAPLNVQISHDDESIKNNSVAKTDEIPASPAENQSILVSLSSRCVWKESLCERPHLLRIKYYGNFDRPLGRFLRDQLFDQSKLCQSCELPPEAHVYCYVHPQGSLTISVRKLSIKLPGNGENDGRIWMWHRCLRCPRVNGLPPATKRVVMSDAAWGLSFGKFLELSFSNHAAASRVASCGHSLHRDCLRFYGFGEMVACFRYASIRVHSVYLPPPKLDFTSEHQEWVEEEAKEVDDSAELLFSEVLNALHKISGGRPITGSFDGNLKILELRRNIGELEEILVAEKTDFMESLKNLLKTDMRKEQPFIDILDVNKLRRHLLFLCYLWDQRLKFIANSGGKYCDALAGLRIGSGNSDFNGKPVGAAPKLEKGSKATVLSIAKEGSLQQSSCPSHGEDEGFNQANEYNENISRNAAELSGTEDSIAKINHATSADVKDRLDNQESRTGVRRVVSDGQFPVATDIPDTLDAKWRGQNEPAPDSNLAKPPLSVEDTTVDVKSQAKAVHTFTFTVRSGDAAEELLRWIKMPYMTSNSSLNTTSSSPLRFTSLAEYIPKYVELFCDLSQKGGARLFLPTGANDIVIPVFDDEPTSVISYALVSPMYCFQLSDDSSKNRDKESSLPLPVYDSGNFNPFHLFEEFGSHYDVTSSVSGVRGSFAPDQVHLSVSFEDGGPLGKVKYNVTCYYAKKFEALRRSCCPSELDFFRSISRCKKWGAQGGKSNVFFAKSLDDRFIIKQVTKTELESFLKFGTEYFKYLSESISTGSPTCLAKILGIYQVTSKHVKGGKESKMDLLVMENLLFGRNITRLYDLKGSSRSRYNADSNGSNKVLLDQNLIEAMPTSPIFVGNKAKRLLERAVWNDTSFLAGIDVMDYSLLVGVDEEKHELVLGIIDFMRQYTWDKHLETWVKSSGILGGPKNASPTVISPMQYKKRFRKAMSAYFIVIPEQWMPAIINPSKSSSNICQEDSQNGSQE

SEQ ID NO: 49117 - protein, 224 aa, Zea Mays
MQIREGPARRQAPSAAGALRSPLSAMMLAMFATMASFYVAGRLWQDAQNRVYLIKELDRRTGQGQSAISVDDTLKVVACRQQGKRLASLEMELAAAKHEGFVGKYTPETNGTHSGKKPLVVIGIMTSFGRKNYRDAVRKSWLPTGSMLKKLEEEKGIVVRFVVGRSANRGDTFDREIDDENRSTKDFLILDDHIESDEELPKKTKSFFANAANTFDAAFYAKTL

SEQ ID NO: 49118 - protein, 268 aa, Zea Mays
MDSSLASAAAIADQRQKIEQYRHILASVLSSSPPDISQAKRFLDHMVSDEVPLVVSRQLLQTFAQDLGKLESDAQKEVAHYALTQIQPRVVSFEEQVVVIREKLAELYESEQQWSKAAQMLSGIDLDSGIRMLDDTNKLSKCVQIARLYLEDDDAVNAEAFINKASFLVTNSHQEVLNLQYKVCYARILDLKRRFLEAALRYYDISQIEQRKIGDEEIDENALEQALSAAVTCTILAGAGPQRSRVLATLYKVVQQIPINLDVYGFSG

SEQ ID NO: 49119 - protein, 439 aa, Zea Mays
MDSSLASAAAIADQRQKIEQYRHILASVLSSSPPDISQAKRFLDHMVSDEVPLVVSRQLLQTFAQDLGKLESDAQKEVAHYALTQIQPRVVSFEEQVVVIREKLAELYESEQQWSKAAQMLSGIDLDSGIRMLDDTNKLSKCVQIARLYLEDDDAVNAEAFINKASFLVTNSHQEVLNLQYKVCYARILDLKRRFLEAALRYYDISQIEQRKIGDEEIDENALEQALSAAVTCTILAGAGPQRSRVLATLYKVVQQIPINLDVYGFSGKYGLTEIIASGLSWVVSDLVQCQPDERCSKLKIYPILQKVYLERILRKPEIDAFAEELRPHQKALLPDKSTVLDRAMIEHNLLSASKLYTNISFDELGTLLGIDPRKAEKIASRMIYEDRMRGSIDQVEAVIHFDDDTEELQQWDQQIAGLCQALNDILDSMSSKGITIPV

SEQ ID NO: 49120 - protein, 205 aa, Zea Mays
MALSWSSALRLAVAAVLLVAVVVALFTLPIEKILKDFLVWIKENLGPWGPLVLALAYIPLTVLAVPASILTLGGGYLFGLPVGFVADSIGAAIGATAAFLLGRTIGRSYVLSKCKDYPKFQAVAIAIQRSGFKIVLLLRLVPLLPFNMLNYLLSVTPVGVGEYMLASWLGMMPITLALVYVGTTLKDLSDVTHGWSEISTTRRWS

SEQ ID NO: 49121 - protein, 175 aa, Zea Mays
MFILKDFLVWIKENLGPWGPLVLALAYIPLTVLAVPASILTLGGGYLFGLPVGFVADSIGAAIGATAAFLLGRTIGRSYVLSKCKDYPKFQAVAIAIQRSGFKIVLLLRLVPLLPFNMLNYLLSVTPVGVGEYMLASWLGMMPITLALVYVGTTLKDLSDVTHGWSEISTTRRWS

SEQ ID NO: 49122 - protein, 168 aa, Zea Mays
MQARVVVFPVKGRAWCFALPRASAAAPAADGALPRPTLRDLWRGISSGSRTAPEKAEAVVDFVADKMNRAWVGFGSAPEGSMKSRIHSFGLKLLSRVRPSEVLLKSVTKDVSALEIVHPASINSRLVRRRLRHIAVRYYRYQTFHSFGCYFVLILIGELYREVRGSSY

SEQ ID NO: 49123 - protein, 491 aa, Zea Mays
MDLAGPRGATDPAGSRAAPPHEELDGRGGGACSGAAAVEGSAWRLAVAGLGDPRAGVLESLGQPEAHLHTCTMDVPQLTAEGATQLGDRVSLLHQTGTLQSETPCLTLGRDSNAVSMEKLHASDCLPCGKENVGTGLQPKSDPERADNRMSVARLGLDLNTVDSPDVAEPNPFFPYKKLGQSKVSDPSECGSTTGAIEESESHRKWREMKQNGFLSSFHGNAVVPRPRGRPPKRKRDDEFKKSSSTQHVQANKSVKVAAPSGLLSGLNPGIINHVRNSKQVYSIIKAMVHSERLENENHSSQTGERGREVNERIQDQKYGGGFMKCHLLINDNNAVFHQTLPNTSQFLAQDGDSLKLQLPSAVTMSSDRTFSTSADDPASNHDYMTVLSVKAASVASQWLELLHQDIRGRLAALKRSRKRVRNALHTELPYLTATEFSSNQENESSIANTSEIGCTDKAVSEAHVARWRSLFVQMDKTLQEEGKQLARHAR

SEQ ID NO: 49124 - protein, 163 aa, Zea Mays
MAWTTAATVCWRLLHLPSARCPLSSRARCSAAQSPDAVDKEYADLNLRPLYPNRGHHMRIRQHVNPLSSSFSEPTGPPEWKEVFDDPLLPLMVDIGCGSGRFLIWHAKNSGKSQNYLGLEIRQKFKREKKDHNSFRNKELGSSSSTPPQKKGIPHPHNTEQRK

SEQ ID NO: 49125 - protein, 435 aa, Zea Mays
MAMEEEQTPPELRYLSGLGNTSFTTPRARNLRTWLYRIKPSVTHEPFYPRNPTNERLVGEFDRTTTVATPTQLRWRPADVPLHPGLDFIDGLYTVCGAGSSCLRHGYAIHMYAANKPMDGCSLCNADGDFLIVPQQGRLFITTECGRLLVSPGEIVVIPQGLRFAVDLPDGPSRGYVSEIFGAHFQLPDLGPIGANGLASPRDFLSPTAWFEQEHHPGYTIVHKYGGELFSATQDFSPFNVVAWHGNYVPYKYDLSKFCPFNTVLLDHGDPSVNTVLTAPTDKPGVALLDFVIFPPRWLVAENTFRPPYYHRNCMSEFMGLIYGIGSSHVKRCKDDAHLQAKADGFLPGGASLHSCMTPHGPDTKTYEATISRAAANEPSRLSGTLAFMFESWLIPRVCPWALDSPCRDLDYYQCWIGLKSHFSPPAAAVDDENE

SEQ ID NO: 49126 - protein, 641 aa, Zea Mays
MGPPRPASPACATAGVTVKVEIKNGIFDLTLSNPDGIVTGVRYNGVDNLMEILNKEDNRGYWDLVWNPPGQKTGIFDVIKGTEFRIVYQDENQAEVSFTRNWDPSLEGKAVPLNIDKRFIVLRGSSGFYTYGIYEHKEGWPDFGLGETRVAFKLRKDMFHYMALADDRQRIMPMPDDRLPPRGQPLAYPEAVLLVDPINPELRGEVDDKYQYSCEDQYNNVHGWMSFDPPIGFWQITPSDEFRTGGPLKQNLTSHVGPTMLAMFLSAHYAGDDLSPKFTNGEYWKKVHGPVFMYLNSSWDASDPTMLWEDAKVQMMIEKGNWPYCFALSEDFQKTEQRGCVSGRLLVRDRYIDDQDLYASGAYVGLALPGEAGSWQRECKGYQFWCRADVDGSFYIRNIVTGNYNLYAWVPGFLGDYKLDATVTIASGDDIYLGDLVYEPPRDGPTMWEIGVPDRSAAEFYVPDPNPNYVNRLYVNHPADRFRQYGLWERYAELYPDSDLVYTVGQSDYSTDWFYAQVNRKIDDNTYQPTTWQIKFDLDSVSPSSTYKFRVALASSALAELQISFNDQDRAVPHFATGLIGRDNAIARHGIHGLYWLFNIDVASAWLVQGVNTIYLKQPRSQSPFQGLMYDYLRLEGPCGC

SEQ ID NO: 49127 - protein, 250 aa, Zea Mays
MGGSADANGAGSVRVPVPPARPFLDTFRGNLKETFFPDDPFRGVVRERGAGRRTVAALRYFFPFLEWAPAYALSTFKSDLIAGITIASLAIPQGISYAKLANLPPVLGLYSSFVPPLVYALMGSSKDLAVGTVAVASLLISSMLGSEVSPTENPVLYLHLAFTATFFAGVFQASLGLLRLGFIVDLLSHATIVGFMAGAATVVCLQQLKGMLGLVHFTTSTDVVSVMESVFSQTHQLAAGFHVTGERHHV

SEQ ID NO: 49128 - protein, 208 aa, Zea Mays
MKDSQDIQSTTELQSSAQGTNEVQSQQPNPMTTDAPAGNSGSLSIASNDSKKVSREDIELVQNLIERCLQLYMNKGEVVRTLSTRARIEPGFTTLVWQKLEEENSEFFRAYYIRLKLKRQIILFNHLLQHQYNLMKYPAPPNVPLAPIQNGIHHMPVQLAIYQWGIQYFRSLSCRLPASLTWTQWPVVCPMVMWSMEYLHQVVIIRCA

SEQ ID NO: 49129 - protein, 812 aa, Zea Mays
MLALVLVAIQASSQPRCRFFLMKSPFLSVIFADSSHGTPPMDDTLTKMKVLANDPDEKDYKFDFDLRQIDDLLPDEDEFFAGITDETEPVAQTNTTEELEEFDVFGNGGGMELDIDPVESITVGFANSSIVDGARCNSINPFGVPSTVGTVAGEHPFGEHPSRTLFVRNINSNVEDSELRSLFEQYGDIRTLYTATKHRGFVMISYFDIRAARNAMRALQNKPLRRRKLDIHFSIPKENPSDKDLNQGTLVIFNLDPSVSNEEVRQIFGAYGEVKEIRETPNKKHHKFIEFYDVRAAEAALRSLNKSEIAGKRIKLEPSRPGGTRRNLMQQLGHDLDQEEPRTYRHSHVGSPIANSPPGAWAQYSSPTDSNMLQAFTRSPTGNGMSPIGIPSLISNAPKIAPIGKDSNRSKYDQVFSNGNQSVGAAFQHSHSYQDHNSEHMSSSPGTLSGPQFLWGSPKPYSEHSKSPIWHPPGIGSALSSSSRTQGQGFLYSSRQASLFGSSDQHHHHVGSAPSGAPFESHFGFLPESPETSFMKQARFGNMGNFGTGRNGGGLLLGMANRASVNPGSSLIGSLTDNSSTNFRPMLSPRLGQTFYTNPPYHGIGTFGLDSSIDRVRNRRVDSSVLQADSKRQYQLDLEKIHRGDDTRTTLMIKNIPNKYTSKMLLAAIDELHRGTYDFFYLPIDFKNKCNVGYAFVNMISPVHIISFYQAFNGKKWEKFNSEKVASLAYARIQGRSALISHFQNSSLMNEDKRCRPILFNPNGQESVHQEAFPINGICIHMLPEDDYLDNEDGKSLNEKTGESSTDMAGSL

SEQ ID NO: 49130 - protein, 260 aa, Zea Mays
MTTAARPTWAPAKGGNEQGGTRIFGPSQKYSSRDLAAHTSLKLRKDGQQTQEELQKRNLREELEERERKHYSSKDKSYAERDRRKSSSQLLLEGSKREAEDKIVPREIDADDSDVEPKSDDESDEDGDDDDTEALMAELERIKKERAEEKLRKERQQAEEEAKMKEAELMRGNPLININNPGSFSVKRRWDDDVVFKNQARGETKTPKRFINDTIRSDFHRTGRKEARSANHYSYQVFRIARSNSRLPGSSCTLFPIGSF

SEQ ID NO: 49131 - protein, 556 aa, Zea Mays
MLYNGQKALAKADKVVLSERQLGLLGLKMAGSEGGGKGEQIKRPPKTKPSTPSEPIVPIRRSSFSYTPSRPSGQSRIGSSHLSPGGERLIMALPMSPSTPLQKHVSSPSTPWSRKSSGSAKGIQTEAMLDQFLAGLDVNIDKIMDPETKTTTPPATITSFGVATPVSITTSTTPSGAARSTPLRPVRMSPGSHQKYSTPPKKGEGELPTPMSLEQAVEAFENLGVYPEIEQWRDSLRQWFSSVVMNPLVQKIKTSHTQVKQTTATVGASVTVSQVGSDLPSTTPPVALSPLGGTKDWQPTVTVDEDGILNQLHSALLHSRDAPVAQTFGSLQQPQRNPHLPAIQACIDAITEHQRLNTLMKGELIKGLLPQSSVRADYTVQRVQELAEGTCLKNYDYMGHGNDYGKSEKKWTTELPTDSHLLLYLFAAFLEHPKWMLHVDPTSYSGSQSSKNPLFLGVLPPKERFPEKYVALISGVPAIIHPGALILAVSKQNPPIFALYWDKKQQFSLQGRTALWDAILLLCHQINVGYGGVVRGIHIGSSALNLLSVIDSDSES

SEQ ID NO: 49132 - protein, 345 aa, Zea Mays
MGKGGGEEDGAAAAARAAEQARELQDAAAALLTQTRAEEEALRRRAAALQGELRRLREAAAAHADSDKVEEDLDRAACLIAEGDVASLLPSKTQGAFLKMFLGPVNLRATRKEVQLKVKEEYNSYRDRTALLFLCFPVILLFLRQWLWNGCFPVLPVQLYQAWLLFLYTSLALRENILRVNGSDIRPWWILHHYCAMLMSLVSLTWEIKGQPNCARKQRGVELFLCWAIMQGFVMMLQNRYQRQRLYTRIALGKAKRMDVVWGETAGVEGQLLLLCPLLFLLQVVVCGILLIAMAIGNFANTVDTLVTKSRFKAKMKKSKGRRDLDTCPSPTGSSSPIDSATTKA

SEQ ID NO: 49133 - protein, 377 aa, Zea Mays
MGEDAACSAFDSEKVTLEEFRNMKQSLMRNNKLVVRIAGRYFPWDAAAPIVLGMISFSEEQVFEPKGMINVERVEQSAAPGGSWSIWPFSFRRTRTITAIQPVCESIVETSVSTPKELTHFKELDRERNKSRVKRIERKVRSLTPTSDELASLDLREGRNVVTFTFSTAIVGKQQVDCHIYLWRWNTRIVISDVDGTITKSDVLGQFMPLVGVDWSQNGVAHLFSAIKENGYQLLFLSARAISQAHITRQFLFNLKQDGKALPDGPVVISPDGLFPSLYREVIRRAPHEFKISCLEAIKDLFPHDSNPFYAGFGNRDTDELSYLKGEVAVNRRVDTKSYTSLHALVHGMFPPILSSSEQEDYNAWNYWKMPLPDVDL

SEQ ID NO: 49134 - protein, 61 aa, Zea Mays
MHGFETRAAQQQSASRRTPTQHVRTPSRNPNKSTSHGATVWRRATGDWRLVPPLGPHSPAR

SEQ ID NO: 49135 - protein, 245 aa, Zea Mays
MSHELFDAQLTPLGWNQVDGLREHVKKSGLAEKIELVISSPLLRTMQTAVGVFGGEKYTDGVNAPPLMVENARHSGRPAVSSLNCPPFIAVETCREHLGVHPCDKRRSITEYRPLFPAIDFSLIENDEDVLWEPDVREPNEAVALRGMKFMDWLWTREEKEIAIVSHSGFLFHTLSMYSKECHPTISDEVSKHFANCELRSMVLVDRSMLGSYSSRFNYAGKNPTGLDVPSDIADKKQVDEAQKN

SEQ ID NO: 49136 - protein, 61 aa, Zea Mays
MYRHSYSGVLLMQSLTQYIFIRETEGYLVLFSVSFIVFADLCLDDENSATRCEVHQYYSLN

SEQ ID NO: 49137 - protein, 596 aa, Zea Mays
MKLCTPCPFSIFYGRSISLCRHRHAAAAVASKIYVFGGLSNEGIYSCMNVLDTKNMQWSVLAASGEWPCARHSHSMVSYGTNLFMFGGHDGQRALKDFYSFDTTKLRWNKENTNGGTPSPRFSHCMFIYKNYLGILGGCPITENNQEVTLLNINHRVWFCVSVPLLSQSLCVRSSSVVIKDDLVILGGGASCYAFGTKFSQPIVLDLHSVESMFKYDRNKDGTVQRRDAISVVELSRDEQNGILDHDTKLQDACSGSLTDSSPLVLQLGKTYAKLAKDIMKKFGWLDLSRKVRISHDNGHVLFPINESFCALNAEEHINRNLDDSCTFGESLVFSEKKLVGDNLSLQDALIFFSSCNGSVMKDELAISRKPSKSPQTIMKELVSSLLESKGMPSQLLQQLPARWETLGDIVILPKTCFKNPLWESVSEELWPLVAKSLGAQRLARQGKIMPNGTRDSTLELLLGDNGWVTHYENGICYSLDATKCMFSSGNRSEKLRMGQLNCRDEVVVDLFAGIGYFVLPFLVKANAKLVYACEWNPHALEALRRNVSDNRVEDRCIILEGDNRVTAPKSVADRVCLGLLPSSECSWATAVEALR

SEQ ID NO: 49138 - protein, 1056 aa, Zea Mays
MSRPNTRNKSKRPRSDESINPSAAVFKKIHSAGDISKDDICQLYMVWKPPCHGCHGNTKDSPNCFCGLIPAANGVRKTGLWQKMQEMVRGLGPNPSKDLRDSTDTPAGLTNLGATCYANSILQCLYMNIAFRSGIFSLELDVLEKHPVLDQLARLFAQLHSSKMLFIDSAPFIKTLELDNGVQQDSHEFLTLFLSLLEQSLSHSKVPGARTIVQNLFCGSVSHVTRCSSCGKESAASSKMEDFYELELNIKGLNNLEESLNEYFSEEALDGENQYFCESCQKRVDATRCIKLRSLPPVVNFQLKRYVFLPKTTTKKKISSTFSFPGQLDLGKRLSEPSSSCTYALSAILIHKGTGANSGHYVAHIKDESNGQWWEFDDETVSKLGLHPFGEKPGKASNKDDQKSQNTSTEGSVTNNNNNGHHEAAPSSTMGEMFSSTDAYMLMYKCITKDVNPTESNKIVEINNDLLPHHLLDEINELNASYTKLCVEYQSKKDSHLAYITERRQEVKSVLTEAPAGPGDDSYFWISTDWLRQWADNITPPSSIDNGAIQCEHGKVPASKVTSMKRLSSVAWQKLHSKYGGGPILNSDDFCMECLKDGAKSAVSADVYRERRASLKTLAEAALAGNCPDGPSYFISKTWLTHWLRRKNADIPSDGDNGPTSALRCCHGDFLPEHAPGAKRVSVPEILWLFLYQTVHEKKADDTVTFPSDSHPCETCSRELSDVASVEVNLRAVKLKQRQNHEKLISGKSFALHPGQKYYLVPSSWLSEWRAYITATGKNISSLPEPQTLEAVARSLICEKHSRLLQRPLDLVLKRGSIIQKASNTDGLTIIPEYDWKLFSEEWSATPGKGISAEIAFSKSSQDKLHGSSEAVPITDGNLGQSLDDTNDDLGAREPYIRTDPEVCEECIGERESCALVEKLNYQNEDIHVYFVHGKEAPKSIKEASKAVTVPDRRTSKRSRRTSSGNSISLKIVKENQMLHKGSVEIEDDFATLADKSIFPGDFLWVRDSEIYENRDIADEISEQKDDMLQAEEGFRGTLLTSTVSAQLCQDIAFSE

SEQ ID NO: 49139 - protein, 155 aa, Zea Mays
MAFIHFLSQAADVNMPYTLPFTFYNLKNLELCLNFGEMDSILFMFTLLRSCRNLQGIEIESQDIDQSFEADWEFLNALWTHDMCSDLQTVHMMCISWLPNEISFMKLMLSKATVLRTLDVDRHPADFDDPIIDMLTCKRASAQARVLFGGLEQQW

SEQ ID NO: 49140 - protein, 407 aa, Zea Mays
MEAKQAAAAVDRLSSLPAELQDEILVRLDLRDAVRTSALSRTWRDLWKSLSVLSLSFPVGTQPSVVDSILLPYIGPRVSLFDFCVNEASVGRIDDWLVALSRCRVESIHISNRLGSCDYFNLHSSIFSLGDLVSLRLEGCNIPPLPVGFAGFPALQELDLAFVNFPSNEDKQLEAIIRRSPLLHTLFMCNVCIPDGYPDSVIEAPNLRVLSFVSEYDYGCRFGELPCLEYADIDALFCPQHEHDYGFFLARFAHVQRLTIFCPAADVNMPYTLPFTFYNLKNLELCLNFGEMDSILFMFTLLRSCRNLQGIEIEDIDQSFEADWEFLNALWTHDMCSDLQTVHMMCISWLPNEISFMKLMLSKATVLRTLDVDRHPADFDDPIIDMLTCKRASAQARVLFGGLEQQW

SEQ ID NO: 49141 - protein, 752 aa, Zea Mays
MGAEDNFWTSGATGPCGPCSEIYYDFYPERGSSDVDLGDDSRFIEFYNLVFMQYNKKDDGSLEPLKQMNIDTGMGLERMARILQKVPNNYETDLIFPIIEKAASMAMVSYAKADDATKTNLKIIGDHMRAVVYLISDGVIPSNIGRGYVVRRLIRRVVRMGRLIGIRGDGHGNSEGAFLPSLAEVVISLSTEIDSDVESRRRSILGELQREEMRFVQTLERGEKLLAELLDEALLNAGNNGNKPSLSGKNVFLLYDTYGFPVEITAEIASEQGVTVDIEGFDIEMENQRKQSQAAHNVVRLSVGNETEIVKNIPDTEFLGYDSLSASAVIKGLLVNGNPVNEVSQGSEVEILLDRTPFYAESGGQVGDNGFLYVNGGEDRRQTTVIEINDVQKSLGNIFVHKGMIKQGSVEVGKEVDASVDAKLRQGAKAHHTATHLLQSALKSVVGSETSQAGSLVAFDHLRFDFNFHRPLSEEELTTIEALINQWIGNAAHVETKVMALQDAKNAGAIAMFGEKYGEQVRVVEVPGISLELCGGTHVSNTAEIRGFKIISEQGIASGIRRIEAVAGDAFVDYVCARDNYMRRLCLSLKVKAEDVNSRVETILEELRATRNVASSLRSKIAVLKAASLASRATTVEPQNVRIVVENMGDVDADGLKSAAEYLIDTLKDPAAVILGSSPGDGKVSLVAAFSPAIVEMGLQAGKFVSGIAKLCGGGGGGKPNFAQAGGRKPENLPDALEKARAEIVARVSGSS

SEQ ID NO: 49142 - protein, 164 aa, Zea Mays
MGKLWTILTHLHSLAGPLSVQFRSVMLRTENRLLLFVPFLQANGDAAVPSVRVRAGDGEPVQAGRRAVARLLDPLLLRHAHGDAPRVPHILDPHLVRAQAAVHRVARAPQLQGRRLHLRQVRARAAPEARPHRRRLRQVVVAVVQGQGQAQEQVPRLRHAQEGS

SEQ ID NO: 49143 - protein, 487 aa, Zea Mays
MPVYSIRGVNVDFPFDAYDCQITYMDRVIESLQQGKNALLESPTGTGKTLCLLCASLAWRRTFGEFLRVGRGGGGTKQLPYGSQPSASQQSEDSTSQKQQQSRYPVIIYASRTHSQLRQVIKELKATSYRPKMAVLGSREQMCIHDEVSKLHGRAQNNACHFLCKKRRCPHNNHVAEFIKNKPELGNEPFDIEDLINIGRHKGPCPYYISRELSKSVDILFAPYNYLIDPGNRRSLNGIPWDNAVLIFDEAHNLESICADAASFDLFPNNLTACIAEAHECIKLCSAKRSIENSADKQFDPENYAILKALLMALEKKIAELLIGSELGYTKAGSYIYDFLSELNITSDTSKKLIETIDCASLLLEEGNSAQTGPGVQAKAAVSRLESIRDMLDIIFRGGGQNHAKYYRFHVNESQQTHGDALKFLGKSSRTLSWWCFNPGLAMEEFLKLGVRSIILTSGTLSPLDSLAMELNLLVRVLILLIVLGGQ

SEQ ID NO: 49144 - protein, 176 aa, Zea Mays
MGSEELETALMEMVEHDNRRMLSAKVEKLETEAYELRKAFSDKQEQEQILLRMEQEQKVAEDARIAAERDAAEQKHAAHLLQEKYEAAMTALSQMEKRAVMAETMLEATKQYQVGQVKANQSFTSSSPRADHVPAKINQEPNQTAPIRRIGLLSRGLGWLDKGKQGRQNSNETSGA

SEQ ID NO: 49145 - protein, 582 aa, Zea Mays
MDAESPRDAYGFAVRPQHLQRFREYAKIYKIWQAFVGVGARRIPGYYNKLLDDRTETLDEKDLVDPVVNEQGSAPRKVTQPEKWKGQIEKDLPRTFPGHPALDEDGRNALRRLLTAYARHNPSVGYCQAMNFFAGLFLLFMPEENAFWALVGVIDDYFDGYYTEEMIESQVDQLVLEEVVRERFPKLAKHMEFLGVQVGWITGPWFLSIFINMLPWESVLRIWDVILFEGNRIMLFRTTLALLDLYGPALVTTKDAGDAITLLQSLAGSTFDSSQLVLTACMGFQSVREMGLQELRKKYRPEILTAMEERSKDRGSWKDKKGLATKLYSFKHDPSYVCSPVKSKEGLDGSKVNGETGPANLETYLSTSSILDNDLDQGVDLQDQVSWLKVELCKLLEEKRSADLRSEELETALMEMVEHDNRRMLSAKVEKLETEAYELRKAFSDKQEQEQVMLQILLRMEQEQKVAEDARIAAERDAAEQKHAAHLLQEKYEAAMTALSQMEKRAVMAETMLEATKQYQVGQVKANQSFTSSSPRADHVPAKINQEPNQTAPIRRIGLLSRGLGWLDKGKGRQNSNETSGA

SEQ ID NO: 49146 - protein, 215 aa, Zea Mays
MSRRGVLRVQDGRARPGDAGGDRLRLRQGGRLRLRLQGRALLRQRQQGGRLLLHLQQLLPEPQRHGRHLRLQRRRHAHRHRPQLRHLQVRLRPQQRRHRRWHGRWRGYRRWHGRRGRDPRERPEPTVRRHWRVRPVRGRQHGLQRRRRPARRRAARGGCPRSRRRRRRTSPPLGAVPWQLGAGGHDTRRRDPASAARQRGLWSMSGVSACAYLMK

SEQ ID NO: 49147 - protein, 855 aa, Zea Mays
MSDLASSCKDKLAYFRIKELKDILNQLGLPKQGKKQDLVDRVLAILSDEQGQHHHGWGRKNALTREAVAKVVDDTYRKMQVCAPDLPSRSHSGSDFSHFRPKEEAPDFYHVDTKVRCLCNSTLLNDNMIKCEDGKCQVWQHITCVLIPDKPTEGAGPDIPPHFYCELCRLKRADPFWVTTGNPLLPVKFMSSGVGNDGASVPQIVEKTFQLSRADRETVQRQEYDLQVWCILINDKVQFRMQWPQYAELQVNGIPVRVMTRPGSQLLGINGRDDGPLVTTCSREGINKISLSRVDARTFCFGVRIVRRRTVPQVLNLIPKEGEGESFEDALARVRRCLGGGGATDNADSDSDLEVVTESVTVNLRCPNSGSRMRIAGRFKPCVHMGCFDLETFVELNQRSRKWQCPICLKNYSLENLMIDPYFNRITSLLHNCSEDVNELDVKPDGSWRVKGDAATRDLSQWHMPDGTLCDSKEDTNPGVVSVNEFKREGTSDGHRTLKLGIKKTPNGLWQVSSKPDDKKPVVRNHIQNNTGYSIPNIVPMISSPTGSCRDGEDVSVNQEGGGIQFDISLNQEFDSFAHNFGQTYNTEDRQQEPQHNAADVIVLSDSDEENDPIVRLPAVYANTPTNGDSFPFVTDAAVSGYPEGYQEDAGVGTSGLGLLSNNTGDFEINNWQMHSYPQPEQGFQFFGTDTDVGNPFVGPHNSFSITPEDYSLDCNVGIEDPSAAHDVSICRNSNDVHGSLVDNPLALAGDDPSLQIFLPSQPSTVPLQEELSERANTPNGVHPDDWRISLTLAAGGGGNEEPTSVDGLKSQPKVPSKEAGVEPLLDAACQPFPGSSRLTFEGRHLSFCSPKHEQ

SEQ ID NO: 49148 - protein, 56 aa, Zea Mays
MEVSSDNQWIMSSREKTLDDVLDLVPLRLDQSYLMQLFLKSPCGLFLKSPCGHVIY

SEQ ID NO: 49149 - protein, 57 aa, Zea Mays
MCIYFSDISAHRTFRLSSPPSYQAAARSGDLHTTVSSLDQDASTEEIHTAHPKIRRN

SEQ ID NO: 49150 - protein, 1086 aa, Zea Mays
MAPAFSVPDAEDLPARRSDASDVAGNVWDLATLPTPPAGGGREIYIYRNTFNLVPRSIGGRARGLRSLKFFGNDVEVLPADSGDELDGLESLQVKVSAPRVSGAPLRRMQALKELELSMVPPRPSSCSILAEVARLKCLTKLTICHFSIRYLPPEIGSLKKLQELDLSFNKLKNFPNCIIELSALKFLKVTNNKLVDVPSGISSLRCLESLDLSNNRLTSLGSVKLISMLTLQYLNLQFNRLSHSYVIPSWICCDMRGNVENTMKGCKLKYTESSPNLKHHAPHKIKKGWRRRDCLQQRARQERLESSRSKLNEKYIDEMAVNMAEDECPSSLHDMENKLGIRTIDEETSVQDSLKETSSISEDLFSIVDDDLDGLTKDCGTMVQDHYDEEKPGFNMRGYNDDNSCISGEPACFSRSRVCSVEKELDDTASSVHDVGEIARDNSSVTPKFALKSKRHPDMDSNPKPSKCPRPIDERSKLSYKYSVESFCSIDDHLPDGFYDAGRDMPFMSLEEYERSLGLYAREVILLDREQDEELDTIASSAQLLLSSLTRPSSCEMEEDAGHDLLRASVLALFVSDCFGGCDRSASLGRTRRAIVSLRKEQPFVCTCSAGNLGDNNEAKQTNILSGHFDFAGLCNRSIHLIKERRNSGIVPIGSLQLGVCRHRAVLMKYLCDRADPPIPCELVRGHLDYTPHAWNIVPVKKRNGWVRMIVDACYPTNIKEETDPEYFCRYIPLSRLQIVLDDEGYTPRCSFPSVSSCKEIEVTPSSSVYHCKIGAVDAAAKIRYLDTRRVSNDEVKLFEYKLLGEVRMLGALRKHRSIVDIYGHQLSSKWVQVDGDKEYRILQSIILMEYVNGGSLKGYLTKLLKEGKKCVPIDLSVYIAREVACALLEMHKKLVIHRDIKSENVLIDLDPKRNAGAPIVKLSDFDRSVPLYSLSHTCCISQLGTHPPDVCVGTPCWMAPEVVKAMHEKHHYGLEIDIWSFGCFLLEMLTLQMPYQGLSDTEIYDLILRKKQRPRLTQELEAFWTMDEPATRLKLGITSDAHADKLRHLIDLFYQCTRGHASRRPKAVQIYNSLCSLPTCYDMR

SEQ ID NO: 49151 - protein, 312 aa, Zea Mays
MLCFSSSDSIDDLQVSSSSDTSDSFNLSSLGVIDGDEWNTTFKRVYYPHAACLDSISVIYAKEIGQVSPISVLQPLSEDCSDSENIRHEPADPYDLQLRLELGTSAPRETAAEASNFRGTSVCLTSEVQSSDEKPIQLVEDILEEFEDDEERDFSYLLDILIASGIHGTAEDQMYKVCQSLDHPAGDDVFEKLEKKYNKVVQWSRSDRKLLFDMANTILSQILAPCLNMQPWVYTTRNLAPLWGPDGLLEKVLQMLVQRREHLAPSETKPEKKGFDPKWPGLADCIDRAGRDIERMVKDDLLEELVVELLSS

SEQ ID NO: 49152 - protein, 147 aa, Zea Mays
MKALRRSSTSSSPSSSSSPTAASSPPSSSWIHIRSLLVAAASSSSSSSSSPHSDRGGIKSPWSRRKRKRALSREQWESLFSANGKLRDGGKKFLKKVRSGGIEPSIRSEVWPFLLGVYDLNSSEEERNSVKIKKSVHLARCTMSVFP

SEQ ID NO: 49153 - protein, 472 aa, Zea Mays
MSSSCIPTGLRLDLDMVKAAASPVGAHSSPLRPAHYSSPSSTLSSEASNASSSSATSVSLKRARAPRKRPNQAYNEAAALLASIHPSVFPVNKSPKTAPPRPPQLSVLAAALDASPDLLPPLPVLADSAFLLRDQDTPSPKPRSPSGAKNCPSPAPVSSAFRDFRDPPSSASLDAVGADELGEIDFDDDGFNADSILDVGDAAAGGLDGIMGSLTVDVESGTAARSDDSILSSSGIHPYLRRLMVVGLAGRFELGLGSQHGARPSLNRALKRRDDDGAWWMWPAVPVKDLTIAPPAPPAPPAPNAAVPQAAAAAAPEKKKSKKKKVVKAMAKGNEELLPNAKCKEEEADASVDDAAANGDGDSDSAPTNAPKAGLGLKLDADEVLKAWSDKGSMFAEGSGPELPTSAAEVRAKLADIDLFPENGAGGGGVREASVLRYKEKRRTRLFSKKIRYQGRFVRSPSLLRQALEEET

SEQ ID NO: 49154 - protein, 484 aa, Zea Mays
MGSAILNSIAPEEPKVVVPEYGETADIQDKEVSMEQLCSISTYDQWTPLSVSGQLPKPRYKHGAVVIQQKMYVFGGNHNGRYLGDIQVLDFKTLSWSKLEAKSQAEPSESAGAVPFSACAGHSVIQWGNKILCLAGHTREPAESLSVKEFDPQTCTWSTLRTYGRSPSSRGGQSVTLVGDTLVVFGGEGHGRSLLNDLHILDLETMTWDEFETTGTPPSPRSEHAAACFAERYLLIFGGGSHSTCFSDLHLLDTQTMEWSRPKQQGVTPESRAGHAGVTIGEYWFITGGGNSRKGVSDTLVLNLSTYEWSVLTNLEARAPPVSEGSSLVMHTINGENFLVSFGGYSGRYSNQAYALKASLKPSVPSQQINESDTNGFSPLSVAENSSRKVIFEIEELKDEKPGNRADNSKTLGQVVMVEQNEIENRLNQEHLQSLRLKQELTGLENRNAELTEELHLVQDQLSIEQTRASKFEIFNNDYRRWIP

SEQ ID NO: 49155 - protein, 289 aa, Zea Mays
MTWDEFETTGTPPSPRSEHAAACFAERYLLIFGGGSHSTCFSDLHLLDTQTMEWSRPKQQGVTPESRAGHAGVTIGEYWFITGGGNSRKGVSDTLVLNLSTYEWSVLTNLEARAPPVSEGSSLVMHTINGENFLVSFGGYSGRYSNQAYALKASLKPSVPSQQINESDTNGFSPLSVAENSSRKVIFEIEELKDEKSLRLKQELTGLENRNAELTEELHLVQDQLSIEQTRASKFENEISDIQQRLQKMDTLEKEIESLRYELDSTVSEEESSSGNELHRSRGFWRWNG

SEQ ID NO: 49156 - protein, 328 aa, Zea Mays
MMMLIDCSRCRTPLQLPHGAPCIRCAICGAITHVAPAPPVEPNRGAVQPPPGWGPPPPPVHGRKRAVVCGISYRHSRYELKGCINDVKCMRHLLMTRFNFPDDSIIMLNEEQTDPYKIPTKHNIGMAMYWLVQGCQPGDSLVFHYSGHGAQQRNYNGDEVDGFDETLCPLDFETQGMIVDDDINTALVRPLPRGVKLHAFIDACHSGTALDLPYLCRMNRSGQYVWEDHRPPSGVWKGTSGGEAISFSGCDDDQTSADTSGTTYGSILNSMRSTIRNTDDSAGVGGGAVTSLITMLLTGGSLSAGGLRQEPQLTACEPFDVYAKPFSL

SEQ ID NO: 49157 - protein, 591 aa, Zea Mays
MATEVKQTYFSWSQGESTERDGPQGVSVSQTLDHGSISFGRFELESLSWEKWSVFTNDRRNEEFGKFNGLVAQKKAYFEEYYKKIRELKASQQQNQQTELILEYSGDGSDSSQTAEEEQGADLETPTGSGAAVDVYVEEVPCETTSEHGLQCYNDQGNENFDTEFSSSNLSSSGGFLQQTDHDVRVPVRGDNSTSKLYAAPQNASSVHDGTRKTYEAARTPRRIIEKDSRLRHSPKIIPKSVKALSQSAMDYTFTSERPGSVKPNTTTSQKAKPVQRPNAASQKMSASTERSKLTGLRRPSSAGAQRPSTGERHAIARENSQLPVVVSTPRRPSTAERRPVTRDRAEKQANVTTPRRPSTSERLPIKRETAAKHNDISAVRRPSTGERRAFTRDGVLRTDVKTPSKARATVAHPMSEMTTVGNTRKAITPNAARSSKLETKSNNYRLKGPSALDSHSTRSNRMDLQVSGKQKSSSVNLPPRKIFSSTAGEPSVGTISRSKKKEGVQATVQSRASTSKRTTPLQTGNLKARGPNPPAPPPPPRRPSRTTTKPSAGASSIGGRKPKLQHHNGTDAVEESGKRFSTVARRAWWI

SEQ ID NO: 49158 - protein, 768 aa, Zea Mays
MAMEDVAGASSSSVAAAASDPTHGWQTVSYPKRHRKQAHQPPRAMAPDLALQANGKGSGVFDAVEKRSQERHRALQQQLASRAADLDDARIAPVTGGAYSDDSDSDEATAPRQVGEVKKPKKPKKPKVTVAEAAALIDAENLAAHLVEISSSYENQQDIQLMRFADYFGRAFVAVSASQFAWAKMFKESTVSKMVDIPLCHIPEAVIKTASDWISQRSYDALGDFVLWCIDSIMSELSGPSAGPKGSKKVAQQSPRAQVAIFVVLAMTLRRKPDVLVNVMPKIMGNNKYLGQEKLPIIVWFIAQASQGDLVTGMFCWAHFLFPTLCAKPSGNPLARDLVLQLLERILSVTKARSILLNGAVRKGERLVPPVSFDLFMRATFPVSGARVKATERFEVAYRTIKELALAGSPGSKTVKQASQQLLPLCAKAMQENNAELTREAVDVFIWCLTQNAESYKQWERIYPENTEASVAVLSKIVIDWKDVSPKLSSEALKATVKNLKAKNEAALESATDAGKQASIKKQTSTARLEQGSEQLLGGRPGPALGVLATVAECSVEPAAQTTKGPDSNGSSSPLPPVLPSVCFPPRPRAMAPCASPSALALSASTRVSSFPLTLRPRPRPEARVPRAPGGAQLRPATACSWPRPLLPELAPAFPRAGARSAGRPQPLFRPRAMMTTSQIASCAFTVGTVAVLPFYTLMVVAPNADITKRTVESSAPYVALGLLYAYLLYLSWTPDTLRAMFASKYWLPEEWDALCSCRASSGCSRAR

SEQ ID NO: 49159 - protein, 610 aa, Zea Mays
MAMEDVAGASSSSVAAAASDPTHGWQTVSYPKRHRKQAHQPPRAMAPDLALQANGKGSGVFDAVEKRSQERHRALQQQLASRAADLDDARIAPVTGGAYSDDSDSDEATAPRQVGEVKKPKKPKKPKVTVAEAAALIDAENLAAHLVEISSSYENQQDIQLMRFADYFGRAFVAVSASQFAWAKMFKESTVSKMVDIPLCHIPEAVIKTASDWISQRSYDALGDFVLWCIDSIMSELSGPSAGPKGSKKVAQQSPRAQVAIFVVLAMTLRRKPDVLVNVMPKIMGNNKYLGQEKLPIIVWFIAQASQGDLVTGMFCWAHFLFPTLCAKPSGNPLARDLVLQLLERILSVTKARSILLNGAVRKGERLVPPVSFDLFMRATFPVSGARVKATERFEVAYRTIKELALAGSPGSKTVKQASQQLLPLCAKAMQENNAELTREAVDVFIWCLTQNAESYKQWERIYPENTEASVAVLSKIVIDWKDVSPKLSSEALKATVKNLKAKNEAALESATDAGKQASIKKQTSTARLEQGSEQLLGGRPGPALGVLATVAECSVEPAAQTTKGPDSNGSSSPLPPVLPSVCFPPRPRAMAPCASPSALALSASTRVAG

SEQ ID NO: 49160 - protein, 641 aa, Zea Mays
MFKESTVSKMVDIPLCHIPEAVIKTASDWISQRSYDALGDFVLWCIDSIMSELSGPSAGPKGSKKVAQQSPRAQVAIFVVLAMTLRRKPDVLVNVMPKIMGNNKYLGQEKLPIIVWFIAQASQGDLVTGMFCWAHFLFPTLCAKPSGNPLARDLVLQLLERILSVTKARSILLNGAVRKGERLVPPVSFDLFMRATFPVSGARVKATERFEVAYRTIKELALAGSPGSKTVKQASQQLLPLCAKAMQENNAELTREAVDVFIWCLTQNAESYKQWERIYPENTEASVAVLSKIVIDWKDVSPKLSSEALKATVKNLKAKNEAALESATDAGKQASIKKQTSTARLEQGSEQLLGGRPGPALGVLATVAECSVEPAAQTTKGPDSNGSSSPLPPVLPSVCFPPRPRAMAPCASPSALALSASTRVSSFPLTLRPRPRPEARVPRAPGGAQLRPATACSWPRPLLPELAPAFPRAGARSAGRPQPLFRPRAMMTTSQIASCAFTVGTVAVLPFYTLMVVAPNADITKRTVESSAPYVALGLLYAYLLYLSWTPDTLRAMFASKYWLPELPGIVRMFASEMTVASAWIHLLAVDLFAARQVYHDGLKNNIETRHSVSLCLLFCPVGILAHVVTKVLAGAAGRSH

SEQ ID NO: 49161 - protein, 863 aa, Zea Mays
MRPGSTPGPSSRRCIHGSAAALPTLLLLLLLLLAASSAQAQQTSRMKTDPVEAAAVNAVFAKLGQAATSAWNISGDPCTGAATDGTNIDNDPTFNPAIKCECSVQNNRTVCHVTKLKIYALNAFGPIPQELQNLTRLTNLNLAQNYLTGPLPSFLGNLTAMQYMSLGINALSGSVPKELGNLVNLVSLGIGSNYLNGSLPSELGNLAKLEQLYIDSAGLSGPLPSSFSRLTRMKTLWASDNDFTGEIPDYIGSWTNLTELRFQGNSFQGPLPATLSNLVQLTSLRIGDIVNGSSSMIFISNMTSLNTLILRNCRISDSLASVNFSQFAKLNLLDLSFNNITGQVPEALVKLNSLSFLFLGNNSLSGSLPSSIGTSLKNLDFSYNQLSGNFPSWTTQNNLQLNLVANNFETNSVLPSGLSCLQRDTPCFLGSPQSASLAVDCGSSRSISGYQPDAASLGAASYYVTGAQTWGVSNVGKFMEASNGSYIIYSLHQFQNTLDSELFQTARMSPSSLRYYGIGLENGNYTVTLQFAEFDFEDSQTWKSVGRRVFDIYLQGERKEKNFDIRKASGGKSYTAVEKQYIVPVTRNFLEIHLFWAGKGTCCIPAQGYYGPAISALSATPNFTPTVRNSAQKKNSSKTGVIVGVVIGAAVLGVLALAGICMWRQKRRKLLLEQQELYSIVGRPNVFVYGELRTATENFSSNNLLGEGGYGSVYKGKLADGRVVAVKQLSETSHQGKQQFAAEIETISRVQHRNLVKLYGCCLEGNKPLLVYEYLENGSLDKALFGNGKLNLDWPTRFEICLGIARGLAYLHEESSIRVVHRDIKASNVLLDANLNPKISDFGLAKLYDDKKTHVSTKVAGTL

SEQ ID NO: 49162 - protein, 221 aa, Zea Mays
MARRQLCRTKRTNRPRRPSGTPHPRIFSAFCQRHASPAVLSSPTPTPTPLSPTLSLHGGAPLVRHSTASTRSYTTSNQTQPRRKLAVATYPVRSPLLPHAQPAASSFLRPPASFAEHKGLAPVSHGGIGIGMAGRMVRSCVQTALKAANSVVGLAGMAVILYALWMLRAWYREIAGLGQRPPAPWFIYTFLGLGIFLCILTCSGHIAAETANGHCLYCVSF

SEQ ID NO: 49163 - protein, 135 aa, Zea Mays
MYKIIRPAIGEALREMPSSELKSKYRKVSSIDKVSKGWQEEYDASSKQCMHGSKCKIGSYCTVGRRLQELNILGGLILPVWGTIEKALAKQERLIHKRIRVVRLVTTNDSQRIVGLLIPNSAVESVLTGLQWVGH

SEQ ID NO: 49164 - protein, 474 aa, Zea Mays
MKAQKADKSKSKRRWPFGKSKHSEPSISTVPGTAPAVAPLPSPPATQPHSLEIKDVNPVETDSEQNKHAYSVALASAVAAEAAAVAAQAAAEVVRLTAVTTAAPKMPVSSREELAATKIQTAFRGYLARRALRALRGLVRLKSLVDGNAVKRQTAHTLQCTQAMTRVQTQIYSRRVKLEEEKQALQRQLQLKHQRELEKMKIDEDWDHSHQSKEQIEANLMMKQEAALRRERALAYAFSHQWRNSGRTITPTFTEPGNPNWGWSWMERWMTARPWESRLAAASDKDPKERAVTKNASTSAVRVPVSRAISIQRPATPNKSSRPPSRQSLSTPPSKTPSASGKARPASPRNSWLYKEDDLRSITSIRSERPRRQSTGGGSVRDDTSLTSTPPLPSYMQSTESARAKSRYRSLLLTEKLEVPERAPLAHSVVKKRLSFPVVEKPSVVPTEKPRERVRRHSDPPKVDPATLKDAPAA

SEQ ID NO: 49165 - protein, 629 aa, Zea Mays
MMEVGLNPGEELDFGDNQEDDDDAGDISPASKELAAMVAAAAAAETVELDDGGAGVEAAASAAAAASSSSAAARYGDDRTPRDGMVFKSYEEVLNFYKRYALRTGFGVCVKKSSFTKAGLCRRLVLVCNKWGNGKEDACYQARPTAKTNCQATVVARLLGDDLLHLTDVNLEHNHALNPSAARFLRCYKTLPSGLSKDLVVRAARGECSVAGDIDVPIFDEWGRLKTGQADVLAINAFFTQMQAKLPNSFYVMDFYVEGHLRSVLWADSRSRAAYQYFSDAVWIDTACLRNKYHVPLVSFLGVNHHGQLVLLGCGLLSDESTESFLWLFKSWLTCMKGQPPNAIVTDECVAIKAAVREVFPKTRHRISDWHVVRSISEKIGDLPEYEAMRTNLVTVIYDSLNDNEFEARWKNWIDRFSLQDNEWITFLYENRHLWAPAFLRDTFSAGLCTVSQRESPSTFFEDAVSSETTLVTFLASYMTLLDNKYKMEQQDDFDSLNSSRLLISKYQMEEQLSRLYTLNMFMKFQDELKATMHCQVQLDGSASSFIVIDLTEAGSEMLNKKYEVVHCMATNRMECNCGLFQFHGIVCRHALSVLKWQQVYDIPPCYVLNSFFVSSRLGWYPTRSIGMQ

SEQ ID NO: 49166 - protein, 152 aa, Zea Mays
MKSVKQTPAYKNRLKALEYERTGGIASKKKGIKQVDKKVEEELSNEVELQIHGVEKPSVWRLFGVQFILWPYSVGKALTWKICWFWRYRVKKLPYTWEDACYLTWISLQIPANAWKNMDESRKEDLVRRHLWEKSNMERYTSGTRKEPKRRR

SEQ ID NO: 49167 - protein, 194 aa, Zea Mays
MDRIVGGKFKLGRKIGCGSFGEIYLATHVDTYEIVAVKIESSKTKHPQLFYEAKLYNTLQGGSGIANVKWCGVDGEENVLVIDLLGPSLEDLFCYCGRKFTLKTVLMLADQMITRIEFMHSKGYLHRDIKPDNFLMGLGRKANQVYIIDFGLAKRYRDSTTNRHIPYRENKSLTGTARYASCNTHLGIASLGRD

SEQ ID NO: 49168 - protein, 245 aa, Zea Mays
MDALECGELASLRRDFGVPVFDIGPLHMLSPAASSSLLLQDRGCLEWLDAQAPASVLYVSFGSLASMSAAELVETAWGIANSGYTFLWVLRPGLVRGSQTSEAAPPLPDGFDAATRGRGMVVSWAPQEEVLAHPAVGAFWTHCGWNSTLESLCAGVPVIARPCFGDQMGNARYVDHVWRTGLTLDGVLERGEVEAAVAALMAPGEPGDGLRRRARELESSAADCMTKDGSSCTNVDKLVDHILTL

SEQ ID NO: 49169 - protein, 735 aa, Zea Mays
MPYSGTKREFVATIMSDPLFRTNVAKLLTPESDLGYMVTHISLNTDGSSLLLVGSHNLNIMYVHERISEDGDTIICRTAPIASQILPSDSDGIKVLQASWHPFSNNHFAVLTSDAVFRLFDLSSDLEQPEQGFYLQPIVPGKCQNASAICPVGFSYGSDHLWDRFSVFILFSDGSIFVLCPVVPFGSDYSKKHIQEIYEDVNAFGLKSSNPNVVTNSHLAIAWLEATFPDLLHQSTDTSFLMSKAHAYAPLDDSLTLQGPLCTVCEESNESESKSSSCEGKAVGFMYSSAGKDSVLVTAWGSGLLQVDALADEIQPRWNIGVPSRLNVDSHGQINNVAMICDSNSQDPLALRSHRPSSTGSNVKSNIEAVWMGHSPPLLRLAIVDLALPKTPNDNSLSLFADPLVPERFYCAHGGGLDMVTLHFLPFSYPEMSSTPPSVHPVLTTGNSETSSPFLSGFVTIADAYGHVQLAGITCLGECFVVEMKGWKEPAPLQLDLESKIVKDVEPPATGMISKELIAGPDPPILPSSSSLKSLTPDSIEGKSTLHHYIKVFHEYYVEYGHKVFIELKEHADYLKTEMEDKQKRLEAVKKSLISVEAKDGDINKRIDRAFKVYELLEKRIDSFKMLPAANKKPLTQAEQEFKSQLDRFADVELDALRSSIAALSARMKRFAQQSTGSAASTGMVPWQAQRAGRSHISESQMSLLKSSLEKLSLLNEENSLKLRLIDHELKNQER

SEQ ID NO: 49170 - protein, 431 aa, Zea Mays
MNYKVIRLQEEFFLPGEVILEQGSAVDQLYFVCHGALEGVGIGEDGQEETLLMLEPESSFGEISILCNIPQPYTVRVCELCRLLRLDKQSFTNILEIYFVDGRRILSNLSESEYGGRVKQLESDITFHIGKQEAELTLRVNSAAFYGDLHQLKSLIRAGADPKNTDYDGRSPLHLAASRGYEDVVQFLINEGVDIDLTDQFGNTPLLEAVKQGHERVAALLFAKGAKLSLKNAGSHLCTAVAKGDSDFIRRALAYGADPNCRDYDHRTPLHIAAAEGLYLIAKMLVEAGASVFTTDRWGTTPLDEARKCGGRTLGALLEEARASELSMFPERGEEVRDKVHPRRCSVFPYHPWRASAGEERRAEGVVLWIPHTIESLVASAQEKLGLPGPAASRLRLLCEDGARVLDVDMVNDGQKLYLVGGEDGDQEGGQ

SEQ ID NO: 49171 - protein, 565 aa, Zea Mays
MKPLDDDQSLQLFYSRVKHINGYNAEECKAISHGIVSNCGNLSPLAIINIAGMLAGWADFNMNDWEYVSKCCTSTANLTTEEATERFLNLMYNKLPAKLKTCLLYLSMYPEGCVIGKDDLVRQWAAEGIFSQVVEPKGREHEVGFIYFDELLKRGLIQPVDTDYNDQVLSCIVHQVVLEFITKKSMQENFITVVDYRETGTVLDDNKVHRLSARFEGAKSAQIPRSFRVRQVRSFMFSGFIKSLPSLLKYCLVRVLILHVWSDDQGKTVVLDLSPVGNMLHVRYLKVVSNMIVKLPLIIRGLRHLETLEVDAEEVAVPLDVFILKSLLHLRLPSKAYQPDSDIQRIDLTNTFPLRFLPFVRALSMLGRFLLSHGHRIRHLTSLQSLGYFDLSTCSRYTVWQLGKLTNLRDLHLTCSAVRSRHRISNIQCLASVLGKCTSLESLTIRGEASSNQSISFDGLSSLSSPPYNLVSFVLSPRIFKMAKLPKWIGQLSRLSTLKIAVGELSSEDVDILKGLSALTALSLYVRRNPKKGSWILFTVQAGRCRNLVPVRPSSYLCQNRSCRY

SEQ ID NO: 49172 - protein, 1145 aa, Zea Mays
MAEVKVMRARADGPEAVKGECWVLTDGSEQPGDQPQWLMRLGHALVQGCGGVDRVVGVVEDWRDTRLIVEDVHEVRCSRQVCYGGGGHETMELGASVSMSILEKLVQSCSFPDSWRGPPDAEVQALIGYLEELRSSVLDLSKEDEDEDDSATSSSTLKMSLTSQLQELCYDAEDYLEMAQHSRGGCSWQISWVRSKATRQRPALISAKDLSGLISRVNPAKEIAQAYIKSASSRTTTKENGPRPQEEPAKSSSRRAVYSDDTLQPDSHDEQLVRLLALESDQQLKTVAILGLPGVGKTTLARRLYHCYEGRFHCGAFLRASRNLQDTTRLLATMLSKIKGQQGCRYWGGSGDEQDLIDSIRQHLQGKSYFIVIDDLWATSVWDFLSRAFPKDNCGSRIVITTQVTEVAFACCNNHTVDIFNMKPLDDDQSLQLFYSRVKHINGYNAEECKAISHGIVSNCGNLSPLAIINIAGMLAGWADFNMNDWEYVSKCCTSTANLTTEEATERFLNLMYNKLPAKLKTCLLYLSMYPEGCVIGKDDLVRQWAAEGIFSQVVEPKGREHEVGFIYFDELLKRGLIQPVDTDYNDQVLSCIVHQVVLEFITKKSMQENFITVVDYRETGTVLDDNKVHRLSARFEGAKSAQIPRSFRVRQVRSFMFSGFIKSLPSLLKYCLVRVLILHVWSDDQGKTVVLDLSPVGNMLHVRYLKVVSNMIVKLPLIIRGLRHLETLEVDAEEVAVPLDVFILKSLLHLRLPSKAYQPDSDIQRIDLTNTFPLRFLPFVRALSMLGRFLLSHGHRIRHLTSLQSLGYFDLSTCSRYTVWQLGKLTNLRDLHLTCSAVRSRHRISNIQCLASVLGKCTSLESLTIRGEASSNQSISFDGLSSLSSPPYNLVSFVLSPRIFKMAKLPKWIGQLSRLSTLKIAVGELSSEDVDILKGLSALTALSLYVRRNPKKGSWILFSKGFAVLKYFKFTCTALCVKFSEQAMPAVQRLIVCFNANTMQQYRPEDAGIWYLSGLQVISARIGAAGIDQASREAAKSRLLDAILSNHPKPPPIRNVQMVDWVIHGDTEECSTGVMIRKDESSREHTRSFLSQFPFRRRPLLPSIFTRRGQDDEQHKIEENDVLQDSIILRKSSSLMQKPGTWIM

SEQ ID NO: 49173 - protein, 391 aa, Zea Mays
MLNCWPINKLRERALHNLMEHIHYEDETTKYICLCPVNKALNMICCWVENPNSNAFKQHLPRIYDYFWLAEDGMKAQVYNGCQSWETILTVYAFCSTNLIDEFGSTIERAHEYIKRSQVLKDQPNYQSYYRQRSKGSWTLSTVDSTWNSPDITAEALKVLMLLSKISPNLVGNPIEEQKLYDAVDCILYSMNEGGTFSSYECQRTASWLEIINPCENFMNIVVDYPYVECTSSVLEAFIFFKELYPSYRTKEIDKCINNAAMFIENKQRKDGSWYGTWGICFICGTFFAIKGLVATGRTYDTSSSIRQACNFLLSKQQATGGWGESYLSSEIGNYINGNTHVVNTAWAMLSLIYAGQVERDPIPLYQAARELINMQLDTGDFPQQFKGCRV

SEQ ID NO: 49174 - protein, 319 aa, Zea Mays
MRAAAAATSTAAALLAPGLKLCAGGARARVSCPSRSRLPLHRIAAMASAPNPSFRPEEARSPPALELPTPPLSKFKVALCQLSVTADKNRNIAHARAAIEKAASEGAKLVLLPEIWNGPYSNDSFPEYAEDIEAGGDAAPSFSMMSEVARILQVTLVGGSIAERSGNNLYNTCCIFGSDGKLKGKHRKIHLFDIDIPGKITFKESKTLTAGQNPTVVDTDVGRIGIGICYDIRFQELAMLYAARGAHLLCYPGAFNMTTGPLHWELLQRARATDNQLFVATCGPARDTSAGYVAWGHSTLVGPTDTMHHHKTNSVPVVV

SEQ ID NO: 49175 - protein, 119 aa, Zea Mays
MYWMEFNKWEHFVNDDCTRSFVSLEVTRTGLPEITRQILMVDEVYRLHGLPEFYTNPRPHISLVWALGDVSGKLKQALKDIEKYQSSMSSLQKCNVRCKFSRVVCKVGKKVHDICKVAD

SEQ ID NO: 49176 - protein, 225 aa, Zea Mays
MVESRRPVSPTRSTSAMAPCSQSRPPRIHSFACTGEEPRVVRLHLHGRRQGQLPRATAQAGEAGWPHRLRQHAVERLHRAPGRRAHAQVHPLLPRLRARPQHGARRRRARRDLPAPSFMWCCVSEENATSNFAAIDASLGDATGEGVAARGLATRGARAASSAVALGFSGEAEKPREEGKLMLSSADEGPGDDDAVEEPTPRTVQLRILGGIWADRIGDLGCKSL

SEQ ID NO: 49177 - protein, 225 aa, Zea Mays
MVESRRPVSPTRSTSAMAPCSQSRPPRIHSFACTGEEPRVVRLHLHGRRQGQLPRATAQAGEAGWPHRLRQHAVERLHRAPGRRAHAQVHPLLPRLRARPQHGARRRRARRDLPAPSFMWCCVSEENATSNFAAIDASLGDATGEGVAARGLATRGARAASSAVALGFSGEAEKPREEGKLMLSSADEGPGDDDAVEEPTPRTVQLRIKFCIIDILVQPMGEERL

SEQ ID NO: 49178 - protein, 389 aa, Zea Mays
MRGSADAVVVARDVVASSSPSKAASALDMTRYPRLSPDGLPLPNGSGSGASKKPAAPVSPAPRSSKDDVAPAVATDSSRIAAFLASTSLEPKPRARAPQPQPTAPNSAPTAAVAANRSPARDHGHGHCSDHSDPASPSSTGARELLLRWGQNKRMRCRRDCASASPQRRQAGGKIPRRSSSPAADNLMPPPSAAPYARGSNLRYATPRPPRSGASDAHHGRGALPNPLRSAEDCAGACAGAGEKFLAVAEAAARAQKQRAVSPHKVGLGVPDPKQQQNQWGSSGSGHQQQAGAAAGASSKPAAKLEVPRIYTTLSRKEKEEDFMAMKGTKLPQRPKRRPKIIEKTVSAICPGVWLTDATRSRYEVREKKCPKKKHRGLKGMESIDSDSD

SEQ ID NO: 49179 - protein, 147 aa, Zea Mays
MFAAAQDADKEAANAHIRVQFRALADQIYHNPDYHKHVRKAVMKQLKEFRKQYESYVPMEYKVYLKKMKRSGEWGDHLTLQAAADRFGAKICLLTSFKDTCLIEIVPRDLTPTKELWLSFWCEVHYNSLYGIDDLLTRKTKKKHWLF

SEQ ID NO: 49180 - protein, 172 aa, Zea Mays
MKQLKEFRKQYESYVPMEYKVYLKKMKRSGEWGDHLTLQAAADRFGAKICLLTSFKDTCLIEIVPRDLTPTKGKGLATLLLSYQMLGSISNFSGTSIAASILLLRQFCIQPLQDANHNSIFRFCRNHYHLIPVMVHIFAELWLSFWCEVHYNSLYGIDDLLTRKTKKKHWLF

SEQ ID NO: 49181 - protein, 222 aa, Zea Mays
MENSFAPLHIQEIPWETQPQVSSGLKLWEGSLDLVKALNSDIKEYKLRVEGKHVLELGCGHGLRGIFAGLKAGKSAPHSLRHTFVDGSISELFEYCDLVLARSWSIVNYIISCSIHRSRSKRPSDSSFCICVEWGFIRPSSLADEKRHEKGKAEFKKVVESLGHVILGWRLVPTDNSDLGESALETEPVIEQVFVTKSSRSEAEFEQQERCHFYPAAASPPN

SEQ ID NO: 49182 - protein, 176 aa, Zea Mays
MSKTLIWSQENMKVSSGLKLWEGSLDLVKALNSDIKEYKLRVEGKHVLELGCGHGLRGIFAGLKWSIVNYIISCSIHRSRSKRPSDSSFCICVEWGFIRPSSLADEKRHEKGKAEFKKVVESLGHVILGWRLVPTDNSDLGESALETEPVIEQVFVTKSSRSEAEFEQQVIPYHLR

SEQ ID NO: 49183 - protein, 620 aa, Zea Mays
MWRLKIGERPSNPLLRSPNGFLGREVWEFDPAAGTPEERAEVDRLRQEYTRNRFTRRQCSDLLMRMQYAKQNLHNTNLPAIKIDQDSDVTEETILITLRRALNQYSSLQGPAGHWPGDYGGISFILPLMMIGVYDWAGNNAIIPELWMLPHFLPIHPGRFWCFCRMVYMPMAYIYGKKFVGPITTTILEIRNELYNIPYNKINWNKACNSCAKEDLIYEPSWLQSIAMAYLNKFIEPLSNLWPMNKLRERAMSDLMEHIHYEDETSNYVGLCPINKALNMICCWIEKPNSNEFRQHLPRIHDFLWLGEDGMKSKVIKNIPDYKSYYRERTKGSWTLSNGENFWPIADTTAEALKAILLLSNIPSELVGDPIKQERLYDAVDCLLSFVNKDGTLSSAECKRTTSWVEFINPSESFRNIIVDYPYPECTSSLIQALVLFRGKHPIYRRDEIDKIIKSGASFIEKVQRKDGSWYGSWAVCFTYATFFAIKGLVAAGRTYRNSLAIRKACNFLLSKQLGTGGWGENYLGCQIEEYVDSGSPHGVNTAQAMLALLYAGQVEQDPAPLYRAAKELINMQMENGEFPQQEIVGNFNSSLFFNYPNYRNLFPIWALGEFRRRLVAKKG

SEQ ID NO: 49184 - protein, 723 aa, Zea Mays
MWRLKIGERPSNPLLRSPNGFLGREVWEFDPAAGTPEERAEVDRLRQEYTRNRFTRRQCSDLLMRMQYAKQNLHNTNLPAIKIDQDSDVTEETILITLRRALNQYSSLQGPAGHWPGDYGGISFILPLMIFALHVTRSMDEVLSIEHIREICRYIYNMQNEDGGWGTHTLGPSSMFGTCVNYATLRILGEVLDGENDALSKGRSWILSHGSATAAPQWAKIYLSMIGVYDWAGNNAIIPELWMLPHFLPIHPGRFWCFCRMVYMPMAYIYGKKFVGPITTTILEIRNELYNIPYNKINWNKACNSCAKEDLIYEPSWLQSIAMAYLNKFIEPLSNLWPMNKLRERAMSDLMEHIHYEDETSNYVGLCPINKALNMICCWIEKPNSNEFRQHLPRIHDFLWLGEDGMKSKVYVGCHSWETALIVQAFCSTGLTEEFCSTLQKAHQFLKNAQVIKNIPDYKSYYRERTKGSWTLSNGENFWPIADTTAEALKNKDGTLSSAECKRTTSWVEFINPSESFRNIIVDYPYPECTSSLIQALVLFRGKHPIYRRDEIDKIIKSGASFIEKVQRKDGSWYGSWAVCFTYATFFAIKGLVAAGRTYRNSLAIRKACNFLLSKQLGTGGWGENYLGCQIEEYVDSGSPHGVNTAQAMLALLYAGQVEQDPAPLYRAAKELINMQMENGEFPQQEIVGNFNSSLFFNYPNYRNLFPIWALGEFRRRLVAKKG

SEQ ID NO: 49185 - protein, 501 aa, Zea Mays
MQSFLSYGCFHIFSQFILFVGPITTTILEIRNELYNIPYNKINWNKACNSCAKEDLIYEPSWLQSIAMAYLNKFIEPLSNLWPMNKLRERAMSDLMEHIHYEDETSNYVGLCPINKALNMICCWIEKPNSNEFRQHLPRIHDFLWLGEDGMKSKVYVGCHSWETALIVQAFCSTGLTEEFCSTLQKAHQFLKNAQVIKNIPDYKSYYRERTKGSWTLSNGENFWPIADTTAEALKAILLLSNIPSELVGDPIKQERLYDAVDCLLSFVNKDGTLSSAECKRTTSWVEFINPSESFRNIIVDYPYPECTSSLIQALVLFRGKHPIYRRDEIDKIIKSGASFIEKVQRKDGSWYGSWAVCFTYATFFAIKGLVAAGRTYRNSLAIRKACNFLLSKQLGTGGWGENYLGCQIEEYVDSGSPHGVNTAQAMLALLYAGQVEQDPAPLYRAAKELINMQMENGEFPQQEIVGNFNSSLFFNYPNYRNLFPIWALGEFRRRLVAKKG

SEQ ID NO: 49186 - protein, 737 aa, Zea Mays
MWRLKIGERPSNPLLRSPNGFLGREVWEFDPAAGTPEERAEVDRLRQEYTRNRFTRRQCSDLLMRMQYAKQNLHNTNLPAIKIDQDSDVTEETILITLRRALNQYSSLQGPAGHWPGDYGGISFILPLMIFALHVTRSMDEVLSIEHIREICRYIYNMQNEDGGWGTHTLGPSSMFGTCVNYATLRILGEVLDGENDALSKGRSWILSHGSATAAPQWAKIYLSMIGVYDWAGNNAIIPELWMLPHFLPIHPGRFWCFCRMVYMPMAYIYGKKFVGPITTTILEIRNELYNIPYNKINWNKACNSCAKEDLIYEPSWLQSIAMAYLNKFIEPLSNLWPMNKLRERAMSDLMEHIHYEDETSNYVGLCPINKALNMICCWIEKPNSNEFRQHLPRIHDFLWLGEDGMKSKVYVGCHSWETALIVQAFCSTGLTEEFCSTLQKAHQFLKNAQVIKNIPDYKSYYRERTKGSWTLSNGENFWPIADTTAEALKAILLLSNIPSELVGDPIKQERLYDAVDCLLSFVFINPSESFRNIIVDYPYPECTSSLIQALVLFRGKHPIYRRDEIDKIIKSGASFIEKVQRKDGSWYGSWAVCFTYATFFAIKGLVAAGRTYRNSLAIRKACNFLLSKQLGTGGWGENYLGCQIEEYVDSGSPHGVNTAQAMLALLYAGQVEQDPAPLYRAAKELINMQMENGEFPQQEIVGNFNSSLFFNYPNYRNLFPIWALGEFRRRLVAKKG

SEQ ID NO: 49187 - protein, 333 aa, Zea Mays
MAPAKRKRAAAAAAAAAAAAAKWKVGDLVLAKMKGFPAWPAMISEPEQWKMPSTKKKPLVYFYGTKQMHTFSSLALKELNHRKIKDRSTSPDSMPMKELIAVAQARRFSRLTSFPDIFLNAKYIPERATNTPPKEGSHRQLSPSNRIFRSTSGNDNVHSRSPFDIIQQKKLAGHVEANAARRSFKDFLSTLTRTKESISRATRLAIECAKFGIAGEAIDIIVEHLEKESNLYKRVDLFFLVDSITQCSRNQKGGAGDVYPSLIQAVLPRILYAAAPPGNSAWENRKQCLKVLKLWLERRTLSEYIIRHHIKEIETIMRHHLEVLAVLHARGEL

SEQ ID NO: 49188 - protein, 87 aa, Zea Mays
MPPPRAIVRATPHAPVQCPGHLDGSAQSCLVSGSTTSTSTKGRIYHKTYGCQMNISDMEIVLSIMKNEGYIEIVPHPESAYNIYQHL

SEQ ID NO: 49189 - protein, 206 aa, Zea Mays
MSSLAYPLLRLPCRCSIAPAPAPASQLPAPVCLSASASANAGGDLTAREKRAQRRERRELRATDWKEEVQDRLIHEPARRRKKPPKRSWREELNLDLLAELGPQWWLVRVSMAPGTDYVDLLTKAISRRYSEVPFKIYNPSIQVKRRLKSGAISVKSKPLHAGLVFLHCTLNKELHDFIRDTEGCYGFIGATVGSMNLVFMYHSSR

SEQ ID NO: 49190 - protein, 212 aa, Zea Mays
MAVVRLRVSPRLRSIPLLLSQPDAATVRRSFACASASQAPAPARAMAAPSSSSATPSPYTTLVGRVSCEREIKRSKFIAIAAPVPNERAAMAFLDQVKDPRATHNCWAYKLGDQFRYNDDGEPSSTAGKPIYSAIISSGIDKVMVVVIRYFGGIKLGTGGLVRAYGGVASECLKDAPTCLVKPKARVGMEVPFNLLGTVYHQVRCCPPSLFS

SEQ ID NO: 49191 - protein, 163 aa, Zea Mays
MAVVRLRVSPRLRSIPLLLSQPDAATVRRSFACASASQAPAPARAMAAPSSSSATPSPYTTLVGRVSCEREIKRSKFIAIAAPVPNERAAMAFLDQVKDPRATHNCWAYKLGDQFRYNDDGEPSSTAGKPIYSAIISSGIDKIFWRHKTGNRWTGEGLWWGCF

SEQ ID NO: 49192 - protein, 430 aa, Zea Mays
MTVTWTSGYESDEAYPFVEWGMKWSPPVRSAAGTVTFDRESVCGEPARSVGWRDPGFIHTAFLTDLWPNKEYYYKIGHMLPDGSVVWGKLSSFKAPPFPGQKSLQRVVIFGDMGKAERDGSNEYSNYQPGSLNTTDTLVKDLDNIDMVFHIGDITYANGYISQWDQFTQQVEEITSRVPYMVASGNHERDWPNSGSFFNGTDSGGECGVVAETMYYTPTENRANYWYSADYGMFRFCVADSEHDWREGTEQYEFIESCLATVDRKKQPWLVFIAHRVLGYSSGFFYGVDGSFAEPMSRQSLQKLWQKYRVDLAFYGHVHNYERTCPVYEEQCMSSEKSHYSGTMNGTIHVVVGGGGSHLSNFTAQVPPWSVYREMDYGFVKLTAFNYSSLLYEYKRSSDGQVYDSFTMHREYRDLLACVKDSCPPTSPAT

SEQ ID NO: 49193 - protein, 265 aa, Zea Mays
MDIDASASVMCQLLSPEGDPLGSALYLPQNVGPPQLQEIVNQLLHNEEKLPYAFYVGDEELSVYLGAYMRQKNANVEVTLRIVCQPQALFRIRPVNRCSATIAGHTEAVIAVSFSPDGKSLASGSGDTTVRFWDLSTQTPLFTCKGHKNWVLCIAWSPDGKHLVSGSKSGELILWDPKTGNQLGTPLMGHRKWITAVSWEPVHLQSPCRRFVSASKDGDARIWDITTRKCVISLTGHTSSVTCVKWGGDGLIYTGRIKLCLHHRF

SEQ ID NO: 49194 - protein, 589 aa, Zea Mays
MSATIDRLATPSHEGRAHSDEKRECNSDEENSEGERKPKKDSFKKRAVTTGYRFRHSLRRKSKTKNDNHIASIEDIRDVQELEIVERFRQCLLDDGLLPEHHDDYHTMLRFLKARKFNIDKAKHMWSEMLRWRKEFGADNIEEFDYTELDEVVKYYPQFYHGVDKDGRPVYIELIGKVDTNKLVQITTIDRYLKYHVKEFERCLQMRFPACSIAAKRHIDSSTTILDVKGVSLKNFTKDARELIMRLQKINNDNYPETLYQLYIINAGQGFKILWGTIKSFLDPETASKIHVLGNKYQTKLLEIIDGSELPEFLGGKCRCEEYGGCPKSDKGPWKDPEIFKRVINGEANYGRQVLAVSSINQKEVGCTEHTTVEDVSSSTALVDPIISPNLTHVDELKFQGHASSSDAPPIIGDSIPAAGKVMDACSNPRNSSTPSSSGSFSLRNIPATLGGLKTRIVAWSTFVILTLSAFLCSVLSIVTKRLSNQAITCDHYSADFHQGYMGNGTLTSVLTRLGELEEKVQALEAKPPQVPFEKEELLHTAVYRVDVLEAELISMKKALYETLIRQDELLAYIDQQQTAKFCRQKFCF

SEQ ID NO: 49195 - protein, 243 aa, Zea Mays
MIYFSIYLGYIGLIYSIGSVGSLIGVLLYQSTLKDYTFRSMLLWGQVLSSLAGMLDLVLVTRLNLKIGMPDYFFAVADNTVSQMVGRLQWLPLLVLCSKLCPPGTEGTLYALLMSLQNAGLLMSAWWGGLLLHMLNVTRLEFSNLWIAVLIRNISRFVPLMLLFLVPDCDQNSALLPAEMLHGSESTETMEKGSNEFSVLVGDDCGCISPDVTVDNEQIKMFDAEIDDVELIPLVNKSGLTIS

SEQ ID NO: 49196 - protein, 148 aa, Zea Mays
MHYVMGDCFGKGMGTEQFSEAHLLWKRSKPPNFPTRYNLTRFAITLNELTPGLKEKLPPTDSRLRPDQRCLEKGEYERANAEKLRLEQKQRQARKMQDSGWKPRWFAKDKATDTYRYLGGYWESREKSSWEGCPDIFGQDPNDLMIAD

SEQ ID NO: 49197 - protein, 412 aa, Zea Mays
MDGINPSMKSIGVSYAYVRRRNRLPDPVEKEKGVSLWSMIKDNIGKDLTKVCLPVYFNEPLSSLQKCFEDLEYSYLIDRASEWGKRGNSLMRILSIAAFAVSGYASTDGRSCKPFNPLLGETYEADYPDKGLRFFSEKVSHHPMVIACHCVGTGWRFWADSNLKSKFWGRSIQLDPVGALTLEFDDGEVFQWSKVTTSIYNLILGKLYCDHYGTMRIQGNCEYSCKLKFKEQSIIDRNPHQVQGVVQDRNGRTVATLFGKWDESMHYVMGDCFGKGMGTEQFSEAHLLWKRSKPPNFPTRYNLTRFAITLNELTPGLKEKLPPTDSRLRPDQRCLEKGEYERANAEKLRLEQKQRQARKMQDSGWKPRWFAKDKATDTYRYLGGYWESREKSSWEGCPDIFGQDPNDLMIAD

SEQ ID NO: 49198 - protein, 239 aa, Zea Mays
MASSTAIATARAHDAAVYGAAGTHSNLRSFLDSVTPVVKAHTVPMASYLPLSNGYYEKIADGVRCFYLGDLWNSFYEWSACGVGTSVCIAPGETVVQYFVPYLSAIQLYTNTRNAPVSQSMIYDGRFDRNNHYSVGMYTHGYQAPLRMPTIGVEGKGELFFKYFEPDSPYERIPFADKVYELCYSCPSLSSLSSAELSPSSWMSVFWYPTSHVPMKNRKDLNTCFLTYHSLSTCKGTHQ

SEQ ID NO: 49199 - protein, 347 aa, Zea Mays
MLHLLSSMMRRIWRMTEAAVTRYWCHGCVRVVEEAMGEEIKCPFCGGGFIEEMIGEEFDGLASQQSERDSSQWGASNNPFEQPRAEADSEDEEDDDDYDDDIGRAFESFIRRHGRPSALRRAFDSIQDDLRADRDSDFSILINAFNQALALQRSVLDADEARDDQGGSSNDDGLMEEYVLGAGLTLLLQYLTENDPSQYGTPPANKEAVDALPTVQIAEAVSCSVCLDDLELGSQAKQMPCEHKFHSPCILPWLELHSSCPVCRFELPSEETEDLDEPSNVDRTENTHEEVRADGPEDDSESSNRAWALVPWFSGLFSTPEPQTVRGAFTDQQTRSTSGTNMNAGES

SEQ ID NO: 49200 - protein, 204 aa, Zea Mays
MEFLQGQRLETTLAVAAAVVAVAAGSAYLFLRSRKPRGCLDPENFKEFKLVEKRQLSHNVAKFKFALPTPTSVLGLPIGQHISCRGQDASGEEVIKPYTPTTLDSDVGSFELVIKMYPQGRMSHHFREMKVGDYMSVKGPKGRFKYLPGQVRALGMVAGGSGITPMFQVTRAILENPKDNTKVHLIYANVTYEDILLKLDAGRT

SEQ ID NO: 49201 - protein, 323 aa, Zea Mays
MLHKPYPSLDSTSSRSTPCLDGSFSNRSRTASGSIIFQKSLKSIKKSYMPSQRKQLKFCNCPVEMAKKSYKDACFWCPQAYANDMDSSEEDELDDNLNDIFGLNDDGVTSSVSASRDQLKYNLISCKQMVGIFVTVWAKKELMQHIGHLRTSCVGRGIMGYLGNKGCISVSMTLYQTSFCFICSHLASGEKEGDELRRNLDVLEILRLTQFRRICRRAGRRIPEKILDHERVIWLGDLNYRISLSYEDTKKLLTENNWDALFEKDQLNIQRASGSVFKGWSEEKIYFAPTYKYSCNSDSYAGETATSKKKRRTPAWYVLQCLR

SEQ ID NO: 49202 - protein, 315 aa, Zea Mays
MLHKPYPSLDSTSSRSTPCLDGSFSNRSRTASGSIIFQKSLKSIKKSYMPSQRKQLKFCNCPVEMAKKSYKDACFWCPQAYANDMDSSEEDELDDNLNDIFGLNDDGVTSSVSASRDQLKYNLISCKQMVGIFVTVWAKKELMQHIGHLRTSCVGRGIMGYLGNKGCISVSMTLYQTSFCFICSHLASGEKEGDELRRNLDVLEILRLTQFRRICRRAGRRIPEKILDHERVIWLGDLNYRISLSYEDTKKLLTENNWDALFEKDQLNIQRASGSVFKGWSEEKIYFAPTYKYSCNSDSYAGETATSKKKRRTPA

SEQ ID NO: 49203 - protein, 354 aa, Zea Mays
MPRDSRPAGMRLFGVTIAPAPEADPPVRDPSPNPPVAAREDVMRKCKSMGNLAALGAVVDGGGGGADGGGAGDGYLSDGGLMQSSGKRRRAQERKKAVPWTEEEHRTFLAGLEKLGKGDWRGIAKNFVTTRTPTQVASHAQKYFLRQTNPNKKKRRSSLFDMMPRELSPAPNCPILPPSMAKVHDVVAMTKQLQNSNLEGTSSSNAASQVGRDLPPVPSFKATNMDPSFSKFSHMERVWRTPYPFGPVPRAPEGTPSPTPAAAAAAAAAAANAAVPVSQANLTTACTSNTFLSQPKPSDTPSLPPKGGPPSEEDGLELTVAPPSQQNMTNMSSQNAEILNLYTGISVHSQGCVP

SEQ ID NO: 49204 - protein, 143 aa, Zea Mays
MVFYFKARPEAGDYTIFMGLDKYENEDLIKYGFPEDIWFHVDKMSSAHVYVRLNKGQSMDDMSEGLLEDCAQLVKANSIQGNKVNNIDVVYTPWYNLKKTPSMDVGQVGFHNPKLGMARIVTMCIGRQEFAIICFSINLGSHY

SEQ ID NO: 49205 - protein, 172 aa, Zea Mays
MNPDDEAEEDGANIDLDSQRKVKCVVLKTSTRQVHWTAVWLAEPAVRMRLMAVLVDGCQGLSGGAMAGVIHGQAQHGDPMFQEFAGRLLRRVCSPLFEMVRSWVLEGELEDVFAEFFIVGQPVNYQPERSLACFRRNVGLGDLNYRINLPYEKTHELISKQDWNELFGKDQM

SEQ ID NO: 49206 - protein, 80 aa, Zea Mays
MEIYVDDEAKLTLHGLVQHYIKLSEVEKNWKLNDLLDALDFNQVVIFVKSVSRAAELNKLLCECNFPSICIHSGMTQEER

SEQ ID NO: 49207 - protein, 324 aa, Zea Mays
MPGLPLPQSLNQNIGCEYAYPGSTGQAFRQQLRTALSPDEKLTAEKDLALYCKPVELYNIIQRRAMKNPLFIQRCLLYNIHARRKKRIQITISLSGSTNTELQTHYVFPLYVLLARPTSNLSLEGHSPIYRFSRVCLLTSFSEHGNKDNSEATFIIPDVKSLSTSRACNHDIIFISCGQVGQSNGEDNCSGNHVEDSSLQMLEGKCSWGKIPTNLLASSLESCVNLSLGHIVELASKVTMRPSFLEPKFLEQDSCLTFCSHKVDAVGSYKLQLCMSAQEAGARDMSLSPYSSYSYNDVPPSSLSDIIRLVPSKFKRGRTVQEAL

SEQ ID NO: 49208 - protein, 213 aa, Zea Mays
MEKIRHVHSHIMESGSPEDEAGSEDNFVQGENGTSVANASIDPAQSLHGSNLSPPTVLQFGKTRKLSERSDPRNRQLLQKRQFFHSHRAQPMQLEQVFSDRDSEDEVDDDIADFEDRRMLDDFVDVTKDEKLIMHMWNSFVRKQRVLADGHIPWACEAFSQLHGRQLIQNPALLWGWRFFMIKLWNHNILDARTMNTCNTVLQILQEESTGLK

SEQ ID NO: 49209 - protein, 323 aa, Zea Mays
MKNPLFIQRCLLYNIHARRKKRIQITISLSGSTNTELQTHYVFPLYVLLARPTSNLSLEGHSPIYRFSRVCLLTSFSEHGNKDNSEATFIIPDVKSLSTSRACNHDIIFISCGQVGQSNGEDNCSGNHVEDSSLQMLEGKCSWGKIPTNLLASSLESCVNLSLGHIVELASKVTMRPSFLEPKFLEQDSCLTFCSHKVDAVGSYKLQLCMSAQEAGARDMSLSPYSSYSYNDVPPSSLSDIIRLRSGNVLFNYKYYNNTMQETEVTEDFSCPFCYVRCGSFKGLGCHLNSSHDLFHYEFWISEEYQVVNVSLKADAWRTEVNL

SEQ ID NO: 49210 - protein, 79 aa, Zea Mays
MISTPGSTTKSKTSSNSTTSRRRTEETPSCRFIPSSLEMEEFFSAAEQQEQHSFREKYNFCPVNDCPLPGRYEWARLDC

SEQ ID NO: 49211 - protein, 594 aa, Zea Mays
MIMEQGMWKEGMPDEEPLNVVARLMGLHDAPVQQSNFHLARQLDKEYQRGGFEENYRNLKPNKESKCHQNQKAGHTWNGSGDQPSRINSSRSKHQGNEPCCEKRMSLVREKFAEAKRLATDEKLLHSKEFQDALQFLSSNRDLFLEFLDEPNPLLSSNRYEFQPVAPPSQAKQITILKPSELAKRKGSILVGRQLFSDGDERGLNRYRRHQSLDVCPANSNLSEPTKIVLLKPGRLSKPHDSRIARSSLSSAENSEDESMTTVDETVCSRRLAKEVTWQTRMRLKDKQDEKSTLSCEYLDFYIGDDSFSKSEVEISKEMPGETSEELEFGTPTSGRSWDFLSRSGSPYSASCSSQASHRREPSVVREGKKKILERWSMVSSTVSSEEEMEGRRSTGTLGDILTIPKVKDQEGIGAETLGSPAPELEPEEPFSCLPRSRSLPLSLSCGVAESNGGVASGSTQEAERERIRKSSSFREKVSSLFSKNKKPVREKADLSVSNRLEVYGGAETTADVKKGLNRLALDNLQKQSTSRVNTDGKKNAAQGLVTSSCGTNDTANTTPAKLRCIRTTLPPFQVLAPQESLVTLRTSLVLYLC

SEQ ID NO: 49212 - protein, 356 aa, Zea Mays
MMVRSTIHEITKIEGVMEDVIRGSQASWLKQLRTLTSRSFTNMSRDLNYYWLRIIIYIVMAICLGTIYYDVGTSYTAIQARASCGGFVSGFMTFMSIGGFPSFIEEMKVFTLERQNGHYGVAAYIISNFLSSMPFLLAVSWASASITYWMVKFRPGFSYFAFFALNLYGGVSVIESLMMIISALVPNFLMGLILGAGVIGIMMLTSGFFRLLPELPKIFWRYPVSYIVYGSWGLKGGYKNDLIGLEFEPMMPGQPKLTGEYIITEMMGLSLNHSKWLDLAMIFVLLFAYRLTFFVVLKVKEAAAPYIRVAYTRFTVKRLERRASFRKTLAMASMSKRHNPPHPMAIQEGLSSPMPY

SEQ ID NO: 49213 - protein, 290 aa, Zea Mays
MRGPSGDDCIERKGVDDPCHNSNCHWHRHKQQCSGNYCRVQESSPGGPELKCLEAVEAFNEGKVEEPACTSWHTTHTSNKSRRSNKNEREDASVEFLHVAHNAVVCSGLDSSSKDRSNKKIKISKDVNSDLGRTETVQEAPKRRRTAVLDNQECSRRKKRKQSNRCGSYSVIIEWLNYYCLSESDEDEVPLINKRTERRRRQRLHEMYLARESNDVEFGSSTSHKVGSCSLAPKDNNKGESVPASQPEERSCSSHPVSSNGVAGNQAGHEHMSSPTDSPIRGEIVDISDG

SEQ ID NO: 49214 - protein, 250 aa, Zea Mays
MQDMSYPPQMLFVENVVGFEVSDTHDQLLEVLSSLNFNTQEFILSPLQFGVPYSRPRYFCLAKREPVRFRHAFVNNKLLQTPMCLSLTLSSTSQGSDHQTEEELEPVCKPIKDFLVKEADGGTPDETVLQDYMVPVNLIERWGNAMDIVYPEFKRCCCFTKSYYRYVKGTGSLLATSKNLNVPEEKLQISSLKELGLRFFTPREVANFHSFPSNFCFPDHISLRQQYAMLGNSLSIAVVGPLLHYLFAEA

SEQ ID NO: 49215 - protein, 333 aa, Zea Mays
MEAPAPWRVLEFYSGIGGLRYSLMASGVRAEVVEAFDINDVANDVYEHNFGHRPCQGNIQTLTASDLDKYKAHAWLLSPPCQPYTRQGLQKHSADARAFSFIKILNLMQDMSYPPQMLFVENVVGFEVSDTHDQLLEVLSSLNFNTQEFILSPLQFGVPYSRPRYFCLAKREPVRFRHAFVNNKLLQTPMCLSLTLSSTSQGSDHQTEEELEPVCKPIKDFLVKEADGGTPDETVLQDYMVPVNLIERWGNAMDIVYPEFKRCCCFTKSYYRYVKGTGSLLATSKNLNVPEEKLQISSLKELGLRFFTPREVANFHSFPSNFCFPDHISLRQQ

SEQ ID NO: 49216 - protein, 133 aa, Zea Mays
MGLTFTKLFRRLFAKKEMRILMVGLDAAGKTTILYKLKLGEIVTTIPTIGFNVETVEYKNISFTVWDVGGQDKIRPLWRHYFQNTQGLIFVVDSNDRERVVEARDELHRMLNEGLYEGLDWLSNNIANKVYHV

SEQ ID NO: 49217 - protein, 184 aa, Zea Mays
MGLTFTKLFRRLFAKKEMRILMVGLDAAGKTTILYKLKLGEIVTTIPTIGFNVETVEYKNISFTVWDVGGQDKIRPLWRHYFQNTQGLIFVVDSNDRERVVEARDELHRMLNEDELRDAVLLVFANKQDLPNAMNAAEITDKLGLHSLRQRHWYIQSTCATSGEGLYEGLDWLSNNIANKVYHV

SEQ ID NO: 49218 - protein, 139 aa, Zea Mays
MGLTFTKLFRRLFAKKEMRILMVGLDAAGKTTILYKLKLGEIVTTIPTIGFNVETVEYKNISFTVWDVGGQDKIRPLWRHYFQNTQGLIFVVDSNDRERVVEARDELHRMLNEDELRDAVLLVFANKQDLPNAMNAGFV

SEQ ID NO: 49219 - protein, 680 aa, Zea Mays
MVLPRRTPELLEADEAQSFVHKLQLSVSGGLPHAVPVPGLRTEEHELVKAVFQVLQGFETSWFYWDSDVPWYREKAGIYVAHLSLTGLRSLLSPFLFTATCLKQVELFVGKVRMQHHKIPTLDAFASSVDSWLKRLRKAALKEEEQQFVSVNKTITLLGLTDSLSSLRSGAEHLSQVLHGAVPDGFWDSGAHMASSEVAVHILDHLFKKLNEVCLLEDGEGEPFHMLLVIFTGSLLPYLQCLDSWLYDGILDDPYEEMFFYANNAVTIDQPSFWEMSYMLRVRGSRVDSSTTLTESESIKKKGSSNKESTTAGACLKVNNQGCVYILCPTFLKDVARAIVSAGKSFQLVEHVQDVHQIQTHKSTHRSNLYQDTNCSGQQKFWPDMSNLRIHDGPPRNKDALEVSTSQFGNDSREMGLLTLSEIFLICISGLLENGDHVYEYLRTLHADNVPNNNAFMENESNLKETEGTCTGNIIEKTWVKLLKDATSGRKCNGMEETIHAVIDKAGFASGCPKDASSNVVEGVFTLSCYENPAITACREVLMRNPASWSELNISESFHLPPLNDGNMRRAIFADGHSAGTSTDYKFGFQFDDLEHVRQEDDRRTLEDLYAFPTLLPCAKENALLSEILPMQKDSTLASRVLKFIQNMSMKDPLQPVGIIQECLSKCRSHRQSNPVQANG

SEQ ID NO: 49220 - protein, 544 aa, Zea Mays
MAQAARLNLRMQKEIKLLLDDPPHGVSLNLSEDKNVLSSLSSIEAKIEGPEGTVYAKGVFILKIQIPERYPFQPPNVTFVTPIYHPNIDNGGRICLDILNLPPKSREYKYNRQVFDTTAQLWTDKYASSAAVGASGWCSVDADVLAQNTQMEDTNNLGSLPNVSKKVCEGNQRKMRLLGQKLSLKYERSEESMKTVKQDPVASYLPSMAGSTYPTACFSDVSGRKNDTSENMSISTDSGVVSKQDHQGHKKELQLPGQSLFVTSEAPCKSSDASDMLSNHLPIDASDAKDHVMQSSDGILENNSARRIGGSSASAYKAPEGNRRNIRALKLSLKSVKPEKKNNDQNENMAPNHLPSQSSFSYLQKRPLDAVSRKKFDGGPALVQQNPNTEQKPSNTNMVSNEERNQGLKMLCSQRRRLSLKSEPRLPRVENACEKETKRPNNFPLSDEKLNELPSSEPIPKGEPVAPSELPFSAPAVLKSQTRALGSAGGQKDSSSGNSCVNENTLAIENAVVSDSEDSADERERPPRSRLSLMRRRLGGKLRT

SEQ ID NO: 49221 - protein, 155 aa, Zea Mays
MDLDITVEFWSLQALRSFFSSYQTSSTGPKLDEHFVMSNNHAARAQYFFQQMEAANEERLREEFVRESRKLPPKQQSQTCDSNVITPRTEFMAVLSVALECYIHLRLNYDHEWKQNKVILSDANVPGERDLSGFNPNPLPVWPGRISDHASFADT

SEQ ID NO: 49222 - protein, 567 aa, Zea Mays
MLFDVEEPTHSSDNVMNQPGSNRKKNGSSGRKTKSQQSESSSTARVISESSDSEVHPISNKSPQHSPSPSKVKIGPKGGIRKITNRRIAERILMSVKKGQREMASSDSNFVSGYLLARDMKLRSDTRNGNKELIVSSQQSSPSTRSSKKKSTPQIGNSSAFAEAHNDSTEEANNRHSATDGYDSSRKEEFVNENLCKQEVYLRSWKAIEQGLLVKGLEIFGRNSCLIARNLLGGMKTCKDVFQYMNYIENNSASGALSGVDSLVKGYIKGTELRTRSRYFRRRGKVRRLKYTWKSAGYNFKRITERKDQPCRQYNPCGCQSTCGKQCPCLSNGTCCEKYCGCPKICKNRFRGCHCAKSQCRSRQCPCFAADRECDPDVCRNCWVGCGDGTLGVPNQRGDNYECRNMKLLLKQQQRVLLGRSDVSGWGAFLKNSVSKHEYLGEYTGELISHKEADKRGKIYDRENSSFLFNLNNEYVLDAYRMGDKLKFANHAPDPNCYAKVIMVTGDHRVGIFAKERILAGEELFYDYRYEPDRAPAWARKPEASGAKDDGQPFNGRAKKLAQNNRG

SEQ ID NO: 49223 - protein, 785 aa, Zea Mays
MFGGNLGPKNAIIRPIKLPEVPKLPPYTTWIFLDRNQRMTEDQSVLGRRRIYYDTSCGEALICSDSEDEAIEDEEEKKEFKHSEDHIIRMTVQECGMSDAVLQTLARHMERAADDIKARYEILHGEKTKDSCKKGTEHNVKVEDLYCDKDLDAALDSFDNLFCRRCLVFDCKLHGCSQDLVFPTEKQPAWSGVDDSVPCGIHCHKLASEPDAAAGADHMLFDVEEPTHSSDNVMNQPGSNRKKNGSSGRKTKSQQSESSSTARVISESSDSEVHPISNKSPQHSPSPSKVKIGPKGGIRKITNRRIAERILMSVKKGQREMASSDSNFVSGYLLARDMKLRSDTRNGNKELIVSSQQSSPSTRSSKKKSTPQIGNSSAFAEAHNDSTEEANNRHSATDGYDSSRKEEFVNENLCKQEVYLRSWKAIEQGLLVKGLEIFGRNSCLIARNLLGGMKTCKDVFQYMNYIENNSASGALSGVDSLVKGYIKGTELRTRSRYFRRRGKVRRLKYTWKSAGYNFKRITERKDQPCRQYNPCGCQSTCGKQCPCLSNGTCCEKYCGCPKICKNRFRGCHCAKSQCRSRQCPCFAADRECDPDVCRNCWVGCGDGTLGVPNQRGDNYECRNMKLLLKQQQRVLLGRSDVSGWGAFLKNSVSKHEYLGEYTGELISHKEADKRGKIYDRENSSFLFNLNNEYVLDAYRMGDKLKFANHAPDPNCYAKVIMVTGDHRVGIFAKERILAGEELFYDYRYEPDRAPAWARKPEASGAKDDGQPFNGRAKKLAQNNRG

SEQ ID NO: 49224 - protein, 116 aa, Zea Mays
MIYRYSRHLLLPDFGVEGQRKLSQSSILVVGAGGLGSPLALYLAACGVGCLGIVDGDDVELNNLHRQIIHKEAYVGQSKVKSAADACLRINSSIKVVEHHHTLKPCNALEIARNIN

SEQ ID NO: 49225 - protein, 308 aa, Zea Mays
MLAVIRINSSIKVVEHHHTLKPCNALEIARKYDIVVDATDNLPTRYMISDCCVLLNKPLVSGAALGLEGQLTVYHHNGSPCYRCLFPTPPPVAACQRCSDSGVLGVVPGVIGCLQALEAIKVATGVGEPLCGRMLLFDALSARIRVVKLRGSSPDCTHCGENSVFTEEDFQKFDYESFTQSPMSDKAAASVNVLPESARITCREYKKLADDGEPHLLLDVRPAHHFQIASISPSHNIPLSMLEEKLPALEASLKEAGEGSALVVLCRRGNDSQRAVQLLREKGFANAKDIIGGLQAWGQDVDPDFPVY

SEQ ID NO: 49226 - protein, 288 aa, Zea Mays
MALRSQRRPLPPRRPASPRVGVASAPNRLPERWPSCACAVPPAQDDRVFCRGAEEAGRGGGGDGDDPCRGRKGGGRPVHRGDAGGGHAAALQGPGQGRQEGGAPGAARRQVADHRRGVPPLPRRQQARLPDARGHRRPRRRSLVCRVQGYWFSGLERSEPLGRDLEWFRQQGHAVPEPSAPGIAYASFLVELSEKNPPAFVCHFYNVYFAHAAGGRIIGKKVAEKLSLQKELEFYEWEGDLSQLQRNVRSRLNRVASGWSRVEKDRCLGEMEKAFTCSVDLRRHMFPC

SEQ ID NO: 49227 - protein, 169 aa, Zea Mays
MHWQYRTICRGPNSILKNLYDVVGSKADDYISFYGLRAHGRSDDGGPLVTNQIYVHSKLMIIDDRMALIGSANINDRSLLGSRDSEIGIIIEDKEVVSSIMDGRPWEAGKFSLSLRLSLWAEHLGLLPGEVSCIMDPVDDSAYKNIWMATAKIDTSEYQNLFGPPGPLN

SEQ ID NO: 49228 - protein, 336 aa, Zea Mays
MELGLALRLVAPPPLLPCLSRRALSLPPDFVSSRVLRGRRIHASRLKHGAGVVCNAIMTYSGVEEEEMVEEEMEEEAEPAVSTRPRLELIEKPDRSLALLDEYESEELGTSLCANHRSGYVAVLGKPNVGKSTLINQMVGQKLSIVTDKPQTTRHRILGICSEPEYQIILYDTPGVIKKEMHKLDSMMMKNVRSAIGSADCVLVVADACKTPEKIDEMLEEGVGNKDIGLPVLLVLNKKDLIKPGEIAKKLEWYQKFTNVDDVIPISAKFGHGVDDIKEWILSKLPLGPAYYPKDIASEHPERFLVQCYHPLCCSVVERMLCNMIPQLNGPVYFLL

SEQ ID NO: 49229 - protein, 375 aa, Zea Mays
MELGLALRLVAPPPLLPCLSRVEEEEMVEEEMEEEAEPAVSTRPRLELIEKPDRSLALLDEYESEELGTSLCANHRSGYVAVLGKPNVGKSTLINQMVGQKLSIVTDKPQTTRHRILGICSEPEYQIILYDTPGVIKKEMHKLDSMMMKNVRSAIGSADCVLVVADACKTPEKIDEMLEEGVGNKDIGLPVLLVLNKKDLIKPGEIAKKLEWYQKFTNVDDVIPISAKFGHGVDDIKEWILSKLPLGPAYYPKDIASEHPERFFVGEIVREKIFVQYRQEIPYSCQVNVVSYKSRPAAKDFIQVEILVEKESQRGIILGKDGKSIKMLATASRLDIEDFLQKKVYLEVEVKVKENWRQDERLLKRYGYGGEIQAL

SEQ ID NO: 49230 - protein, 501 aa, Zea Mays
MVQALNRLGLRVVMDVVYNHLYSSGPFAITSVLDKIVPGYYLRRDSNGQTENSAAVNNTASEHFMVDRLIVDDLLNWAVNYKVDGFRFDLMGHIMKKTMIRAKSALQSLTIDEHGVDGSKIYLYGEGWNFGEVAENQRGINGSQLNMSGTGIGSFNDRIRDAINGGSPFGNPLQQGFSTGLFLEPNGFYQGNETETRLTLATYADHIQIGLAGNLKDYVVISHTGEARKGSEIRTFDGSPVGYASSPIETINYASAHDNETLFDIISLKTPMDLSIDERCRINHLSTSMIALSQGIPFFHAGDEILRSKSLDRDSYDSGDWFNKIDFTYETNNWGVGLPPREKNEGSWPLMKPRLENPSFKPAKHDIIAALDKFIDILKIRYSSPLFRLTTASDIVQRVHFHNTGPSLVPGVIVMSIEDARNDRHDMAQIDETFSCVVTVFNVCPYEVSIEIPDLASLRLQLHPVQVNSSDALARQSAYDTATGRFTVPKRTAAVFVEPRC

SEQ ID NO: 49231 - protein, 223 aa, Zea Mays
MPNKSLDDHLFNRAHPPLSWRLRLQIMLGAARGLDYLHEGVPEVQVIYRDFKASNVLLDAEFKPKLSDFGLAREGPTEGKTHVSTAVVGTHGYAAPDYIETGHLTVKSDVWSFGVVLYEILTGRRSLERSRPAEEQKLLGWVRQHPPDGAGFRAIMDPRLGGRYPLAAAREVARLADRCLGKNPKERPAMRDVVEVLERVVQMEPTTTTADKRGGDGRLPAKR

SEQ ID NO: 49232 - protein, 499 aa, Zea Mays
MALPGCSCRVPGSAFVKHAGPLSCFFPSGPTLLLPLPLPALPRRRGLFNSPTDSNPTRTRVHYSDAPATSPSTKSSLASPRCSARRPMGCFAFRSGGKSGSSSSTSSRPQQHPRPGARTPPAKSAPASTSSSSSSSGAGAGAQSNTKAAAASAPAAASSATPTRTIQELSEERGAQRLRVFDLDELGSATNGFSRALKLGEGGFGSVYRAFFRSAAGARVVLAVKRLNQRSLQGHKQWLAEVQFLGVLEHPNLVKLIGYCAVDSEASKHRLLVYEFMPNKSLDDHLFNRAHPPLSWRLRLQIMLGAARGLDYLHEGVPEVQVIYRDFKASNVLLDAEFKPKLSDFGLAREGPTEGKTHVSTAVVGTHGYAAPDYIETGHLTVKSDVWSFGVVLYEILTGRRSLERSRPAEEQKLLGWVRQHPPDGAGFRAIMDPRLGGRYPLAAAREVARLADRCLGKNPKERPAMRDVVEVLERVVQMEPTTTTADKRGGDGRLPAKR

SEQ ID NO: 49233 - protein, 336 aa, Zea Mays
MGTGGERWEGEGDDGFMVLSQNCDIMLVLDSNHAGIKVTYFKCGGVSLGVGMQHHAADGMSGLHFINSWSDLCRGAQISVMPFIDRTLLRARDPPTPSFQHIEYQSAPAMLSSTTQFLASKSKPPATAVDIFKLTRSDLGRLRSQLPAGEGAPRFSTYAVLAAHVWKCVSLARSLPPEQPTKLYCATDGRQRLQPPLPDGYFGNVIFTATPLAEAGKVTSELAEGAAVIQGALDRMDNDYCRSALDYLELQPDLSALVRGAHTFRCPNLGLTSWVRLPIHDADFGWGRPVFMGPGGIAYEGLAFVLPSANGDGSLSIAISLQAEHMEKFRKLIGEA

SEQ ID NO: 49234 - protein, 232 aa, Zea Mays
MDIPAADWDACACDLDDPGNFNPFLTYAFLSSLEESGSAVKETGWLPFHIVARDENGHIIGVVPLYLKSHSRGEFVFDQSWAEAYYNYGLEYYPKLQSCVPFTPVTGQRILLRNTSYRDQVFDALVKGLMSLTTKMNVSSLHITFPSEGEFSKLKDSGLLQRIGLQYHWRNRNYKSFDEFLMDLKQPKRKNIRQERKKIPAQNLQMKRLRGDEIKSRHWDTFYKFYLGADHT

SEQ ID NO: 49235 - protein, 397 aa, Zea Mays
MKNSAAQSASGQVVPKLFPCPNNLLFFGKSDELLSSRKFEQPPSLMLDSRNDDIAIVNKSSHLFMVSGIEAGQSSNILRQKEIENGPRQIKWEQPTLNIGDMGRPLLTRSQSALESPQCTRRDDNKDPTTDSTTSESFPEACLSMNLGIANNGNRMEATSTAERPMLSPTTAIAEGRELTTALSPFQHAQRARHFLTRPPRVGEGAAFDPTRDMFPHLRVARPPAEGRGRNQLLPRYWPRITDQELQQISGDSNSTIVPLFEKVLSASDAGRIGRLVLPKACAEAYFPPISQPEGRPLTIQDARGKEWHFQFRFWPNNNSRMYVLEGVTPCIQSLQLQAGDTVTFSRIDPGGKLVMGFRKATNTVSLPDSQISAIANGSLLSETLFSTANESIGVLE

SEQ ID NO: 49236 - protein, 529 aa, Zea Mays
MYVLEGVTPCIQSLQLQAGDTVTFSRIDPGGKLVMGFRKATNTDSQISAIANGSLLSETLFSTANESIGVVSGYPGFLHSIKGAADFHPSSLYDHHINSADGDVSWNKADKFGSRPDEGSLQFLQKRSRNIGSKSRRFLIDAEDAMELKLTWEEAQELLRPAPTAKPTVVMIEDYEFEEYDEPPVFAKRSIFTIRATGEQDQWIQCDECSKWRRLPLNVIVASKWTCTDNSWDPKCCSCSAPEELTPKELQSVMQQYEEMRRRKGSYGLKLNVAEMDASSFDALATGAVFGEVGNQGTASVATTTRHPRHRPGCTCIVCIQPPSGKGPKHNPACTCNVCMTVRRRFKTLMMRKKQRQSEREEAEASKKIAWVNRDEPEGSSLSRSPQTLDTTRDSSDVTMFDKVAADVNKGHIDLNFHPAAPAVRGAGDQGQNGAQQPRAVSMMGLLEVASRPLDNYMKQNGLTSLAGEQGGGSSSTATVPPAPVESEDRTSDEGRVASAEREADAMAIDEAGENQQDKPADSAAAAAT

SEQ ID NO: 49237 - protein, 313 aa, Zea Mays
MENMRYAEELVREFLVFRGFTSTLQAYETELSTEIGRNFQGDKIVDLVFSEYVPKYQLDKLLGLFAFFKQCFMSPADTELFSTLVKLELSVLRYYVINALKSGRQDKVIEFFGESGNYLMQKRGDWLAWFAIPYIKNPSLDPQFRLYFSKEWLDTLVLSFRNFLSGIFNDTPLMRISSEKNTIKSLKNDIKQLNNKLAELQASLEEKEDEISLLRRNYNSGGYGNKNVVGTSTAGSPHEEMSENYEESSASSSMIQGFDSRSSSSVKSYTRGGKFHESSEINHTEDQQVLVTEEEFPEVKVDFQVLEFDSLTL

SEQ ID NO: 49238 - protein, 229 aa, Zea Mays
MENMRYAEELVREFLVFRGFTSTLQAYETELSTEIGRNFQGDKIVDLVFSEYVPKYQLDKLLGLFAFFKQCFMSPADTELFSTLVKLELSVLRYYVINALKSGRQDKVIEFFGESGNYLMQKRGDWLAWFAIPYIKNPSLDPQFRLYFSKEWLDTLVLSFRNFLSGIFNDTRTPALMRISSEKNTIKSLKNDIKQLNNKLAELQASLEEKEDEISLLRRFLSAINVKLG

SEQ ID NO: 49239 - protein, 181 aa, Zea Mays
MKTWKPLTVLPLGEDPPAITSLCFNHNGKILAASATDGMIHMFDMSAGLQITGWPAHDSPVSSVLFGPAETSIFSLGSDGKILEWSLHNQGQILWSRDCSRFCNPESFKTRMHEIALDSNGKRLLVTSGLVRAPIYQVQGHESELRTLPHSSSITSVDWHPTLPMYITGSADHSVRVTSIL

SEQ ID NO: 49240 - protein, 616 aa, Zea Mays
MENMRYAEELVREFLVFRGFTSTLQAYETELSTEIGRNFQGDKIVDLVFSEYVPKYQLDKLLGLFAFFKQCFMSPADTELFSTLVKLELSVLRYYVINALKSGRQDKVIEFFGESGNYLMQKRGDWLAWFAIPYIKNPSLDPQFRLYFSKEWLDTLVLSFRNFLSGIFNDTRTPALMRISSEKNTIKSLKNDIKQLNNKLAELQASLEEKEDEISLLRRNYNSGGYGNKNVVGTSTAGSPHEEMSENYEESSASSSMIQGFDSRSSSSVKSYTRGGKFHESSEINHTEDQQVLVTEEEFPEVKVDFQETFLGHNSPISRCRFSASGSNIASSSIDGTVRIWTYDSSTASSRNATIYCGSEVSALSWECRSDRLLLIGTANGGIKAWNADAKRVVCDLSTSRNFPSILDLKCSPVEPVFVSAAASRRHGSTTFERTGFANLTVWHMKTWKPLTVLPLGEDPPAITSLCFNHNGKILAASATDGMIHMFGWPAHDSPVSSVLFGPAETSIFSLGSDGKILEWSLHNQGQILWSRDCSRFCNPESFKTRMHEIALDSNGKRLLVTSGLVRAPIYQVQGHESELRTLPHSSSITSVDWHPTLPMYITGSADHSVRVTSIL

SEQ ID NO: 49241 - protein, 146 aa, Zea Mays
MWEPSAWGLPNYTCVWLRPTSPLQTYNYHVKVFFCNIYEIKLASQIIVHLLNFFVLHSAENFRALCTGEKGVGSNGKPLHYKGTPFHRIIPGFMIQGGDIVRGDGKGSESIYGGIFPDENFTVKHTHPGVIVQPVNFIIQFAFCLC

SEQ ID NO: 49242 - protein, 247 aa, Zea Mays
MVLVDTEAWGKGSGLAFYHRFVDCQLKGAHKFSQPMPKTILLGSSISPVESDYLRLTGFGDCIRKPLRLSTIVACLRKTLGVGVTRQQSRDQSLVLQSVLTGKQILVVDDNAVNRKVAAGSLKKYGSKVTCVDSGSDAIDMLKPPHTFDACFMDVQMPEMDGFEATRLIRSIEKKINDMIMMGEISANNYGNKAHWHVPILAMTADVIQATFEKCMQCGMDGYVSKPFEEQQLYFAVAHFLETDETE

SEQ ID NO: 49243 - protein, 1049 aa, Zea Mays
MVPNGAGECGGGCRRGKAAHAGVGAVAGFFLCLLMVWAVGGSERSGCGRVAEHHGVVRVGQFNLSRSQLQALVFLLSSTHKECMVNSGMVHDGNQVNGASFIPDIRCIRDRIYDGKQNWLKDAILQESCTAQDKYGLNSHAPAVLEDKLLQNVIQEDINSTTQCNKTFEDFTARTTFERPLMSGVAYALKVLHNERQQFEEQHGWKIKKMEDGDQSLVHDYNLEKLEPSPVQDEYAPVIFSQETVKHIISVDMMSGKEDHDNILRSWSTGKGALTSPFKLLKSNHLGVVLTFTVYKYDLPPNATPQERIHATLGYLGASFDVPSLVDKLLEQLASKRKIVVNLYDTTNHTSPIEMYGSDFTPSGDLHISSIDFGDPTRKHEMHCRFKHEPSLPWSAIIISTAVAIIVLLVGHIIYATLNSLEKAEHDYRVMRELKGQAEAADIAKSQFLATVSHEIRTPMNGVLGMLQMLMDTELDTTQQDFVVTAQESGKVLINLINEVLDLAKIESGRIELEAVPFDVRDILDNVISLFYDKSQAKGIELAVLVSDQVPDVLIGDPWRFRQIITNLVGNSMKFTEQGHIFVQVHLVKELNRKGNNFCDVSAHNREILYDSDNSMLWNTLSGLEVADSWRSLENFTMFKNSNGETDTIRLAVRVEDTGIGITKDAQMRIFTPFMQADSSTSRTYGGTGIGLSITKRLVELMGGEIGFTSKSGVGSTFSFTAIFKENRGCPGDMKRYYSEPTPLDFQGMRALIIDGRSARAEVTMYHLRRLGIQCSLVATSESESASSALMKACTSSKNNPDMVLVDTEAWGKGSGLAFYHRFVDCQLKGAHKFSQPMPKTILLGSSISPVESDYLRLTGFGDCIRKPLRLSTIVACLRKTLGVGVTRQQSRDQSLVLQSVLTGKQILVVDDNAVNRKVAAGSLKKYGSKVTCVDSGSDAIDMLKPPHTFDACFMDVQMPEMDGFEATRLIRSIEKKINDMIMMGEISANNYGNKAHWHVPILAMTADVIQATFEKCMQCGMDGYVSKPFEEQQLYFAVAHFLETDETE

SEQ ID NO: 49244 - protein, 289 aa, Zea Mays
MRQNSRLNLDFSFSGGLNSRKQRFDESFGLRVFKIGYEVYADGLTRVLRICEHADNPKIEKIQWPIANIQFRISYVCIHLLDKDQNGENVQLPSTILAARLQHVSSDSVVTNRFKQVSVAIHSLNVDEKWEGASIGTILRRNKLQDATLDENILRMIFVLNSTDSSVKQIQYCAIILQPVDLKIDEETLMKLVPFWRASLAPSGTTSTQFYFRRFEVHPIKIIASFRPGGRRTTYSSAQEALRALLHSVIKVPEISNSAVELNGVLLNHALVTFRELLLKCAQHYSWHV

SEQ ID NO: 49245 - protein, 260 aa, Zea Mays
MGAPSSRALALGAAFLLLLVALPSAFLYLTSSAATRATLLDLKPFSARCAPAVAPLRVFMYDLPARFHVAMMGAAAGAGFPAWPPSAGGIRRQHSVEYWMMASLQDGGAGPERGREAVRVRDPDAADAFFVPFFSSLSFNVHGRNMTDPDTEADRLLQVELVDILWKSKYWQRSAGRDHVIPMHHPNAFRFLRAMVNASILIVSDFGRYTKELASLRKDVVAPYVHVVGSFLDDDPPDPFEARHTLLFFRGRTVRKDVWN

SEQ ID NO: 49246 - protein, 94 aa, Zea Mays
MDFDGAIGDQGELWEWQSQEYCMQKDSLAAPCSSLWAEASNNVGGDWSIFEEQTPIKHCTDFEFQFCDVGGEVLFSCCISGLVKMQSRYHRQGV

SEQ ID NO: 49247 - protein, 83 aa, Zea Mays
MQGLLILGGKGSCFPSFCMKLCCGFRAFSACCVQFQLPLLMHLLTNRTIEGILVFVFSVTFLYIDCYHELLTSASMLSDVSEL

SEQ ID NO: 49248 - protein, 276 aa, Zea Mays
MYQVLSECMMVAKLMSVLPTPLYRLVNILDFKLAKGVGDYIARCQTYEGGIAGEPYAEAHGGYTFCGLAALILLNEAEKVDLPSLIGWVAFRQGVECGFQGRTNKLVDGCYSFWQGAAIAFTQKLITIVDKQLKSSYSCKRPSGEDACSTSSYGCTAKKSSSAVDYAKFGFDFIQQSNQIGPLFHNIALQQYILLCSQVLEGGLRDKPGKNRDHYHSCYCLSGLAVSQYSAMTDTGSCPLPQHVLGPYSNLLEPIHPLYNVVLDKYHTAYEFFSEE

SEQ ID NO: 49249 - protein, 163 aa, Zea Mays
MEVEVNRGFNSDAVLAMETIHSLSASKSSYPMADLTQLFMTATQEGKRSESQGQILRVITCLHRFEDTGYSFSVETAARVKVIDFGSALPWRVLDVNGLKREAASRGGATGHGKPRLLIISRRGSRRFLNEREMERAAGDAGFEMCGNGVRCFGRFIAEIENL

SEQ ID NO: 49250 - protein, 419 aa, Zea Mays
MGWSVGGWKSDSSWRGCQLSSSIREFLCSEAMHGLGIPTTRALCLVETGKSVVRDMFYDGNAKEEPGAIVCRVAPSFLRFGSYQIHASRGKEDIEIVRRLADYTIHHHFPHLENMKKSEGLSFETAIGDSPTIDLTSNKYAAWAVEVAERTAYLIARWQGVGFTHGVLNTDNMSVLGLTIDYGPFGFLDAFDPSYTPNTTDLPGKRYCFANQPDVGLWNIAQFTGPLSSAELISQDEANYVMERYGTKFMDEYQSIMTKKLGLTKYNKQLISKLLSNMAVDKVDYTNFFRLLSNVNADPGIPENELLVPLKAALLDIGKERKEAWISWVQTYIEELVESGVPDEERKAAMNSVNPKYILRNYLCQSAIDVAEQGDYEEVRRVLRVMHNPYDEQPGMEKYARLPPAWAYRPGVCMLSCSS

SEQ ID NO: 49251 - protein, 608 aa, Zea Mays
MPPQFPTARLLLPSHRLLPLLSPLPSASLSPAPRTLRLPPPQLLHRVARRRPLLRGMASAAAPGSHAAAEAPPVDVGGGGAGAPRRLVLEELPWDHSFVRELPGDPRSDTIPREVLHACYSRVSPSAKVDNPKLVAWSDSVADLLDLDHKEFERPDFPQFFSGATPLVGSLPYAQCYGGHQFGVWAGQLGDGRAIALGEVVNSRGERWELQLKGCGKTPYSRFADGLAVLRSSIREFLCSEAMHGLGIPTTRALCLVETGKSVVRDMFYDGNAKEEPGAIVCRVAPSFLRFGSYQIHASRGKEDIEIVRRLADYTIHHHFPHLENMKKSEAWAVEVAERTAYLIARWQGVGFTHGVLNTDNMSVLGLTIDYGPFGFLDAFDPSYTPNTTDLPGKRYCFANQPDVGLWNIAQFTGPLSSAELISQDEANYVMERYGTKFMDEYQSIMTKKLGLTKYNKQLISKLLSNMAVDKVDYTNFFRLLSNVNADPGIPENELLVPLKAALLDIGKERKEAWISWVQTYIEELVESGVPDEERKAAMNSVNPKYILRNYLCQSAIDVAEQGDYEEVRRVLRVMHNPYDEQPGMEKYARLPPAWAYRPGVCMLSCSS

SEQ ID NO: 49252 - protein, 903 aa, Zea Mays
MASSTKSDLVSGSPDGHGYFNAQRGSYAAASLERSGSFREGGDGYAMFSASNSSRSAAVNSINLVQSLALDLRPATVDHKTSRLDLKKSISSIFGTSAEDSTSLPSLGRNLPNAIEEIRRMRSNLNDNSNKARERSRAFGGAMAKIDKLCPNIVRKRSRGDSSSNERSSVLSSGGVTPKNVPQSHLNADDMEAGLQREERTKNAGQNRRIRTSMVEMDARTAGPSRGPGPTDRISDPGKATNGSSAVPEEKIRGLATTIDGWEKPKMKKKRSTIKADMSLAGVLRTVDVDRESKQGMQHKFTNDGRARMTSSSFRSGTVASGTTKADLLSTQNGLVMRPLNRSDQDNGFHPTNKRERQAALDKETPNPRTINKPNEDDSGCNIASLPKANGSARGPRSNSGSILKSYPNIHRSQASSDDWEHPSGTNKLISAGGSGIHKRTKSTHSLSPPIQWGGQRPQKISRSARKSNLVPIITTDSALVPGSLDSPVNEDCAGLPRRASVNSLQQTKRGDHGLSTGPEGNEPVVAEKKLRDKGKRAGELDDGHGSGFQKIAMLGHPSKRNKLPADEDIGDALRRQARVVPGFTLTRPGTPVSIDKLENAPITKQRSVRTVSERTESKSGRPLMKKISERKSNARPRHTSSSVQSDSPVQSEDDHEELLASANAALRSACASTFWRQVEPFFAFLTAEDITYLSQQIHLPDDSSSSRSMEGGECQKYKGGLEYISHPSTPAASNKDDHAALPNGFGLNQLDNDIGVGWEASCIEPILDQLVHGIGVPGWSSVGQRLIQALIDEDRIDSITNNTYISEGYAFDTHEIHFDGGGWKPHSNNYKLEPLANFEASRRGPNGLTMDSDWKYNDVSNRSGNVMDKTKVWPEFQYSEMCFNDRIIIELSEVGVSIEPVM

SEQ ID NO: 49253 - protein, 286 aa, Zea Mays
MGVHGKAYILALGLLMSQYSLIGYDASAHMTEETKNADWSGPMGIVTSVALSSVLGWVYLVALASLMTDIPYLLDPGNDAGGYAVAQALYDAFRRRFGSGVGGVVCLGIVAVTTFLCGSACVTSNSRMGYAFSRDGAVPFSHVWYKVNKQEVPLNVVWLSVSVAFAMALTSLGSQVAFQAMLSVATVGPYIAYGLPIVFRVTTARRSFVPGPFHLGRYGLLVGWVAVAWVAAVTVLFSLPVAYPVAEDTFNYAPVVVVGVLLLSVGSWVLHARFWFQGPITNVDVA

SEQ ID NO: 49254 - protein, 246 aa, Zea Mays
MAINSDVLAEMEIPEVYLETLPKNGKSCLGEIIYRYITAEQFSPECLLDCLDLSSEHHTLEVANRIEGAIHVWKLKGQKKSTPQAKSKISWGGKVKGLVGDKEKSHTLSERADGLLQSLRLRYPGLPQTSLDMNKIQYNKDVGQSILECYSRVLESLAFNIIARIDDVIYVDDATNRSAAAESVSIFNRGTVTGSPGRVQPPLNKNILGTQEIKVEKLFSGDLEKVWTYAGNLSARKDAGDAPERD

SEQ ID NO: 49255 - protein, 547 aa, Zea Mays
MASSSSSLTRLFIPPHRAHHEAAMAASAGASLRNGGGMQMLTKDLVMQRWAEMVLCCGADWNCVSQLWNRVVLRKWLNIGAGSGDSDFSADEHDTSEGETDREGMSGLNHALCNEERILGGLGASTTGDEMSDLPYCLRMHRSEISRAQYVDVRELRIYVGTWNVGGRFPPSDLDIEEWLATEEPAEIYVIGFQEIVPLNAGNIFGAEDNRPVAVWEHIIRETLNKNCSDKSGFKCHSDPLSPSRFNPSDVVLSMEHGLLSESDKDSDGELHPLIERDHNCGLQAKTNENLEAFPEDNLACDAIIDNRTKRKRPEFVRIISKQMVGIFLSIWVRRSLRKHIKNLRVSTVGVGAIGYIGNKGSISVSMSVHETPFCFVCCHLTAGEKDGDDLKRNSNAEEILRRTVFNPENVVGMPMRIYDHKRIIWLGDLNYRINLSYERAHELISKQDWDGLFERDQLKRELRKGCTFDGWFEGVISFAPTYKYEFDSENYVSDESESGRRTPAWCDRILSYGKGIRLLSYKRGELTLSDHRPVAAVYVAEIEVFH

SEQ ID NO: 49256 - protein, 724 aa, Zea Mays
METTAAGAPRAQTLRDLAEEGKKRGVLLLVFAFGLAFLMSLTSSSVWFNLPFAIALIVLFRYISLDYGLRRKSVTRTDHASHSLVKTKGTEVKKVIHQTETDGKIDWRSKVNSPPVEAAFEQFTRHLISEWVTDLWYSRVTPDKEGPEELIDVVNTVLGEISVRARNVNLINLLIRDLVDLICNNLELYHFCQAKIGREKFVGLPSERRDAELKMILLAENKLHPALFSAGAEYKVLKSLADGLISITVKPQDLQCTFFRCTARELLACAVLRPVVNLANPRFINERIESFALSHANKLEKGTAESLDVVTTVKHREPHMPSVDEFSALIDHSSSGVELVQFRQGQSKTASDIQPGKSTNPYSLKLESSHAPLVSSSHPLESTSLASSSHVTSDNGFSLHTKSSNRATANGHGRECAQPLGISSERAHQALALEHLENMWTKGKNYKPENVEHVAKVSVGSASLGSTSVQQSVPCSTSVCYNQSNSERPTASSQSKDQHLVRHSTTPTYVTYPNGTPKSLSAEMAEHAGPEDFAVESESSYATEDDEFNNVTGLDSPVTRVWESKSKGNATLSHIHHPLESPGFHRAKKNRSHVGKLKMSRTSSGRKRSRSNAQKPPIWQEVERSSFSVGDSMDILNTSANDLKTHELDEDPEVESMARMFSSSNTSSLLLPSSDSAYSSNYCGANVLQDSYLKLRCEVVGASIVKSGSGMFCCVFYFRDRRQW

SEQ ID NO: 49257 - protein, 919 aa, Zea Mays
MILLAENKLHPALFSAGAEYKVLKSLADGLISITVKPQDLQCTFFRCTARELLACAVLRPVVNLANPRFINERIESFALSHANKLEKGTAESLDVVTTVKHREPHMPSVDEFSALIDHSSSGVELVQFRQGQSKTASDIQPGKSTNPYSLKLESSHAPLVSSSHPLESTSLASSSHVTSDNGFSLHTKSSNRATANGHGRECAQPLGISSERAHQALALEHLENMWTKGKNYKPENVEHVAKVSVGSASLGSTSVQQSVPCSTSVCYNQSNSERPTASSQSKDQHLVRHSTTPTYVTYPNGTPKSLSAEMAEHAGPEDFAVESESSYATEDDEFNNVTGLDSPVTRVWESKSKGNATLSHIHHPLESPGFHRAKKNRSHVGKLKMSRTSSGRKRSRSNAQKPPIWQEVERSSFSVGDSMDILNTSANDLKTHELDEDPEVESMARMFSSSNTSSLLLPSSDSAYSSNYCGANVLQDSYLKLRCEVVGASIVKSGSGMFCCVFYFRDRRQWFRHFEDLHRRLKEYAQYNLHLPPKHFLSSGLEVSVVRERCKLLDIYLKNLLQIPIVSSCIEVWDFLSVDSQTYIFTDTLSVIQTLSVSLDERSNGKNIKALNSSGALNGNSISGGQSLHGHIDDTVHKDSDIACDGLRFRKGNVNKNLGNGVSHTTDSVSNTTANHYQDNSGSDPEQNDHSFSIDSLNPKKLRSTETNDTSQIPESGGFSVSPNDWMAPNLSVPLFHLVDVVFQLQDGGWIRRQAFWVAKQILQLGMGDTFDDWLVDKIQLLRKGRIIAFAVKRIEQILWPDGIFMTKHPKRNSPPPPPGAQSNGMGNYLSDEQRIEAAHRANFVRELIIDKAPSPLVSLVGRKDYERCAHDIYFFLQSPVCLKQLAFELLELLVLSSFPELDGTVRKWHEDKEQFCAQ

SEQ ID NO: 49258 - protein, 499 aa, Zea Mays
MEAEEVAWICHLALPRLTLDLLPRLVVATCYTGGRRTSSAFLLLSRSRGGRSTVHLARRPKQPMSSSGPSPATGIHASPPLGLLPATGTHHTRSWGKTTSTSFTGSTTKHEQSLHGNVKPLQLAANESSRLAYRSPALKNQWNLPASSSSTNVVTTFDDNEHVSSSVIEEKVGVLLLNLGGPETLDDVQPFLFNLFADPANALKIALEKKKLNANIYVGMRYWYPFTEEAIDQIKKDKITKLVVLPLYPQYSISTSGSSIRVLQDIVKEDSYFSGLPISIIESWYQRDGYVKSMSDLIEKELSAFSNPEEVMIFFSAHGVPLTYVEDAGDPYRDQMEDCIALIMGELRSRGILNSHTLAYQSRVGPVQWLKPYTDEVLVELGQKGVKSLLAVPVSFVSEHIETLEEIDMEYKELALESGIKNWGRVPALGCTSTFISDLADAVVEALPSASALATRKPDDIDSSMDLTHYLTKMLFGSILAFVLLLSPRLVSAFRSTML

SEQ ID NO: 49259 - protein, 203 aa, Zea Mays
MLITEFLRGGDLHQYLKDKGALNPLTAVNFALDIARGMAYLHNEPNVVIHRDLKPRNILLVNSAANHLKVGDFGLSKIIKAQHANDVYKMTGETGSYRYMAPEVFKHRKYDKKVDIFSFAMILYEMLEGDSPFSNYEPYEAAKYVADGHRPVFRKNHTTELKDLVELCWSGDISLRPSFLEILKRLEKLKEHYSHENHWHLFQ

SEQ ID NO: 49260 - protein, 252 aa, Zea Mays
MDQDPRNHTYKDFWSFCDAINAGNCRLAVLEAFQRMYGVHLDHDLDSLLHMPNDGDTWSVMQSWVLPTRSFLEFVMFSRMFVDALDAQMYDKHHQTGHCILSLHKDRHCYSRVLELIVNVWAFHSARRMVYVNPQTGAMQEQHHLSGRRGQMSVQFFSYTTLKSMDEELAEEFDLDHPDRRWLWPQTGEVFWQGLYQRERIMRQQEKERRKQQSREKIQRIKNRARQKTLGKYIKPPPDDTGGSNDTTSVDL

SEQ ID NO: 49261 - protein, 225 aa, Zea Mays
MTATASCFSSPVAWARPRAGPAGASAALRVGRCPAAAVAAHDVAFHPDVSRAADSLQAEFRAVDRAIALNSSRVAAAFRRARVAPHHFGGSTGYGHDDGGGREALDSVFADIVGAEAAIVRPQFFSGTHAIACALFALLRPGHELLAVAGPPYDTLEEVIGIRGSANVGSLKDFGVTYREVPAGNWVCLHTEIVWIFVAQELKCSRYSQSYRFDQDAKSKLHGDG

SEQ ID NO: 49262 - protein, 430 aa, Zea Mays
MTATASCFSSPVAWARPRAGPAGASAALRVGRCPAAAVAAHDVAFHPDVSRAADSLQAEFRAVDRAIALNSSRVAAAFRRARVAPHHFGGSTGYGHDDGGGREALDSVFADIVGAEAAIVRPQLLAVAGPPYDTLEEVIGIRGSANVGSLKDFGVTYREVPLVADGGLDWDALACSIRPETGCAFIQRSCGYSWRKSLSVADIHKAIGLIKMQNPNCMVMVDNCYGEFVEISEPAMVGADLIAGSLIKNPGGTIAPCGGYVAGKEHLVEAAAARLSAPGLGVEFGSTPGHVMRALFQGLFLGPQMVGEAVKGGLLIAEVMSAKGYKVEPLPRVPRHDIVQAVELGSRERLIAFCEVVQQTCPVGSFIKPTAGETPGYASEVIFADGTFIDGSTSELSCDGPLRDPYAVFCQGGTHWTQWALVLGNVLKVI

SEQ ID NO: 49263 - protein, 370 aa, Zea Mays
MTATASCFSSPVAWARPRAGPAGASAALRVGRCPAAAVAAHDVAFHPDVSRAADSLQAEFRAVDRAIALNSSRVAAAFRRARVAPHHFGGSTGYGHDDGGGREALDSVFADIVGAEAAIVRPQFFSGTHAIACALFALLRPGHELLAVAGPPYDTLEEVIGIRGSANVGSLKDFGVTYREVPLVADGGLDWDALACSIRPETGCAFIQRSCGYSWRKSLSVADIHKAIGLIKMQNPNCMVMVDNCYGEFVEISEPAMVGADLIAGSLIKNPGGTIAPCGGYVAGKEHLVEAAAARLSAPGLGVEFGSTPGHVMRALFQGLFLGPQMVGEAVKGGLLIAEVMSAKGYKVEPLPRVPRHDIVQWSLAAGKDS

SEQ ID NO: 49264 - protein, 358 aa, Zea Mays
MPRCSSPCSTPRRATSRPTPRPARGTPSCVRTAPASRPAPTSPTPPTPSPPPRRPPSPIPPPPMSRLRRTRASPCRRLAGRRSDRRDRERLWRSTCSAAARPGPGTTFSPMSASKGTQWNHYRVGSGRAWMPSRLPMPWPAPTPSPRERCTTSHSTQFLDRHMLKPTPPAPAPAPTDYTLSGTPDYHSSKFPYGWVIGSMGVALALIVIAVLALVLWKFFGYKPQDRNGQRKSPDRHKFQLLKSGSFCYGSGRYLCCQFGNAKPTRADGGEHHINVPKGVAADVFDREKPIVFTHEEILISTDSFSDANLLGHGTYGSVYYGVLREQEVAIKRMMATKTKEFIVEMKVLCKVHHASLN

SEQ ID NO: 49265 - protein, 101 aa, Zea Mays
MDLENADLRMMRVMEAYQVKEFHPDVCKDPEIADLRMSERWRSIRECSSLLSIVKHVLQDYSVVLCWFTVPQTILKRTDEERKVYSIVEDFELQFKEKEDC

SEQ ID NO: 49266 - protein, 103 aa, Zea Mays
MDLENADLRMMRVMEAYQVKEFHPDVCKDPEIADLRMSERWRSIRECSSLLSIVKHVLQYPLPTSSCICCLLDSLKHRVWRKHNIYRMDYDLLVHVLHIDLSF

SEQ ID NO: 49267 - protein, 183 aa, Zea Mays
MSLPVDAAIIQFTQILFSHAPAGPVGRESVIQRPRTQAPSTSLFYPASSEQQIQRPRLLLTLAARLQCSTAPADPGPGSSEETQGDQGPSGLWIRRSATPPLISDLSAPPCPAPPLPRALSAPPRLRGPRPAVRPGPRQLLPAGLLPSARPPRHTAHYFYSSTASAQRSSPASKWLVRTRKIC

SEQ ID NO: 49268 - protein, 277 aa, Zea Mays
MTRYRHGDGSYRLRVTTVARRWAAPRSPEIAAGFDQEAAAAVMARLAVYRAETYHVRDVIRWLDKMLIRFTAKFGNYVPEDPSTFRLSTNFSLYPQFMYYLRRSQFIDVFNSSPDETAFFRLMLNREGVVGSLIMIQPTLFQYSFDGPPIPVLLDVSSISPDVILLFDSYFYIVIHYGSKIAQWRKLGYHKDPNHENLRKLLEAPEVDAEALLVDRFPVPKLIKCDHHGSQARFLLARLNPSVTQKTQFSKGSEVIFTDDVSLQVFIEHLQELAVQG

SEQ ID NO: 49269 - protein, 205 aa, Zea Mays
MTVGSTYASMNEFRSAVRQHAIKGQFEVWTRKSDTCRFRGYCIATYRWIAEKSIPFLKKDPNMGAKKLQEELEDKYNVKLGYSTVWAGRQKAVEQIFGTWEESFADLYRFKAEIDAKMPGSVVDLEVQEEEDGVYFRRFFCCFKPSIDGFLNGCRPFLSVDSTALNGRWNGQFSEKEESRQTRATIRISKYLHAQKAKSCAKRVN

SEQ ID NO: 49270 - protein, 222 aa, Zea Mays
MTSEEHPSSTSSDGSTTIGSDEHLDSPPSPSTFFDSPPESDDSAASSLLSDGSSESEPIIFKKPRPPVRSWPASDEIAILETVASHRQKHGRLPLADDLAAAVRGRLSAGDRLSAAQITRRLCALRNRGRIEKKTRVPDARNDPRGFDDLAELYPCLSAEVEAIGARCGYGALKRAFGRIGDDTAARLEAKLKRQRMAETRASGKLDRLRSRVAKALQGFNK

SEQ ID NO: 49271 - protein, 311 aa, Zea Mays
MQSSPPGVHVLKHFKGRTNEKSKDVTTLDWNGEGTLLATGSYDGQARIWSRDGDLKQTLFKHKGPIFSLKWNKKGDFLLSGSVDKTAIVWDTKTWECKQQFEFHSAPTLDVDWRNNNSFATCSTDNMIYVCKIGEQRPVKAFSGHQSEVNAIKWDPTGSLLASCSDDWTAKIWSMKQDKCVFDFKEHTKEIYTIRWSPTGPGTNNPNQQLLLASASFDSTIKLWEVEQGCLLYSLSGHRQPVYSVAFSPDGEYLASGSLDQCLHIWSVKEGRILKTYRGTGGIFEVCWNKEGSKIAACFSNNTVCVMDFRM

SEQ ID NO: 49272 - protein, 1300 aa, Zea Mays
MSAEKQRQKEELRKEKEAARQKAANERATARRIAREYMELVEDERLESMELAAQNKGLPSMLYLDSDTLQQLDSFRGMLSQFPPTTVRMKLPFSIKPWTGSEDNVGNLLMVWKFLITFTDVLGLCPVTLDEFVQSLHDYDSRLLGELHIALLRSIIKDIEDVARTPSIALGVNPGGGHPQIVEGAYAWGFNIRSWQRHLNLLTWPEILRQFALSAGFGPQLKKRTVEDSYYRNDNEGHDGENVILTIRNGTAAVNAAAKMKERGYTNRRRSRHRLTPGTVKFAAFHVLSLEGSNGLTILEVAEKIQKSGLRDLTTSKTPEASIAAALSRDTKLFERTAPSTYCVKSPYRKDPADSEAVLSAARERIRAFQNVLSDSEAEKEVDEAERDDDSDCDDGDDDPDGDDVNTEVEDDKDPLLAVKSQDEVPSTTTVIGIKANLDGVGNALNSSSSFTKSAKGAPLPSLGRSNAADTSNDLPLGVSSANHEVVPDDSENTQIDESNQAEPWVRALAEGDYCDLSVEERLNALVALVGVATEGNSIRAVLEERLELANALKKQMWAEAQLDKRRFKEEFTSRVQYNSDMGLKPDIYQENNVTEITSTPACDAYRENDEHVGTINNCEMLDQHNQGNAGSLPYERNGVCQEILATPDTSYVQQYAYADKRRSQLKSYIGHRAEQLYVYRSLPLGQDRRRNRYWQFTTSASPNDPGSGRIFFESKDGYWRVIDSEEAFDSLLAALDTRGTREAQLHSMLQVIEPTFKEAIKRNVSIELSAGRYPKNGATDMIRANYHSEVGSSSSTPSATSDSITAYSDSFKVELGRNDFEKTAISKRADIFLKWMWREFYNQELTCAMKYGKKRCSELLHSCNCCYQIYLAEERHCSSCHKTFKSIYNFSDHTTQCEEKQRTEPFWNMQNTDYSVPIGMAYIPSEALQPFWTDVYRKSWSVKLYTTKSIAEIFQLLTVLEGAIRPDCLSSDFETSECLNSQVGSASVLPWVPDTTSAVMLRMLDLDSAILYVQNQKMDRDDGGFMKFPSRYTVAKSKQETTPETAGLDLYDGRWLPGSGRRGRGRGSRGGSRGGRGRSRGGRIPRGVSSSSRIEFKGGIVASDKAPRKNVRRGRGRGRGRRRGRRTVRPRQPSVGRARSIPKENLLGSFSMLSSSKAATIEESPRSSGADEWGLETRTTYTECDENSSGSQSEDNEENGQPMDDDYEDQVPDYSIGYSTGSRHHVMMSMMDHDSDEEDEDAEGDENVEEDADLAVDDADVEMDEDDEIGDDGEDGGVGGEMNADEDPDATSYSSDYSD

SEQ ID NO: 49273 - protein, 1577 aa, Zea Mays
MESPFVPNSFTGKRKSPVGNSAIVQPHVGSRAVHEYQFLPEQPSDTYERATRSHYYDTPVEVSNARIPSITSGSQLLHGSEEAAPSYAFQGHTSGSSLLPPSSRPQVFPAAPTDYEMTQSNSNLSSVPVEGQFDISQVAAFENPPVSSEIIAYHDEDTSRVERKRKHSEEAKIAKEVEAHERRIRKELEKQDMLNKKREEQRRKEMERLDRERRKEEERLLRERQREEERFQREQRREHERMEKFLQKQSRRAEKQRQKEELRKEKEAARQKAANERATARRIAREYMELVEDERLESMELAAQNKGLPSMLYLDSDTLQQLDSFRGMLSQFPPTTVRMKLPFSIKPWTGSEDNVGNLLMYSYNFISGDILLTGLQVWKFLITFTDVLGLCPVTLDEFVQSLHDYDSRLLGELHIALLRSIIKDIEDVARTPSIALGVNPGGGHPQIVEGAYAWGFNIRSWQRHLNLLTWPEILRQFALSAGFGPQLKKRTVEDSYYRNDNEGHDGENVILTIRNGTAAVNAAAKMKERGYTNRRRSRHRLTPGTVKFAAFHVLSLEGSNGLTILEVAEKIQKSGLRDLTTSKTPEASIAAALSRDTKLFERTAPSTYCVKSPYRKDPADSEAVLSAARERIRAFQNVLSDSEAEKEVDEAERDDDSDCDDGDDDPDGDDVNTEVEDDKDPLLAVKSQDEVPSTTTVIGIKANLDGVGNALNSSSSFTKSAKGAPLPSLGRSNAADTSNDLPLGVSSANHEVVPDDSENTQIDESNQAEPWVRALAEGDYCDLSVEERLNALVALVGVATEGNSIRAVLEERLELANALKKQMWAEAQLDKRRFKEEFTSRVQYNSDMGLKPDIYQENNVTEITSTPACDAYRENDEHVGTINNCEMLDQHNQGNAGSLPYERNGVCQEILATPDTSYVQQYAYADKRRSQLKSYIGHRAEQLYVYRSLPLGQDRRRNRYWQFTTSASPNDPGSGRIFFESKDGYWRVIDSEEAFDSLLAALDTRGTREAQLHSMLQVIEPTFKEAIKRNVSIELSAGRYPKNGATDMIRANYHSEVGSSSSTPSATSDSITAYSDSFKVELGRNDFEKTAISKRADIFLKWMWREFYNQELTCAMKYGKKRCSELLHSCNCCYQIYLAEERHCSSCHKTFKSIYNFSDHTTQCEEKQRTEPFWNMQNTDYSVPIGMVLLKLQLVSIEAYIPSEALQPFWTDVYRKSWSVKLYTTKSIAEIFQLLTVLEGAIRPDCLSSDFETSECLNSQVGSASVLPWVPDTTSAVMLRMLDLDSAILYVQNQKMDRDDGGFMKFPSRYTVAKSKQETTPETAGLDLYDGRWLPGSGRRGRGRGSRGGSRGGRGRSRGGRIPRGVSSSSRIEFKGGIVASDKAPRKNVRRGRGRGRGRRRGRRTVRPRQPSVGRARSIPKENLLGSFSMLSSSKAATIEESPRSSGADEWGLETRTTYTECDENSSGSQSEDNEENGQPMDDDYEDQVPDYSIGYSTGSRHHVMMSMMDHDSDEEDEDAEGDENVEEDADLAVDDADVEMDEDDEIGDDGEDGGVGGEMNADEDPDATSYSSDYSD

SEQ ID NO: 49274 - protein, 589 aa, Zea Mays
MASSSQSGGAGGGGTVASNPRVWIVASIAVAGVLVLAEVARRRRRWLRGMSGTAPDAGSFCDRFELHPPAQPPPPAARHILSGLTFAASDNFEIEGYVAGFGNPDWKKTHETARHTAVAVTMLRKQGATCVGRTIMDELGFGVTGENLHHGTPANPVSSSLVPGGSCSGSAVAVAAQLIDFAIGTDTIGDVRIPASFCGLLCFRPSYGVISTLGTIANSQSLDTIGWFARDPCILHRVGEVLLPAAVGGLKQTRQFVFADDCFQLLKVSNQKTVHAIKNAVQALRGYQPPKHINIGQYIYSNVPSLKEFCEPATKLEEGTSALKAISTVMLLLQRYEFKANHEEWVNTVKPKLGLDISTRVLQAVNFARENIKSLYAIRNELRVALKNLLKDTGILVLPTTAGYPLKRNSKERLSSGFEDRMYKFVGVAALSGCCEVTIPMENLDHHVSLSFVAAHGSDKFLLRNILDTYSLIQDQVVLASKLETAPVTNVDVDVNASELLKEKGNSAFKRRQWIKAIEFYSEAISLSDTNATYYCNRAAAYLELGRFKQAEADCDRALLLDRKISGMLWHWSHRIKQLLQRKGGCRNS

SEQ ID NO: 49275 - protein, 466 aa, Zea Mays
MLRKQGATCVGRTIMDELGFGVTGENLHHGTPANPVSSSLVPGGSCSGSAVAVAAQLIDFAIGTDTIGDVRIPASFCGLLCFRPSYGVISTLGTIANSQSLDTIGWFARDPCILHRVGEVLLPAAVGGLKQTRQFVFADDCFQLLKVSNQKTVHAIKNAVQALRGYQPPKHINIGQYIYSNVPSLKEFCEPATKLEEGTSALKAISTVMLLLQRYEFKANHEEWVNTVKPKLGLDISTRVLQAVNFARENIKSLYAIRNELRVALKNLLKDTGILVLPTTAGYPLKRNSKERLSSGFEDRMYKFVGVAALSGCCEVTIPMENLDHHVSLSFVAAHGSDKFLLRNILDTYSLIQDQVVLASKLETAPVTNVDVDVNASELLKEKGNSAFKRRQWIKAIEFYSEAISLSDTNATYYCNRAAAYLELGRFKQAEADCDRALLLDRKVIDFCRCNIPVLLRVTCLKHCLP

SEQ ID NO: 49276 - protein, 230 aa, Zea Mays
MSDQRPLPSSDPVHRPPRILAGRCSPAAGSRSAARAPRERRLAASRWRRTTSPRPCGTTHVSGTCCSDAVSRVPRTASPTCDLWRRGPPRWGRRQLQVRHQPATHLGSRIFCHQSARAAGGSRAGDGAVLVLLPVPKAALLGSPPTDQLVPRPQLLLQSVPILIVEDLLCLLWCLESAFRERPLPQAKKSWGSEIASSGGRSSSDVSTPYATTFCASTPDATIDKLRKKG

SEQ ID NO: 49277 - protein, 238 aa, Zea Mays
MYASSDSSDEPLLKSNMFSLGGSKFFGAVSRSINLGGQSALALRLLLAVFSSKIASSANRPFGEEFRAARRVSEDIGAQLVLGDRPIEITLERAWKSLTWDQKAKLLISLFRGITSKTHTPQDEKAAVSPYELYEKLSTSYPALLQPLIHERDMFLAWSLKRSKAVNKSRTVVGVVGKGHINGIVYALISDQGDLRFRDLVGRASSDTWVSSLVKGLVRDTVIGLVLWALYEQLQAVL

SEQ ID NO: 49278 - protein, 686 aa, Zea Mays
MIGNLIHCHDKVKHEAGINGNIKIFTEDEIKRITNNFNTLIGKGGFGEVYRGTLDDDNEPVAVKKYINEDLREVFMEEVRIHSKISHKNVVKLIGYCIGKSTLMIVMEYMSTGNLNDILHCTEISIPLDVRLGIAIGCAEALSYMHSMHLSSGNLICHGDVKPANILLNDNLTAKITDFGVSRLLVGGITQYTTSVKGSIDYMDPIYIQEGRLTPRSDVYSFGLVLCELISRKRIRKGDINLILYVNKGSASGKGFREMSDAAIANEDNMKILKEMKKLATECVSLSIYRRPQMTDVVRRLRMLRKELKERHEYYSESILASHHSWRKNNKQEIIMPTYNSKMQIKKSLGFFKRSLSNSKIQSEPSDVRIFTQEELKEVTNNYSYLISGGTSGKVYRGTLEDNTVVAVRIFSEVLEGFEEAFVNGGMILSQISHRNIIKLVGYCLDADCPAFLYEYAAKGSLSDVLDGHEDFPLDLRAKIVVKIAEALEYLHSPATGIIRHGYVVPSKILVDNNFMPKLTGFSWARRLIQESNTTASDDVISSHQHPSSGFNNDPIHDHYVSLKLKTDVYQFGVLLLTLISRKSFVFYADHDGLVSQFLTACQEDGSGRAFFDDDVAVHGGDVVLLEEMGRLSLKCVCEEIEQRPTMREVAEHLRMITRSWKDFSGSYAGAEGNTPERPPSSDIGD

SEQ ID NO: 49279 - protein, 68 aa, Zea Mays
MNPSPIRAPIARALILEWCLPPSLSPLPYSDLRDFHWRYTPTRCTCTPSPLLLLCETNHSNSSYVFRS

SEQ ID NO: 49280 - protein, 77 aa, Zea Mays
MNPSPIRAPIARALILEWCLPPSLSPLPYSDLRDFHWRYTPTREFLDQHEEEEMPHVISVTPDVQEAIGRLESMGFD

SEQ ID NO: 49281 - protein, 426 aa, Zea Mays
MGARGGGGGGRKARNFATFRLFPRAGAADPNDRVFVRVDNNDYTVPGFADEDSFDPSRSDPSAGNGNFGSASGPLPEHVRREILELGLPDDGYNYLSHLRELRPAAAAASSFVPSSTGRPEPLPLDVKAYDASRVRIGLSEGELDEGKTMCKVAAKTAPVRRIEKAVDPDIARLLDESDVSHVGSEDEGLEEDFVIIANQAEEEEEDEDGDMEEKQEWNGVFSDVEEEEFDFEEDEPKPRVRRLLDEQFDLLALEEYGDSDDDDMGVKEEEVVVLVSESSDESEVWDCETIVSTFSNLDNHPGTIETPGISRARFPRVFPGETTTTNGIIKLHGKEKLPVEYLPQRRRNGEKEKKVKPVEASVTDKFKKGAEKETKEEKKARKAAVKEEKREARKAKKELKGLYKSETQKAQKVAAVTGPSSIRLM

SEQ ID NO: 49282 - protein, 139 aa, Zea Mays
MAPLLFRDMKGLSCSSQASTATCPSLERHPAPRPHKASAGASPLAPVPAAEPRTRTHRLDGKKGQQPQHKAAVVPANAGGGLVSPAGSSRYLLLSGRFAAVAEEIQEVLEPAPAVDAIAKREEASDAADAKTAQAQEQA

SEQ ID NO: 49283 - protein, 388 aa, Zea Mays
MAIECLVLGAGQEVGKSCVVVTIGGKRVMFDCGMHMGYHDDRHYPDFARALAAWGAPDFTTAISCVVITHFHMDHIGALPYFTEVCGYHGPIYMTYPTKALAPFMLEDYRKVTMGQRGEEKQYSYEDILRCMKKVTPMDLKQTVQVDKDLVIRAYYAGHVIGAAMIYAKVGDAAMVYTGDYNMTPDRHLGAAQIDRLKLDVLITESTYAKSIRDSKPAREREFLKAVHKCVSGGGKVLIPTFALGRAQELCMLLDDYWERMGLKVPIYFSAGLTIQANVYYKMLIGWTSQKIKDSHTVHNPFDFKHVCHFERSFINNPGPCVLFATPGMITGGFSLEAFKKWAPSEKNLVTLPGYCVSGTIGHKLMCGKPTRVDYEDTHIDVRCQGCV

SEQ ID NO: 49284 - protein, 284 aa, Zea Mays
MINAPKSYHGGASETKICPSTWTVVSGRPTSQDKQGDIHGQYSDLLRLFEYGGFPPEANYLFLGDYVDRGKQSLETICLLLAYKIKYPENFFLLRGNHECASINRIYGFYDECKRRFNVRLWKVFTECFNTLPVAALIDDKILCMHGGLSPDLAHLDEIKNLQRPTDVPDQGLLCDLLWSDPGKDAQGWGMNDRGVSYTFGADKVSEFLQKHDLDLICRAHQVVEDGYEFFADRQLVTIFSAPNYCGEFDNAGAMMSVDETLMCSFQILKPAERKNKFMGSNKM

SEQ ID NO: 49285 - protein, 190 aa, Zea Mays
MASPAGANSGDEPGTIPRDVRVENGHGVVGRRDGGPASSYWDLLRAHLSDPLTGVLMDDALILSCGHSYGSSGMQHVYRMKACGKCGMPITEAAIRPNLALRLAVQAFKREEDSAKSLKRRRERLELDKCGDDDPNRTELATRGKQEDPGTVCGTSSSCDSAVLKWMVCCEDFRQRRECEAAIPFLGKGC

SEQ ID NO: 49286 - protein, 128 aa, Zea Mays
MASPAGANSGDEPGTIPRDVRVENGHGVVGRRDGGPASSYWDLLRAHLSDPLTGVLMDDALILSCGHSYGSSGMQHVYRMKACGKCGMPITEAAIRPNLALRLAVQAFKREEDSAKSLKRRRERLELR

SEQ ID NO: 49287 - protein, 210 aa, Zea Mays
MASPAGANSGASSSRGTPLPLPFPFPAAAHFPSRGAGPFLSQHYHPPSTSDGDDEVEEDEGSMDDGSAEEDDAELSDGGALGSPRRRAFSAPGIGRMEINGGNGVRSIQEGQQWHLCNHGIEIGRPSPGGDEPGTIPRDVRVENGHGVVGRRDGGPASSYWDLLRAHLSDPLTKLVVSVACQLLRPPFDQTWLFALQFRHSNVKKTQQSH

SEQ ID NO: 49288 - protein, 135 aa, Zea Mays
MNERELSALKSVIKCIEEHKLEQQYPVDPLQKRVLQLEKAKADKRMAVEAAKPQSKRPRANGSAFATRATGFADKSFYSATPERHPFNPCERQFVYGAEVHLPPMMTSASYTMQPAHGPYYGNGYPVQYQVSYIH

SEQ ID NO: 49289 - protein, 271 aa, Zea Mays
MEAHASRGRRTLEEIRQKRAAERMQHAVPIAASHVDSHGNQRAGAEHLARVQELENGNTELERENKMLLSKIAEKEVEKDALVNRLNDLERNVVPSLKKSLNDIYLEKDAAVVAKEDALAQLRSMKKRLKEAEEEQYRAEEDSASLRAQLNTLQQQMGHTYSGYTMGTSSEESVAMEKEIQDLQAQLKQESLLRQQEQQQLAEQSQLRQQEQEKLAKEQTRIASLEAEKQQLEDQITMLTKKATEDASEFAARKAFSMIGKNLNSSCMTWL

SEQ ID NO: 49290 - protein, 79 aa, Zea Mays
MEMQPAPPPSAAASASQTAWPLDWPVDGRSLNPPSPPTISVQYVSHIDFIIDFMRQFLPRLMGPLPFCNHLCMFTVSLW

SEQ ID NO: 49291 - protein, 434 aa, Zea Mays
MEFASRSRPTTTAADDEENDCLRRFPDHPPSQPQGHGEPNTSGVDAALLARRQKLLLELLKGSIQQGLILRELVETEHAMGFIAGSHNPVPALPQDFLRCWTPSMSTLEAHLRQPCPCGCGNSMAVRAPPVNPHLERSSHAPEQTRPGNDAEQHQEDRSSGVRTHPFNGHFKLCHSPSKQTPVPGKAGVNQMRPSSGHQQAIVWEKIGVEVVHNMQPLNEIKNHSSEGQKAVDSAIEVCVKKPIQQRLQYKPVDQENAANNEPTAEGTSAGVKRKLTTPSSPVKKQKPLGQWSCTICQANPASQRQLEQHLAGKRHQSNVAALQPSQSNSSSPEPDTKATPARSRIIATNAQQDGKQDVPENRWTCTLCRAKCYTELNYYSHLGGLWHREKAQARREEHLRFYCSVCDLQCNSEKMLESHLGGRRHRETLEARD

SEQ ID NO: 49292 - protein, 486 aa, Zea Mays
MGFIAGSHNPVPALPQDFLRCWTPSMSTLEAHLRQPCPCGCGNSMAVRAPPVNPHLERSSHAPEQTRPGNDAEQHQEDRSSGVRTHPFNGHFKLCHSPSKQTPVPGKAGVNQMRPSSGHQQAIVWEKIGVEVVHNMQPLNEIKNHSSEGQKAVDSAIEVCVKKPIQQRLQYKPVDQENAANNEHAPEQTRQGNDAEHHQEGRSSGVRTHPFNGYFELCRSPSKQIPLAGKAGINQVRPLSGHQQGVVWEKIGVEVVHNMQPLHEIKNPSSEGRKAIDSGIEDCVKKPMHHRLQYKPVDQENAASNDQKSTEFNEPTAEGTSAGVKRKLTTPSSPVKKQKPLGQWSCTICQANPASQRQLEQHLAGKRHQSNVAALQPSQSNSSSPEPDTKATPARSRIIATNAQQDGKQDVPENRWTCTLCRAKCYTELNYYSHLGGLWHREKAQARREEHLRFYCSVCDLQCNSEKMLESHLGGRRHRETLEARD

SEQ ID NO: 49293 - protein, 211 aa, Zea Mays
MASNNGGAMQEPLLPKAPKSGGWLWKGTRPSASGDLPSSKAVLRPPRHVPALLCTLIVALGPVQFGFTSGYSSPTQDAVIRDLNLSISEFSAFGSLSNVGAMVGAIASGQMAKYVGRRGSLMIAAVPNIMGWLAISFAKDTTFLYVGRLLEGFGVGVISYVVPVYIAEISPHNMRGALGAVNPLSATFGVLLSYVLGLFFPWRLLALIVGM

SEQ ID NO: 49294 - protein, 258 aa, Zea Mays
MNMMDDCETSLQVLRGFDADITEEVNDIKIAVASANKSGTISFRELNQKKYRTPLILGIGLLVLQQLSGINCIIFYSGSIFKAAGLNNSNLDTCLIGAISVLATGVTTTILDRAGRRILLIISSSGMTLSLLAVAVVFCIKDNIAQDSDLYNILRIVSLVGVVAYVTAFSFGMGSIPWIIMSEILPVSIKCVAGSFATLANWLTSFGITMTANLLLNWSAAGTFASYMMVSAFTLVFVILWVPETKGRTLEEIQWSFQ

SEQ ID NO: 49295 - protein, 285 aa, Zea Mays
MNQLSTGSSYELGENQFTDLTEEEFKDTYLMKLDEQPPAAEAMPPTVGTMSTAGMSNGNNTGEAPNSVDWRTKGAVTRVKDQQQCGSCWAFATVASIEGVHQIKTGRLVSLSEQEIVDCDRGGNDNGCRGGSPRSAMEWVTRNGGLTTESDYPYVGSQRQCMSGKLGHHAARIRGYQAVQRNNEAELERAVAGQPVAVFVDASRAFQFYKSGVFSGPCDTTTVNHVVTVVGYGSTGSDSGGRKYWIVKNSWGQGWGENGYVRMARRVRAREGMCAIAIEPYYPVM

SEQ ID NO: 49296 - protein, 375 aa, Zea Mays
MARKHQHVAIFTTACLPWMTGTAVNPLFRAAYLAKAGDWEVTLVVPWLSKGDQELVYPNKMRFSLPAEQENYVRRWLEERTGLLPKFDIKFYPGKVIRLSAATQDVPRSVICNVHGVNPKFIEIGKLKHQQLCQREQAFFKGAYYIGKMVWSKGYTELLQLLHKHQMELSGLKMELYGSGEDADEVKASAERLSLDIRVYPGRDHGDSIFHDYKVFINPSTTDVVCTTTAEALAMGKIVICANHPSNVFFKRFPNCHMYNTDEEFVRLTMKALAEEPIPLSDDLRHELSWEAATERFIRVADIAPTVPVGQPPPSSQHFMRISPDELQKNMEEASAFFHNTISGFEAVRCVFGAIPNTLQPDEQQCKELGWNLQG

SEQ ID NO: 49297 - protein, 387 aa, Zea Mays
MVWIVYLVHKFSLVISSLMIAAIPNIIGWLAISFAKDASFLYMGRLLEGFGVGIISYTVPVYIAEISPQNMRGALGSVNQLSVTFGIFLAYLLGMFIPWRLLAVIGALPCTMLIPGLFFIPESPRWLAKMNLTEDCETSLQVLRGFETDITTEVNDIKRAVASSSKRTTISFQELNQKKYRTPLLLGIGLLVLQNLSGINGVLFYASSIFKAAGVTNSDLATCSLGAIQVLATGVTTWLLDRAGRRILLIISTSGMTLCLLAVSVVFFLKDNISQDSNSYYILTMISLVGIVSFVITFSFGMGAIPWLMMSEILPVSIKSLGGSIATLANWLTSFAITMTTNLMLTWSVGGTFLSYMVVSAFTIVFVVLWVPETKGRTLEEIQFSFR

SEQ ID NO: 49298 - protein, 523 aa, Zea Mays
MESEAGLLVRSSLNGEGLCMPAPRADPLNWGKAAEGLSGSHLDEVKRMVAEFRDPLVKIQGASLSVAQVAAVAVGAGGGEARVELDESARERVRASSDWVMGSMMNGTDSYGVTTGFGATSHRRTKEGGALQRELIRFLNAGAFGTGADGHVLPAEATRAAMLVRVNTLLQGYSGIRFEILEAITKLLNTGVSPCLPLRGTITASGDLVPLSYIAGLITGRPNAQAVTVDGRKVDAAEAFKIAGIEGGFFKLNPKEGLAIVNGTSVGSALAATVMYDANVLAVLSEVLSAVFCEVMNGKPEYTDHLTHKLKHHPGSIEAAAIMEHILEGSSFMKHAKKVNELDPLLKPKQDRYALRTSPQWLGPQIEVIRAATKSIEREVNSVNDNPVIDVHRGKALHGGNFQGTPIGVSMDNARLAIANIGKLMFAQFSELVNEFYNNGLTSNLAGSRNPSLDYGFKGTEIAMASYCSELQYLGNPITNHVQSAEQHNQDVNSLGLVSARKTAEAIDILKLMSSTEDIFWCT

SEQ ID NO: 49299 - protein, 203 aa, Zea Mays
MAPSLLGGFTKSLAMTVLSEIGDKTFFAAAILAMRHPRKLVLAGCLTALIVMTALSASLGWVAPNLISRKWTHHLTTLLFFLFGIWSLWEGFKEDGYRDSEELAEVEAELDAAFKSNKGESKNKFKANDDMKKQQRPFLMQFFSPIFLKAFSITFFGEWGDKSQIATIGLAADENPFGVVLGGIITLHYCCRSWWKEPSVPDI

SEQ ID NO: 49300 - protein, 272 aa, Zea Mays
MGRGRIEIKRIENNTSRQVTFCKRRNGLLKKAYELSVLCDAEVALIVFSSRGRLYEYANNSCCSVKATIERYKKAHTVGSSSGPPLLEHNAQQFYQQESAKLRNQIQMLQNTNRHLVGDSVGNLSLKELKQLESRLEKGISKIRARKSELLAAEISYMAKRETELQNDHMTLRTKIEEGEQQLQQVTVARSVAAAAAAATNLELNPFLEMDTKCFFTGGPFATLDMKCFLPGSLQQMLEAQQRQMLATELNLGYQLAPPGSDAADNNPHHQF

SEQ ID NO: 49301 - protein, 366 aa, Zea Mays
MPEAEWNDEHTRIVCELFEEQVRAGNRPNTHLNNIGYRQVAAKFQQRTELLYTKLQLKNKWDKFKNDYITWRKLLVVGKGLPWDTAKGTFVADEEWWKKINKELPGARKFRHGGLHHEDKLNVMFDYITSNGVDPSPPAPESPKNGVNHSPPAATGLPSAPDCALNGVDHSPVTAHGLPSGPYSPMNGMDQLPLPAHDLRSVQEIPMNGVNLDGLDNNTEDNDDIYQEPVFQYTSNRKKRPISFSATKKNKKNKAETALLMQAHLYRITELAQKAQDTFKKFSSQADLVPWPSIQDVMTLVWECGARCGSNEHFIATELFVSREQREMFLTMETAEERFQWLRRKYIVKYLSAIISFGRKAGQIIV

SEQ ID NO: 49302 - protein, 759 aa, Zea Mays
MSVDFHPFGEFFASGSLDTNLKIWDIRRKNCIHTYKGHTRGVNTIRFTPDGRWVVSGGEDNIVKLWDLTAGKLLHEFKCHEGQIQCIDFHPHEFLLATGSADKTVKFWDLETFELIGSTGPETTGVRSMTFNPDGRSLLCGLHESLKVFSWEPIRCHDTVDVGWSRLADLNVHEGKLLGCSFNQSCVGIWVVDLTRLEPYTMGTSTKVNGHSELKTVSSGTLPLQNDSGSRANIGRSSVLQNTENNLKTTSGRLSASQNSDSAPKETNSAPSSGLIPSTPHRAGVGSHNRSVGNSAFQSGGTTLKRSSLRNNSASNVHNFSKADVVPVIVPRTSSGGELATDSRSDAADVAPVLPKVTRRVEPATDSRKESNDVELVVPRASSRMEIADLAPISSSKSGRRLESAPDSKEESADTAPVVVSNPRANVRMEIVSDSAPALSKSNRKLDSGTNSKKESADAVIVPRTNSRMEMISDSRREPSAGRISPFRIQSRYAEPRKLAHARTDSNKVDSRSKITETEDFNCQIFLPRRNSVFQTISSEEPREDVKCGPVDRMFLECANQETTAISKFQEQRGSNQASEAPIIASDEDVLSLIMERHDLFLSSTKSRLMKLQIIHQMWERNDIRGVLSAMDRMGDHAVCADMASVLMEKSETITLDLCTSILPVVTDLLESKIDRHLVVALELLVKLVRTFGPMIHSTVSSGPCVGVDLEAEQRRERCNLCFIELEKAKNKLPSLTRRKGAVANAAQELALVFQEIMS

SEQ ID NO: 49303 - protein, 739 aa, Zea Mays
MEKSKLKKVREYRLGKCYHNKTGEEFVAHSSNVNCLKIGRKTSRVLVTGGEDHKVNLWAIGKPNSILSLSGHTSAVESVGFDSTEVFVAAGAASGTIKLWDLEEAKIVRTLTGHRSNCMSVDFHPFGEFFASGSLDTNLKIWDIRRKNCIHTYKGHTRGVNTIRFTPDGRWVVSGGEDNIVKLWDLTAGKLLHEFKCHEGQIQCIDFHPHEFLLATGSADKTVKFWDLETFELIGSTGPETTGVRSMTFNPDGRSLLCGLHESLKVFSWEPIRCHDTVDVGWSRLADLNVHEGKLLGCSFNQSCVGIWVVDLTRLEPYTMGTSTKVNGHSELKTVSSGTLPLQNDSGSRANIGRSSVLQNTENNLKTTSGRLSASQNSDSAPKETNSAPSSGLIPSTPHRAGVGSHNRSVGNSAFQSGGTTLKRSSLRNNSASNVHNFSKADVVPVIVPRTSSGGELATDSRSDAADVAPVLPKVTRRVEPATDSRKESNDVELVVPRASSRMEIADLAPISSSKSGRRLESAPDSKEESADTAPVVVSNPRANVRMEIVSDSAPALSKSNRKLDSGTNSKKESADAVIVPRTNSRMEMISDSRREPSAGRISPFRIQSRYAEPRKLAHARTDSNKVDSRSKITETEDFNCQIFLPRRNSVFQTISSEEPREDVKCGPVDRMFLECANQETTAISKFQEQEEQGQVSLIGKGGISPLVMKNQQQAVLHWLLPAIHIHLEEAIKLLKLQS

SEQ ID NO: 49304 - protein, 403 aa, Zea Mays
MELLLPVFLKLFPNMLPSTFQDKMKEEEALKRKLKARMEYAKFLQDTAKEMAKEVQTSRSGEMKQTAEDLDEFLNKVRKGGHASNDEILSFAKLFNDELTLDNMSRPRLVNMCKYMGIQPFGTDHYLRFMLRKKLQDIKNDDKMIQAEGVESLSEYELRQACRERGHLGLLSTEEMRQQEEEKRQEKDDKAKLEEPKATEEDLALKEMTEPTVREKEELKKAKTHDKKEQLCNISQALAVLASVSSVTKERQEFLSLVNKEIELYNNMLAKEGTDGEEEARRAYKAAREESDHAAEAAVGEKVSSALIDRVDAMLQKLEKEIDDVDARIGNRWQLLDRDCDGKVTPEEVAAAANYLKDTIGAEGVQELISNLSKDNEGNILVEDIVKLASQTEENNEAEETAR

SEQ ID NO: 49305 - protein, 725 aa, Zea Mays
MASRAIIRRRNDILRHTHVPILSPSFTSTIGQGQFDCEVDHQRSVCYFSKESLADSNHAMAHCTLNKRKLCHLSSGFAWHPACEVSLPTYGSRAQNFVFPLGVRCFLQSVRTTSNTTAQGQVHIMDKKSEDEKQKQQKKEASPEECDQAVEGLSTAKAKAKAKLEEVQKTDQSVVQKLWAKLLGIGPALRIIASMSRADWAAKLKHWKDEFISTLQHYWLGTKLLWADVRISSRLLVKLASGKSLTRRERQQLTRTTADLFRLVPFAVFIIVPFMELLLPVFLKLFPNMLPSTFQDKMKEEEALKRKLKARMEYAKFLQDTAKEMAKEVQTSRSGEMKQTAEDLDEFLNKVRKGGHASNDEILSFAKLFNDELTLDNMSSIKNDDKMIQAEGVESLSEYELRQACRERGHLGLLSTEEMRQQLRDWLDLSLNHSVPSSLLILSRAFTVSGKMKPEEAVVATLSSLPDEVVDTVGTVLPSEDSVSERKRKLEFLEMQEELIKEEEKRQEKDDKAKLEEPKATEEDLALKEMTEPTVREKEELKKAKTHDKKEQLCNISQALAVLASVSSVTKERQEFLSLVNKEIELYNNMLAKEGTDGEEEARRAYKAAREESDHAAEAAVGEKVSSALIDRVDAMLQKLEKEIDDVDARIGNRWQLLDRDCDGKVTPEEVAAAANYLKDTIGAEGVQELISNLSKDNEGNILVEDIVKLASQTEENNEAEETAR

SEQ ID NO: 49306 - protein, 71 aa, Zea Mays
MKVVLELFLDCITEPNEKLVEFGIGGICNSCEDPANSLIITQCGGIPLVVQCLWSLVRNTISISEDIVISS

SEQ ID NO: 49307 - protein, 135 aa, Zea Mays
MGGRREAIERELKKLRAEREELDGRIRLLESQLEAGPAGFNGAAAGKGVGDDACGGSGACQSRVGNEFAPDGSLPADMIYRYSRHLLLPDFGVEGQRKLSQSSILVVGAGGLGSPLALYLAACGVGSNRQKQMDR

SEQ ID NO: 49308 - protein, 287 aa, Zea Mays
MGGRREAIERELKKLRAEREELDGRIRLLESQLEAGPAGFNGAAAGKGVGDDACGGSGACQSRVGNEFAPDGSLPADMIYRYSRHLLLPDFGVEGQRKLSQSSILVVGAGGLGSPLALYLAACGVGRLGIVDGDDVELNNLHRQIIHKEAYVGQSKVKSAADACREINSSIKVVEYHHTLKPCNALEVARKYDIVVDATDNLPTRYMISDCCVLLNKPLVSGAALGLEGQLTVYHHNGSPCYRCLFPTPPPVAACQRCSDSGVLGVVPGVIGCLQALEAIKVATGVG

SEQ ID NO: 49309 - protein, 239 aa, Zea Mays
MLREFAQEVYIMKKVRHKNVVQFIGACTRPPVLCIITEFMHGGSIFDFLYNRRGNFQLPDVIRIASDVSKGMNYLHQINIVHRDLKTANLLMDDQVVKVADFGVARVKDQSGVMTAETGTYRWMAPEVIEHLPYDHRADVFSFGIVLWELLTGKLPYEDMTPLQAAVAVVQKDLRPTIAVDTHPMLAELLQRCWQKDPALRPTFAEIVDILNSIKEAVRSSVHHKRHSCRSHSGRRRGC

SEQ ID NO: 49310 - protein, 265 aa, Zea Mays
MSTLPWNVLIVLSLSASTWEIRTLYTSGSSSPKCVVTLMLEIAPSFWGRWKRRHSNFDKSIPFALLSQVAGIREYFAANPALTSELPSTVVKSKASETLIIQSEHEDSELGDEFYDALTRGESFEDGDSDDDDDATTPKARKVKLKNVSWAIAGLALKTTKALVETSELVTNSSPVTVDPSHFHGTLHRAKTQNDQNSWSAPGGEKFMIRGKTYLTDYHKVVGGDPLLELLAVDWFKVNERFDSVALHPKSLVQKLQRNFLSYWL

SEQ ID NO: 49311 - protein, 72 aa, Zea Mays
MNRHLLIAFGGLAGLEESIEEDTNLKGKRADDVFTSYFNTCPNQGSRTIRTEALLISLQYFQDPIRRAEQKL

SEQ ID NO: 49312 - protein, 299 aa, Zea Mays
MSSQTGGGKESDAGPGQHRQMQSLARQGSLYNLTLDEVQNHLGEPLLSMNFDELLKSVFPDGVDSDGAVTGKPDRTSSLQRQGSILMPPQLSKKTVDEVWKGIQGGPETSTVVDGLQRRERHPTLGEMTLEDFLVKAGVVTEGLVKDSADFPSNMDTAGSSVVVAAASSLNPGAQWLQQYQQQVLGSQQLSLAGSYMASQLRPQPLSIATGATLDSIYSDDQITSPSFGALSDPQTPGRKRGALGEVVDKVVERRQKRMIKNRESAARSRARKQAYTNELENKVFRLEEENKRLKKQQS

SEQ ID NO: 49313 - protein, 119 aa, Zea Mays
MARLGRLPTPAEQPRQQPAATGQPRRHLLMTDWSVFVSSKRLVSGDTFIFLSVTTLHVKVVLFIHVCILNITSKETCYMHNFLAETKYNRAVKKVFLTTMHRTYLGGEINFTDGSINFY

SEQ ID NO: 49314 - protein, 65 aa, Zea Mays
MVSLQMCARCFWTWTVNYLKSASSSIWINKQKPKRCRSNENQHGDNWKLLLLPRLLGMTWFWSTR

SEQ ID NO: 49315 - protein, 427 aa, Zea Mays
MFNKIIKRGNRKGARGDSAEVAARPAAPSSSSGSGGGGAGGAAPVTVNHASRATAPSPSSPTSPHVTPSAFATNPAVGAASPPLLEPLPLLRDVAAADRPGLILRKLRLVAALFDLSDSLKHPREKEAKRQALLELVDYVQAPAQAAGANAPTRLPDHVQEALVLAISANIFRPLPPALHESAAAIDPGAAPDDDEEPYLDPSWPHLQLVYELLLRYVVSPDTDTKVAKRYVDHAFVLRILDLFDSEDPREREYLKTVLHRIYGKFMVHRPFIRKAINNVFYRFIFETQRYNGIGELLEILGSIINGFALPMKEEHKLFLARALIPLHKPKSVVIYHQQLSYCIVEFVEKDYKLADTVIRGLLKYWPVTNCQKEVLFLGELEEVLEATQPAEFQRCMVPLFKQIARCLNSSHFQNLDAMGWKNLSWV

SEQ ID NO: 49316 - protein, 95 aa, Zea Mays
MVSLQMCARCFWTWTVNYLKSASSSIWINKQKPKRCRSNENQHGDNWKLLLLPRLLGMTWFWSTRSMFLASVKNMWAEFEHIGGRDSQSTQNFCV

SEQ ID NO: 49317 - protein, 121 aa, Zea Mays
MLSQAVGVVREPAEESARASPPERRRLPPPQIRYDDLYDPYHDLDIKEALARLPREVVDARNQRLKRAMDLSMKHQYLPDDVQAIQTPFRSYLFDMLALVKKESAEREALGALPLYQRTIP

SEQ ID NO: 49318 - protein, 553 aa, Zea Mays
MWLFKEQHLSSPHWRNQRSYVMSEQVCINPDENTGLCTLLVSGYLRAHNLSVNQLVHVSGAGDFQLGQIDVLKDPCPLSERKSSDVMETEDNGIQIVNTFVPDPSSQEPLLVENVPDPLAGEQTWPTEEDMEEVDINNKQRKLEKRKLPQGTSEYQAAWIVEDTDDEDNDSDDDNQTESGMVIDEQGHSDQGSDGSDIDAVSHFTEKFDGETIGDTEMADEENLTKDQIEAEIKKIKEANADDEEFPDEVETPLDVPAKKRFAKYRGLKSFRTSSWDPKESLPLDYARIFAFDNFTRTQKHVFAKIAELDGGMKNCAQVGSYVRLYVKNVPTDIASKLCHPSRRIPVVVSGLLQHESKMSVLHFSIKKHDSYEAPIKSKEPLIFNVGFRQFTARPLFSSDNINCNKHKMERFLHHGRFSVASVYAPISFPPLPLIVLKNRDGEQPAIAAVGSLKSVDPDRIILKKIVLTGYPQRVSKLKSIVRYMFHNPDDVKWFKPVELWTKHGRRGRIKETVGTHGAMKCLFNSSIQQHDTVCMSLYKRAYPKWPEQLYHV

SEQ ID NO: 49319 - protein, 397 aa, Zea Mays
MAGRFLLVVAVALLLRPGDASVHEYRGLSFANKGNAFILHAGSEGLYAASHANTTAEDAAAVAEALIRFDKITFRRSEDTNNSVKETSSAKVQVLIFEIEDREMIGGSAYGGQKAICCTSDLAKLGACTEGSVIYRPSQVNPGWPKLFVASFDGSDLIATLPSRTIPITKTGIYNMYFIHCDPSLASLEIEGKTIWKNPTGYLPGRMAPLKNFFGLMSFAFVVLGIYWFYQYMKSWREVLPLQNCITLVITLGMFEMALWYFEYAEFNETGVRPKGITFWAVTFGTVKRTAAEVIVLIVSMGYGVVTPTLGGLTSKVVMLGGTFFLATEILELVENLGAVNDLSGKARLFLVYPVAILDAAFVIWIFISLAKTIGKLQEICNCIDHICSGVCWVDWL

SEQ ID NO: 49320 - protein, 407 aa, Zea Mays
MRKLPPAHRLRWMRALLLALPLVSLPILYAALGAARSSASAARPPPPPPQQQQQRRPPPRLAYLITGAGPGDGPRIRRLMRALYHPWNYYLVGVAGEDERTDLEAFVRAQEAPRRYGNVRVSAAGEWGSVSRRGPTELASTLHAAAVLLREFDGWSWFINLSASDYPLMPQDDILHIFSYMPRDLNFIEHTSNIGWKEYQRARPIIVDPALQVPNKTEVVTTKEKRSMPSAFKIFVGSSWVMLSRSFLEFCLLGWDNLPRTLLMYFTNFLSSSEGYFHTVICNSEYYQNTTVNSDLRFMAWDNPPRTHPANLTTEHFDAMADSGAPFAHSFANDNSVLDMIDAKLLGRAPDRFTPGGWCLGSSVGGKDPCTFLGRSFILRPTKGSAKLEKLLLKLLEPDNFRPKQCK

SEQ ID NO: 49321 - protein, 153 aa, Zea Mays
MAMQTGVATSKVLILVGAGMTGSILLRNGRLSDVLGELQEIMKGVNQGTSSGPYDIALIQAQIRNLAQEVRDLTLSKPITILNGKSDSGGSLSSYILPAAAVGAMGYCYMWWKGLSLSDVMFVTKHNMANAVQSMSKQLEQVSSALATSNSTA

SEQ ID NO: 49322 - protein, 150 aa, Zea Mays
MKVESPRTSPSRADPSPRLHPSDIHLHLIATSMACRAWPRLRPAHLRGWPPRIPFFPPYEDHADADAGRRKESTRPRDAVMPVPLRDAATPRCPCPSPRRRDARTARACPHPDAPPPHHAPSSPCDPCPQPSFPYYLKQDLWEEYIDLIM

SEQ ID NO: 49323 - protein, 66 aa, Zea Mays
MPRQMCTSLGRKARSCHHKLLANLAICHENKTGQHYSLRGNNLRFLFASANLIYQLIFFHFLPISY

SEQ ID NO: 49324 - protein, 347 aa, Zea Mays
MAEPGLEGSQPVDLSKHPSGIVPTLHGIFLKCVGSSVPLNRGMKPFLAAISVSPGASAFKRRGTWGSFELKESGGNEMDGEYARHWMSADVKSRVSSSVGRSGSDDLFRPYEISGWAGYASLVAAILKLHETVRMDWPNSWAAVVPSSSVMLRDCGTMLKIRLCSHEEGNKDRNIVSTVNLDCKLDLKAIALQARNAEYNPKRFAAVIMRIREPKTTALIFASGKMVCTGAKSEQQSKLAARKYARIIQKLGFPAKFKDFKIQNIVGSCDVKFPIRLEGLAYSHGAFSSYEPELFPGLIYRMKQPKIVLLIFVSGKIVLTGAKVREETYTAFENIYPVLSEFRKIQQ

SEQ ID NO: 49325 - protein, 567 aa, Zea Mays
MASVLPDTASDGKALTDAWDYKGRPASRATTGGWACAAMILGAELFERMTTLGIAVNLVPYMTGTMHLGNASAANTVTNFIGASFMLCLLGGFVADTYLGRYLTIAIFTAVQATGVMILTISTAAPGLRPPACADAKGASPDCVPANGTQLGVLYLGLYLTALGTGGLKSSVSGFGSDQFDEAHGGERKRMLRFFNWFYFFVSIGALLAVTVLVYVQDNVGRRWGYGICAVGILCGLGVFLLGTRRYRFRKLVGSPLTQVAAVTAAAWSKRALPLPSDPDMLYDVDDAAAAGADVKGKEKLPHSKECRFLDHAAIVVVDGGGESSPAASKWALCTRTDVEEVKQAEVMDRALGGGSGFLIPAGSLTVFLIGSILLTVPVYDRLLAPLARRLTGNPHGLTPLQRVFVGLLLSVAGMAVAALVERHRQVASGHGATLTVFLLMPQFVLVGAGEAFTYMGQLAFFLRECPKGMKTMSTGLFLSTCALGFFFSTLLVTIVHKVTAHAGRDGWLADNLDDGRLDYFYWLLAVISAINLVLFTFAARGYVYKEKRLADAGIELADEESIAVGH

SEQ ID NO: 49326 - protein, 108 aa, Zea Mays
MPLSLSTSHAHACTHPLVTQTIVSSAPVLATASTSVESSDRASGRRCRPRFAMPPTPTRRRAKPALTSGQIYLPVWCCAYDHLVKMLQQAYAQVEELSVEREHLVNEL

SEQ ID NO: 49327 - protein, 385 aa, Zea Mays
MAPGTDAGYGQWAAACPPLRRNLQLLSPDEVELAKMLLNEGQIHLFEHWPEPGVDDDNKRGFFDQVRRLNSSYPGGLVSYIQNAKKLLADSKEGKNPYDGFTPSVPSGEVLTFGNDNFVSLETAGIKEACNAAFVLVAGGLGERLGYKGIKVALPRETTTGKCFLQHYIESILAFQEASCKMVDEGCQTKIPFVIMTSDDTNALTIKLLESNSYFGMEPSQVKILKQEKVACLADNDARLALDPSDKYKIQTKPHGHGDVHSLLYSSGLLEQWKTEGRKWVLFFQDTNGLLFNAIPSALGVSATKGYNVNSLAVPRKAKEAIGGITKLTHVDGRTMVINVEYNQLDPLLRATGHPDGDSNCETGYSPYPGNINQVNYLFQRDNLP

SEQ ID NO: 49328 - protein, 85 aa, Zea Mays
MFIIDVSAHSPSMEEREFQKHMESTRLATQVSIASPSSSQGLPTSARANQEETDMAGTDEGYPWSSLMLQDQYRCVSLLVVSEWG

SEQ ID NO: 49329 - protein, 87 aa, Zea Mays
MEKRGYGVWSGYKPKSCSGRAPERAPPVLVWYKGESRCPTPHRRQALQPLCLARPALVPGIPSTFSFTFSNYVHLVGVIDSWEPGCN

SEQ ID NO: 49330 - protein, 125 aa, Zea Mays
MQRDIRELARGWQPSQVRFCVRQIEVLDSKERHMEEAWAVSGDLQQSGRTYHQGKDCTFHFSMIILFSMLLLGFTFILSVCTQLEEQTCNLFNKMVVICNNIKLLQDRFFGFLDCTTEFREWYAL

SEQ ID NO: 49331 - protein, 617 aa, Zea Mays
MEEVQNCVMKLRSNPRRHRDKVYVGCGAGFGGDRLMAAYKLLQRVKELNYLVLECLAERTLADRYRIMVSGGKGYDPRVKEWMSLLLPLAFERKVCIITNMGAMDPLGAQKEVLNLASVLGLEITVAVAYESSFETQGSPVLSDESTGGRGGCSTYLGAASIVHCLENYKPHVVITSRVADASLFLAPMIYELGWNWNDTQLAQGTLASHLLECGCQLTGGYFMHPGDAYRDFPFEQLLDLSLPFAEVSCRGEVIVSKVDGSGGLLSPHTCAEQLLYEVGDPANYITPDMVVDFCNVQFHQISKDKESGWKGWGEISYGGHQCLKRAQAAEYLVRSWIGERYPGINEKIVSYVMGYDSLKAIGGDEDSYLAKQVLDVRLRMDGLFELEEHAVQFVEEFIALYTNGPAGGGGISTGHRKEIILQKMLVDRENIFWRSHAKKASIPCLHNQATYSETGQARISQAQRNPTCRTMAIQHFEASTETPASPAPALPGKRVALYHVAHSRAGDKGNDMNFSVIPHSPADIGRLRSVITPDWVKNAVSPLLGSSSFPDERDVQHRNKLLELVTVEIYYVPGISSLNVVVRNILDGGVNCSRRIDRHGKTLSDVILCQQVILPP

SEQ ID NO: 49332 - protein, 335 aa, Zea Mays
MEEVQNCVMKLRSNPRRHRDKVYVGCGAGFGGDRLMAAYKLLQRVKELNYLVLECLAERTLADRYRIMVSGGKGYDPRVKEWMSLLLPLAFERKVCIITNMGAMDPLGAQKEVLNLASVLGLEITVAVAYESSFETQGSPVLSDESTGGRGGCSTYLGAASIVHCLENYKPHVVITSRVADASLFLAPMIYELGWNWNDTQLAQGTLASHLLECGCQLTGGYFMHPGDAYRDFPFEQLLDLSLPFAEVSCRGEVIVSKVDGSGGLLSPHTCAEQLLYEVGDPANYITPDMVVDFCNVQFHQISKDKVSCDGAKPSNACCPEKLLQLSPTVGLVRC

SEQ ID NO: 49333 - protein, 235 aa, Zea Mays
MAAAVEGVRHRTLEANGVRLHVAEAGPEEGSAPVVLLLHGFPDLWYGWRHQMSALAARGYRAVAPDLRGYGDSDSPPDASSYTTFHVVGDLVALISDLGQRQVFVVGHDWGATVAWQLCLLRPDLVRALVNLSVVYHPRRPEMSPLQAIRAACGEDHYMCRFQLNLLYMTSSGCLRRHLACASQLLLFCPRTRASLTLLIQMELVLHGYQRKIFLTMQKNLRKQALLEDLTTTGA

SEQ ID NO: 49334 - protein, 904 aa, Zea Mays
MRLILLWLSIWAVCSAASAGAGSDMEALLEFSRGIRQDPSRRQAIPWNPTSALDSDDCPVDWHGVQCIGGQILSIAFDGIGLVGNASLSVLARMPVLRNLSLSDNKLEGFLPGELGSMASLQLLDLSNNRFSGSIPSELTKLAGLGYLNLSSNGFRGALPLGFRNLRKLKYLDLHDNGFTGKLDDVFAQLQSPVHVDLSCNQFSGSLASISDNSSVVSTLQYLNVSHNVLSGTLFDSVPMPLFDSLEIFDASFNMLSGNIPQFNFVISLKVLRLQNNNFSGSIPEAFFRETSMVLTELDLSCNQLTGPIRRVTSTNLKYLNLSHNNLQGTLPITFGSCSVVDLSGNMLYGNLSVARTWGNYLQMVDLSSNRLTGSWPNETTQFLRLTSLRISNNLLSGELPIVLGTYPELIFIDLSINQLHGPLPGNLFTAVKLTFLNLSGNSFTGTLPLRNSDTKNSTSIDLSILPVQTSNLSYVDLSSNFLHGSLPMGIGDLSALTLLNLRQNNFTGEIPRTITKLKNLLYIDLSSNNFNGSIPDGLPDDLVEFNVSYNYLSGSVPSNLLKFPDSSFHPGNELLVLPRSESLNGSDKSDEARHGLKRGILYALIICVVVFVTGIIALLLVHWKISSWKSREKGTGQGKHVGQVQSAQRSAEISTTEMHDVALESSPSAEYGAVSLPGKERRHEAQDAPIDAAYFNEPAGSSSARKDSTKSSMPSLSSSPPDARSQHHHSILRVHSPDKLVGDLHLFDNSVVFTAEELSCAPAEIIGRSCHGTSYKATLDNGYMLTVKWLKEGFAKSKKEFSREIKKLGSVRHPNLVPLRGYYWGPKEHERIMISDYADATSLSTYLSEFDERNLPPLSAGQRLNIAIDIARCLDYLHNERADDSNRHGGAGPKRRRARIFPS

SEQ ID NO: 49335 - protein, 290 aa, Zea Mays
MEAAPSARAFSPSSSPSAGARPSLPLAGLASRRARVLAAPPPPRAVASSRAPLVVSSPPPPEDSGTHNPAHAKVDRSGRFCSPRAARELALMISYAACLEGTDVVRLFDRRISARREPGFVFNKACLLNYNHMSFGGGPLEVGTEQEAEKLASQNDKDSANDVLSAPPKLVYNNYVLRLSRELLVAVASGWDKHVVIIDKIIPQAWKVRYLFLIFYVDSSIPSTCITASNYLYVQQSGSNMYLFCILHHCFSHYTVLVNNHSDAYQKLFTVWFEHILILYITPLFFIALK

SEQ ID NO: 49336 - protein, 130 aa, Zea Mays
MERSYADPRKGEVVVRWWRWPMGGSTNPRVRPTRRYSPLRGSAVRSQGEKPCNPMKGETVARWWRRPAVGCKYEHLAKRVFLPMLPLPPAPHARRRAARPRRSLPSHHAPRCGGQHHPRRQSLVGPTLSA

SEQ ID NO: 49337 - protein, 627 aa, Zea Mays
MEYLKTARNLLKKAGEAVPVELLNGIGLLHFEKGEFEMAEQSFKEALGDGLWVSIMDGKVGSSMINWSVQNKDQSFFHQLEGVPLELHSNKVTTLFNYARLLEELHDSVRASIFYRFIIFKYPDYIDAYLRLAAIAKQRNNVQLSIELIGDALKIDEKNPNALSMLGSLELQSDEAWLTAKEHFRNAKEATKGDTYSLLQLGNWNYFAANRPEKKAPKIEATHREKAMELYQTQVLKQHRSNMFAANGIGILYAEKAKWDVAKELFTQVHEAASGSIFVHMPDVWINLAHTYFAQGHFQQAVKLYQNCLRKFFHNTDATILLYLARTHYEAERWQDCRKTLLRAIHLAPSNYLLRFNVGVSMQKFSASTLQKTKQTVDEVRATVTELQNAIRVFSLLSVASTYHSHGFDERKIETHVEYCKHLLDAAKVHRDAAEQAEQQNKQKMEVARQIALAEEARRRAEEQRKFQLERRREEDELKQVKQQEEHFQRVKEQWKTSSNTPGKRKDRSKTEDEEVGNKKRRRKGIRRKDQKTKMQYGEEEDEYKDEPEADDDYADLARYNGADNSERAPDHLLAAAGLDDSDAEDDMGHPQSAIERKRRAWSESEDDEPVKKPAAQPSPGADGLSE

SEQ ID NO: 49338 - protein, 509 aa, Zea Mays
MTSVYIPVQGTEEEVQVALDQLPHDASDILDILKAEQAPLHLWLIIAREYFKQGKIEQFRQILEEGSGPEIDEYYADVKYERIAILTALGAFHTFLGKVDRAPQKESHFKDATQYYNRASRIDETEPSTWIGRGQLCIAKGELQMASDSFKIVLDEDENNFPALLGQASVYFLMGEAEQQHKKSLEHYRNSLDLYKKALRVYCNCPAAVRLGIAFCRYKLGQVEKARQAFQRVLELDPQNVDALVALAIMDLQTNEAGGIRRGMEKMKKAFEIYPYYTLALNHLANHYFFTGQHFVVEQLTETALSSSNHGLLKSHAYYNLARSYHSKGDIETAGRYYMASVNEISKPQDFVLPYIGLGQIQLKFGDFKSSLGSFEKVLEVHPENCESLKAIGHIHAKSGETEKAIETFKKVTRIDPKDHQAFVELGELLVESDWAAAMEYLKTARNLLKKAGEAVPVELLNGIGLLHFEKGEFEVCLQLLHNITNYHLYRSLPLNYTFRWQNRVLRKH

SEQ ID NO: 49339 - protein, 343 aa, Zea Mays
MPSLSPTMTEGNIAKWLKKEGDKVSPGEVLCEVETDKATVEMECMEEGYLAKIIHGDGAKEIKVAEPVAPAESKAQPEPSQPKVEEKKLTQAPEVKAPKIEEASQSGDRIFASPLARKLAEDNNVPLSSVKGTGPDGRILKADIEDYLAKGGLREAFAAPGLGYVDIPNAQIRKVTANRLLASKQTIPHYYLTVDARVDKLVKLRGELNPLQDASGGKKISINDLVIKAAALALRKVPQCNSSWMNDFIRQYHNVNINVAVQTEHGLFVPVIRDADKKGLGTIAEEVKQLAQKARDNSLKPADYEGGTFTISNLGGPFGIKQFCAIINPPQSAILAIGSAEKR

SEQ ID NO: 49340 - protein, 162 aa, Zea Mays
MVSESAGGSSTWSVGIKGTIGVRNGRRCLHPRRPVQLWRPPARDVHGEAADGCLVPGRPDSAELRRVLLPGQGTGGSRPWPTASAGQRVFERRGRLLRRDRRRKAAQVHGVGISSRLAMLPGTTQSENACRDCHQRTRGGQGCPAKRLSLDRISRQQKHNKT

SEQ ID NO: 49341 - protein, 124 aa, Zea Mays
MDGDVSIQGDLYSYGVLLLEMFTGKRPTDASFQGGRTLQSYVASCYPDKVLEVADPGLRHQLGNGCLSGGDVCCDEIDAEKLRRCMASVFRVGLQCSQEPPRARMHVGTAIKELEAVKDALLND

SEQ ID NO: 49342 - protein, 90 aa, Zea Mays
MDRNPASSELTSSPTLYIFLDRRPRLHLRFFVHDSKSDADSKNRGAPTSCLNQEASPGYSTSSLPSTSWNAKKPKDVIRKKRYSRLQKPL

SEQ ID NO: 49343 - protein, 294 aa, Zea Mays
MFSFCFETWLVLEHEKQDQKQDLLFDTFWLMTFFESVSLVGSQEITNVLVSDDDSRFLLPYAFAATLSVVGILYIRNASSTCQHASAIGSYQKSFLAHVLRDKRVLILVLAQASIHFAVSAFWFLWAPTIVADGRYAQLSVIYPCFLASRMLGSAGFPWFYGAIAPFRNEDSLTIAYVGAGLALSIVAYDYQEIAPLVIVFCIFHACVGFILPSLARLRTMYLPNELRGGMMSFSMSLANAATFVFLIQGSAHHRHVANSTILSLASYGLLGAGGCVHMLRRWRKHTRLNARSL

SEQ ID NO: 49344 - protein, 451 aa, Zea Mays
MGVVVEREEWALSPFAYPLLSAAALAAVLLLPYLSPRTAAHATGPSSPFDVGAAPFLRFRRAFLVLFSLASGIHSVFGEDEFVRCGLGREQTTARLASTTAAALFPGAISGVISDKIGPRRACILYWVLQLAVGVVKSFSALRCSWINNFILAFASSVFSFCFETWLVLEHEKQDQKQDLLFDTFWLMTFFESVSLVGSQEITNVLVSDDDSRFLLPYAFAATLSVVGILYIRNASSTCQHASAIGSYQKSFLAHVLRDKRVLILVLAQASIHFAVSAFWFLWAPTIVADGRYAQLSVIYPCFLASRMLGSAGFPWFYGAIAPFRNEDSLTIAYVGAGLALSIVAYDYQEIAPLVIVFCIFHACVGFILPSLARLRTMYLPNELRGGMMSFSMSLANAATFVFLIQGSAHHRHVANSTILSLASYGLLGAGGCVHMLRRWRKHTRLNARSL

SEQ ID NO: 49345 - protein, 342 aa, Zea Mays
MSRVASLSPSLSGDEVEVEEEEEDEGVDGYRKGGYHAVRPGDQFAAGRYVAQRKLGWGNFSTVWLAFDVQSQRYVALKIQKSAPEFAQAALHEIEFLSEITKKDPLNCKCIIQLIDHFKHTGPNGQHICLVFELLGDSLLKLVQYNRYKGIGLDRVRQICKSILVGLDYLHNELGIIHSDLKLENLLLLSTIDPSKDPIRSGLKPCLERPEGNPNGEAGINAIENKLKMRARRVLAKLAEKRKSAVESSRSERSLGGIDLTCKIVDFGNACWADKQFTDFIQTRQYRAPEVILGAGYSFSVDMWSFACIAFELATGEMLFTPKEGHGYSEDESFSYLIEDRR

SEQ ID NO: 49346 - protein, 280 aa, Zea Mays
MLSLPQKPFLAVGLLEAFGAAAGMAAGAVLSGASIPILSQTYLVWQLLLSAIFLKRRYRINEIAGCFLVAIGVIITVASGSGTSASFKSSGILWPLLMIISFFFQAADTILKEIIFIDASKKLKCGSVDLFVVNSYGSAYQALFMCILLPFLSKLWGVPFHVLPTYIKDGAACFLNMGSISGCEGAPLLPLLFVLVNMGFNISLLNLLKISSAVISSLASTFSVPLSIYAFTLPLPYIGAASSLPPGFVAGAAVLTTGLLLYSLPQAQHYGNSFHNKNDD

SEQ ID NO: 49347 - protein, 333 aa, Zea Mays
MRADRAMGEGSGNQRIDLGAPLRSARLADAPTQYKAGLNSGPLRHPGTVPFAWEQRPGQPKSVRTRRAAPPTPPRETSRARPGETGGSPYYDAVAELDLQALRGVADQGSRTAAASRKVVVGENELAVAVESTKDVKKHEALPAAAVLQKQDGIVEEEEERFSDALDTLSRTESFAMNCSVSGLSGALDPGHGAEPGSRGFMMDRFLPAAQAVAVGSPQYTFRKAGAAGGTGNSGSGHARAAAVKAGVGNGEDRMRRAPVQLPYQHLPPNYLSCAYPRHEEHEEEDEGDDDDDDYDVHSTRGFSAKGNHGRMCISISWSRSILVKERMIGGAS

SEQ ID NO: 49348 - protein, 486 aa, Zea Mays
MATSFGFGSSATAGSTASSPFSSTPSAFSFSQPASASSPAPAFGSSLFSSSSAAASSAPTFGSSLFRASSAAAAPASSPAFGFGSTFSFGQSMAAASSAASAPSLFGATPASSAGTTLSLFGAATSAASSPGFFGATSTAASSPGLFGASATGSAATSPSLFGGTSGLFGGTSSAATTPSPFGATSSTAATVSPFGAASSAASTPSLFSGGATGFSFGSSASGSTTTTAAAPAPSFGFSFNSGPAASSTASTPTSAPALGFGGATGSSLFGSTTSAPLFSTTTASSPASAATTTPSFGFSSSPATTASAPSFGFTPSSGSATTANTAPSLFSSSATTLTTPASSSSTGFSLATSQAAPAPSLFSTSAIGMTTTAPLTGTTGFPNFNLQTTTPASTSSPTLAFGVSTTAASSSATSTTTQATSSAVQVSSTGPTTTTSITPAASQAPKLPSEIVGKNVEEIIRDWNNELQDRTAKFRKHATAIAEWD

SEQ ID NO: 49349 - protein, 533 aa, Zea Mays
MATSFGFGSSATAGSTASSPFSSTPSAFSFSQPASASSPAPAFGSSLFSSSSAAASSAPTFGSSLFRASSAAAAPASSPAFGFGSTFSFGQSMAAASSAASAPSLFGATPASSAGTTLSLFGAATSAASSPGFFGATSTAASSPGLFGASATGSAATSPSLFGGTSGLFGGTSSAATTPSPFGATSSTAATVSPFGAASSAASTPSLFSGGATGFSFGSSASGSTTTTAAAPAPSFGFSFNSGPAASSTASTPTSAPALGFGGATGSSLFGSTTSAPLFSTTTASSPASAATTTPSFGFSSSPATTASAPSFGFTPSSGSATTANTAPSLFSSSATTLTTPASSSSTGFSLATSQAAPAPSLFSTSAIAAAASAASGSSFPAVSTSGFSFAVAPSSSAAAATATTTTVTSASTSAGMTTTAPLTGTTGFPNFNLQTTTPASTSSPTLAFGVSTTAASSSATSTTTQATSSAVQVSSTGPTTTTSITPAASQAPKLPSEIVGKNVEEIIRDWNNELQDRTAKFRKHATAIAEWD

SEQ ID NO: 49350 - protein, 280 aa, Zea Mays
MPICSCEETIHEFEMLTRDAGRVQKDTLKKILELNADAEYLNKFGLNGRTDVESYKSCIPLCVHSDLEPYIHKIADGDSSPLLTGKPVTSLSLSSGTTQGRPKFLPFTDELLETTLQIFQTSYAFRNREYPIGRGKALQFIYGSKQVVTKGGILATTATTNLYRRARYKEGMKDIQSQCCSPDEVVFGSDFHQSLYCHLLCGLIYSDEVHQVFSTFAHSLVHAFQTFEEVWEDLCADIRDGVLSEKVTVPSVREAVTKILKPNPELADSIYKKCTGLSNW

SEQ ID NO: 49351 - protein, 428 aa, Zea Mays
MDKEQQESHLDSFAPLDGAAAPEDQQHQPACGGGPEMVDYMLGRHHVNAHAPPSPTQSQAVSFDKLSFSDVLQFADFGPKLALNHPVAASVGGGEDADADDDDDGYFFRFQSLPQRHADREAAGSKTTAEDGGGTGVVVSEGTTLVQQQADHGRADKAGDQGKSGRRKRPRTVKTSEEVESQRMTHIAVERNRRRQMNEYLRILRSLMPGSYVQRGDQASIIGGAIEFIRELEQLIQCLESQKRRRLYGGSGDAPRPPVVDAAAGSGGALITSSTQPLALQPPHLFPPTPSHPFPVAGADAKITLDLEAAGGAVVDDAGGGLREEVAENKSCLADIEVRALGADAMIKILSRRRPGQLIKTIAALEDMQMSILHTNITTIEQTVLYSFNVKIVGEARYSAEDIAGAVHQILSFIDVNYSLTLTFNGLT

SEQ ID NO: 49352 - protein, 151 aa, Zea Mays
MDHSYTDQRVVAWTFSSRLVTLDTVEIFTTHEWFAKPTVAFRCNGANKTYLPDVTEAHTPYTFKGEESWQSFQKRNASDVVCMRRAHLSLMLSLMNGRCVRVISRAENTPALRKASSMQHSYAQTALPLLDMETLDQAKIWKLRRHLLLSS

SEQ ID NO: 49353 - protein, 112 aa, Zea Mays
MFTTAIRQANQNRLHRIDEISRETWDLKKSFDGKAVLLQGVPRNALADDIERFLCGTNFEPPPFETFLRAGVPEPIRMMLVKFHTKTDAMNAFITKNRSFCLNSQVSMRVLQ

SEQ ID NO: 49354 - protein, 239 aa, Zea Mays
MAAAAPASSVKEVLPSPLTSASEPPPLFDGTTRLYVAYLCPFAQRAWIARNYKDKIKIVAIDLADRPAWYKEKVYPENKVPSLEHDNQVKGESLDLVKYIDSNFEGPSLLPEDHAKQQFAEELLGYTDAFNKAFYSCLVDREDVSEEAVAALDKIEDALGKFNDGPFFLGQFSLVDVAYVPFIERFQILYSNIKNYDVTKGRPNLQKFIEEVNKIDAYTQTKLDPQFLLEQTKKRLGIA

SEQ ID NO: 49355 - protein, 676 aa, Zea Mays
MKSRTATLAVGILLLVALVVVAEADTDAGDVAALGNLYSSWNSPAQLTGWSASGGDPCGAAWAGVSCSGSAVTSIKLSGMELNGTLGYQLSSLQALKTIEYRNLAKNNFSGNLPYSISNLVSLEYLDVSFNNLTGNLPFSMGALSKLSSLYMQNNQLSGTVDVLSNISLATLNIADNNFSGMIPQEFSSIPNLIVGGNSFVNMPASPPSTLKPPLEEPQGPVSAPTSPDTPIDQDDRKIQTGPLIGIAVGSIAAASCVLFVLVFCLHNARRRNDDEISEPKDLVGSLAVSIETASSREVLNNNHENSAVATSDLQHAGKMMMTPDRVLHDTTNGSSTAKRPKVPVTVTSYTVADLQVATNSFCEDSLLGEGSLGRVYKAGFPNGKVLAVKKVDDSALLSLYGGGEDAFLELVSNVSRLRHPNIVPLTGYCVEHGQRLLVYEYVGNGTLRDVLQHCLSDDEGASKKLTWNTRVRIALGTARALEYLHEVCIPPVVHSRTFKASNILLDEEYSPHLSDCGLAALTTVVSPEAVGSFGYSAPELAMSGTYTAKSDVYSFGVVMLELLTGRKPLDSSRERSEQSLVRWAAPQLHDIDLLARMVDPALDGLYPSKSLSRFADIIAICVQPEPEFRPPMSEVVQQLVRLMQRAAIIRRQSDDLGYSYRVPDRDGGAAAGDVL

SEQ ID NO: 49356 - protein, 103 aa, Zea Mays
MSKLKKSEAFTREREREIEQVVESVNELAQIMKDLSVLVIDQGTIIDRIDYNIQNVAASVEEGYKQLQKAERTQKKGGMVMCATVLVILIFIMIVLLILKTIF

SEQ ID NO: 49357 - protein, 615 aa, Zea Mays
MRGGGGASWLSFRGVVVEEEEAVVSAPEKPMRRGRRRWGAEVDDGYSPSSTGGGGSSCCDSFGCDSPLAGFVRPDGDPDTDLETDGLATSTSSASAAFTERQDDEAEEALYGVKEEEWAQIQEPAKNPAFRATPECHKQRYRTDAAVLLHGRKGSKQRPASLDLGSPGFHGATFSPSFVIGGVGLMNKGLGASVIRSDVFHSPGTPNYPRHRASVLGCHKGWSSERVPHPSKGNRRYPGSSMAFPYSNGRTLPSKWEDAERWIFSPNSSDALGRTTVAHARRPKSKSGPLGPPGRLGGQYSSVSSVSLLDNGRAGPITANSPFAAGVLMPEHVCEGKSTNGTYSSRPIGNEINIGRGVKICPLNGGSHPVRTSRVRQRLDYAVESSVSLPSTQESVQDEQVEITEDSASTIASIISRKDAATQTSPELSRSSSPNTRPTFNGSLSTEQVKEKGSCLSDLDIRDVQMDDRVTLTRWSKKNVTRSSNKNSTNIIEWSEKTVESKSSSWGFAKAKCISKIDREDTEITAWENIEKAKADAAIQKLVIKLEKKRSSSLDKILNTLKSAQRKSQVMHEHERDAVTANQDGKGSRKAKKRAQLSKNGQISSLSGCFTCHAF

SEQ ID NO: 49358 - protein, 123 aa, Zea Mays
MASLKASGLLHAAGIATSLTNTSQQWDFPNGWAPLQHLIAEGLLHSGSEAKKLAEDIATRWVRTNYAAYKATGAMHEKYDVEACGESGGGGEYKPQTGFGWSNGVVLSFLEEFGWPEGKEIAC

SEQ ID NO: 49359 - protein, 242 aa, Zea Mays
MTTLATTYIIPVDLNTFLFKMELDIGALAKVVGDNATSEFFLNASKARHIAIDSILWNSEMEQWLDYWLPGDADCQEVHEWKPNSQNRNIFASNFVPLWLNAYHSEFVRFADEAKSNRVMASLKASGLLHAAGIATSLTNTSQQWDFPNGWAPLQHLIAEGLLHSGSEAKKLAEDIATRWVRTNYAAYKATGAMHEKYDVEACGESGGGGEYKPQTGFGWSNGVVLSFLEEFGWPEGKEIAC

SEQ ID NO: 49360 - protein, 778 aa, Zea Mays
MEAQEIAAAARHFCAMDPKAVKMRRHAFHFHHSGSTTLSASALLLPRGALAEPPLLLDHICSAHGHAAGDVALTAASLVEPFLVAEQRNNSGEELQPRLVPETRLDVFVEYELGNAQDGKSGPPRWLPARLLAMVDVPTAAVSALSLLRHDDSFIRRPTWDVGWSLADANQKQVENDSRSSLESNRNNSSLESVDSLMLAKSATRIAILGISTSNLNDARRINVSVMQQRGDPLLIVGSPFGLMSPFHFFNSVSVGAVANCLPPCTARSSLLMADMHCLPGMEGAPVFDQNSCLVGLLMNPLTQKGSNIEVQLVITWDAICTEWNSKKLEEIERPPRKLPNDKNTDSKSMELRHVYNYVRVFSSTDNKTNQHCISPRSLREAISAVVLVTVGDTSWASGIVLNKRGLVLTNAHLLEPWRFGRTSPSDLQASFAGEHLNAGENKSLQPQQGKISNEDAVKHKVSSFNLGFKRGKRISVRLDHEERQIWCNASVVFISKGPLDVALLQIEKVPVELNTIRPEFVCPTAGSPVYVVGHGLFGPRSGLHSSLYSGVVSKVVQIPANQLSHLARAEADNMDIPVMLQTTAAVHPGASGGVLVNTHGLMVGIITSNAKHGGGSTIPHLNFSIPCKLLVAVFEYSANGNLVVLEQLDKPNEVLSSVWALAPSSSPFVRSSPEKGKEEKVLEFSKFLSDKQQALKSNVDLKELFRFFVWLFTGSVPRLCYRSLSFRSWFWLPDNVWSKWSGCFLPRLAGGNLVLGLISTRVIRLLVFFRLCASSAM

SEQ ID NO: 49361 - protein, 405 aa, Zea Mays
MDAGGTPPLPLLLLAAAAALLGAALGWLLLAWRSAARPGRLPPAARGCRSSGRRCASSRRTRRRTRSRSSTSAWRHGSGVFTTHVFGERTVFSADPAFNRLLLAAEGRAVSCSYPSSIATLLGPRSLLLTAGPAHKRLHSLTLARLGRPASPPLLAHIDRLVLATVRDWGRPGAGAGPAAVVRLLDEAKKITFNLTVWQLVSIEPGPWTESLRREYVKLVDGFFSIPFPFAYLLPFTAYGQALKARKNVAGALREVIRKRMGEEAGTGPGAGRNGEKKDMVEELLEAEGGSFSVEEMVDFCLSLLVAGYETTSVLMTLAVKFLTETPTALAQLKEEHDSIRHRKGKDEQPLQWSDYKSMPFTQCVISETLRVANLISGVFRRANADIHFKGVSIVVFKLWYQLGH

SEQ ID NO: 49362 - protein, 722 aa, Zea Mays
MGKCTSVDLSGNLFSGELAILRSWDGIVEVIDLSSNKLVGSYPNDASQFQNLVSLKLRNNSLSGSLPSVLGTYQKLSVLDLSQNTLEGSVLPTFFMSPTLTVLNLSGNKFSGTIPFESTHSTESILLSSQPGLRIVDLSSNSLTGPLPPDISNLQKLEFLILMMNELSGEIPSEISKLQALEYIDLSHNHLTGRIPDMPQNGLKVFNVSYNNLQGTVPKSIEKFPLSCFRPGNDMLVFPDGLPAGNDDYTGVSQGQTSHVHKAGVRVALIIGCIGAVLLVIFIALAFYVVRSQELCGRNGFRSQITIRDLKGRISPPNLFKPPKDNVIPSKTSFSNDHLLRAAARSMSAQKELLAEASVEYGYTDPKEVAESTSLGVTETSSAIQAQESSPRSALPTSPHFADSRFLEEPVAFEVYSPDRLAGELIFMDSTLVFTAEDLSRAPAEVLGRSSHGTTYKAVLQSGHVLTVKWLRVGLVKHKKEFTKEIKRIGTIRNPNIISWRAFYWGPKEQERLIISDYVNGDSLALYLYESTPRRYSRLSVPQRLRIAIDLARCLQFLHQEKGLPHGNLKPTNIFLAGPDLSPKLVDYGLHRFMTPSGTAEQILNLGALGYRAPELANAAKPAPTFKADVYAFGVIVMEMLTRRSAGDIISGQSGAVDLTDWVQMCSREGRGTDCFDRDIAGLEESPRVMDELLAVSLRCVLPVNERPSMKTVCDDLCSITA

SEQ ID NO: 49363 - protein, 402 aa, Zea Mays
MQAVHDAHDDSENFLDLLNSRALAPELFAEPPACDYLKKMEYGGGSGGWPDHNFTTSALEKHLGSGYGAPERLTANLSDLVSNWSIAPPSPCLGDARHHRVAVAGAGACDNNNAAVAALGLGGKAAAGLFLDSGGVGVCNSKHEIGGHGAMLEEAAAASGGSGQELLRPAGYSSMLGLSSSSRMYMDVPWGNNASRSLSDLISFGGTPLGKPEQPTPAATSTKAQAAEYKKQGREISSPPKTSSEGGSKGSSDGKKKKRSDGRQGSEANAKKSKNEASSPTSSSLKASQLPKVKLGDKITALQQIVSPFGKTDTASVLYEAINYIKWLHEQVQLLSDPYMKTSSSKDYNAWGGLDWKDKSETEMDLQSRGLCLVPVSCTPQVYRDNNGPDYWTPPYRSCLYR

SEQ ID NO: 49364 - protein, 73 aa, Zea Mays
MEMTTIGRPLRRSAAAAVRADSSSSAPLLDTPRLSVGFLCRLVRTSSTPAASTDLFASGTAIPASTNKLGFTP

SEQ ID NO: 49365 - protein, 463 aa, Zea Mays
MILFWEKTRESLFHLFYSVVIVFLFFHIEPISVISLPGGLQTILESRIVLGIQCLVAILSRDIALLVLSQTGARLLCHPSSLAMVICSLGLILGHRHSMVHLSNLMVATPQHLVVIRLDGISLKTSNLIQLPLVLGMIIIVSSSNLSNNLPLGQLLLLMPLATIMVSLRRMLHRDMILPTLSRVVGSKHMDMMATLVTRPKGSSRATLSRLVMISRVMAHLLMDQLQARPRMGPTMVVLEGPVRHLQGSKHQTQLLEANLAIPANRPLVLQQLTHLKVQLHLDMALHHPSLAMAPNHHSKPDMVRALMGSLLHRARNLLHCHLMDRLRLLVLLRLVTGSMVTANLLTVHHQLTLVHPLQATRAMASSSLMASSSLMAMLMVVQAMGSLQPTLLKQHLLLHPRITLLPLLRPLEQQLRQLLKTVGAPKHPLKLELQQLIGNKHFPRPCRVVSSALLLNIITHLI

SEQ ID NO: 49366 - protein, 380 aa, Zea Mays
MVICSLGLILGHRHSMVHLSNLMVATPQHLVVIRLDGISLKTSNLIQLPLVLGMIIIVSSSNLSNNLPLGQLLLLMPLATIMVSLRRMLHRDMILPTLSRVVGSKHMDMMATLVTRPKGSSRATLSRLVMISRVMAHLLMDQLQARPRMGPTMVVLEGPVRHLQGSKHQTQLLEANLAIPANRPLVLQQLTHLKVQLHLDMALHHPSLAMAPNHHSKPDMVRALMGSLLHRARNLLHCHLMDRLRLLVLLRLVTGSMVTANLLTVHHQLTLVHPLQATRAMASSSLMASSSLMAMLMVVQAMGSLQPTLLKQHLLLHPRITLLPLLRPLEQQLRQLLKTVGAPKHPLKLELQQLIGNKHFPRPCRVVSSALLLNIITHLI

SEQ ID NO: 49367 - protein, 608 aa, Zea Mays
MKISALLTSAGINIGLCVLFLSLYSVLRKQPANVRVYFGRRIAEEHDRLRGAFILERFVPSTGWIVKALQCTEEEILAAAGLDAVVFNRILVFSIRIFSLAAVLCVFGILPLNYFGQDIHHVRIPSESLDIFTIGNVEVKSRWLWVHCVTLYIISAVACILLYIEYKHIARLKLLHLTSATPKPNHFTVLVRGIPKADKESCSDVVDNFFTKYHSSSYLFHQVVYKVGKVQKIMTGAKKAYKKFKHFTDETVDQGCRTVTYRCCLCGASSNSFKLLNTECEQNKGKADNKSILDLDDEECTTAFVFFKTRYAALIASEILQTSNPMKWVANLAPEPEDVYWSNLWLPYKQLWARRIATLLGSIFFMFIFLIPVTFIQGLSQLEQLQQRLPFLRGILKKKYYMTQLVTGYLPSVILQIFLYIVAPIMMLFSTLEGPTSHSERKRSACCKVLYFTVWNIFFANVLSGTVISQLNVLSSPKDIPVQLAKAVPGQATFFITYVLTSGWASLSSEVMQLFGLIWNFIIKYVLRMREDTEFVPSFPYHTEVPKVLLFGLLGFTFSVLAPLILPFLLVYFCLGYVVYRNQLLNVYRTSTAETGFFHYSRLFQHRI

SEQ ID NO: 49368 - protein, 718 aa, Zea Mays
MKISALLTSAGINIGLCVLFLSLYSVLRKQPANVRVYFGRRIAEEHDRLRGAFILERFVPSTGWIVKALQCTEEEILAAAGLDAVVFNRILVFRLWVHCVTLYIISAVACILLYIEYKHIARLKLLHLTSATPKPNHFTVLVRGIPKADKESCSDVVDNFFTKYHSSSYLFHQVVYKVGKVQKIMTGAKKAYKKFKHFTDETVDQGCRTVTYRCCLCGASSNSFKLLNTECEQNKGKADNKSILDLDDEECTTAFVFFKTRYAALIASEILQTSNPMKWVANLAPEPEDVYWSNLWLPYKQLWARRIATLLGSIFFMFIFLIPVTFIQGLSQLEQLQQRLPFLRGILKKKYYMTQLVTGYLPSVILQIFLYIVAPIMMLFSTLEGPTSHSERKRSACCKVLYFTVWNIFFANVLSGTVISQLNVLSSPKDIPVQLAKAVPGQATFFITYVLTSGWASLSSEVMQLFGLIWNFIIKYVLRMREDTEFVPSFPYHTEVPKVLLFGLLGFTFSVLAPLILPFLLVYFCLGYVVYRNQLLNVYRTRYDTGGLYWPIAYNTVIFSLVLTQIICLGVFGLKESPVAAGFTVPLIILTLLFNQYCRNRLLPLFKTFPAQDLIDMDREDERSGRMDEIHHGLHSAYCQFADTVDVPLDKIEIVGGDEEQGSSSGQSSVKETCEDPKKHLAHPTLKGLPVNRLRHAVRSVTFLIRLQRRGLSEQKIG

SEQ ID NO: 49369 - protein, 402 aa, Zea Mays
MFIFLIPVTFIQGLSQLEQLQQRLPFLRGILKKKYYMTQLVTGYLPSVILQIFLYIVAPIMMLFSTLEGPTSHSERKRSACCKVLYFTVWNIFFANVLSGTVISQLNVLSSPKDIPVQLAKAVPGQATFFITYVLTSGWASLSSEVMQLFGLIWNFIIKYVLRMREDTEFVPSFPYHTEVPKVLLFGLLGFTFSVLAPLILPFLLVYFCLGYVVYRNQLLNVYRTRYDTGGLYWPIAYNTVIFSLVLTQIICLGVFGLKESPVAAGFTVPLIILTLLFNQYCRNRLLPLFKTFPAQDLIDMDREDERSGRMDEIHHGLHSAYCQFADTVDVPLDKIEIVGGDEEQGSSSGQSSVKETCEDPKKHLAHPTLKGLPVNRLRHAVRSVTFLIRLQRRGLSEQKIG

SEQ ID NO: 49370 - protein, 76 aa, Zea Mays
MPRDRDEPAAVRVYTVCDESRYLIVRNVPSLGCGDDLASLFGTYGPVEECTPMDAEDSEPYTDVFFVKFSQVNNAR

SEQ ID NO: 49371 - protein, 561 aa, Zea Mays
MDFQKIRIQELASADNHEEGRVPRTVECELTEDLVDCCIPGEIVTVTAIVKVLNNHMDVGGGKSRISSQGLYYLYLEAVSVRKLKSHAVSDKEIQASGICHSQSSTVNDDFAVKYKEKYGTDVFRRILQSFCPSIYGHELVKAGITLALFGGVQKNSMDQNMVPVRGDIHVIVVGDPGLGKSQLLQAAAAVSPRGIYVCGNTTTKAGLTVAVVKDSMTNDYAFEAGAMVLADRGICCIDEFDKMFTEHQALLEAMEQQCVSIAKAGLVASLSARTSVLAAANPIGGHYDRAKTVNENLKMSAALLSRFDLVFILLDKPDESLDKRVSDHIIALHTNDVDNFRPNKRTRTGSHFDGDPGLGVGGNSVASRLRLHPEKDKDFTPLSGQLLRKYISYSREHVFPRMSKAAAAILKEFYLKLRNRSASADGTPITARQLESLVRLAEARARVDLRDEVTEEDAQDVVDIMKESLYDKYVDEHGFVDFTRSGGMSQPKQAKKFLNALNKESELQQKDCFSRTELYTIADKISLQVPDLDTLVEKMNIAGYLIQKRSGMYQLVTAPY

SEQ ID NO: 49372 - protein, 478 aa, Zea Mays
MAEVLRSRVEDDGNDILCLPIDFQQLQELRMFIEDKLNESPKEALLCMGVAAHLALCSDKDNKRNKINIRLYNTGAAIALKKLKAAFIKKLVTVRGTVLKVSTVKPLVLWLKFRCMKCRKEIPRVFCDGKFSPPMSCTIQGCKSRSFIPDRSSAQLMDFQKIRIQELASADNHEEGRVPRTVECELTEDLVDCCIPGEIVTVTAIVKVLNNHMDVGGGKSRISSQGLYYLYLEAVSVRKLKSHAVSDKEIQASGICHSQSSTVNDDFAVKYKEKYGTDVFRRILQSFCPSIYGHELVKAGITLALFGGVQKNSMDQNMVPVRGDIHVIVVGDPGLGKSQLLQAAAAVSPRGIYVCGNTTTKAGLTVAVVKDSMTNDYAFEAGAMVLADRGICCIDEFDKMFTEHQALLEAMEQQCVSIAKAGLVASLSARTSVLAAANPIGGHYDSIPMMLIISDPTRGPEQGHILMVIRGLELVEIQ

SEQ ID NO: 49373 - protein, 563 aa, Zea Mays
MAEVLRSRVEDDGNDILCLPIDFQQLQELRMFIEDKLNESPKEALLCMGVAAHLALCSDKDNKRNKINIRLYNTGAAIALKKLKAAFIKKLVTVRGTVLKVSTVKPLVLWLKFRCMKCRKEIPRVFCDGKFSPPMSCTIQGCKSRSFIPDRSSAQLMDFQKIRIQELASADNHEEGRVPRTVECELTEDLVDCCIPGEIVTVTAIVKVLNNHMDVGGGKSRISSQGLYYLYLEAVSVRKLKSHAVSDKEIQASGICHSQSSTVNDDFAVKYKEKYGTDVFRRILQSFCPSIYGHELVKAGITLALFGGVQKNSMDQNMVPVRGDIHVIVVGDPGLGKSQLLQAAAAVSPRGIYVCGNTTTKAGLTVAVVKDSMTNDYAFEAGAMVLADRGICCIDEFDKMFTEHQALLEAMEQQCVSIAKAGLVASLSARTSVLAAANPIGGHYDRAKTVNENLKMSAALLSRFDLVFILLDKPDESLDKRVSDHIIALHTNDVDNFRPNKRTRTGSHFDGDPGLGVGGNSVASRLRLHPEKDKDFTPLSGQLLRKYISYSREHVFPRQQLQF

SEQ ID NO: 49374 - protein, 178 aa, Zea Mays
MFSWWSTDELNGVRGLMLDTYDFDNDVWLCHSFQGKCYNFTAFQPAINVFKEIQTFLDANPSQVVTIFLEDYTAVGSLPRVFNASGLTKYWFPVAKMPKSGGDWPLLKDMISQNQRLLVFTSKRAKEASEGIAYEWNYVVENQYGDEGMVAGKCPQPRRVSGHGFQRPVACPDELLHD

SEQ ID NO: 49375 - protein, 325 aa, Zea Mays
MVMAKQHHDKGLPKQARNEPAPFRLEQCCRCDDAHRQADDESMDAAGSAGPLHLTLGPLGSAAGPRCSWRCRAGAGAGGARNGGRPPRVPVHEAGAGAAGRGCARGRPGGCRRRRRGPGGGAARGRRSPGGASGGRERRRRRPGQAPLPAQRAGEQAGALLRRAGARGVVVRAGAGRRRGGGVHNPDGAGHGPPLRQPAPRHTAQAQAPSRRCGEEVSAARRRGPGRRRRRRRRRRRRGDRGAGGQVGSADEAGRGGAGGASVAAAAWSAGWLRGRAPGVALRPFPPPVPQRRREAEAGGDHRLEQAPGPYPTGSSTRACGCGSP

SEQ ID NO: 49376 - protein, 259 aa, Zea Mays
MIHTASLIHDDVIDDSGMRRVTLSHSYVMQEASWKETIHQLYGTRVAVLAGDFMFAQSSWFLANLENIEVIKLISQVIKDFASGEIKQASTLFDCDVTLDDYLLKSYYKTASLIAASTRSAAIFSGVGSGVCEQMYEYGRNLGLAFQVVDDILDLTQSAEQLGKPAAGSDLAKGNLTAPVILALREEPRLRGIIESEFCEPGSLAAAVELVHRGGGIRSARELAEEKGGLALRSLQCLPRSEFRSALERVVHYNLQRVR

SEQ ID NO: 49377 - protein, 246 aa, Zea Mays
MIHTASLIHDDVIDDSGMRRGKETIHQLYGTRVAVLAGDFMFAQSSWFLANLENIEVIKLISQVIKDFASGEIKQASTLFDCDVTLDDYLLKSYYKTASLIAASTRSAAIFSGVGSGVCEQMYEYGRNLGLAFQVVDDILDLTQSAEQLGKPAAGSDLAKGNLTAPVILALREEPRLRGIIESEFCEPGSLAAAVELVHRGGGIRSARELAEEKGGLALRSLQCLPRSEFRSALERVVHYNLQRVR

SEQ ID NO: 49378 - protein, 1635 aa, Zea Mays
MQPSGGASGSSRGSPASSPHPDHQQPPTPASAQQQAQQLGFRGQGMMHHHEQQQAFHSGAPHGMMGPGGVNFPQSSGPVSSFQGQRNLPLSSGGPQGMVGGQMHNQVAMQQQFLKLAMQQQQQQQKAAQGMLLQQQAKMNMAGSSSRDQDMLNNPAKMQELMALHQAQMYKRQCEQKEQGQSSGSEQRSGDMRPPMPPQGVPGQQLPSMGMIRPMQPIQGQVGMGSAGGNPITPTQFQAIQAWAKEHNFDLSNPANISAISQLLPIWQSNRMAAMQKQNEANMAAQQQQALPSQVNSDTPGHVNAPSQGALLKPRQPLAPSSISGGEEAKVVNSSNLQLQQQFPVHNRDGSNERAVRSLMTGGNGAQTTHIPQSSGHVNKIPEQPNPKNVLANSEAMQMQHVRQMQQLNQAAAPTSTPIEAGGSQVPTSAQPQTGQTGFTKNQLHVLKAQILAFRRLKRGDRLPPEVLELIVSGRPPDSQGQQQVSGPQGLSEEEVKAAAQCAGQEVMIRNTFSEMNAPRDNTSVNKYYTLAHAVSERVTKQPSLLRAGTLRDYQLVGLQWMLSLYNNKLNGILADEMGLGKTVQVMALVAYLMEFKGNYGPHLIIVPNAVLVNWKSELLNWLPSASCIFYVGAKDQRQKLFSQEVMAMKFNVLVTTYEFVMFDRSKLSRVDWKYIIIDEAQRMKDRDSVLARDLDRYRCQRRLLLTGTPLQNDLKELWSLLNLLLPEVFDSSKAFSDWFSKPFQRDGPTHNEEEDDWLETEKKVIIIHRLHQILEPFMLRRRVEDVEGSLPRKDSIVLRCRMSAVQGAIYDWIKSTGTIRVDPEDEKRRAQRNPMYQVKTYKNLNNKCMELRKVCNHPLLSYPFLNHGKDFMIRSCGKLWNLDRILIKLHKSGHRVLLFSTMTKLLDIMEDYLQWRRLVYRRIDGTTSLEDRESAIVDFNRPGSDCFIFLLSIRAAGRGLNLQSADTVVIYDPDPNPQNEEQAVARAHRIGQTREVKVIYMEAVVDNISSYQKEDELRNGGSGDLEDDLAGKDRYMGSIESLIRNNIQQYKIDMADEVINAGRFDQRTTHEERRMTLETLLHDEERYQDSVHDVPSLQEVNRMIARTESEVELFDQMDEDFDWTGDMTKHHQVPKWLRVNSNEVDAVVASLSKKPSRNMSSGGIALDTNETLEKRRGRPRGTGKYSIYREIDDEDLEESDEDSEERNTASLPEEGEVGEFEDEEDNDDSVPDNKDESEEEEPMNDDVYEFTEGLRGRKANRMEEAGSTGSSSGSRRLPPPVPSSSSKKLRSLSALDARPGTLSKRTPDDLEEGEIAMSGDSHMDLQQSGSWNHERDDGEDEQVLQPKIKRKRSIRLRPKPNAEKQEDRSGEGAFPQRAARQQDAVHPIVKQKRNMSSRKVSPASRSGKLSHLSGSGEGSAELSKENWSSKAIDSTAPEFGGTKMSDSMQRKCKNVISKLWRRIDKEGHQMIPNISSWWRRNENSSFRGPAGSTLDLQKIEQRVDGLEYGAVTEFIADMQQMLKSVVQHFSYRHEVRIEAETLHNLFFNIMKIAFPDSDFMEAKNAMSFSNPGSGAHSDHQAGASSSAPGIGDIQWAKPAKRLRTCSPGPPPRRQRTAGSADQPPPPPPGNGRGR

SEQ ID NO: 49379 - protein, 1004 aa, Zea Mays
MVGPEMLVAATVNQVVRKINEIIGVAQGETKLCCSFSDDLEGIKDTLVYLEGLLKNAESNSFGSDRANLRHWLGQIKSLAYDIEDIVDGYYSSKEQYEGSNYAQKGSLLCSLSNPMLSKVSMVHKMKSKRELLQTRQNLPTQYHFISHINSVVNYDEKQTTSYRNCDIRIVGRGPDLEHLMYMLMQINLKELTIISIVGPVGLGKTTLAQLIFNDARAETFRFRIWVHVSMGNVSLQKIGRDIVLQTTEKIEGNMQMQSIKNVVQDILNKYSCLIVLDSLWGKDEEVNELKQMLLTGRKTESKVIVTTHSSKVAELISTVPPYKLSLLSEDDCSAIFCQRAIAGQSISDPLFREYGEEIVRRCEGMPLVANFLGSVVNAQRQRREIWKAARDKDMWKIEEDYPENKIVPMFPSFKIVYYSMPHELRLCFVYCSIFPKGYVIDKKKLIQQWIALDMIESKHGTLPLDVTAEKYIDELKDIYLLQVLERHQIDAEISNTSEEKLYMNNLAHDLARSVAGEDILVILDAENVRCNRNYDYRYAQVSTSSLQSIDSKAWPSKARSLVFKSSAELQHVSEVLSVNKYLRVLDISGCSVKEMPAPIFQMKQLRYLDASTLSIADLPPQISGFPKLQTLDLSDTEVTELPAFIANLKRLNYLNLQGCKKLKQLNNLDLLHELHYLNLSRCLEVRSFPASLKNLRKLRFLNLSQCSKLPTLPDELLQSFSSFSSIVDLNLSGFEFQMLPDFFGNICSLQFLSLSKCSKLELLPQSFGQLAYLKGLDLSFCSDLKLPESFKYLSSLQFLNLSHCHNVEYLPSFDKLSNLEYLNLSQCAGLKALPKSLSNQKNLQIEVFGCQDCIVQSCYLSPQSHTCSQEVKEVGSSSDISDTILKESANRDVALGISFPEIDEVGYPHNNLKQKLTLSYHMDGHKSEEPNFITKNSTTETVQLTPRHQFPSSTCRISSIASSSSALFASGSSSDVSITYNPVSNDKAGNQTGPQTESTHTVV

SEQ ID NO: 49380 - protein, 824 aa, Zea Mays
MRGGGRGGGGRQPSYAAPDGADAAAIPVASRKMVQSLKGILADRSEGEIYATLCDCGMDPDIAVERLISQDTFHEVRRKRDRKKETKVNHETRPRPFQKYTYRGYKAVSDRSGRGGFKGPVKKEPEMQAPLNSSALDVKTSDTTEIFSATINVAQTDAKNTTSQPLSKVQHGWGGIPGRPSMAEIVKMGRPQAKVGSRSVASSTALPTVGDSVISNTPNLVPEEYNRTVFASEAGHVAADKLPNGAVEVHSLPKDASAFDMLPSAEGTDVEAPSMSANAQGSSTPDANEDDIEKYANLEEGNTESLISPGQVSASGKDIQSEYTEVVSHVDEGSIEKTNDFQLNGLPFEHNQNLNGDVSTATTQFDHLTLHEGPKLSDDNPAVIIPDHLQVSNADCAHLTFGSFVSGTLDSSLTTKPLESHGDAAAVPDDDSIDQSDGRIHDDEGKVTLATDVNEYVTSAANSNEENLDITSVQQSEVTRADFLDVTSNTEYNLTSTPDYATSSAPLQDSASQSLQENRQFQNISPFSSFMQMQNGLLPPAIPPLREFDPAFSLLLTHPPMMHGTMSSSMSNTTVSTQPQENANPVGLPNPQLTQSQQSTSIASGPPLPQHLLHPYAQPTLPLGYASMIGYPSLPPSYAYLPPAAFQQPYMNSGLFHQAAAAVPTSSVKYPLPQYKSNIALASLPQPGSLLSSYVGGFGTASNMPGNFPLNQSTAAATTTLGFDGTVPSHFKDGNQFISLQQNENPAMWMHGASSRGMPPLAASTMYGYQGQSHQAGLRQGQLPSQFGSALGQSQPGLGPEHRNPSDSNLSGAAQANQMWPNTY

SEQ ID NO: 49381 - protein, 122 aa, Zea Mays
MAPKAEKRLPAAKSSGKEGGDKKGKKKAKKSVETYKIYIFKVLKQVHPDIGISSKAMSIMNSFINDIFEKLAGEAAKLARYNKKPTITSREIQTSVRLVLPGELAKHAVSEGTKAVTKFTSS

SEQ ID NO: 49382 - protein, 335 aa, Zea Mays
MWMERTGQVQRGGVDGSDPRRGRVDQSARCVGLCSSSCRRHYLSTASSTPAYSPSTAELSSSLSLSFSRSLCFLVEVQVPALMATEVAETPAPLAEAVPETPAEAPAAPAAEAKPTKAKKASAPKKRANPTHPPYAEMISEAVTSLKERTGSSQYAIAKFVEDKHKDKLPPNFRKLLLGQLKKLVAGGKLTKVKNSYKLPARAPAAAKPKPKSKTAVKKPKAGAKKPKAATKPKPKPKAKSPAKAKPAAKPKAAAKPAAKPKPAAAKPKAAAKTSAKDTPGKKAAPAKKPAAAAKKAPAKKAAPAKKAATPSRKAPATMTNQCVLLLLEDNVVFL

SEQ ID NO: 49383 - protein, 648 aa, Zea Mays
MDKLRVHRCTGDAVEWSPSPIVALAASPCASQVAAAREDGSLELWLVSPGSVGWHNQLTIQGNDESRVTSLVWGRRGGEATGRLLSSSVDGSVCEWDLFYLQQKIVLDTVGIPIWQMAIEPSVDAKNTENNSSEFAVNGHPNQNDSSDSDLSNIDDGDNSEDEDGSTNTISSYHVNDFQRLALACDDGSVRLYNVPESGALTYYRSLPRVSGRTLSVAWSSNAKFVFSGSSDGLIRCWDSTSFHEMYRITVGLGGASNSPELCVWSLLFLRCGTIVSGDSTGSVQFWDSRHGTLLQAHSYHKGDVNALTTVPSGNRVFSAGSDGQVILYKISKDEFGASKNVIKEQVQKWVYVGYLRAHTHDIRALTMAVPICREDALPEEKVVKIRRREKHEFSYHRWAHLGVPMLISGGDDAKLFAYSAREFTQFSPHNFCPAPQHPLIKLARNSTVNGDYVMLVQSSNFLDVLLVTVQNKLTTPSTSSSRGDATVRQLVRLKSKGSRKIISSAACANGTLLAYSDGVRPCLFALRHKGGKKYTLDKLELPKGLPCSQSMLFTVDSSNLILAGRNGKIYIIDIATREISNVFHPTRRADGAKISREPPVTKMFLSADGQWLAAVNCYGDIYVFNLETTLVHIPNEWWFCYIWWFLP

SEQ ID NO: 49384 - protein, 755 aa, Zea Mays
MGRFVNGIYSTCSKRCLSSHAYTRFSRGIVNSELSDAGICIKLIVLDTVGIPIWQMAIEPSVDAKNTENNSSEFAVNGHPNQNDSSDSDLSNIDDGDNSEDEDGSTNTISSYHVNDFQRLALACDDGSVRLYNVPESGALTYYRSLPRVSGRTLSVAWSSNAKFVFSGSSDGLIRCWDSTSFHEMYRITVGLGGASNSPELCVWSLLFLRCGTIVSGDSTGSVQFWDSRHGTLLQAHSYHKGDVNALTTVPSGNRVFSAGSDGQVILYKISKDEFGASKNVIKEQVQKWVYVGYLRAHTHDIRALTMAVPICREDALPEEKVVKIRRREKHEFSYHRWAHLGVPMLISGGDDAKLFAYSAREFTQFSPHNFCPAPQHPLIKLARNSTVNGDYVMLVQSSNFLDVLLVTVQNKLTTPSTSSSRGDATVRQLVRLKSKGSRKIISSAACANGTLLAYSDGVRPCLFALRHKGGKKYTLDKLELPKGLPCSQSMLFTVDSSNLILAGRNGKIYIIDIATREISNVFHPTRRADGAKISREPPVTKMFLSADGQWLAAVNCYGDIYVFNLEVQRQHWFISRMNGGSVTSGGFCPKNNTLIITTSKNEVYVFDVETKQLGEWSKRYTHQLPRSFQEFPGEVIGLSFSPQSSSSVIVYSTRAMCYIDFGLPVVEDVDLPNGSAGAAEKSDTKKIKKARQKRKAHDEESKQEKRNNLSFFAFKEPVLFVGHLLDSSILIVEKRWMDVVEGFGAPVHRHIYGT

SEQ ID NO: 49385 - protein, 285 aa, Zea Mays
MGHSYSGYTMGISTEESVAMEKEIQDLQAQLKQESLLRQQEQQKLAEESQLRQQEQEKLAKEQIHIASLEAEKQQLEDQITMLTKKATEDASEFAAHKAFSMQDREKLENQLHDMALMIERLEGSRQKLLMEIDSQSSEIEKLFEENSALSTSYQEAIAITVQWENQVRDCLKQNEELRSHLEKLRLEQASLLEVSNITTKSDGQIENSISNLPEMVTENISLKGQLIKEQSRSESLLAEIMKLSAELRKAVQAQNNLVRLYRPVLRDIESNLMKMKQETYATIQ

SEQ ID NO: 49386 - protein, 254 aa, Zea Mays
MSAPMPINGLPINRQQLAGTGSFDSHCSPASGTSQGSADISDAMDQPPSDYLTRIRLLEQYASAIAGLVRDEIKGGRHLEAFSIQLIVLATWKQAIHIGNTFVASPARESPSQDIPMKGHIAGASHLPANSKLADDACMQIEKQFLSEVEYAEELASIVGQIADGTEMPDAIEMIFQSALLIGRRGGVDEMFGKAADAMTGYMRAVSMLRFLLVEAPSLALNPPLTLTRSDRNRLRTYIDALNTRLCQMQSQRH

SEQ ID NO: 49387 - protein, 468 aa, Zea Mays
MFYYCCYHIQLSANINGAVLICVIDPVERLTVEEFVHHPFLSEHAPEKTLSLTQSDIRDGFPRNNSSPTRHSNHSSQEDCMPFPLDDESSGQDEGPVPDSKSLMKSYGFPMGKRLDKTSGQKSPPKHNSLFSRYVLGNNHAPSSQHHGHSGKVTKESKIHEVQGQKVVYPEDQEYVFVSGPHLEGSSSSTNASQQLNVPAKYDNSSVSPPKLTFMSAPMPINGLPINRQQLAGTGSFDSHCSPASGTSQGSADISDAMDQPPSDYLTRIRLLEQYASAIAGLVRDEIKGGRHLEAFSIQLIVLATWKQAIHIGNTFVASPARESPSQDIPMKGHIAGASHLPANSKLADDACMQIEKQFLSEVEYAEELASIVGQIADGTEMPDAIEMIFQSALLIGRRGGVDEMFGKAADAMTGYMRAVSMLRFLLVEAPSLALNPPLTLTRSDRNRLRTYIDALNTRLCQMQSQRH

SEQ ID NO: 49388 - protein, 529 aa, Zea Mays
MAPEVMQAQKYDAKADLWSVGVILYQLVTGRPPFNGGNQIQLLKNILRTCEIRFPSDCDLSHGCIDLCRKLLRLNSVERLTVEEFVHHPFLSEHAPEKTLSLTQSDIRDGFPRNNSSPTRHSNHSSQEDCMPFPLDDESSGQDEGPVPDSKSLMKSYGFPMGKRLDKTSGQKSPPKHNSLFSRYVLGNNHAPSSQHHGHSGKVTKESKIHEVQGQKVVYPEDSPIIDSLEFVDQEYVFVSGPHLEGSSSSTNASQQLNVPAKYDNSSVSPPKLTFMSAPMPINGLPINRQQLAGTGSFDSHCSPASGTSQGSADISDAMDQPPSDYLTRIRLLEQYASAIAGLVRDEIKGGRHLEAFSIQLIVLATWKQAIHIGNTFVASPARESPSQDIPMKGHIAGASHLPANSKLADDACMQIEKQFLSEVEYAEELASIVGQIADGTEMPDAIEMIFQSALLIGRRGGVDEMFGKAADAMTGYMRAVSMLRFLLVEAPSLALNPPLTLTRSDRNRLRTYIDALNTRLCQMQSQRH

SEQ ID NO: 49389 - protein, 203 aa, Zea Mays
MKLTCLSAAAGGGGGYHSPASHLLELEGVRFLLDCPIDLSALAAFAPVPLAGDAGGLIRAVPRYWLPAAVKEGGVDAVLVSSATGMLGLPFLTGLPGFTNTKVYVTEVAARIGKPMMEELVEMHREFVRYYGPDTDASPKWMEGEELNELMSMSQKAVIEGRENDLTSLVPLYRSAMESQSCWVLACTSVASLPVFPQGNLYV

SEQ ID NO: 49390 - protein, 382 aa, Zea Mays
MVKLLSGRLETVLTVAGLYYWFAAIESSKATSIVSKQHAACEQSIPSRKVALLIAALSCAIRPTSAVTWLYVSLLDFIQMKSKCCFILLDVIPVGAIVLAVTTLLDWWMYGSWVIVPLNFLKFNLLSSGGDYYGTHVFHWYFTQGFPSMIWTFLPFALCGIVKSQEWRLSGLIAWVLGVYSILGHKEFRFVLPVLPLALMFSGYCLASMSRSKGKNQHRKDSLSRMQPFVILLVITNVPMALYMSLFHQRGTEDAMYYLSKEAHDGRVRSVLFLMPCHSTPYYSTLHYNLPMRFLDCTPSDSKGTLDESDRFLTSPSEFVGEVFGNLSAFSHIVIFESEERHVLQLLLHNSFLEMRRFFHSHFKVDRDLQSAVVVYSRRNVL

SEQ ID NO: 49391 - protein, 205 aa, Zea Mays
MFFCITRTLSNSLETVLTVAGLYYWFAAIESSKATSIVSKQHAACEQSIPSRKVALLIAALSCAIRPTSAVTWLYVSLLDFIQMKSKCCFILLDVIPVGAIVLAVTTLLDWWMYGSWVIVPLNFLKFNLLSSGGDYYGTHVFHWYFTQGFPSMIWTFLPFALCGIVKSQEWRLSGLIAWVLGVYSILGHKEFRLNTAGLFFQCYL

SEQ ID NO: 49392 - protein, 413 aa, Zea Mays
MSKMHPEFRYKTEFQSHEPEFDYLKSLEIEEKINQIKWCQAANGALYLLSTNDKTIKFWKVQEKKVKKLSEMNLDRSAAPANGSPGGVGYLSPSLSNGNALKPGRLPLLRLPVVTSQETSLATSCRRVYAHAHDYHINSISNNSDGETFISADDLRINLWNLEISNQSFNIIDVKPTNMEDLTEVITSAEFHPTHCNTLAYSSSKGSIRLVDLRQSALCDTHYQIFEQHEAPGSRSFFTEIIASISDIKFSKDGRHLLSRDYMTLKLWDVKMNSGPVATFQVHEYLRPKLCDLYENDSIFDKFECCQSGDGLRVATGSYSNIFRVFGCGTGNSEATTLEATRNPTRRQLQNPTRATRSLSSLTRAVRRGGESTGIDVNGNSYDLSTKLLHLAWHPSENLIACAAANSLYMYYA

SEQ ID NO: 49393 - protein, 638 aa, Zea Mays
MGSTHKEEVGVLEEILDGRKEPRKLSLSVLKHITNDFSHERIIGYGGCGEVYKGILQNGSVAVKKIFSNLNVEDKEFDREIQSMMQVKHPNVVRFIGYCSNTEHELMRKEGKYIKVEVRERLLCFEHISNGSLRSHITDGLRGLEWHARYKIIKGICEGLHHLHMEKNIIHMDLKPANILVHDQMVPKIADFGLSRLAEVSRTMSNERLLSLGYCAPEYQYHGKMSLKSDIYSLGVIMLELVTGSKEEPDITNEVTYLEDMLGIEPLDLHFLVEPTKQISCSVHLTNATNDCFAFIVQTTNPKQYCIQPDRGVVPPRSECSVAIVLSQEPTHNKRCSMEDELSVQSTRVDEGVTAADVSEALFTGKEDRTVDHVSLMVGFDMSPSPPEEQTEDFTFAPLASLYDEEPQLSAAKSARLQLGRSGRFSKKKLVSILKSWRARLKVSSHKKLETPKHDCEIPEAVEHEEVAAPRCPKGPLPQRDLSPLGEACSRMNMTAIHEILVNRHYRDDDLDPNVPSLEEWTQQSRDMLDDRKRGDFTFRDKDFRAAIDWYTKCMDVGPKKASPTVLVRRSCCHLMCGNLDAALRDAMQAQRQYPDCPTSLYMQAVALSKLGMHSQAMGMLIEASEMEANQKKTRKAA

SEQ ID NO: 49394 - protein, 708 aa, Zea Mays
MGSTHKEEVGVLEEILDGRKEPRKLSLSVLKHITNDFSHERIIGYGGCGEVYKGILQNGSVAVKKIFSNLNVEDKEFDREIQSMMQVKHPNVVRFIGYCSNTEHELMRKEGKYIKVEVRERLLCFEHISNGSLRSHITDGLRGLEWHARYKIIKGICEGLHHLHMEKNIIHMDLKPANILVHDQMVPKIADFGLSRLAEVSRTMSNERLLSLGYCAPEYQYHGKMSLKSDIYSLGVIMLELVTGSKEEPDITNVLRRWSHRWKKSGQRTPSFQRHQVSKCIGLAKRCKEVEPTRRPSICDILAALGKMEDMNCSDQQVDEEVTYLEDMLGIEPLDLHFLVEPTKQISCSVHLTNATNDCFAFIVQTTNPKQYCIQPDRGVVPPRSECSVAIVLSQEPTHNKRCSMEDELSVQSTRVDEGVTAADVSEALFTGKEDRTVDHVSLMVGFDMSPSPPEEQTEDFTFAPLASLYDEEPQLSAAKVSVWTSNQLGRSGRFSKKKLVSILKSWRARLKVSSHKKLETPKHDCEIPEAVEHEEVAAPRCPKGPLPQRDLSPLGEACSRMNMTAIHEILVNRHYRDDDLDPNVPSLEEWTQQSRDMLDDRKRGDFTFRDKDFRAAIDWYTKCMDVGPKKASPTVLVRRSCCHLMCGNLDAALRDAMQAQRQYPDCPTSLYMQAVALSKLGMHSQAMGMLIEASEMEANQKKTRKAA

SEQ ID NO: 49395 - protein, 523 aa, Zea Mays
MGSTHKEEVGVLEEILDGRKEPRKLSLSVLKHITNDFSHERIIGYGGCGEVYKGILQNGSVAVKKIFSNLNVEDKEFDREIQSMMQVKHPNVVRFIGYCSNTEHELMRKEGKYIKVEVRERLLCFEHISNGSLRSHITDGLRGLEWHARYKIIKGICEGLHHLHMEKNIIHMDLKPANILVHDQMVPKIADFGLSRLAEVSRTMSNERLLSLGYCAPEYQYHGKMSLKSDIYSLGVIMLELVTGSKEEPDITNVLRRWSHRWKKSGQRTPSFQRHQVSKCIGLAKRCKEVEPTRRPSICDILAALGKMEDMNCSDQQVDEEVTYLEDMLGIEPLDLHFLVEPTKQISCSVHLTNATNDCFAFIVQTTNPKQYCIQPDRGVVPPRSECSVAIVLSQEPTHNKRCSMEDELSVQSTRVDEGVTAADVSEALFTGKEDRTVDHVSLMVGFDMSPSPPEEQTEDFTFAPLASLYDEEPQLSAAKVSVWTSNQVRVCAFSLWIPSPDWIMHDSLSECAFTVGAFWSLL

SEQ ID NO: 49396 - protein, 427 aa, Zea Mays
MGSTHKEEVGVLEEILDGRKEPRKLSLSVLKHITNDFSHERIIGYGGCGEVYKGILQNGSVAVKKIFSNLNVEDKEFDREIQSMMQVKHPNVVRFIGYCSNTEHELMRKEGKYIKVEVRERLLCFEHISNGSLRSHITGVIMLELVTGSKEEPDITNVLRRWSHRWKKSGQRTPSFQRHQVSKCIGLAKRCKEVEPTRRPSICDILAALGKMEDMNCSDQQVDEEVTYLEDMLGIEPLDLHFLVEPTKQISCSVHLTNATNDCFAFIVQTTNPKQYCIQPDRGVVPPRSECSVAIVLSQEPTHNKRCSMEDELSVQSTRVDEGVTAADVSEALFTGKEDRTVDHVSLMVGFDMSPSPPEEQTEDFTFAPLASLYDEEPQLSAAKVSVWTSNQVRVCAFSLWIPSPDWIMHDSLSECAFTVGAFWSLL

SEQ ID NO: 49397 - protein, 445 aa, Zea Mays
MPELRSSTRQACLRSKKLEDLQLGEPPAKPVSPAPPRAGKRAPTRAARGRKGATGKGVPPAPTTRRKRGNIVDLEADPACEDPPKAVKGLEVAAAAAPKNLPLKEVAEVGVLKMNGVSAEKIIGAEDESTATPVPERVQVGNSPEYITDRKLGKGGFGQVYVGRRVSGGAARTGPDAYEVALKLEHRNSKGCNYGPPYEWQVYNTLNGCYGIPSVHYKGRQGDYYILVMDMLGPSLWDVWNSMGQAMTPNMAACIAVESISILEKLHSKGFVHGDVKPENFLLGQPGSPDDKKLYLIDLGLASKWKENNGHHVDYDQRPDIFRGTIRYASVHAHLGRTGSRRDDLESLAYTLIFLIRGRLPWQGYQGDTKSFLVCKKKMATSPEMLCCFCPAPFKQFLEIVTNMKFDEEPNYAKLISIFDGLIEAPASRPVRIDGALKIACKSRR

SEQ ID NO: 49398 - protein, 423 aa, Zea Mays
MISSESAWSGGVGAGDGAGSGMTVLERLVLDEALAAAILELQGIQQAPACAGKEVVMVAEPTAGGGVVGEAAVAFPSMGMATPTPAYADVDADVLQRQQHHHRHHGAMGMPPDYDLTPATPAVTVTAVPPAFTSAAAYSGGNFVVGQSPAVFSTSNETTATAAAVTSTTSLNCEQGGGGGGGRRQRRANRKRKAAAERSPVAAAQESTLCSLLASTTTAGEGGIQIAFSNAAAAAKRSAKPSSLSSSGSSSISFDGRNPETNCGGVDDPMYEPDTEALAQVKEMIYRAAAMRPVSLGSEEDAGERPRRRNVRISSDPQTVAARQRRERISERLRVLQKLVPGGAKMDTASMLDEAASYLRFLQSQVRELQTLDRRNYGLTTADNNASRATATMAASGPLMSYNNGHGALPAFTFPAAAGETLY

SEQ ID NO: 49399 - protein, 408 aa, Zea Mays
MPMVRRAAASNLGKFAATVEQNHLKTEIMSIFDDLTQDDQDSVRLLAVEGCAALGKLLEPQDCVAHILPVIVNFSQDKSWRVRYMVANQLYELCEAVGPEPTRADLVPAYVRLLRDNEAEVRIAAAGKVTKFCRILNPQLSVQHILPCVKELSSDSSQHVRSALASVIMGMAPVLGKDATIEQLVPIFLSLLKDEFPDVRLNIISKLDQVNQVIGIDLLSQSLLPAIVELAEDRHWRVRLAIIEYIPLLASQLGVGFFDDKLGALCMQWLEDKVFSIRDAAANNLKRLAEEFGPEWAMQHIIPQVLEKINNPHYLYRMTILQAISLLAPVMGAEITCQKLLPVVINSSKDRVPNIKFNVAKVLQSLVPILDQSTVKPCLVELSEDPDVDVRYYANQALQACDQMMVSS

SEQ ID NO: 49400 - protein, 74 aa, Zea Mays
MLALMTTSSAFSAPLLSFRPPPRLPINRLRLHPRRHALFRCDAVSEIAPAASAAYGVLLLGGGAFACLLSDAVA

SEQ ID NO: 49401 - protein, 443 aa, Zea Mays
MYLSLPLPSTTMRTMTITVFSTDGTSGPSPYTISVPKSGDTRTLINALSSACSLRDDERLLVAEVYNNSLIRYLDEPSEVISLIRDGDRLVAYRLPKDNEDAPIVVFRNQRMESSLSSFGRKSWKTFGTPLVSSLPDTVTGSNIYNLFLKVMTPFRVSRGDAAVADQTLGESSLVDETEDINMSSDASEHTSINNNSVEDETGTEDVMQFFLTNERIPDQRMKIEMDLSITVNDPHKRLHVAVCWEDSGLDQYNFSSLNSLPEVYKAVLFSRRPQDTCSLYACLEAFIKEEPLGPEDMWYCPGCKEHRQASKKLDLWRLPEILIIHLKRFSYSRYTKNKLETFVDFPIHDLDLSKYIGHRCQDVPHNYRLYATSNHYGSLGGGHYTAYVYHEGKKGWYDFDDRHVGPITEDSIKTSAAYVLFYRRIQEDSLDTVTDIDSDIPT

SEQ ID NO: 49402 - protein, 489 aa, Zea Mays
MSRCGVCGVRASSFQLYRNKFIEAKKSDLTNPEVVEAQKNCPGALVFFKTRYAAVVASRVFQSSNPMLWVTDLAPEPRDVYWSNLWIPYRQIWLRKLATLAASIVFMFVFIVPVAFVQSMMQLEQLKRMFPSLTGLLNKSFFARVITGYLPSVTLLLSLYTVPPLMMLFSSIEGSISRSGRKRSGCLKILFFNIWNVFFVNVLSGSVLNQLNVFSRPKDMPTMLAELVPKQATFFITYVLTSGWASLCSEILQVFNLVYNFFSRFVCCCHRQNKEYVYSFPYHTEVPKVLLFNLLGFTFSIMAPLILPFLLVYFCLGYLVYRNQILNVYYPKYEMGGKLWPVMHNAIVFSLVLTQVIALGVFTIKRSPVTAGFTILLLVGTVLFNEYCRHRFSRIFEAYSAQDVIELDRDDEQSGRMQEIHQHLLDAYSQTPPGEGSSRGGSQVPIELIMEDPAQEASESSQELCDTVQEVSGAIHDHDHVVEDKAHSV

SEQ ID NO: 49403 - protein, 650 aa, Zea Mays
MAAHLPRLPVLLLVLLAAHVVSTSTRAEPLLPSTYNVSMCSESFWCGGVEIRYPFYLANATADYSGSYYSCGYTDLSVSCELEVEGPPTTWTPTIRLGGDNYTVKNILYDYHTISLADSDVLGGGECPVVRHNVSFDETWLHNASAFNNLTFFFGCHWGPRDTLPEFAGYNISCDGFSTPTISGGGSFVFKTEDLDEQEEQDFASHCDEVFSVPVGSEALRATDTFSLSRYGYGELLRQGFELEWNRTSEDQCGQCEGSSSGGRCAYNQKREFLGCLCSGGKAGNPFCKPSRSKRNEGPIVGAVVAVAFLCLVILTCFLACRHGSLPFKSKNKPGTRIESFLQKNESSIHPKRYTYADVKRMTKSFAVKLGQGGFGAVYKGSLHGRQVAVKMLKDTQGDGEEFMNEVASISRTSHVNVVTLLGFCLQGSKRALIYEYMPNGSLERYAFTGDMNSENLLSWERLFDIAIGTARGLEYLHRGCNTRIVHFDIKPHNILLDQDFCPKISDFGLAKLCLNKESAISIVGARGTIGYIAPEVYSKQFGTISSKSDVYSYGMMVLEMVGARDRNTSADSDHSSQYFPQWLYEHLDDYCVGASEINGETTELVRKMIVVGLWCIQVIPTDRPTMTRVVEMLEGSTSNLELPPRVLLS

SEQ ID NO: 49404 - protein, 224 aa, Zea Mays
MDSEPDVELRGLDIDVELDPEDLQPSVPLKKVPGGDLFEAARAGDCDRLALLLDAGANVNARDRWDSVALYYACLAGHAEAARMLLEAGAVCAERTFDGDRCHYAALNLRLRWLLKSFEARPPPLAPLPTALRATFLACPANRTAFLEMLQGSAGAESAALAAAAGFGPKDDPSSACLFPPDITFYVDRKPVEAHRVILCARSPFFEKKFKTDWKDRKETRGSC

SEQ ID NO: 49405 - protein, 558 aa, Zea Mays
MDSEPDVELRGLDIDVELDPEDLQPSVPLKKVPGGDLFEAARAGDCDRLALLLDAGANVNARDRWDSVALYYACLAGHAEAARMLLEAGAVCAERTFDGDRCHYAALNLRLRWLLKSFEARPPPLAPLPTALRATFLACPANRTAFLEMLQGSAGAESAALAAAAGFGPKDDPSSACLFPPDITFYVDRKPVEAHRVILCARSPFFEKKFKTDWKDRKEVRFSNQKLYFGALYSLIHFFYSDRLEVAVDDMENLARACKVCKCEELQKVLDKEVVHQKYAEYKSARELDMDSSQKRFILQAQSLPEEDRLPSALQRILQTCLANSREGYCSEESNEMIRNSEDDDLADLYIKVGDKVFHCHQVILASRSEYFRARLSRTVDFLEGNCGFEAAQNVPLLEEHDISAEAFEKMLEYMYLLFPLKRVVADMLLPYLEHVSPAELCHWLMMSDIYGVMKIREYILDIIACNFEMFAATREFRALLLTLPPPSGDDSLRTTRPSAPGTGGNTDQGNILDDLREKWLEAEGAELDERDESAALFDKRLEMLMLVAEKEADDEDA

SEQ ID NO: 49406 - protein, 413 aa, Zea Mays
MLLVQLKPLKPFCATMVLLYFMSVTGAHSSVHCICSLGLLILFLHEVVQMAHGGTNFGFYNGANTGQDESDYKADLTSYDYDAPIKEHGDVHNAKYKALRRVIHECTGTPLHPLPANIKKASYGIMKLQKVVSLFDIIDNINDPLKVSVSEHPLYMEQIGQMFGFLLYMSEYQGKLPSSILSIPKVHDRAQVFVSCSAGVRTLRYCGVIERWSNKTLEIPNLRCSSKTSLYILVENMGRVNYGPYIFDRKGILSPIQIDGITLRHWKMYPLALNSLDILPKLQLITQIPYAGASKMSIHGDSEKILQDSSCCSNESTSAEPAFYEGHFRIDNETEIKDTFISFRGWNKGVAFVNNFNIGRFWPACGPQCTLYVPAPILRPGDNIVVIFELHAPNHELTIDFTTDPDFTCGPEQ

SEQ ID NO: 49407 - protein, 358 aa, Zea Mays
MACCSAVLHHPLGFSLTPCSASRAPPRIQRVGVATPSAASARPLSRARISPRCTYSGGASAAPGPGELPAAALRRVLEMPGAHQAPACYDALSARLVERAEFRACFTSGFSISAARLGLPDVGLISYGEMIDQGRLMTEAVSIPVIGDADNGYGNCMNVKRTVKGFINAGFAGIILEDQACGHTQGRKVVSREEAIMHIKAAVDARNESGSDIVIVARTDSRQAVSLNEALWRVRAFADAGADVLFIDALASREEMKAFCAIAPGVPKMANMLEGGGKTPILSPVELEEIGYKIIAYPLSLIGVSMRAMEDALIAIRGGRIPPPSSLPTFEEIKNTLGFNHYYEEDKRYAVTPAQPLL

SEQ ID NO: 49408 - protein, 155 aa, Zea Mays
MLPALRPRRRLPVASLLRRLLSDSTPSSSGTGESDLMAAAAAKARAEAAARARVEAYKQVQNFDWSSGADWKTAANILFTVPPKRKEFGLDFHLVQLFFVCMPSLAVYLVAQYARREIKRMEGKRKGKKTRNLRNKNRSRKNLPRRMLIQSFRRY

SEQ ID NO: 49409 - protein, 316 aa, Zea Mays
MIIFGVVQIFFSQIPDFDQISWLSILAAVMSFTYSTIGLGLGIAQVVSNKGVQGSLTGISVGLVTPVDKMWRSLQAFGDIAFAYSYSLILIEIQDTIRAPPPSESKVMRRATVVSVAVTTFFYMLCGCMGYAAFGDNAPGNLLTGFGFYEPFWLLDVANAAIAVHLVGAYQVYCQPLFAFVEKWARQRWPKSRYITGEVDVPLPLGTAGGRCYKLSLFRLTWRTAFVVATTVVSMLLPFFNDVVGLLGALGFWPLTVYFPVEMYIVQKKVPRWSTRWVCLQLLSVACLVITVASAAGSVAGIVSDLKVYKPFVTTS

SEQ ID NO: 49410 - protein, 331 aa, Zea Mays
MPPRPSLHSLLLMAASAAAASGDSGPLLAARRRLAATAAAGGHRIRLLHSFSPGRVPRRPEVVCCVRSAPDSRRSAPAPPCSRNVLSAKNYSTASEERLGKIIQKLKNEGINPKQWRLGNFQRMLCPQCNGGSSEELSLSVYIRKDGINATWNCFRSKCGWRGFVQADGVTNISQGKSGIESETDQEVEAKKAANKVYRKISDEDLNLEPLCDELVEYFATRMISAETLRRNKVMQRNWNNKISIAFTYRRDGALVGCKYRAVDKTFSQEANTEKIFYGLDDIKRAHDVIIVEGEIDKLSMDEAGYRNCVSVPDGAPPKVSSKIPDQEQLG

SEQ ID NO: 49411 - protein, 313 aa, Zea Mays
MLEDSTKRRRELEESTESRIQFWKQKEIVVNKFVGLQVKNAQELRLSSVSVRLEIQNCQKRWFEELAGLGQNLKMVTSAAEKYHATLADNRKLFNEIQELKGNIRVYCRIRPFRPWEDEKSTSVEYIGENGELVLSNPTKKGKEAGKNFTFNKVFGPTATQDMVFNDIRPLIRSVLDGYNVCIFAYGQTGSGKTHTMMGPENATEKEWGVNYRALNDLFNISHDRRDTIKYELGVQMVEIYNEQIRDLLGTGGSQKKLGIQNTTQPNGLAVPDATMCPVDSTSHVIELMQTGHNNRSMSATALNERSSRSHRK

SEQ ID NO: 49412 - protein, 387 aa, Zea Mays
MWKTSLCQAVGCPEASIEPPARGRNGHNNRSMSATALNERSSRSHSVVTIHVQGQDLKTGNTLRGALHLVDLAGSERVDRSAVTGDRLKEAQHINKSLAALGDVIFSLSQKNAHVPYRNSKLTQVLQTSLGGHAKTLMFVQVNPDVSSYTETLSTLKFAERVSGVELGAARTNKEGKDVKELMDQLSLLKDTIAKKDDEIDQLQLANSSNSLLKSTKHGDSLLKHSASSPGMTSLGKVASFGSGAASDLDNCSDTSDRHSEAGSMLSTDEARQLSQNSADPGGDSDGRLSDISDGGIPAGAETDSSANNVVDQEQDKTSATGKERLAKAVSRVQKLTVPKVGQASSLRPKPRDPSAPKSSVTPGVRKGTTTQATPPAKASGTSKRVP

SEQ ID NO: 49413 - protein, 566 aa, Zea Mays
MNQFVPDWSNMGDTSRPLGEEDDLIELLWCNGHVVMQSQSHRKVPPRPEKAAAVAAPPAPASVPQEDEGGLWFPFALADSLDKDIFSEFFCEAPTPAPAAADAAPAASGGGTGTEAGGKSCGGDVPVPAEDDRRGGGGACAVSAGDPCDLMPPPKSTPASCSRQQTTMSLANGGDNAGGDLPGLVRAGAEAGASSMLSAIGSSICGSNQVLVQRAACAPGRASASGSGTARGDGSGSAALPSAVGSANANAVGGGRGHEASSSGRSNYCCFGAATTTTTTTTTEPASTSNRSSKRKRLDTEDSESPSEDAESGSAAMLARKPPQKMTTARRSRAAEVHNLSERRRRDRINEKMRALQELIPHCNKTDKASMLDEAIEYLKSLQLQVQMMWMGSAGIAAPPAVMFPGVHQYLPRMGVGMGAAAAAALPSMPRLPFMAPQPVVPSAPVSVGPVPAYRGHMPAVGITEPYGHYIGVNHLQPAPPPPQVQHYAQGVSYYPPPLGATAKAVQQAAELHHVPGPGGSIMPAGAAPGVLLPESAQGRGPGTVPCAPPFSSSASVFGLQMGALR

SEQ ID NO: 49414 - protein, 551 aa, Zea Mays
MARNNEGHLELPEMDQIQPKNIPHNESLPLGQKLLLHHGSDAPLRIGHSSHGNMGLRINDLPSSSRTVQTLGYRVGNPGTSHAPFVHFHAGSSGSHLPDPAVNYPHRSEEGFAPVGSHMDNRRAAMKRKGPSVHPAGISATGYYVGSSSSTQPSNSVQPNAAPLAEPFLRQIPLSIDQSGWDIQHLIHQEGFQRNVRARHSSIPLVPRSASTYPLNINSVHVPSFGSTASASSSAPVEMNQVPVSLPTRTLPSGAPGMTSRVPTGRAYYPVVGSSSSSSSVGAVPTIHGSSGAAMFANGGYVPSSVHAGTVPIFPNPAPATSSGSRAMPHQMVIQSHPAATSAATSTSMRTAQPSLPARTAAASRHARHVSAGLANNGRYRRARSSYYRLHPLMVEAEVDSLFLPYCFNEVEFKSLSNLKLMLLLVVKRFMMDHLVFYESRAAAADPHRDMRLDIDNMSYEDLLALGEAMGNVNTGLADEKVSECVKEVVCCSSDHTQMDQDDGSCAICLEDYRDKEALGILKCRHDFHAGCIKKWLQTKNSCPVCKAAAA

SEQ ID NO: 49415 - protein, 276 aa, Zea Mays
MLMDGYCLVGKMEKALRVFDAMVSAGIEPDDVVYGTLVNGYCKIGRIDEGLSLFREMLQKGIKPSTILYNIIIDGLFQDGRTVPAKVKFHEMTESGIAMDKYTYNIVLRGLFKNRCFDEAIFLFKELRAMNVKINIITLNTMIAGMFQTRRVEEAKDLFASISRSGLVPCVVTYSIMITNLIKEGLVEEAEDMFSSMQNAGCEPNSRLLNHVVRELLKKNEIVRAGAYLSKIDERNFSLEHLTAMLLVDLFSSKGTCREQIRFLPAKYHFLAEASP

SEQ ID NO: 49416 - protein, 289 aa, Zea Mays
MAARRGPHVIKLHDPNPPLLGRAPGTAPAAIPAPSRDEGILAQHPRAAPSSASASHPAFALIEERLVARDQDIQELLVDNQRFAATHVALQQQLIAAQHELRAVSVAATRARAEREVEVRALADQAAHIEAEARAVAAARAEVDQVHADVQVLVAARTDLVNRLQGLREKLAHKKAEASKTDSVRAQIETMRREIQKGRAAVDFEKKAHSDNLEQSKAMEKNMIAVASEIERLRGELANAEKGATAVNPAAAVGSHARWCQFLLHESTIFLWTIREPAHQYPKMTAGTR

SEQ ID NO: 49417 - protein, 189 aa, Zea Mays
MPMAHPQSLLSLCLSLIHGRALPELPARRAPCSLMALAAALRPQPSSSLCAGVACSSPSSEFPLSISPRSVSSSLCARRVPVPNSAYRIQPHVDVSLFQLAVPRRHRFLSRARFPLSSSFTLARVCRRAVEPPPLLVTPSSRRVCSSIYATLLYRRRSCHPLLDPYLTSSLQTRSRHRSVSHQEISKIG

SEQ ID NO: 49418 - protein, 286 aa, Zea Mays
MPPHRAQNGWSPDAWNKIVSKFHKKHEYVTFNKIQIQEKERELKREYKILKEARKQSGVSWNEKRCMIIAEPTIWDNIITVRSICFTQTFPRAKKFRNKSFPIFDALGELYDGHIAQGTWNITSTQPLQNSDDGEKFKTIEVEYEDTNEPQVDARIEQDEDIVIVERVEHRLPKRSGAPTVNQEKETKRVRKDALEGLIGRYLDVKTKQVADEATQSTKEKEVAQDNDFSIKRCISVLKTMDITRDEKIKAAEVFNTPNYRETFICFNDDEPEVALLWPRGKMDKL

SEQ ID NO: 49419 - protein, 441 aa, Zea Mays
MKDLAGLGHLFVVSFLFHFASFMVIPAVTDVTMEAACPGRDECSVAIYLSGFQNAVTGMGALVVTPIVGNLSDRYGRKALMTLPVTVAIAPLFILACGRSEVYFYVYYVAKIIAGVFCEGTMHCLCLAYVADHVGPRRRAAAFGLLSGVSAAGFVSGTLTARFLPTASTFQVAAAVAVAAALYLRAFLPDAGGSVSCADEACDPLLQDSSCASSTSSSDEELSPRLPPHKGGLPSLSDMVALLTGSLALSGAATITFFYSLGEHGLQTALLYYLKAQFGYNKDEFANLLLIVGAAGMLSQLTVMPILAPILGEEMLLIVGLLGGCTHVFLYGIAWSYWVPYFAAAFVILSAFVHPSIRTNVSKNVGSNEQGIAQGCISGISSFASILGPLIFTPLTEPFNFKGFSILCAGFCTLIAFVISLRMPGARSSTCKKTAVQHEQA

SEQ ID NO: 49420 - protein, 726 aa, Zea Mays
MCSSCIQLDNNNFSGSTIPSSYGNISTLLKLSLRNCSLEGPVPDVSGIPQLGYLDVSWNQLRGPIPSIQFSSNITTIDLSHNNLNGSIPGIFSGLPYLQRLSLDDNNLTGSVPSNIWQDIDLRGNKSLVLDFQNNALNNLSTPLSPPPNVTILLHGNPVCIGQNQLNISQYCQSGTYVARGGSADNSTVCPPCSSDFPFERIPMSPIPCSCVVPVYVGYRLKSPGFSNFIPYESQFQQYLTSGLSLSSYQLEVSTFMWEEGPRLKMDLKIFPNNTPFFTVSEVFRLNGMFTAWQIADSDIFGPYELISFNQGWYNTIIPQGTKSGLSTGAIVGVVMAAFVAAAILSSLVTIIILRRRSRQSSSNKRTAKRISMKIAGVKDFTFDELSHCTHDFNDSTLIGQGGYGKVYRGVLADGIVVAIKRAQQGSLQGSKEFFTEIELLSRLHHRNLVSLLGYCDEDDEQMLVYEYMPNGNLRDHLSARAKVPLDFPMRLRIALGSSRGILYLHTEADPPIYHRDIKASNILLDSKFVAKVADFGLSRLAPLPETEGSAPGHVSTVVKGTPGYLDPEYFLTHKLTDKSDVYSLGVVFLELLTGMQPISHGRNIVREVLAANQSGMIFSVVDNRMGSYPAECVEKFAALALRCCQDETDSRPSMVEVVRELDMIWRMTPGTENIASSESGVMGMGSNSTSTPTASGSRMDDHYISSMEVSGSNLLSGVMPSINPR

SEQ ID NO: 49421 - protein, 69 aa, Zea Mays
MMLSFLVFDGELFFSLLSVRPCNQEISWRICTKEWLATTRESVLREATRGQSVDELRERHSHAERVDNL

SEQ ID NO: 49422 - protein, 574 aa, Zea Mays
MGCSCPPLADAACLALLLLALSLACRHHHGCAAATLSTASRWVLDESGSRVKLACVNWPSHLEPVLAEGLGKRPVGAIAADVAAMGFNCVRFTWPTFLVTDASYSDLTVAQSFQRLNLTESLAGIRVNNPGVVDLKLIDAFKAVVSSLGEHNLMVILDNHLSKPGWCCSNTDGSGFFGDTYFDPDVWVDGLTKMATMFAGVPNVVGMSLRNELRGPRQNVNDWYMQRGAEAVHAANPRVLVILSGLSFDNDLAFLNSRPVNLSFTGKVAFEVHWYSFSNGPEWSSGNANQACARITAGITRRAFYLLDRGWPVILSEFGVDNRGVNTNDNRYYGCAAAAAADLDLDWALWALQGSYYLREGVLGLDEVYGVLDWAWCRPRNDTALRRVQALQRPLRGPGLAEAAPYTVLFHPVSGMCVVRRSPTPSLTQPFQLSLGPCNETEAWEYSAQQQRLALRDAALLCLRAEGAGRPASLAVSCGDAMARWGFVSDSKLHVAVNATSSAGSVGDGLLCLDVGADGRSVVTNPCRCLSADNSCDPQGQWFKLVSSTRSVVTKQTMLAQLPLKLKDWKIRSF

SEQ ID NO: 49423 - protein, 233 aa, Zea Mays
MASSSVAADMELDRPNLEDYLPPDSLPQEAPRNLHLRDLLDISPVLTEAAGAIVDDSFTRCFKSNSPEPWNWNIYLFPLWCFGVVIRYGLLFPLRSLTLAIGWLAFFAAFFPVHFLLKGQDKLRNKIERKLVEMMCSVFVASWTGVIKYHGPRPSTRPHQVFVANHTSMIDFIILEQMTAFAVIMQKHPGWVGFIQKTILESVGCIWFNRNDLRDREVTARKVPLSLGVLSVQ

SEQ ID NO: 49424 - protein, 235 aa, Zea Mays
MASSSVAADMELDRPNLEDYLPPDSLPQEAPRNLHLRDLLDISPVLTEAAGAIVDDSFTRCFKSNSPEPWNWNIYLFPLWCFGVVIRYGLLFPLRSLTLAIGWLAFFAAFFPVHFLLKGQDKLRNKIERKLVEMMCSVFVASWTGVIKYHGPRPSTRPHQVFVANHTSMIDFIILEQMTAFAVIMQKHPGWVGFIQKTILESVGCIWFNRNDLRDREVTARKQKPSLDFPRRNLC

SEQ ID NO: 49425 - protein, 335 aa, Zea Mays
MADGSASASPPSVSPHQYHRDAIKSSVRNTAANRRREHAIAIGKERREALMRAKRVCRAPLSGSDEAAGEEGDMVVDEEKADLETRTTQAVEELKSALSSQGKGAQNRKTEVLRALRRLLSQSEVPPVDAAIKAGAVPLLVQSLSFGSPDEQLLEAAWCLTNIAAGKPEETKSLLPALPLLIAHLGENSSTLVAEQCAWAIGNVAGEGAELRNTLLAQGALWPLARLMLSNKGSTTRTAAWALSNLIKGPDSKAANELIGIDGILNAIIRNLEKADEELVTEVAWVVVYLSALSEKATSLIVRSSMPQLLIGRLLASENLQLLIPIKPYQVLSSV

SEQ ID NO: 49426 - protein, 50 aa, Zea Mays
MRTVCYFDGKTQRSTMGKDVLENESFCLKTIGYKKLASGFVKAFVNHLNH

SEQ ID NO: 49427 - protein, 60 aa, Zea Mays
MLPNFNEVFGLECAQSVTLMAKRNEVPWDVLENESFCLKTIGYKKLASGFVKAFVNHLNH

SEQ ID NO: 49428 - protein, 66 aa, Zea Mays
MNLLLYFAGGRESPPQACPPSSCLCCSSSNTCRGVMLTVIPCSLLEDKNMEAIGSLLEVLGLQLLV

SEQ ID NO: 49429 - protein, 488 aa, Zea Mays
MRNARRNINDAPVNAYEQQRIAIIAENKRKLASLNIPTLKTAGPSEKRTKRTHDTSVVATEGHNLRARPQRNYNGNENIQIDEDLVINQSDGDFLCDNEDFEDIPKKRAGKGRGITRLDDIFARKSDMPKIKITLNEHGQPVGKDCRKFSSAIGCLVRKKLSVACADWRLVPAEKKYEVWTSIKEIYDIDDAAFNWFLASAGRKWKEFKATLKEQYFNEKLTNEELKTKVGDRVDDDAWNFLTEYWMSPNFDNKLKAIVEARPELKERSIQQGDAFAAVCGEKEPRGRVRVLGLGPTPQEVGTPGLKCYTPTRLQMEVFARKKLESEKAALEKRIADMQEEMMEREKQNVEMGSHNDSNSRLHSQSPREEHIHQAHDAQFQEDDASLDNHCEEDEYVFLPRGGNIRPTSVTTTRPRIVSATRFSHDALVGEDGAQTSVPPNECNPIQPKRATTSVWPRNDAATRFSHDVRPRNDAATRFSHDVQLGKM

SEQ ID NO: 49430 - protein, 960 aa, Zea Mays
MASSAATTTTTLLRLLCLCTVLLVAMQAAAARPPNVTIGSLFAFDSVIGRSARSAIQLAVDDVNRDPTVLNGTTLTVVFQDTKCSGFAGTIQAGLELMEKEVVAVVGPQSSVIAHVVSHVANQLRVPLLSFAATDPALASTQYPYFVRTVHDDRFQMAAIADVVSHFGWREVTAVYVDDDYGRGGVIALADALEATRARVSYRAAFPLGADRATLADILQRANFMESRVFIVHASPDSGLNVFAAARGLGMMVSGYTWIATDWLATAAIDAAGAASNSSNIQGVLTLRQYTPDSDAKASLLSRLAAADPTSNNATASVNTYGLFAYDSVWMAAYAIDQFLGDAGGGNVSFSADPTIRDANGSALGLSALRVFDQGEQLLGKVMLSNFTGVTGHVEFQFDAGVNSSGTLVNPAYEILNVGGTGVRRVAYWSNYTRLSVDAPKQLGDGVPPPNSTSTTAQQQMSNVIWPGGTTATPRGWVFADNGKPLTIGVPYRTSYKEFVSKDETSPDGVSGYCVDVFKAAVALLPYPVPVSFVLFGDGVENPSYNELVQKVADGYFDAAVGDISIVTNRTRVVDFTQPYIDSGLMIVSTVKSSSSDEWAFLKPFTPELWATVVAFCIFVGAVVWILEHRHNDEFRGPLKKQMVTIFWFSFSSMFFTQREDTVSVPGRFVVIMWLFVVLIITQSYTASLTSILTVQQLSTGIQGLSDLLASNDPIGYQVGSFAGSYMNKELGVAATRLRELDPDDYADSLQRGPRGGGVAAIVDELPYMELFLSSNCQFQTVGQEFTKSGWGFAFPLDSPLAVDLSTAILTLSENGDLQRIHDNWLNTGTCDSQNNGVGGAERLSLRNFGGLFLICGVACVIALLIHFVRILFQFCQYRRHGAADGAQEEDENDGDDDRDGDSDKEKSQRRPARQTSIRDLMSFVDMEEAEVKRAIRSRSGKSMGRSRSDTSDAPSSSPV

SEQ ID NO: 49431 - protein, 520 aa, Zea Mays
MTCVRAEDAVSPAAADDVAAALVSRGGLIQKVAAGGGRRPAGSARSLQRSAHLATGDGNAPAPAVEASCSWSGDGIGKSNGGGKRDDRHRMRQYRSQLEQEVKKLQRQLEEEVDLHVALADAVTQNVAPILKSSMKLPHKAQELLINIASLEITVSNLEKKLNDLYYQLCHERNERLLAENNQGCLPSTSSDEHQSLSTCTCTWEEHISSLRDLKFGGSESMRSMRQDLFPELEDDQDMGEDPEGQQIVSLNRLLEKHRDSSLNRLLEKHRDEEMQESGSMENEGNENEQPDTLSFEQSILKITSIKGGNLWSNPNELSEEMVRCMRNIFLRLSESLKISPKTSSDCSSSSVERLSGSTLASFSDSSIMPSMLRSPSVDSNHNDETMKEVRNFDPYKVNGKETRRDIGNYRSAAEVSWMSVGKDQLEYASEALKKFRFLVEQLSKVNPSCMDRDQRLAFWINLYNALIMHELTSIHRICPQFLSSSVMRSPIVYRCIFLSESIRRIWHTEYLEMTSSFFL

SEQ ID NO: 49432 - protein, 203 aa, Zea Mays
MDPEDTTPPAPSQGDAETTPPPVLEVAAGEDSLASGGEAAERAHEEEELAREVMELGLQNEYLRSQIAGVRPAGDADEVPGLVRGWKEQVERMSREVQEQRLTREATEKALEHVNVAYAEADGKVQELTAKLAQAEQKMEKELKERDDKYLELETKLQRLLKRAKQRIQDIQKQELERARQQASEGLRSMDAERQQLRTVNSK

SEQ ID NO: 49433 - protein, 221 aa, Zea Mays
MERLRRDKSILLAEVVKLRQEQQSTRAGMRAMEERLRHAEHKQVQMMGFLARAVQSPDLFQLLAQQQARRRELEGAALLSAASRKRRRPIGAAPANGGLQQQEEEQQQGDDDDPTATRALFAELDERGTTSELENLALNIQGLGKRRQDGSEKQGGRARSQQQGGFETAELTDDFWEELLNEGMKGGAEAETLPPERRRPAWYVDALAQKLSSMSNNTTAK

SEQ ID NO: 49434 - protein, 67 aa, Zea Mays
MPKRHVRSLSQHPVTIPCVAVCVSEERNPIYVRTGNPCNSCLMFGVMRKSEIVIIIPNIDLVCDMVH

SEQ ID NO: 49435 - protein, 709 aa, Zea Mays
MAGQERRTIDLEEGWAFMQKGITKLKNILEGKPEPQFSSEDYMMLYTTIYNMCTQKPPHDYSQQLYDKYRESFEEYITSMVLPSLREKHDEFMLRELVQRWSNHKVMIYQEIKGQVKDAVIALIDKEREGEQIDRGLLKNVLDIFVEIGLGQMECYENDFEDFLLKDTTEYYSVKAQSWILEDSCPDYMIKAEECLKREKERVGHYLHISSEQKLLEKVQNELLAQYATPLLEKEHSGCSALLRDDKVEDLSRMYRLFSKISRGLEPISNMFKTHVTNEGTALVKQAEDSASNKKPEKKDIVGMQEQVFVWKIIELHDKYVAYVTECFQGHTLFHKALKEAFEVFCNKGVSGSSSAELLATFCDNILKKGCSEKLSDEAIEDALEKVVRMLAYISDKDLFAEFYRKKLARRLLFDKSANDEHERSILTKLKQQCGGQFTSKMEGMVTDLTVARDHQTKFEEFVAGHPELNPGIDLAVTVLTTGFWPSYKTFDINLPAEMVKCVEVFKEFYQTRTKHRKLTWIYSLGTCNINAKFDAKPIELIVTTYQAALLLLFNGSDRLSYSEIVTQLNLSDDDVVRLLHSLSCAKYKILNKEPASRSISPNDVFEFNSKFTDRMRRIKVPLPPVDEKKKVVEDVDKDRRYAIDASIVRIMKSRKVMGHQQLVAECVEQLSRMFKPDFKAIKKRIEDLITRDYLERDKDNANTYKYLA

SEQ ID NO: 49436 - protein, 170 aa, Zea Mays
MNTRTFCEICVEEVEAGNRPNGTLTTAAYKNICVKYRQRTGLLHSKTQLKNKWDLLKGLYSFWLGLNKDTGLGWDSKLGTVIASDEYWKKNTKWMDLHHALQVNFMMWKIMRLRLMVLMELILAHLRQTVMLNMMNLRLLLLVPASQLSRREAAQLSQRKELVLLLLIAH

SEQ ID NO: 49437 - protein, 296 aa, Zea Mays
MNNHISILVILIVDVSVVLLLNSHVGLCSCYNRIFSFGDDTMDTGNFIHLIGKAPSKYKEAPYGKTFFRHATGRISDGRVLIDFYAAKKQFLSDSLVIMGGIGQNDYYSYFIKGKPPKDGNIISDVIADISHFIEELIVVNGAKAFVVANNFPVGCLASYLSRFHSDDHEDYDEHGCLKSFNEFSQKHNEQLYSAIGQIRYSYPNVKVIYADYYNATMEFIKKPSRFGIGDPLVACCGGNGPYHTSMECNGTAKLWGDPHHFANWDGMHMTEKAYNIIMEGVLNGPFADPPFPLSC

SEQ ID NO: 49438 - protein, 333 aa, Zea Mays
MNNHISILVILIVDVSVVLLLNSHVGLCSCYNRIFSFGDDTMDTGNFIHLIGKAPSKYKEAPYGKTFFRHATGRISDGRVLIDFYAEALKLPMIPPILPEKNFGCFPHGANFAVFGATARGKVFFSGSPWCIGTQMYWFDQLVDRIAPGDGKPPKDGNIISDVIADISHFIEELIVVNGAKAFVVANNFPVGCLASYLSRFHSDDHEDYDEHGCLKSFNEFSQKHNEQLYSAIGQIRYSYPNVKVIYADYYNATMEFIKKPSRFGIGDPLVACCGGNGPYHTSMECNGTAKLWGDPHHFANWDGMHMTEKAYNIIMEGVLNGPFADPPFPLSC

SEQ ID NO: 49439 - protein, 212 aa, Zea Mays
MGRKGRKKGLLYPLTSLSPRPSAPSSLYLALASLPVARQRWLPLPPPRRRRRQRCCCCSSCRSPRRRTCRSCPTGSAATRRRGGCTRSGWRRTAGPTTPSARRSGGTRCSGTTSATSTRTTPPPTRASTPSASASTASPTSPTTSTAPPTSAPGPGRRGRGSSAPGTTPPTTRTCRSPSTGGPRAPSPRSRTRAAAVNAQRQASRSAIPLVV

SEQ ID NO: 49440 - protein, 347 aa, Zea Mays
MASALDTLCGQAFGARQYYLLGIYKQRAMFLLTLCHVRFLQTQNIVVPVMASAGAAAACHVVVCWALVYALGMGSKGAALSNSISYWVNVAVLAVYVRVSSACKETWTGFSTEAFRDALGFFRLAVPSALMVCLEMWSFELIVLLSGLLPNPKLETSVLSISLNTAAFVWMIPFGLSSAISTRVSNELGAGRPRAARLAVRVVVLLSVAEGLGVGLILVCVRYVWGHAYSNVEEVVTYVANMMLVIAVSNFFDGIQCVLSGVARGCGWQKIGACINLGAYYIVGIPSAYLIAFVLRVGGTGLWLGIICGLIVQLLLLAIITLCTNWDSEATKAKNRVFNSSSPASGT

SEQ ID NO: 49441 - protein, 726 aa, Zea Mays
MVTSKSSWSQVVKNTRPTNLSVAARNLQPQDLGAVIFGCTNSTIQECHSRQLFGLPKTHISYVRNIKEGLPLFLFNYDDRRLYGIYEASGNGKFCPESNAWSQDSKGKTSYPAQVAMRVKVWCFPLAENQFRNAIIANYYQKIPGVPGQKLHFFKFELDHAQTRVLMDMFTPSPSPNSFWTPPAAAPADEHAKELVLSPGWAPECEGNNNLKSEKVVKSYADIVKKNTFVEVGTRDVDVEHAGSGDESSGGFDELDCQYTPTEREDYALSDRVVQVQQQYPDKQAEVLSFDRVLQGRITFPGQQWHSDFYANTTQTEDNDAYSCEYAQEVKYAILDGSSNLPETLDSEVDKLSLGHSDLLVQLLDSESCTEAKLIDAVKQLSGRIEAWSNKEVKHLQGMNERLLKRIVELKGTVMTLNSKIDPLTLDDSLNQFVEQCLGSEDVIYLVGGFDGFSSLPSLDSFSPSLDILTPLKPMAVGKSYSSTVALEGKIFVLGGGDGACWFDTVDCYDRSRDDWSTCPSLTCDKGSLAGVSVNGRIYAFGGGDGTKCFSDVEMFDPVHGKWIKNQPMLEKRFALAGVALNGAIYAVGGFNGVQYLSCAERLDPREPNWKMLPKMSAGRGCHTLTVLNEKIFSIGGYDTRAKAMVSTVEVYEPRMPSWVMVEPMNYTRGYHSSAVLGGSIFTFGGVKGEADTILDVVEHYKEGCGWMTTGLKSIGRRCYCSAIVL

SEQ ID NO: 49442 - protein, 623 aa, Zea Mays
MLNPTELIDPKCKVCKNTPHIRETDHLFLDLPRIEDKLVNYINDTSVAGMWSQNAIQATNAWLKEGLKSRCITRDLKWGVPVPIEKYKDKVFYVWFDAPIGYVSITSSYTPEWERWWKNPDNVELFQFMGKDNVPFHTIMFPSTLLGTGENWTMMKTICVTEYLNYEGGKFSKSKGIGVFGNDAKDTNIPPEVWRYYLLMNRPEASDTLFTWTDLQAKLNSELLNNLGNFINRVLSFIAKPAGAGYDSIIPDAPGAESHPSTSVIAEKVSKSVEQYLDAMEKVKLKQGLKSAMGISTDGNRYLQDSEFWKLYKDNPASCAIVMKTSVGLVYLLACLLEPFMPSFSKEVLRQLNLSPEENISFSEENGESVKAKPPWDLVPAGHKIGRPVPLFEELKDEKVSEYREKYAGSQAERNSKAVADAEATKIANQTQSIALSGGSKKEQKKQSGNSKSKVAEAELSVAKLEIRVGLIRKAEKHPDADSLYVEEIDVGEEAPRTVVSGLVKYIPLEEIQNRKVCVLCNLKPVVMRGIKSDAMVLAASNEDHTRVELVEPPADAAVGERVTFAGHSGETEASLSGKSKVWEKLAADLRSNGDLVACYQDVPFMTSAGVCKVQTIANGEIR

SEQ ID NO: 49443 - protein, 484 aa, Zea Mays
MCPLSPSLLSLSPLHCSSDLLFARRRNKNHPSPYRCYSCTRALPPGAAAYDPDMNRAHSSSSKLINEKLVEHRISTAKHCPHCGEKIDSKPDWVGLPAGVKFDPTDQELIEHLEAKVKDEGSRSHPLIDEFIPTIDGEDGICYTHPEKLPGVTRDGLSKHFFHRPSKAYTTGTRKRRKIQTECDVHKGETRWHKTGKTRPVMVNGRQKGCKKILVLYTNFGKHRKPEKTNWVMHQYHLGDLEEEKEGELVVCKIFYQTQPRQCSWSSDRGAAATALAATAAAAAAQEQHRRDSGSGSCSSRDHEVSATSFPAGYTVTTAVEMQQHMKQPADHFSFAPFRKTFDQEVGIGGDQVPSNQLGRSEPHHAGLGQQPHGPVLATKTAVPATAFLISRPSNPVSTIVPPAMQHASVVLDHDQFHVPAILLHHHDKFQPQQKLDRRSAGLEELIMGCTSSTSTKGDASIAHPQETEWPYTYWPPDNQDHHG

SEQ ID NO: 49444 - protein, 431 aa, Zea Mays
MNRAHSSSSKLINEKLVEHRISTAKHCPHCGEKIDSKPDWVGLPAGVKFDPTDQELIEHLEAKVKDEGSRSHPLIDEFIPTIDGEDGICYTHPEKLPGVTRDGLSKHFFHRPSKAYTTGTRKRRKIQTECDVHKGETRWHKTGKTRPVMVNGRQKGCKKILVLYTNFGKHRKPEKTNWVMHQYHLGDLEEEKEGELVVCKIFYQTQPRQCSWSSDRGAAATALAATAAAAAAQEQHRRDSGSGSCSSRDHEVSATSFPAGYTVTTAVEMQQHMKQPADHFSFAPFRKTFDQEVGIGGDQVPSNQLGRSEPHHAGLGQQPHGPVLATKTAVPATAFLISRPSNPVSTIVPPAMQHASVVLDHDQFHVPAILLHHHDKFQPQQKLDRRSAGLEELIMGCTSSTSTKGDASIAHPQETEWPYTYWPPDNQDHHG

SEQ ID NO: 49445 - protein, 507 aa, Zea Mays
MYYIDSGGRSGFRETAAQVFLRGTVGVQLLHPSIAALGSPARRRNKNHPSPYRCYSCTRALPPGAAAYDPDMNRAHSSSSKLINEKLVEHRISTAKHCPHCGEKIDSKPDWVGLPAGVKFDPTDQELIEHLEAKVKDEGSRSHPLIDEFIPTIDGEDGICYTHPEKLPGVTRDGLSKHFFHRPSKAYTTGTRKRRKIQTECDVHKGETRWHKTGKTRPVMVNGRQKGCKKILVLYTNFGKHRKPEKTNWVMHQYHLGDLEEEKEGELVVCKIFYQTQPRQCSWSSDRGAAATALAATAAAAAAQEQHRRDSGSGSCSSRDHEVSATSFPAGYTVTTAVEMQQHMKQPADHFSFAPFRKTFDQEVGIGGDQVPSNQLGRSEPHHAGLGQQPHGPVLATKTAVPATAFLISRPSNPVSTIVPPAMQHASVVLDHDQFHVPAILLHHHDKFQNMHQQPQQKLDRRSAGLEELIMGCTSSTSTKGDASIAHPQETEWPYTYWPPDNQDHHG

SEQ ID NO: 49446 - protein, 63 aa, Zea Mays
MRPSRPHQYTTIPHRPPLLLRVRFSALHRYLARRSPNHPILRPRPWHRIPEASRRGRWSPMTV

SEQ ID NO: 49447 - protein, 299 aa, Zea Mays
MATPTATALTCSCRPSSPSSSSAAFRRLNIFAPVSGAHSPPRRRLRLAPLHVVDDSKNPPEERSETDKMVDGMDFGELCSDFECISSPYVESTARQVARDILELREDNRAFNCYAVSVKYKDPLRTFVGREKYRRPLWITKALENPVVEMSMQSTSNLTIRWALRGKPKNPLFASVGGDVIVRVESRFVLNQISGQVLEQAESWDLSASSLPAQAYFWLSRRVYSAVESGKDAIEAAKSAASSGLTTKGDQNLEAYPDPSADPTKFFQRPDDGFSQDVYQIGLLLAVIYFIVQFLKATL

SEQ ID NO: 49448 - protein, 330 aa, Zea Mays
MAKGRAHPSKRPTHQLLAAVLSVFVLLPLLVPAAATVAVAVAVAEGGGKQLAVGKDEGKLVSEGDAGGGGLVEENEFAGGFGSLDSMLQWAIGNSDPEKLKEGAADVQKLSADELLERRQEIKELMEKLKMPSDADLMKIAIDDLNNSSISLEDRQRALQELLVLVEPIDNANDLEKLGGLLPVIQELNNANEEIRTTSAWVLGTASQNNELVQNQILGYGALVRLVKMGYSTSTEEAAKALYAISSLIRNNVNGQEAFHSENGSAMLQHILVSNNIDVRLQKKAVFLVTDLADFQLNSGIAQLPFLSDRLFLKSIVDMLSRYYWPSRVC

SEQ ID NO: 49449 - protein, 76 aa, Zea Mays
MLLKTLVLFLCILIVPSSIINYIVILKCSFQLVSTLMYIRINLWCLIQCFVAINGVVSMNSYMRFLRSYQESNVAG

SEQ ID NO: 49450 - protein, 414 aa, Zea Mays
MTRIGKNTDGVQAVMKTFVHFGAPPNILVDGKPHLGTDKLVPLLRKFRHHLRELGVTIRFNARVDDLIVEDGQVKGIVVSDVELQPGPASQKLAFDAVVMAVGHSARDTYSMLWQHNVDMSPKSFAVGLRIEHPQELINSIQYSELAAEVQRGRGRIPVADYKIVKSVGERDAENELDIAEPTRSCYSFCMCPGGQVVLTSTNPSELCINGMSFSRRASKWANSALVVTVSSHDFKPFQSHGPLAGVEFQRQFERRAAMMGGGNFVVPAQCVTDFISNRLSVTTLPPSSYRLGVRPSNLHELFPPYITEALQESLIMIDREMPGFVSSKALLHGVETRTSSPLQISRHGETYESTSLRGLYPTGEGAGYAGGILSAAVDGMYCGFALAKQLSLFHGDIEPFLGKTQKQTGFIKY

SEQ ID NO: 49451 - protein, 593 aa, Zea Mays
MAMAFAAASAWSLSLTAFSLPLPQSLRPKPSQLLHGATSSFPRPRRCGWGAVVRCAKRTGKQRYPSEKKRLNRRKQELLRQAAPEEGSKGRESGYWRLSKLAVPARDDPGKDFTGISLPLLQAIAKAIKFPVPSMLPDEAFTVIRKSFDARKVLKEPQFTYIVDMDVKKILNIEPRAWDFIARLEPKLGVVEYMTEEKLAVDLVSMLNVSSKGSNNVLGIRDTHSGMIYRQQKKPRVAVIGSGPSGLFASLVLGELGAEVTLLERGQPVEQRGRDIGALAVRRILQPESNFCFGEGGAGTWSDGKLMTRIGKNTDGVQAVMKTFVHFGAPPNILVDGKPHLGTDKLVPLLRKFRHHLRELGVTIRFNARVDDLIVEDGQVKGIVVSDVELQPGPASQKLAFDAVVMAVGHSARDTYSMLWQHNVDMSPKSFAVGLRIEHPQELINSIQYSELAAEVQRGRGRIPVADYKIVKSVGERDAENELDIAEPTRSCYSFCMCPGGQVVLTSTNPSELCINGMSFSRRASKWANSALVVTVSSHDFKPFQSHGPLAGVEFQRQFERRAAMMGGGNFVVPAQCVTDFISNRLSDARLCF

SEQ ID NO: 49452 - protein, 1314 aa, Zea Mays
MDAPGELQCVGRLEVAAPPPARYLRVGSLPVPTDSSASLPVLLPSPSPIGAPRYQMLPLETDLNTLPMIPNIPEKVFSSDAKSTEGLRYDSGHINQNLSRKCEALAVSGLAEYGDEIDVIAPADIMKQIFKIPYSKAQVSIAVNRIGDTLILNTGPDVDEGEKIFRRQGNQPKGSDPSIFLNFAMHSVRAEACDCPPSHQPSQKKQTASAVLRGSFGCDEGSFDSSPSSSFSTSPYLDQNDSKSRKASHSTHESLYLGAMENNRKVKGSDPIKKTTRVGEKNSCEVQESEKSKRVGNNGFRKVCFWQFHNFHVLLGSDLLIFSNEKYIAVSLHLWDVSRQVTPLNWLEAWLDNVMASVPELAICYHQNGVVQGYELLKNDDIFLLKGVSDDGTPAFHPQVVQQNGLAVLRFIQDNCKQDPGAYWLYKGAEEDVIQLYDLSILPEKHTAGDHRSPCGPMSSFIDKGRKESLFSLGTLLYRVAHRMSLSKVPSNRAKCAKFFRKCFDFLSEQDHLVVRACAHEQFARLILKCYEDLELTSESFMIESEVTLTDLDDDSPELRLENLPAKQNVLPELGKNEPAVLDEVLECTTSVSSGMTSSLVEPSQVDGGSSSSVTKEDVSLDSLVMCQAGISKTIADAISSKLAAIHHVSQAIKSLRWNRQLQNNTQHGCGDSADTIWERSVDFSLCRCGDVDCIEVCDIREWLPKSKMDHKLWKLVLLLGESYLALGEAYKNDGQLQRTLKVVELACLVYGSMPGHIDGDEFISSMSNSSLSREDLALKTKLVLDEADYCNNKRCFSYEVSSHQLPPNYLFWAKAWMLVGDVYAEYHRLNSHQAKLAPEQKSHGEVRMSNEVALEVKRLKRKLGKDKQNCDTCSLINCSCQSDRASSGSSASSSSSEASKLYSRKKNKKSLGKNLQLQSQYREASKNPNAQEATQGSESKQHDVNDTCIENNSVLNDDIGHYSQARENQSRNVDGVPDKSQASVPTVRDGGIFKFLGGPKPGDVEYNLSSAIHCYGAAKGALFAFPVHSVETSMVLKKRGWGFNELGRCRLENRNLVSAEIAFADAIKAFEEVFDHTNVILINCNLGHGRRALAEECVSRIDEFQKHNLPEGTYMQSFKSAKSEYFQAINYYSAAKRQLKYVNTEADKVLYHEVYTQYAHTYLRLGMLLARESFLTDSYEGGLVNESSNRTAVEILASDAFREALSTYESLGEHRKQEAAFGHFQLACYQRDLCLRFLDLVDKEVKQKNEDKYRQKSKWYGSLAEKNWQKALEFYGPKTHPTMFLNILMAQSALSINISNSFHSTAYTDLNGQ

SEQ ID NO: 49453 - protein, 1325 aa, Zea Mays
MDAPGELQCVGRLEVAAPPPARYLRVGSLPVPTDSSASLPVLLPSPSPIGAPRYQMLPLETDLNTLPMIPNIPEKVFSSDAKSTEGLRYDSGHINQNLSRKCEALAVSGLAEYGDEIDVIAPADIMKQIFKIPYSKAQVSIAVNRIGDTLILNTGPDVDEGEKIFRRQGNQPKGSDPSIFLNFAMHSVRAEACDCPPSHQPSQKKQTASAVLRGSFGCDEGSFDSSPSSSFSTSPYLDQNDSKSRKASHSTHESLYLGAMENNRKVKGSDPIKKTTRVGEKNSCEVQESEKSKRVGNNGFRKVCFWQFHNFHVLLGSDLLIFSNEKYIAVSLHLWDVSRQVTPLNWLEAWLDNVMASVPELAICYHQNGVVQGYELLKNDDIFLLKGVSDDGTPAFHPQVVQQNGLAVLRFIQDNCKQDPGAYWLYKGAEEDVIQLYDLSILPEKHTAGDHRSPCGPMSSFIDKGRKESLFSLGTLLYRVAHRMSLSKVPSNRAKCAKFFRKCFDFLSEQDHLVVRACAHEQFARLILKCYEDLELTSESFMIESEVTLTDLDDDSPELRLENLPAKQNVLPELGKNEPAVLDEVLECTTSVSSGMTSSLVEPSQVDGGSSSSVTKEDVSLDSLVMCQAGISKTIADAISSKLAAIHHVSQAIKSLRWNRQLQNNTQHGCGDSADTIWERSVDFSLCRCGDVDCIEVCDIREWLPKSKMDHKLWKLVLLLGESYLALGEAYKNDGQLQRTLKVVELACLVYGSMPGHIDGDEFISSMSNSSLSREDLALKTKLVLDEADYCNNKRCFSYEVSSHQLPPNYLFWAKAWMLVGDVYAEYHRLNSHQAKLAPEQKSHGEVRMSNEVALEVKRLKRKLGKDKQNCDTCSLINCSCQSDRASSGSSASSSSSEASKLYSRKKNKKSLGKNLQLQSQYREASKNPNAQEATQGSESKQHDVNDTCIENNSVLNDDIGHYSQARENQSRNVDGVPDKSQASVPTVRDGGIFKFLGGPKPGDVEYNLSSAIHCYGAAKGALFAFPVHSVETSMVLKKRGWGFNELGRCRLENRNLVSAEIAFADAIKAFEEVFDHTNVILINCNLGHGRRALAEECVSRIDEFQKHNLPEGTYMQSFKSAKSEYFQAINYYSAAKRQLKYVNTEADKVLYHEVYTQYAHTYLRLGMLLARESFLTDSYEGGLVNESSNRTAVEILASDAFREALSTYESLGEHRKQEAAFGHFQLACYQRDLCLRFLDLVDKEVKQKNEDKYRQKSKWYGSLAEKNWQKALEFYGPKTHPTMFLNILMAQSALSINISNSFHSTAAGMWLKQMKTTPTIWIWT

SEQ ID NO: 49454 - protein, 310 aa, Zea Mays
MGDCVVEDGHVHHPSDEVEGAVPLTVAVELDERAGESREEGGGQRKKVGGIRREPSFSRWCRDTSVAAASNTAVAAAISDSDSDDSEEFDLPLLPSSSGGGSSPMDIEAGATVRSDDLPISPRLLAKVIGLIACWYTLSTCLTLYNKEMLGKHMWKFPAPFLMNTVHFTMQAVASRAIVWFQQRGLEGGPNKMSWKDYCLRVVPTALATALDINLSNISLVFITVTFATMCKSASPIFILLFAFMFRLEKPSFSLLGIMLVVSFGVLLTVAKETEFNLWGFIFIMLAAVMSGFRWSMTQILLQKEEYVIM

SEQ ID NO: 49455 - protein, 449 aa, Zea Mays
MGDCVVEDGHVHHPSDEVEGAVPLTVAVELDERAGESREEGGGQRKKVGGIRREPSFSRWCRDTSVAAASNTAVAAAISDSDSDDSEEFDLPLLPSSSGGGSSPMDIEAGATVRSDDLPISPRLLAKVIGLIACWYTLSTCLTLYNKEMLGKHMWKFPAPFLMNTVHFTMQAVASRAIVWFQQRGLEGGPNKMSWKDYCLRVVPTALATALDINLSNISLVFITVTFATMCKSASPIFILLFAFMFRLEKPSFSLLGIMLVVSFGVLLTVAKETEFNLWGFIFIMLAAVMSGFRWSMTQILLQKEEYGLKNPFTLMSHVTPVMAIVTAIISIVMDPWHDFRASHFFDSSAHIIRSSLLLLLGGALAFFMVLTEYVLVSVTSAVTVTVAGIVKEAVTILVAVLFFNDPFTWLKALGLAIIIFGVSLFNIYKKHVFICNAWRTLSNDCLCY

SEQ ID NO: 49456 - protein, 285 aa, Zea Mays
MLDSVQQGDAGEAHVEVPGAIPDEHGAFHDAGCGVQGHSVVPATWPGGRAKQNVVEGLLFTRLEKPSFSLLGIMLVVSFGVLLTVAKETEFNLWGFIFIMLAAVMSGFRWSMTQILLQKEEYGLKNPFTLMSHVTPVMAIVTAIISIVMDPWHDFRASHFFDSSAHIIRSSLLLLLGGALAFFMVLTEYVLVSVTSAVTVTVAGIVKEAVTILVAVLFFNDPFTWLKALGLAIIIFGVSLFNIYKYKRFKKGHYNENAGTNTQSSNWTSKYVILDEDTEAQDDTG

SEQ ID NO: 49457 - protein, 387 aa, Zea Mays
MGDCVVEDGHVHHPSDEVEGAVPLTVAVELDERAGESREEGGGQRKKVGGIRREPSFSRWCRDTSVAAASNTAVAAAISDSDSDDSEEFDLPLLPSSSGGGSSPMDIEAGATVRSDDLPISPRLLAKVIGLIACWYTLSTCLTLYNKEMLGKHMWKFPAPFLMNTVHFTMQAVASRAIVWFQQRGLEGGPNKMSWKDYCLRVVPTALATALDINLSNISLVFITVTFATMCKSASPIFILLFAFMFRLEKPSFSLLGIMLVVSFGVLLTVAKETEFNLWGFIFIMLAAVMSGFRWSMTQILLQKEEYGLKNPFTLMSHVTPVMAIVTAIISIVMDPWHDFRASHFFDSSAHIIRSSLLLLLGGALAFFMVCIVYSYSGNKYLCFLLT

SEQ ID NO: 49458 - protein, 505 aa, Zea Mays
MARRRRRVFRGRVPPDLHRAYGALARTLGHAVLSLIPPPTQAGTPCSACRGRGGAGCLACRRWEYLLRDGDPVAYRSLITRAVCAVAPSGSATPPPLYTPGNGGHSQAKLVGVAIKLMMMDRACTTTNVLSSGCRAIGDLLMCYILRHSSIFLPVKKNVFFQVTGLPLNDFLQKPMFASAAKNQQPQSTKGKYLCYLCQNPERSQIIYGGYANNSKVACSELPLTNGPIKCSNLDNQNSRKRKRLYKWQRLKKQKQIFPSSEDKSLTSQSEISTNGFGVHDVLLEDLCATVKDKSQFLEPTVDNDSLAMNIRTSQCNSTSRIQSTSPQVGLPNFMHLNNGLICFNCLMLNSSKRVSVDLLISRHTIFYNRKTSYNVFHGNHILNKRKIPDALSLIIHIFGFKGCCAKLLKCNCHVSTTTNSNCMCLSLPKLMNKLIRNSKRCQYRKLFLKHCPVNSKTKLQDFAWYIQERSNPVMLFFNSEVHSKSKRYETISKSQSSIKKCPPQ

SEQ ID NO: 49459 - protein, 743 aa, Zea Mays
MCLSLPKLMNKLIRNSKRCQYRKLFLKHCPVNSKCAADVAKNHNNKAHFLIGGKSAYYDQSYVQLEAYSTHQQVVSFIWAVLTRIIPEPLLGNSSSKRSLRINIWKFIKLRRFESFCLSDCIGELKVSHYSWLSNIGFSDCFCSALMEKEIWSSNGSEEEKLQNLLRCWISWMFSDIVIPLVQSYFYVTERESRRYDVLYYPKTVWRNLTSTAIASLNRQNFRILRGTSRKEAIQSCYFSTVRFIPKAKDMRPLVNLRAQSKNALLNNCHLIINKVKDENPDKFGSSVFDYNNVHQNIWHFISSVRSHLKEKIKIYIVVADVSKAFDCITHDMLLKVVDDALKCDDYVLRKCKKVVCNWSKNAIYRFDSNVSISNGDNVCDFLIQLSSRGGILVDQGKSCKIRKKEIQCFLSKQVKCNILKIGQNFYSQRVGIIQGNKLSPNLCSLYFGHLENSELLKSLHDNKIDSEKDVLTPRSLLMRFIDDFIFISFSKEQALNFFNRMRRGFVNYNCYMNDSKYGFNFEVANSEHCSNRIYKGDDGFSFIPWSGLLINCETLEIQADYTRYLDIHISSTITAKMHSSAKYLESKLCHYMRPKCHPIFFDSVINSPGTVRLNIYQNFLLCAMKFHCYFRSMPDPGIMKPELLHIIKRTFRYMHSLVAKRMHEAELQYDVRPVLKLRRKETMWLGLSAYLRVLQKKQSRYSELLASLREEIGRCGHLDRHNDALRYAVDDSHSSVFWKFKF

SEQ ID NO: 49460 - protein, 1183 aa, Zea Mays
MARRRRRVFRGRVPPDLHRAYGALARTLGHAVLSLIPPPTQAGTPCSACRGRGGAGCLACRRWEYLLRDGDPVAYRSLITRAVCAVAPSGSATPPPLYTPGNGGHSQAKLVGVAIKLMMMDRACTTTNVLSSGCRAGGQTTCVIELVSSSSWDILLHRIGDLLMCYILRHSSIFLPVKKNVFFQVTGLPLNDFLQKPMFASAAKNQQPQSTKGKYLNPERSQIIYGGYANNSKVACSELPLTNGPIKCSNLDNQNSRKRKRLYKWQRLKKQKQIFPSSEDKSLTSQSEISTNGFGVHDVLLEDLCATVKDKSQFLEPTVDNDSLAMNIRTSQCNSTSRIQSTSPQVGLPNFMHLNNGLICFNCLMLNSSKRVSVDLLISRHTIFYNRKTSYNVFHGNHILNKRKIPDALSLIIHIFGFKGCCAKLLKCNCHVSTTTNSNCMCLSLPKLMNKLIRNSKRCQYRKLFLKHCPVNSKCAADVAKNHNNKAHFLIGGKSAYYDQSYVQLEAYSTHQQVVSFIWAVLTRIIPEPLLGNSSSKRSLRINIWKFIKLRRFESFCLSDCIGELKVSHYSWLSNIGFSDCFCSALMEKEIWSSNGSEEEKLQNLLRCWISWMFSDIVIPLVQSYFYVTERESRRYDVLYYPKTVWRNLTSTAIASLNRQNFRILRGTSRKEAIQSCYFSTVRFIPKAKDMRPLVNLRAQSKNALLNNCHLIINKVKDENPDKFGSSVFDYNNVHQNIWHFISSVRSHLKEKIKIYIVVADVSKAFDCITHDMLLKVVDDALKCDDYVLRKCKKVVCNWSKNAIYRFDSNVSISNGDNVCDFLIQLSSRGGILVDQGKSCKIRKKEIQCFLSKQVKCNILKIGQNFYSQRVGIIQGNKLSPNLCSLYFGHLENSELLKSLHDNKIDSEKDVLTPRSLLMRFIDDFIFISFSKEQALNFFNRMRRGFVNYNCYMNDSKYGFNFEVANSEHCSNRIYKGDDGFSFIPWSGLLINCETLEIQADYTRYLDIHISSTITAKMHSSAKYLESKLCHYMRPKCHPIFFDSVINSPGTVRLNIYQNFLLCAMKFHCYFRSMPDPGIMKPELLHIIKRTFRYMHSLVAKRMHEAELQYDVRPVLKLRRKETMWLGLSAYLRVLQKKQSRYSELLASLREEIGRCGHLDRHNDALRYAVDDSHSSVFWKFKF

SEQ ID NO: 49461 - protein, 343 aa, Zea Mays
MAGYPEDNQHALNGKIFVGGVAWETTEESFSKHFEKYGAITDSVIMKDKHTKMPRGFGFVTFSDPSVIDKVLEDEHVIDGRTVEVKRTVPREEMNTKDGPKTRKIFIGGLPASLTEDELKDHFSLYGKVLEHQIMLDHSTGRSRGFGFVTFESEDSVERVISEGRMRDLGGKQVEIKKAEPKKHGSDNIGNGRSSQGGGGYRSTYRGGGGAGSGSSGSGGGGYGFGDAYRSAAASYGYDGGAGAGYGYGRGYGYGGNAGFASGFGGGYGGSMYGGAYGAYGAYGGGAYGGGAYGGGAYGGSAYGGAPGGGYGTGGYGSYGGAGGTGGGSTGARGSSRYHPYGK

SEQ ID NO: 49462 - protein, 365 aa, Zea Mays
MIEGGEARPDRLREGMEEMDETFHAVLDELFARSAAPGGVGIRPADVDVLVVNVSMFSPAPSLSARVVRRYGLREDAKVYNLTGMGCSATLIALDLVNGYFRTHAGQVALVMTSESIAPNWYAGNKRTFMLGNCLFRSGGCAYFLTNDPRLRPHAKLRLRHVVRTHTGASDEAYNCALQMEDEAGRPGFHLGKELPRAAVHAFVHNLRVLAPRVLPLPELLRLACATLSARLARKKRQRGAGHGHGHLTIRMKAGVDHFCVHTGGAAVIDGVGKGLTLTEHDLEPSRMTLHRFGNTSASSVWYVLAYMEAKGRLRQGDRVLMLTFGAGFKCNSGVWKDRIHHYPLKDVSNPFMDKYGFVKDLIDL

SEQ ID NO: 49463 - protein, 515 aa, Zea Mays
MEVLRDMHLPPGFGFHPSDTELVSHYLKRKILGQKIEYDPIPEVDIYKHEPWDLPAKCNLPIEDNKWHFFASRDRKYPTGSRSNRATLAGYWKSTGKDRAIKLKKRTLGTKKTLVFHEGRPPSGRRTEWIMHEYYIDENECKVSPDMKDAFVLCRVTKRSDWELDNEVGNRYPHLEQLDAAAASVASTVKPEDAVATVICPEESNRAATPVGSDELSNDVGQEPITPDSSPPNGGKELEVWLEELLDPSPSFNLVADTRSADVSLTDQYAESSNPGSVSRNIGPGHASPIQDGTDATDYLLTDDLPEDLYSMLYPGTDQFYDSMFLEQAGQEGIAFPTNQAYYMMGMESYALPTNLNGTLNAELQSDQENNTTNLANGNTDTGVTIQSRRATTSPANISLAAGKIKMQVGINRMVTSSSVSINQTMRFTDNSGRRLDLKTDDVEHQKKTTNSAISAKQSRAANPEGHSSQGYLKGFKNTFRCSSAGFKAYISFAFFVVGVAAAAVLHHHRSCANL

SEQ ID NO: 49464 - protein, 111 aa, Zea Mays
MSYRKGLKVWVEKGEGWVEAVVTEAKDHAVAVLTSQREKARQRTMATVQRTLQAMDEDNIRDESRTGRLVVLAALAAGAISIGKRMPLLAPSPPSSWRRWPPVPSASARLS

SEQ ID NO: 49465 - protein, 161 aa, Zea Mays
MECDWWSLGAIMYEMLVGYPPFYADDPITTCRKIVHWRNHLKFPEDAKLSNEARDLICRLLCDVDHRIGSAGADQIKAHPWFQGVAWDKLYEMEAAFKPQVNDELDTQNFMKFEELENPPAKTGSGPSRKMMLNSKDLSFVGYTYKNFDAVKAIKISVFTC

SEQ ID NO: 49466 - protein, 192 aa, Zea Mays
MQPPRDACPHPTPPTTVCASPPPHGRPSPSASTTMSRASSHPPPLPPPRRHGCPLRPSSTPMMTMNTAHSASSAARPHRWKVRHLLPRRQWKESLISSPAVLGRSTTSPPAAPQRQWKAWLVQGDSSLRRQRHQLLGGVAASLQLHIFWLALLNLCILSYLLSLTVGISRVRIVFASDGGLNWVLCVTDVLL

SEQ ID NO: 49467 - protein, 108 aa, Zea Mays
MPVRGAFFSFRTHLSIFRCLVDHRLNDPPPEPPNPKIVFQLEKTFKTTFSSFVLHMGLVSRHLKEEGNGGVKFGQYIYTSWSIGINVLNLLKFQIILVITLTIRIKSL

SEQ ID NO: 49468 - protein, 105 aa, Zea Mays
MIGVLELLIAGLFELLSFYDHDILRHKYITCTFAVFQLEKTFKTTFSSFVLHMGLVSRHLKEEGNGGVKFGQYIYTSWSIGINVLNLLKFQIILVITLTIRIKSL

SEQ ID NO: 49469 - protein, 223 aa, Zea Mays
MYRYFVRLNREGNAGGSHQLPHVLQERLHALSAAINALQLVDPSFAWLDSICEADDKISPSKRPRNLLMENSAFGTNSELSRLQFCVDIEILEKEYILTEAQYMLSTLKSSFDFSESQSIESLMDILINEKLYDIAFTIVLKFWKESEIKKQLDRVFSVIAQQCCSNRSDNKSSKQVPLLPSSENDAWEINNRSIAVTQQLQGSNHWETLELYLLSSWKADLL

SEQ ID NO: 49470 - protein, 281 aa, Zea Mays
MENSAFGTNSELSRLQFCVDIEILEKEYILTEAQYMLSTLKSSFDFSESQSIESLMDILINEKLYDIAFTIVLKFWKESEIKKQLDRVFSVIAQQCCSNRSDNKSSKQVPLLPSSENDAWEINNRSIAVTQQLQGSNHWETLELYLDKYKDLHPRLPVIVAETLLYTDPEIELPLWLVQMFKANKAGNKISWGMSGKEADPAALFRLYINYGRHAEATNLLVEYLESFASGQWTSSTARRCPPFGSPTPPSRGSGASLVRCNGQGTAWISATGSRSCCTEP

SEQ ID NO: 49471 - protein, 257 aa, Zea Mays
MDILINEKLYDIAFTIVLKFWKESEIKKQLDRVFSVIAQQCCSNRSDNKSSKQVPLLPSSENDAWEINNRSIAVTQQLQGSNHWETLELYLDKYKDLHPRLPVIVAETLLYTDPEIELPLWLVQMFKANKAGNKISWGMSGKEADPAALFRLYINYGRHAEATNLLVEYLESFASSRPVDVLHRKKMSAVWFPYTAVERLWCQLGEMQRAGHSVDQCDRLKKLLHGALMSHLQQVVVDSDDVLSSVGDGQGMEDQSS

SEQ ID NO: 49472 - protein, 112 aa, Zea Mays
MLYVCCRAASEEHISGEEAARAVGVQPLHQGRNPTHQGWQSRHLAQGGLQRGGQELGALSTHPLWTHARSPGAQEDKPATSGSPEKRRRRATKGRAVRCGSQHGGCSILILE

SEQ ID NO: 49473 - protein, 287 aa, Zea Mays
MSSSSSSSSAATVFPPSPQLPPPLLVENLPPLHQLTPPVAAAAAPASEQLCYVHCHFCDTVLVVSVPTSSLFKTVTVRCGHCSSLLTVNMRGLLFPGTPANTAAAAAAAPPPPPAAAVTSTTATMTTAPPPPPATSVNNNGQFHFIPHSLDLALPIPPHQSLLLDEISSAANPSLQLLEQHGLGGMITSGRNAAAPHPHPPQPQAPAAGKGAKEPSPRANSAINRRTKSNASRLAIPTSRTGRPSARRPRTGRTFHTSTLDSCQITRGPRRQACYLRITREATAAGY

SEQ ID NO: 49474 - protein, 358 aa, Zea Mays
MFFSGDPSARRRVDLGGRSSKERDRKVLLEQTREERRRRQGLRLQNTSATKIQKFFRGKKALELARSEVRKNFCSTFGEHCERIEWNIFGTNSDFLRQLLFFFNANEDNDIAILCHVCNLLLQYVKQGGDVVTLFTGVNGSSLQPLVAHRVKKFALICVQAVYQKRHDWGSQLLTTPGTTSVPSVSLLETVGCLINPKFLWNCKVVGYLQQRKIYCLFRGIIVSVPQNVRNSGHFDSASVLEQVLMLVASHVGHHPCCCLKVDPRWSFSSQLLSIPFLWHRLPQLKKVFSVNGLNKYYIHQIACLLPSLVDVLPNDISANHPGYACVLANVLEAATWILSDAKLASDSLINFLGVRYC

SEQ ID NO: 49475 - protein, 75 aa, Zea Mays
MSTPRSTAWSLRYQRGLLQIQALVLSEEAQVSRRFKSNGQILAIDEVQPFHLLLLMLIYHSLMGLGGVWFIGTNF

SEQ ID NO: 49476 - protein, 585 aa, Zea Mays
MAECRIQDWKRASTPESVSRHETSIPRTKQRNIFSLLAQRELSPRTKNQAKNLWTKPPRLDACPIESKFWGTYAQHDLLSWAEAEFLHWWIPKYCPLTPSSKATIAAAFSTDGRVLASTHGDHTVKIIDWQTGKCLNVLLGHHRTPWVVRFHPQRSDILASGSLDCEVRLWDAKTSRCTAELVFYRPVASIAFHATGELLAVASGHKLFLWDCNKRWETLELPIILETRRSLRAVQFHPHGAPYLLTGEVHNLDSEDSTMTPALLSNYSFRDTPLLGGSGVDNLISELQYMQNFEQVGASSSVPVTTGSFDGSRLHDTSGHHLMTSLPSVGRPLLGTHAAEAPAISLSVGSEQTTSLLGGGTELPCTVKLRIWRHEMKNPFITLGPEACLLTIPHAVLCSEMGTHVSPCGRFLVACVACVLPHSYGGHGSQLHEHYDSTGAGTSPTRQAFPSRQIIYELRVYSLEDATFGTVLATRAIKAAHCLTSIQFSPTSEHILLAYGRQHSSLLRTILINGETRVPVYTVLEVYRVSDMELVRVLPSVGEEVNVACFHPSPGSGLVYGTKQGKVRFLRHHGASFTCWGERS

SEQ ID NO: 49477 - protein, 290 aa, Zea Mays
MAHVLPRPHPAYARSRPSRASRSRAAPQPAASPHTPTAAPRAHPAAARSVRFLLPAPAAPAADASRRARAREVASQIPQTRFNPVILPIHGSRARKPRLPTTPTSMASPPSIHGSHAPSAPFHPWLRLPPRRNSSHPLLPRGLRLPILSLCVVFFPSSPSAPDLAPCPPTPVSVMARSGQRWTQPLPGVCSRPRPSSGTSPRWPPARVPRATGWTPPSPRRSSGRSAGGRARRGAFPSTRSSTASMVPSSPPLGEPKPSRGGRSRPDLGILLLPNGMNGRKQNLSGVDLA

SEQ ID NO: 49478 - protein, 1080 aa, Zea Mays
MAQNSSRLHRLLTLLDTGSTQATRFAAARQIGEIAKSHPQELNSLLKKVSQYIRSKNWDTRVAAAHAIGAIAENVKHTSLKDLYASVQAEKHASGFSDGSDDAGSALPRTDSAATSDLAFGSFDIGRVLEFGSPLLASGGQEYDIADSGKNPAERLARQKKNLRRRLGLDLCEQFMDVNDVIKDEDLLAQKNYWGSHVQNNGFHSFNSGHNIQQLVSTMVPRYPKHSNFRSRRLSARELNMLKRKAKSNAKDHTKAVSEDDEVTLKGSVPSNGASSEQGVFDTAVEEDNLEYNENGRWPFQQFVDQLIHDMFDPIWEVRHGTIMALREILTHHGACAGVYFPDLSLPSSDLDGKTNFDSLKREHGIDLNEDVHLEHLEPALKKHKKEPKCAESMMDCDKELVDSDYLKTEGDLSNVPDVLTAEPNSTHVKVEPEFCVDDSADPSKGVSTCKSQKKLNSISHLSSHILAPESSKFMKLMKLAKYSYMKNWEFLQDCAIRFLCVLSLDRFGDYVSDQVVAPVRETCAQALGAVLKYMHPSLVCHTFKILLQMQHRQEWEVRHGSLLGIKYLVAVRQEMLKDLLDYIIHACKAGLEDPDDDVRAVAAEALIPAADSLVRLNDQILHPIVVLLWDILLDLDDLSPSTSSVMNLLAEIYSQPEMVPKMLGTAASGEKGEFDLNEATQIAEQEDELTSIENPYGLATLTPRLWPFMRHSITSVRRSAIRTLEKLLEVGNTRSSAGTTPSKLWPTSILGDALQVVFQNLLLESNDDILQSSERAWKLLLQCPEKDLEYAARLYFSNWVQLATTPFGSALDSTKMFLPVALPRGNRSRAAAKIRSARLEHEYTTMISFGSTGESISHEKHSDVPSIFSNIIVGSDPDKSVTHTRVLTSMALGLFASKLPVSSWQVVLSPLANHLMSLSGVQRQVASMIIVSWFKDLRGRDPVSVGTLLAFLSSLKEWLVDLLTCSDPALPTKGSVLPYSELSRTYTKMRNEANNLLHLIDSCAAFKDYSSSLNLNTDVLTVDDAINFASKLLLPSESDIPSETENIFLNNIESAKQGLLSTSGYLKCVQFGCHVCPAS

SEQ ID NO: 49479 - protein, 282 aa, Zea Mays
MAKKRKHTDAQAETAGAEKPDDSAPARPERTLFGFKDPAPDAVPDSAASRAAVAPFRNREKVLITCSRRITYRYRHLMQDVLSMLPHAKKDSKVESKQSKGNALNEMLELRSCSSCLFFECRKQKDLYLWMVKSPGGPSVKFLVNAVHTMEELKLTGNHLKGSRPLLTFSTNFDEQPHWKLVKEIITHIFATPKDHRKAKPFHDHVFVFSIVDGHVWFRNYQISVPHNEIDKVDKGGMDKMTLIEVGPRFCLNPIKIFGGSFGGPTWYENPYYISPNQKRNT

SEQ ID NO: 49480 - protein, 319 aa, Zea Mays
MMMMNTSAAMSPPSTDVVVDDFSLGAMHQPYVVGFHADAGMRIMPSVVVDRPLLQQNTDLLEEYDSFDFAATGLLPLPFQELPGLLPPANYLPLPTPSMAMSPPSLRLLTLPGVPVPTAAADVVYGGLGGGGAGGPSFLKREHGVGSGGGRIGGLNLGRRTYFTPAAVDRLLGGGLGGVGLGMSVLGLGVGAAHHHQQQPPRCQAEGCKADLSAAKHYHRRHKVCEFHTKASAVAAAGKQQRFCQQCSRFHVLAEFDEAKRSCRKRLTEHNRRRRKPISAQGNNDHSSPPPPAPKKADTCITTSYNDDPKSKKHSRSCI

SEQ ID NO: 49481 - protein, 295 aa, Zea Mays
MEASVAAAGGGGGSAATRSSPAAVQATNDDAAASKLSCVNKGYMKDDYVRFFVRRPTRRAPIINRGYYARWSVLRTLLHQFLNAGKNSNNDKPKQILSLGAGFDTTFFQLQDEGMAPHCYVELDFKEVTSKKAAIINHYSEMKEKLGSEASISIEKGEVISTHYKLFSADIRDIPKLDSVIRMAEMDPSLPTFIIAECVLIYLDPTATGAIIHPDDAFGEQMIRNLESRGCPLLGINATPTLSHKEKLFLGNGWQRAVAWDMLKIYNDFIDSQERRSLCYAAPFHDVTADKAARN

SEQ ID NO: 49482 - protein, 219 aa, Zea Mays
MEASVAAAGGGGGSAATRSSPAAVQATNDDAAASKLSCVNKGYMKDDYVRFFVRRPTRRAPIINRGYYARWSVLRTLLHQFLNAGKNSNNDKPKQILSLGAGFDTTFFQLQDEGMAPHCYVELDFKEVTSKKAAIINHYSEMKEKLGSEASISIEKGEVISTHYKLFSADIRDIPKLDSVIRMAEMDPRVCAYLPGPNCHWCYCELGISKVLHCCLFLI

SEQ ID NO: 49483 - protein, 161 aa, Zea Mays
MITILLRKKNAVGALGFSCLQKVTAAFRQLAYGVPADYVDEYLWIGESTTIESLRKFVRAVCEVFGPEYLRPPNENDIARLLTIGEQRGFPGMIGSVDCMHWKWKNCPTTYQGMYCGHVKEPTIVLEAVASTDLWIWHAFFGLPGSFNDINVLHRFHLFDR

SEQ ID NO: 49484 - protein, 233 aa, Zea Mays
MTADAALLAIIVAFLLPLRLVSLGLSLASGRHGTSSRRVRRSCAALAVAAALLAVIFALPRDHVRECAAPIASVSSAGDDDGGFREELRLEVEQLKQQLARLESLWDSKSKAVDDKLDSLEEDNGRVMRAMALDVQSLINERENIKVQILKDGSRKMNSDISSVAKDTAEKVEVLHSAIEKVQVIADEWVKMNYTINRIWSFTKETEKRVEGLYSDLMKGFKQTKRKVPFWRD

SEQ ID NO: 49485 - protein, 243 aa, Zea Mays
MSISGELPGEGSDGEEEVFIDEEDIIHEITIDEEDLPDRDEEDDDVGDGIVDSEDIIDDSTYSFLGHKDEVFSVACSPTDASLVASGGKDDRGFLWRIGSDEGALELTGHKDTVGTVAFSSDGNLLACGSFDGQINVWNTAARALKGTLEGSGSGFEWLKWHPRGHLIIAGSEDCNVWMWNADHNAIINTFVGHSNTVTCGDFTPDGKLICTGSDDASLRIWDPRSAQSRHVIRGHGYHTVMD

SEQ ID NO: 49486 - protein, 963 aa, Zea Mays
MLIYRRLSVSCKEQMPLFASSLLSIVHTLLDQKRQDDLRIVGCETLFDFTVNQVDGTYQFNLEGLVPRLCEIAQEVGEDERASALRAAALQSLSAMIWFMGELSHISSEFDNVVQVVLENYKPQKMQNDDQSTNDADNQLVQEDQKAEHPPSPFIITPAPSWENIVNAKGGINLPEEDVRDPKVWSRICVHNMAKLSREATTFRRILECLFRYFGNNSSWLSENGLALCVLLDMQLLVESSGQNMHLMLSLLIKHIEHKTMLKQPDMQLSIVEVAATLAEQSSAIASPATVGAISDLVRHLKRTFHITLGSKDMELVKWNEKFRKGIDECLVQLSKKVSDAGPVLDMMAVMLENIASTPVVARSTAAAVYRTAQIIASVPNLQYQNKVFPEALFHQLLLTMIHPDHEARVAAHRIFAIVLVPSSVSPSIQASPSGQVKKHDMQRTLSRAVSVFSSSAAIFDKMKKDKHSENSQGESKDNSLHSVGEGTGQPKNQNLHVSQSRRSSMRISNFSMKRGPSMAMRAPSVAIRAPSISLRGPSMSSRASSVSVKEDQISPKKSDEETESVLVKLSARQITLLLSSIWAQATSPENTPVNYEAIAHTYSLLLLFSGSKASTFEALTQSFQVAFSLRSYALTEADSLQPSRRRSLFTLSTAMIIFSSRAYNVLPLIPICKQMINDRAADPFLRLVDESKLTAVKDCSNDPSKIYGSPEDNANALKSLSEIELSESQSRECIVSTIMNNIANMMDAELHNVRSQLLSDFTPDDMCPTSTQFFEMHVDNPSGFHETGHHEEGLLIDLGNDHDAFGEASEGAEARTSSVPASDLLSIDQLLETVGAEPAPQAGVVSADIGFKDMTSHCEALTIGKQQKMSAFMSFQQSVQAAGVPGSQPNQTTELDLFQDLQLPQAGAQSTNPFSDESVQGYPQYMNGPNGDNAQPGQDFQQQSLKLPAASPYDNFLRAAGC

SEQ ID NO: 49487 - protein, 331 aa, Zea Mays
MELAGTWRKVMPYMAMVFLQFGFAGMFLISVASLRQGMSHYVLVVYRNVVAAIVMAPFALWFERKTRPKMSLPVFIKILALGLLEPVLDQNFIYMGVNSTSASFSSALTNILPALTFVNAIILRMERIVIKERRSQAKIAGTAITVCGALLMILFKGPIINFPWSKHASHAVSDSGVHNSGHWLMGTFMILLSCFCWSAFFILQSYTLRSYPSELSLTTLICAMGATESGAVALVMERDTKAWSIGFDMRLFTAIYSGIMCSGVAYYVQGIVIKDRGPVFVTAFSPLCMILVTVLGSFILSEVVTLGSHCCWTLCAHLGQEQGPCEVAKQF

SEQ ID NO: 49488 - protein, 351 aa, Zea Mays
MAPLPASLMPCLWLFLCLLAAPCPAARAARFACNATAPRASTCQALVSYAPPNGTATPTLAAVRALFQLRSHRALLAANGLPLSTPPTAPAPVPLRVRLPCLCSGGAGATFQRPTYRVRAGDTLDAVARGVFAGLVTYQDIAAANNVSDPNRVAVGQQLWIPVPCSCDLVGGQPVVHFTYVVPAGGSVSSIAEEFGTTEETILTLNKMPDAKSLLAGQVLDVPLRACSSAISSTAIDRNLLVPNGSYILTANNCVKCGCSSSTWQLDCQSTQGLSSSFCPAAKCGDMFLGNTSSSTSSCESTACSYAGYTNSTSFAILANVTTTNVCNGYLRQKTERCRQASVVRIWPSDS

SEQ ID NO: 49489 - protein, 871 aa, Zea Mays
MAWWSGKVSLGGLQDIAGAVNKISESVKNIEKNFDSALGLEEKRDDEDASGSQTSNSDRIGFFNPVMAFMGHNGEEDGTEVSEKPQSLKNLSAEEGINSTPTKKHISEVDPSEVSGTTSPKLPSKSEEVHSISNGSPVSKADVSEQSITPQTPTHPSVAEEKLDSSTEAPASKVGDAEASETSQSAGHPSTVEENQHHQVSKHSDPSDEAEPNQLRESVRDLPDGSASSSPTKIHQSGDTETGESIHTGKEDTSDRNILQSQPAESALASSDDITEAEDNIAQEYDAPKELSGPQESSDMVDKGTHLEVKLHDSNINTEKSEEESNKMESGESSVVVQEDNAMEQPQDLTLKSLTAEHDSNSQNESVINSTDIPVGLGEGPPNDFTKEEKILESVRGTDSQTLDSVVSVDELEKLRRELKMMEAALQGAARQSQSKADEIARLINENEQLKSTIDDLKSKSSEAEMDSLKDEYHQRVATLERKVYALTKERDTLRREQNKKSDAAALLKEKDEIINQIREFEEEKQRLNSKIQIDGIKLVWRPEQDVMSVFFLLSKVEEAKVESIKRDKAATEKLLQETIERNQTELAAQKEFYTNALNAAKEAEALAEARVNSEAKIELENLLGEAGEKENMLIKTIEELRHFLTRQEQEAAFREKRLKGDYDDLQKRYQASELRYNELVTQVPESTRPLLRQIEAMQETTARREDAWAGVERTLNSRLQEAEAKAASSEEKERSVNERLSQSLSRITVLETQITILRTEQTQLSRSLEKERQRASESRQEYLAIKEEAAIQEGRAKQFEEEMKELRARHKEELQEAAEHRDLLEKGSRPCVQNVVLASGRGRAHLVLGWVFSPPRPAVSAPLGVSTVIR

SEQ ID NO: 49490 - protein, 884 aa, Zea Mays
MAWWSGKVSLGGLQDIAGAVNKISESVKNIEKNFDSALGLEEKRDDEDASGSQTSNSDRIGFFNPVMAFMGHNGEEDGTEVSEKPQSLKNLSAEEGINSTPTKKHISEVDPSEVSGTTSPKLPSKSEEVHSISNGSPVSKADVSEQSITPQTPTHPSVAEEKLDSSTEAPASKVGDAEASETSQSAGHPSTVEENQHHQVSKHSDPSDEAEPNQLRESVRDLPDGSASSSPTKIHQSGDTETGESIHTGKEDTSDRNILQSQPAESALASSDDITEAEDNIAQEYDAPKELSGPQESSDMVDKGTHLEVKLHDSNINTEKSEEESNKMESGESSVVVQEDNAMEQPQDLTLKSLTAEHDSNSQNESVINSTDIPVGLGEGPPNDFTKEEKILESVRGTDSQTLDSVVSVDELEKLRRELKMMEAALQGAARQSQSKADEIARLINENEQLKSTIDDLKSKSSEAEMDSLKDEYHQRVATLERKFSIFYSVKGRPGVVVYALTKERDTLRREQNKKSDAAALLKEKDEIINQIREFEEEKQRLNSKIQIDGIKLVWRPEQDVMSVFFLLSKVEEAKVESIKRDKAATEKLLQETIERNQTELAAQKEFYTNALNAAKEAEALAEARVNSEAKIELENLLGEAGEKENMLIKTIEELRHFLTRQEQEDRVQVVVVVSGVHDADLHGESFVIRMSMWLMAAFREKRLKGDYDDLQKRYQASELRYNELVTQVPESTRPLLRQIEAMQETTARREDAWAGVERTLNSRLQEAEAKAASSEEKERSVNERLSQSLSRITVLETQITILRTEQTQLSRSLEKERQRASESRQEYLAIKEEAAIQEGRAKQFEEEMKELRARHKEELQEAAEHRDLLEKDHIISIQGYSMM

SEQ ID NO: 49491 - protein, 209 aa, Zea Mays
MSSEKILSNYVCNKLGLVMFLLQLECLLRALEQDIENLQKKLGGCLRENQNLQEELAEAYRIKSQLAELHGAALSKNKDLEKQVRFFQSSVAQAFAERDSSLMECEKAKEREEAVSRKFADFEERMREYQSEIDEQKHLNDDLQRELTELKAHTELSLKVILKFYDLRCRDSGCSSSLTIEEKCSILLGDSADNWSFSSDGGTSTLKHL

SEQ ID NO: 49492 - protein, 184 aa, Zea Mays
MGLEIEQHLQRNARILEKRQALYDGFLRNGLSELQKFYTCQKAEIMKILEEESLRLMKVVAEIQDKLTEICINTEVSDHPADEIQCCDSSCKDVHVTKDISPSTCRKSDYPADLNSVSFDESKALAQALQEKMEALMLFSQEQERYLLEKQRDLIVIEELQKNLSQVVPLEFLLVIIFQSQRTI

SEQ ID NO: 49493 - protein, 98 aa, Zea Mays
MMEALEKIEKDIKKPLLRSDKKNMATLLAEFDKINKKLGFRKEDLPKIEEELELEIAKSELTELKKECVEAMETQLKREEFQDEEMPDVRKLDIRNFL

SEQ ID NO: 49494 - protein, 368 aa, Zea Mays
MNSLLRPPLPGPTPSLSARRMVSPPPAPVRVSSAALAGSGRRCRLGLAVAASAAPSWMEEAGVAVLEEGGRRNPSVSDSYRPAGLPRPNATVLEAQARVCTGPAQTRPLGEEQAMRVLDTILRSAMGELKEEPVSSAQLGAFFAGMTIRSNSFPEATQWSEGERRAMSIFWPRLVQILPPEVKFIADPEGTIMGANGLTGPRYVGQGTGEMRLVGALREVLAGGHLGYEEVQCVLKDILPIGPSSDLTVTSEALLAAFLIGQRMNRETDRELKAYCLAFDDELGPPLVADVKSLTHYGEPYDGNTRFFRSTLFVAAVRACYSESCLLHGVQWMPPKKDKCLNSWAQTYTYLQHKPRYCWRMRLLVLHI

SEQ ID NO: 49495 - protein, 238 aa, Zea Mays
MPAAAYPARHHQWCPSFPGTRNPPAPREPPAGYPPPPRPRQLRARRQLRASAAVMPRDEGRTGETLGKPLLPALQWGRPQLCHAPAPSETPTTTQDSRFPSTSVIFPAKLTTPPCTHLPTSSPTCSHSCPRLRSSRRRLRWKSGIARLSSTAPPASLRRVHLPPPQRLTPPPLDPTPCPRPSSPTYSPVTTWAPWPDARHGQQVGRNTFYVDPLLPCSSTHESELGLDPLLPLHADTG

SEQ ID NO: 49496 - protein, 239 aa, Zea Mays
MPAAAYPARHHQWCPSFPGTRNPPAPREPPAGYPPPPRPRQLRARRQLRASAAVMPRDEGRTGETLGKPLLPALQWGRPQLCHAPAPSETPTTTQDSRFPSTSVIFPAKLTTPPCTHLPTSSPTCSHSCPRLRSSRRRLRWKSGIARLSSTAPPASLRRVHLPPPQRLTPPPLDPTPCPRPSSPTYSPVTTWAPWPDARHGQQVGRNTFYVDPLLPCSSTHESELGLDPLLPLHAGRVL

SEQ ID NO: 49497 - protein, 267 aa, Zea Mays
MPAAAYPARHHQWCPSFPGTRNPPAPREPPAGYPPPPRPRQLRARRQLRASAAVMPRDEGRTGETLGKPLLPALQWGRPQLCHAPAPSETPTTTQDSRFPSTSVIFPAKLTTPPCTHLPTSSPTCSHSCPRLRSSRRRLRWKSGIARLSSTAPPASLRRVHLPPPQRLTPPPLDPTPCPRPSSPTYSPVTTWAPWPDARHGQQVGRNTFYVDPLLPCSSTHESELGLDPLLPLHAGAPPPDPNVKPTVLLDVAATVWRRLALESGTG

SEQ ID NO: 49498 - protein, 184 aa, Zea Mays
MPRDEGRTGETLGKPLLPALQWGRPQLCHAPAPSETPTTTQDSRFPSTSVIFPAKLTTPPCTHLPTSSPTCSHSCPRLRSSRRRLRWKSGIARLSSTAPPASLRRVHLPPPQRLTPPPLDPTPCPRPSSPTYSPVTTWAPWPDARHGQQVGRNTFYVDPLLPCSSTHESELGLDPLLPLHADTG

SEQ ID NO: 49499 - protein, 162 aa, Zea Mays
MRFQEKSSWTSKALATEIGIPMDSLNRRISFWTSKGVLTESAGPDADDRTFTVVDSMSDVNKDSIVNERMAEYQMTEEEGESSVASVEEQLKKEMTVYEKYIVGMLTNFGSMSLDRIHNTLKMFCIAEPSYDKSLQQLQSFLSGLVADEKLETRDGLYLLKR

SEQ ID NO: 49500 - protein, 537 aa, Zea Mays
MDPAAAALGAVPAAGAPPPGAAAGDQQAAPRVERLSAGVQQQLNLEGMRARAVGLYKAISRILEDFDVIIRTNPSASPKWQDVLGQFSMVSMELFNIVEDIKNVSKVFVVYPRNVNAENATILPVMLSSKLLPEMEVEETTKREQLLSGITNLPVPTQIEKLKVRIDMIGSACETAEKVIAECRKSYGLGSRQGTNLGPTLDKAQAAKIQEQEGLLRAAVNYGEGLRVPGDQRHPQSLPIHLIEVLPLGDGAQNFGDSSGSYPKNMSTFAPNSVNSQGNQIQASGGQLLGRPAPSPGTTGTPNFENVSTPPMPYANSPRSGTNMMNTPSPQQHLTPQQQRQKLMQHSQPLHQPVRPSAAGMLAQSALPQLQDLQGQAQQKLQQMQYNQALSQQFHNRQMQPGRMQPGMAQSQLNQGTQLRSHLGQFTGAANNAMFNAAQASSNSQMMANMHGSQSLMPQMQYGMAGGHPHRSHPQMLTDQMFGMGATNSSMMGMQQQQQGLYGNMQAGAQNVPQGMAGLQNQTQNPNFTQQRQQNQQ

SEQ ID NO: 49501 - protein, 952 aa, Zea Mays
MGCPRPLLLLLLHAVALAAADEFTYNGFGGSDLLLDGMAAVAPNGLLALSNGTSQMAGHAFHPAPFRLRDGAAAAARSFSAAFVFAIVSNYTVLSDNGMALVVAPSTRLSAFNAGQYLGVLNVTDNGRDGNRVFFVELDTMLNPEFQDMNSNHVGVNVNSMRSLRNHSAGYYDDATGAFTNLSLISRRPMQVWVDYDGAAARLDVAMAPAGVPRPRKPLISTPLNLSAVGADDGTAYVGFSAATGVIYTRHYVLGWSFATGAAAPPLDISRLPALPRFGPKPRSKVLETVLPVATAALVLALVVGAFLFVRRRVRYAEVREDWEAEFGPHRFSYKELYQATKGFKNKMLLGTGGFGRVYKGVLSGSKLEVAVKRVSHDSKQGMKEFIAEVVSIGHLRHRNLVQLLGYCRRKGELLLVYDYMSNGSLDKYLYDDRTARPVLDWGQRFQIVRGVAAGLLYLHEDWEKVVIHRDVKASNVLLDGDMNGRLGDFGLARLYDHGVDPQTTHVVGTMGYLAPELVRTGRATPATDVFAFGVFVLEVACGRRPLGRVAPGVDQTVLLDWVQEHQRRGAALDTLDARLCGKYDADEARLAVKLGLMCAHPSPEARPGMRQVVQYLEGDAPMPDVAPSYVSYSMLALMQNDGFDSFANVSFPSTVTSSVSPVSGGFSSSVSGLSGGRIALVTGGNKGIGLETCRQLASRGVRVVLTARNEARGLEAVERVRCARGDAEVYFHQLDVTDPCSAARLADFVRDQFGRLDILVDGMDVNQRVEWMKENSKETYEEAVQCMKTNYYGAKLVTEALLPLLQLSSSGRIVNVSSGFGLLRNFNSEDLRKEFEDIDNLTESRLEELMDKFLEDFKANLVEAHGWPTGGSSAYKVVKAALNAYTRILAKKYPTLRINCLTPGYVKTDMSMHMGVLTLEEGARNPVKVALLPDDGPTGAYFDLNGEASFV

SEQ ID NO: 49502 - protein, 325 aa, Zea Mays
MSEGSDGALEENDTRRREHDFFDVEEVDGVITAPKDEQNVLEVLLPEGVIIPTGFETIGHIAHLNLRDEHMPYKKLIASVVLDKNKPKIQTVVNKTDVIQNNYRTMQLEVLAGNGSLRTMVIESGLRFQVDLGTVYWNSRLATERQRLVNIFRNLDVVCDMFSGVGPLAISAAKKVKYVYANDINPNAVGYLERNMVLNKLEKKIEVFNMDARRFVSAIYSSKHVQPITQIVMNLPNDAVEFLGILCNTKSELHCVMPMIHVYGFSKAEDPEHDFHERINLTLGENIDTVEMHRVRLVAPGKWMICATFTLPQSVASAQPNYITC

SEQ ID NO: 49503 - protein, 774 aa, Zea Mays
MTKTNTMRSHDLHGYSHRHLLVQSSILLFLGTFSAAQAASDILSKGSNLTYGETLVSANGSFTLGFFSRGVPARRYLGIWFTVSNSSGDAVCWVANRDHPLGDSSGVLAISDTGSLVLLDGSGRAAWSSNTTAGAGAASPTVKLLESGNLVLLDGNDGGVDDYGVVKLWQSFDHPTNTLLPGAKIGINLWSGGGWSLTSWRDADDPSPGEFRYTMVRRGLLPEIVTLDSSDAIKYRTGVWNGRWFSGIPEMNSFSNMFVFQVTVSPSEVSYSYAAKAGAPPSLSRVLLNYTADAVRVVWWLDKRGWDNFFTGPRDDCDHYNRCGHSGVCNHTAASTTWPCSCVQGFVPVSSSDWDGRDSSGGCRRNVSLDCGDNGTTDGFVRLPGVKLPDTLNSSLDTSITLDECRARCLANCSCVAYAAADVQGGGDDVGTGCIMWPENLTDLRYVAGGQTLYLRQATPPSGTGRLKKETRVLVAAGSTLGFIGLIMLAIFAVQAVRIRRRNLLIQMTEAVETAQDPSVSSIALATVKSATRNFSTRNVIGEGTFGIVYEGKLPRGHPLLHGLAGRTIAVKRLKPIGDLPDIIVRYFTREMQLMSGLKQHRNVLRLLAYCDEASERILVYEYMHRRSLDAYIFGTPRERALLNWCRRLQIIQGIADGVKHLHEGEGSAGNVIHRDLKPANVLLDGGWQAKVADFGTAKLLVAGATGTRTRIGTPGYMAPEYVQSDGGETTLKCDVYSFGVTLMETLSGRKNCDTPSLVSEVKTILNCLGRSRC

SEQ ID NO: 49504 - protein, 369 aa, Zea Mays
MADGSSPSNASRASLGLTRSSSSRMRWAWGRCGTSASSTSLAAAPRVTRGCSSLSTCPTTPCRSISSTEGDPRLSSFGLMKNSRDGKSYSTNLAYTPPEFLRTGRVIPESVIYSYGTVLLDLLSGKHIPPSHALDLIRGKNILLLMDSSLEGQYANEDASKLVDLASKCLQFESRDRPNIKYLLSSVGPLQNQKEVASHVFMGITKATSVLPAIYSPLGKACAGMDLSAVHDILLKTGYKDDEGAENELSFQEWTQQVQEMLNTKKFGDIAFRDKDFKTAIDYYSKLVAMMSTPSATVFARRSFSYLMNEQAELALRDAMQAQVCMPEWPTAFYLQALALSKLGMETDAQDMLNDGATFEAKKQNGWRS

SEQ ID NO: 49505 - protein, 262 aa, Zea Mays
MGCFQSKVAGPLPPNDAAALPADKPADPEAANGAADGGGDGDDKEAVKRAVPVFREFALAELRAATKGFSADLIVSESGEKAPNAVYRGRLDGGRLIAVKRFSRLSWPDPQQFLADAVGVGKVRHKRLVNLIGCCAEGDERLLVAEYMPNDTLSKHLFHWDKQPLPWEMRLRVAYFIAQALDHCNLENRKIYHDLNAYRVLFDEEGDPRLSSFGLMKNSRDGKSYSTNLAYTPPEFLRTGPRFNKGKEYTVADGFLLRRAVC

SEQ ID NO: 49506 - protein, 487 aa, Zea Mays
MAPPPSMPAASDRAGPGRDAGDSSSLRLRRAPSADAGDLAGDSSVGLRENGEPQPPTNPPPQEQQQQHEMLYYRASAPAHRRVKESPLSSDAIFRQSHAGLLNLCIVVLIAVNSRLIIENLMKYGLLIRAGFWFSARSLGDWPLLMCCLTLPVFPLVALMAEKLITRKLIGEHVVILLHIIITTSAIVYPVVVTLKCDSAVLSGFVLMFLASIMWMKLVSYAHTNYDIRVLSKSTEKGAAYGNYVDPENMKDPTFKSLVYFMLAPTLCYQPTYPQTTCIRKGWVTQQLIKCVVFTGLMGFIIEQYINPIVKNSKHPLKGNFLNAIERVLKLSVPTLYVWLCMFYCFFHLWLNIVAELLCFGDREFYKDWWNAKTVEEPVHKWIIRHIYFPCIRKGFSRGVAILISFLVSAVFHEICIAVPCHIFKFWAFSGIMFQIPLVFLTRYLHATFKHVMVGNMIFWFFSIVGQPMCVLLYYHDVMNRQAQASR

SEQ ID NO: 49507 - protein, 478 aa, Zea Mays
MLTRRRSNHPGCSFPLPFLVCGLLLAAAVAFSPAAAAEAADGGAGHEGRAGKPEVEAEAEARGDGVAVAEAGGEVVAQGNATEAKEGSLADMIDRALEKEFPESEGEQGGGETDPGSFNNTVAEKQGVLETVARRVTKKNETKDNKSFPFKEVFLDRTEQEDVPTLIDRKDNVFIISNPKSKYPVLQLDLRLISDLVVVIVSATCGGIAFACLGQPVITGYLLAGSIIGPGGFSFVNEMVQVETVAQFGVIFLLFALGLEFSTAKLRVVRAVAVLGGLLQIMLFMFLCGILATLCGGKTKEGVFVGVLLSMSSTAVVLKFLMERNSINALHGQVTVGILILQDCAVGLLFALLPILSGTSGLLHGVASMMKSLVVLITFLTILSILSRTGVPWFLKLMISLSSQTNELYQLAAVAFCLLFAWCSDKLGLSLELGSFAAGVMISTTDLAQHTLEQACSFCRSNPSATFSLLFSLPALGC

SEQ ID NO: 49508 - protein, 530 aa, Zea Mays
MEPKGESGQKPIEEAIDSLKTDASMKANNVNLPAKKDASSSDAVSCISSGDAASTVKDREMNQETSFGDQGMHYYGYYYPGAYGGWDENGYFVGYNGLEVHPAVVQADNGSYLCYPLGYENGYASYIPVVPGGIASVDASHSAKSTADTVKGSSSALETVPNAANSSTSSKGANKAPGASITKGYLPSSKFVMHSNNQAKSSVYQSKGINLKESGRSWHSSEKLKARSKLNGHGDSESNENNHTDNSKYSLSSQSDVVGLSSVGDANASIPSPVVIRKTAYNLSDFVTKYEQALFFVIKSYSEDDIHKSIKYNVWASTPNGNKRLDNAYRLAQERMAEKGTKCPVFLFFSVNASGQFCGVAEMVGPVDFNRNMNFWQQDKWNGFFSVKWHIIKDVPNPQFRHIILENNENKPVTNSRDTQEVKFSQGTEMLNIFKNFTCKASILDDFDFYENRQKVMQDRRGKPLTSFGHPLPKAEKTAEVKRQTQLISATEVGRADTTKENEEKSSSVPEILNAACSNKEKPNKIATDG

SEQ ID NO: 49509 - protein, 85 aa, Zea Mays
MHDVGLALVPFWDDRQGTITGMLTASDFVLILRKLQRNIQVIGNEEPISAWKEAKLQFYGGPDGAVMQRTPLIHVLLHIFADSFI

SEQ ID NO: 49510 - protein, 190 aa, Zea Mays
MYRFLVDGVWRCDETKPFVRDEYGLISNEVLVENNVLPVVQPEPSIRGTNMDKGTILKTMPLEPSSQNPSMQIAVIRHVVSGILLHNTIYDVVPLSSKGLALVPFWDDRQGTITGMLTASDFVLILRKLQRNIQVIGNEEPISAWKEAKLQFYGGPDGAVMQRTPLIHFVQTGNIDLRAKKEAQLGMLPV

SEQ ID NO: 49511 - protein, 154 aa, Zea Mays
MKCLWKTMYYPLCSQSLLSEELIWIRMPLEPSSQNPSMQIAVIRHVVSGILLHNTIYDVVPLSSKGLALVPFWDDRQGTITGMLTASDFVLILRKLQRNIQVIGNEEPISAWKEAKLQFYGGPDGAVMQRTPLIHTGNIDLRAKKEAQLGMLPV

SEQ ID NO: 49512 - protein, 96 aa, Zea Mays
MDPFLKMSKEVVADTIMSCVIVSPVGNTLRWYRRVLCFLGVCFCALSCAIEWLCQLLILKEKGELRIIVENKHVIVRSHQLCQLPSISLIRIYRCS

SEQ ID NO: 49513 - protein, 177 aa, Zea Mays
MKCLWKTMYYPLCSQSLLSEELIWIRMPLEPSSQNPSMQIAVIRHVVSGILLHNTIYDVVPLSSKLTVLDTQLPVKQAFKIMHDVGLALVPFWDDRQGTITGMLTASDFVLILRKLQRNIQVIGNEEPISAWKEAKLQFYGGPDGAVMQRTPLIHFVQTGNIDLRAKKEAQLGMLPV

SEQ ID NO: 49514 - protein, 174 aa, Zea Mays
MKCLWKTMYYPLCSQSLLSEELIWIRMPLEPSSQNPSMQIAVIRHVVSGILLHNTIYDVVPLSSKLTVLDTQLPVKQAFKIMHDVGLALVPFWDDRQGTITGMLTASDFVLILRKLQRNIQVIGNEEPISAWKEAKLQFYGGPDGAVMQRTPLIHTGNIDLRAKKEAQLGMLPV

SEQ ID NO: 49515 - protein, 428 aa, Zea Mays
MLTCGRFISSSAATSTASFFPFRTLTRSLVRRPAPHLLSSASAAAATAVELDTNGDGSAGGGAGVVRPQWKAAIDFKWIRDNRDAVADNIRTRNSTANLDLVFELYDQYLTLQKEVERLRAERNAVANKMKGKLDPSVRQALVEEGKNLKEGLIALEEDLVQLTDKLQLEAQSIPNTTHPDVPVGGEESSVLRKEVGSQRSFNFAIKDHLQLGKELDLFDFDAAAEVSGSKFYYLKNEAVLLEMALVNWAISEVSKKGFTPLITPEIVRSSVVEKCGFQPRAKNTQVYSIEDSDQCLIGTAEIPVGGIHMDSILAESALPLKYVAYSHCFRTEAGAAGAATRGLYRVHQFSKVEMFIFCRPEESGKWHEELITIEEDLYASLGLHFKTLDMATGDLGAPAYRKFDIEAWMPGLERYDLQCIKLYRLPK

SEQ ID NO: 49516 - protein, 265 aa, Zea Mays
MIATAIVVGITLHAGNHLACDFPRVIAASPEEYALVAGAFGADKPTYAGLLSGTEGVTGVAMVVLMTVSFTLATHPFRKGEPKGAGAAAGTSRLPAPLNRLTGFNAFWYSHHLLGIVYALLLAHGYFLFLVRRWYEKTTWMYISVPLLLYVGERMLRALRSNAYTVKILKVCLLPGNVLTITMSKPYGFRYRSGQYIFLQCPIISPFEWHPFSITSAPGDDYLSVHIRTNGDWTQELKRIFVENYFSPHLNRRASFSELACQNYS

SEQ ID NO: 49517 - protein, 778 aa, Zea Mays
MWTPSRGSNARRSGHRRIADYLADDQTTTTATDASDNESYTTAYGEEFFAAAAAGSGGAGGMLPAFLADQGDLVEVMLELDEESMVVRSVTPTSAALYGAASLPAPPSAGVLGVSPSPRRAPSEGGGRLSRCSSTSSRIRKKFAWLRSPSPSPSPYRPTPAELQREAAMAARERRREQAQLNRSRAGARRALKGLRFISRTTGSVEAAELWRRVEERFNDLAREGLLSRDDFGECIGMVDSKEFAVGIFDALARRRRQNLERITKEELYDFWLQISDQSFDARLQIFFDMVDTNVDGRITREEVQELIVLSASANKLAKLKEQAEEYASLIMEELDPEKLGYIELWQLEALLLQRDTYMNYSRPLSTASGAQWSQNLGVGGALTITGGGGDGGCGVDGDHPGPPRERRRSWGVRKAAARVRVAAEENWRRAWVLALWFAAMAALFVWKFVQYRRMAAFQVMGYCLPTAKGAAETLKLNMALVLLPVCRNTLTWLRSSWARFFVPFDDNITFHKMIATAIVVGITLHAGNHLACDFPRVIAASPEEYALVAGAFGADKPTYAGLLSGTEGVTGVAMVVLMTVSFTLATHPFRKGEPKGAGAAAGTSRLPAPLNRLTGFNAFWYSHHLLGIVYALLLAHGYFLFLVRRWYEKTTWMYISVPLLLYVGERMLRALRSNAYTVKILKVCLLPGNVLTITMSKPYGFRYRSGQYIFLQCPIISPFEWHPFSITSAPGDDYLSVHIRTNGDWTQELKRIFVENYFSPHLNRRASFSELACQNYS

SEQ ID NO: 49518 - protein, 183 aa, Zea Mays
MDATLLLLPANCTAAASGRMRPRLPAGPHVASPGPSARPRTSIRASAVSAALAVRGLPQHASVAGQSTGSYRVGDVMTKREELHVVKPTTSVDDALEMLVKHRISGFPVIDDDWNLVGVVSDYDLLALDTISGAGPAEADIFPEVDSTWKECWWGGFLMSLACSPPRKKIFVAVAVQLLIVAD

SEQ ID NO: 49519 - protein, 432 aa, Zea Mays
MANRGLKPGIVTYNSVLKGLCKHRRFDKAKEVFRTMDQCSVAPDVRSFNILIGGFCRVGEVKEAVKFYKEMQHRYVTPDVVSFSCLIGLFSRRGEMDHAGAYLREMKGLGLVPDGVIYTMVIGGFCRAGSMSEALRVRDEMVGFGCLPDVVTYNTLLNGLCKQHRLLDAEKLLNEMEERGVTPDLCTFTTLIHGYCRQGNFENALQLFDTLLRQRLRPDVVTYNSLIDGMCRKGDLAKANELWDDMHAREILPNHITYSILIDSHCEKGQVEDAFGFLDEMVKKGNLPNIRTYNSIIKGYCRSGNVKKGQQFLQKMRQDNVFPDLITFNTLIHGYIKEENMHGAFNVFNIMEKEMVRPDAVTYNMIINGFSEQGNMQDAGRVFKGMGDSGIEPDRYTYMSLINGHVTAGNSKQAFQLHDEMIHRGFAPDDKF

SEQ ID NO: 49520 - protein, 260 aa, Zea Mays
MALPELGQEKGYLSESVFTFIFISFLLWSFHPFIYHSKRFYTVLLWRRVLAFLVASQFLRIMTFYSTQLPGPNYHCREGSKLATLPPPNNALEVLLINFPRGVLFGCGDLIFSSHMIFTLVFVRTYHKYGSNRLIKLLSWFMAVIQSLLIIASRKHYTVDVVVAWYTVNLVVFFVDNKLPEMADRTNGLSLLPVSTKDKDGRMKEELHKLEKDGRMMDEFHKLLNGNSIDATDWRQRVQMNGKHGEDTSHTVADATSAGT

SEQ ID NO: 49521 - protein, 463 aa, Zea Mays
MDPANSSAGAELDDASEWRTRALGGTEYSWLRAVPGGTGTTLLALRLSRGDAAEAALRSLRDAHPVLRARLRTSSPSGPTLAFPDPAPPFPLAPLPAPGSAPDFHALLEHELNRNPWADDPASSDDAPVLFATLYELPAATGDAALFVRIHTVACDRSAASALARELVALLAGAGGEEPDPEDAAAEAGLEARIPQRDTWKPFWARGLDMVGYSINGLRTSTLPFVETGTERSTQMLRLGLGLDETTRLLDACKENGVRLCSAVAAATMLAARQSKPLESGQQETYSVVTLINCRKFLEPVLEDRNVGFFYSAITNTHTIHGGEGLWELAKRCHDSYTSAKSNKKHLTDINDLNFLMCRAIENPQLTTAGALRTALVSVFEDPVVADVAEVQSKAGVEDCVCCATVHGIGPSIGVFDSIKDGKLDWACVYPSPLHSRKQVQEIFDKLLIHRDCSQFNFCMLGS

SEQ ID NO: 49522 - protein, 569 aa, Zea Mays
MGSVPEEKAKLGFGGLVGDLREVYESGRTQGLEWRQSQLRGLVRLLEEKEEEIFDVLHEDLGKHRGEAFRDEVGVLKKSVVDKLQNLKNWAAPEKAHTPLVAFPATALVVPEPLGVVLVFSCWNLPIGLALEPLSGALAAGNAVVVKPSELAPATSAFLAANIPKYLDSKAVKVVEGGPEVGEKLMEHRWDKVLFTGSSRVGRLIMAQAAKHLTPVALELGSKCPCIVDWLDSDRDSQVAVNRIIGAKWSTCSGQACIAIDYLLVEEEFAPILIEMLKSTLERFFTKPEYMARILNEKQFQRLSGFLADRRVASSVVHGGHFNPKTLSMEPTLLLNPPLDSDIMTEEIFGPLLPIITVKKIEDSIKFLRSKPKPLAIYAFTRNEKLKQRIIDETSSGSITFNDAIVQTFCSSMAWTASRSVAWGTAGSASTTASTRLTCSATRRRCSRGASSSSSCSATRRGTRPRSECSGASTASTTSRSSSRSSASGDEADGGECVNNRANRICTHTQHTVASGQLSFILIDEYVIVPSVHQNVCSVVYSFYTCLSIYRTKRYLIIMDYYLSSLCSS

SEQ ID NO: 49523 - protein, 954 aa, Zea Mays
MAEKSPSSAPQGGSGGNESFDNLVIQAPQLMREDYIQNAVKFLSHPKVKGSPVFHRRSFLEKKGLTSEEIDEAFCRVPDPKPNGTDAVAAGRQQANNPSQSVVLQPYTEVQPQAATASATAGPIVPHTKAQLSWVNTLLGAGLFLGLGASAAITLKKLVIPSLKSWTRRVVAEGDENAKSEHTSKLCEEIREAIKVSASAFSDIAKINQEVLASKDEDRKVLMKLTEAFESQENVFKSLSETLNRIRENQLSDCNFRNFGLLNSALITLLPKLEGAALVKDFRPISLIHSFAKLVTKMMANRLAGHLGAMVSPNQTAFIKKRFILDNFILVQRTARYLHQQRQARILFKLDISKAFDSVSWPFLIEVLRKMGFGQIWCDVVCGLLASSSTRILLNGVPGEIISHQRGLRQGDPLSPLLFILVMDVLNLLIQKASDEGLLQQLSSGTLHHRLSLYADDAVVFLRPVASDISLVLEILRLFGEASGLKTNVLKSSVFPIRCTEDDLMRVQASLPCPISDFPCQYLGLPLSLGKLSKAQLQALVDKAASVLPGWKADLMTKAGRAVYVQFVLTAKMIYAAMALDLPIWTIKAIDKIRRGFLWKGRKQANGGHCLVAWGKVTRPKVLGGLGITDLWLLSVALRARWPWLQRTDHSKPWSVLPVQACGAVEALINVAVVSQLGDGQDILFWKDRWLNGRRISEVAPEVLEHVPKCVVSKRLVKDALTNLNWVADIRGALSVRALAQVLDLCDLLEGLVLQPGIPDKHSWKFSASGDYSSSSAYQVLLLGAVEFRPAERIWKTWAPRKCKFFMWLVVHDRCWTADRLAKRGMDHPVCCPLCDQADETINHLLVECSFAKQFWFLFLRSGDFQVLCPSTGDGCFDSWWEKSAEVVGKPLSGGFNSLVILGAWSIWKHRNRCVFDGCSPNVEVALSAAREELMCWRLAGAKTLSFFHLEELS

SEQ ID NO: 49524 - protein, 450 aa, Zea Mays
MYFSKKPYNVFLEYGGYGHNDVLIRKPKARLLKPAFTIVRDRSSQCFLLFIRGAISVKERLTAATGTEVPFHHVVVQEGRVSNLVLGYAHCGMVVAARWIARQAIPGLSKAIEQFPEYEVKVIGHSMGAGIATILTYILRENEKLSSSTCIAFGPAACMTWDLAESGKDFVTTIVNRNDLVPSLGIVSAAKLRIEVMSSSWAHDLGRQIQQTRFLGFVNRSVSFIRSHVPFVSDPRSKVVDVDMLQSQSPEAGSKPSADTHAVVKKRPALVCWSYVATPNPKQSMESSIQMQGTEVQTDTAVETEKNSEAAAAELVSIHLGELNIQESDKDDDKRGEKGSETDEEETMEILESLADEKHMPSSSSFAQEPQQLYPPGKILHMVGLAAAEVATTSQQGAQEEVVALYETPRHLYSKIRLARSMIGEHYMPKYIKTMEKLIHKLAEDQLDSL

SEQ ID NO: 49525 - protein, 341 aa, Zea Mays
MQPLHQPPMNGQHGPPPPQGSGVPTASQQQAPPPSYYQQQQQQQQGPPPQYYQQGPPQPWAQQQQYAPPPPQYPPQMQQYAPPPQQYAPPPQQQYAAPPQQQYAAPPPQYAPPPPQYAPPPQQYAQPPQYAQPPQYGTTPGSGEVRTLWIGDLQYWMDENYLHYNAFAPVAQQIASVKIIRNKQTGHSEGYGFIEFYSQAAAEHTLMNFNGQMMPNIEMAFKLNWASASTGDKRGDNGSDHAIFVGDLAPDVTDSMLEDVFRANYPSVRGAKVVVDRITGRPKGYGFVHFGDLNEQARAMTEMNGMMLSTRKMRIGAAASKKNTDAQQTYATNAGCHAICI

SEQ ID NO: 49526 - protein, 410 aa, Zea Mays
MEEAPTREPKRLRQDAAVTSAAAAAEEPQYVYLPIADAMKVPGVRVCLFAVVSEIGITDRSRGTDFTLRLRIVDQSCMDGISVTVFADKTTLLPCVKSSGDVISLHNVMITMHGEFFVSFNKEVSSFALFESKVAECSPYQTSVKYHGSKHDKELLTQMRTWLAYNPLGLKDFELQLRSLKSDSTFDLVCKVVHVHEDNDKLIFYVWDGTDTPAVEFQATLDPKAVESPPLFEGPPLPREVLCTMPIIGTVLRIFSDMPIKEVSHMQNRVYWARFCNITCKEEFGIWKGILLASSKVRLLSHEDGSVVDRRKMYAIRKANQVLCQPMASFPSNVTVLSDVEYEEEWHSTLMQSLTHKEVTHKLKTLARVVGAYPCQASGLRLLSTGNIHLRLTLEDPTARIHASNSSVVF

SEQ ID NO: 49527 - protein, 126 aa, Zea Mays
MTPCRSLPLLLLTLMVASLSSGALTTKTTLCSLTMLGSSRQAAATRTLHFLKVASTPPPVGCRASSTRCTRSRRCHAWTAKARCAAPSSRSTARARRSRTLASPASAVLPTGPTSSDHLLAIHCPG

SEQ ID NO: 49528 - protein, 249 aa, Zea Mays
MLGESQNFKNLIQRAFCPQYQPVTRKTTKSDLIAIYKNKLAALKESFKKVQFSFALTSDIWTSSHQKTCYVSVVAHYLDDSYALNKRVIGFRMMDESHTGDAIANHILEVVRDFEIDGKILSITLDNASANTTAIDILTPRLQSYIQGYIIHHRCVCHIINLVVQAGITVANKYLNNIRAAIRFITSTPQMISRFAEYCKAQDMRPRKFGLDMKIRWNSTYHMLKSLEGYEQLITVFVNANGGKVSKIL

SEQ ID NO: 49529 - protein, 76 aa, Zea Mays
MVPFHSKQAVQVGKTCSISSSSRLPDHLTPWWERRRHTQTRGFPSPPPARVHRRHFDSEPEILARNWQGSAAHPHI

SEQ ID NO: 49530 - protein, 554 aa, Zea Mays
MTSTTPGTFGTLANSGPVALSFPTTTSFASFLGGGSSPSRIMDSGGGVGLSKFKAMTPPSLPLSSSCPPPPQSYLHAFSGLLDSPILLTPSLFPSPTTGAIPSEPFNWMGTAENDLSGSGVEAEQRQQYTDFAFQTAAAATSTIITGAAHTASFPQSSVLMPPSGRVGDSYSGEMLQQQPWTYQEPTAQFEAPAAQAGNMFGTGGGYGAAPGFREQRQSHRPSSDDGYNWRKYGQKQMKGSENPRSYYKCSFPGCPTKKKVEQSPDGQVTEIVYKGTHNHPKPQSTRRGASSAPASYVVQSASDAVMPEHSWGALSGTPVVTPENSSGSFGGDGDEVNGMSSRLGGSFGADDLDDDEPDSKRWRKDGGDADAAGCSVSVASNNRTVREPRVVVQTMSDIDVLDDGYRWRKYGQKVVKGNPNPRSYYKCTGAGCLVRKHVERACHDTCAVVTTYEGKHNHDVPPARGSASLYRAALAAQMPPQQAASYQGAPMPAAERGSFALSGFGDPVGTAYSYYTNHHQEQEQQQQQPNQAMRYAKDEPQDCMSFFEQQLLF

SEQ ID NO: 49531 - protein, 480 aa, Zea Mays
MAAAAAAAVAHLSIHGRLRRSPEHRPSITTTTTSSSSSSAHRPSLLRCRAFKQEAGDGDPAEADARKRRKGPLYKLKAAIQGLAGSRSAAAEVYGGEYQYQRAVEKAEEIFFSVTTQLGRYVITMMSSGVVLGVGFQLSGGDSQMNELIWYSWLGGVIIGTMIGANSVLEEHCKAGPRNVVITGSTRGLGKALAREFLLSGDRVVITSRSPESVLQTIKELEENIQEGLSVAKKKQRNILSHAKINNAGTNKGFRPLVTFSDDDITQIVSTNLVGSLLCTREAMNVMQYQEKGGHIFNMDGAGSGGSSTPLTAVYGSTKCGLKQFQGSLLNESRRSKVGVHTASPGMVLTDLLLSGSSLRNKQMFNLICELPETVARTLVPRMRVVKGSGKAINYLTPPRILLALVTAWVRRGRWFDDEGRAVYAAEADRIRNWAESRARFSFTDAMEMYTENTWVSVFSLSVVCAFIILSSSGGPLPGT

SEQ ID NO: 49532 - protein, 471 aa, Zea Mays
MSTSPPPATSPPGAPPNGTASPTAAPPPPLPPAPSNSSSPTPATPTGAPPTAPAPPSTDSPAPPGTPPAPVSPNAAALPAPGRATPASASPPTPSSSGSGLTTSVVVGIAVGGFAVLLLGCLFCLCLFRSNKRSRRRHRHHPPPPPPPHLLHYYGHPPPPPPPPHKGDQHQSWQHNAPPPPPDHVIKINSHPTLPPPPHNVHSSGSASNHSGGESRPALSPGTALSFSRSTFTYEQLMTATNGFSDANLLGQGGFGFVHKGVLPDGTEVAVKQLRDGSGQGEREFQAEVEIISRVHHKHLVSLVGYCISGAHRLLVYEFVPNNTLEFHLHGRGRPTLDWPTRLKIALGSAKGLAYLHEDCHPKIIHRDIKASNILLDLRFEAKVADFGLAKFTSDANTHVSTRVMGTFGYLAPEYAASGKLTEKSDVFSFGVMLLELITGRRPVNSRQADDNLVDWVSCAWRSKASDDKSI

SEQ ID NO: 49533 - protein, 222 aa, Zea Mays
MFSPEEEETVMSLHATLGNKWSRIARHLPGRTDNEVKNYWNSYLKKRVEGKDQGPSTPAPAASNSDDDSHCVKQRRDDDGTADSGASEPRESSSADDSSCLTDPHACRPHAPVPPKVMFADWLDMDYVGGALPATAPAAPGLLGAAGVATASTGDRDQHQVMSMSQGSVQVDGPSGADVSLHGFDDSGAGCWEFQEHFDAIDHMQAAGFCDLLSMSDYFGLD

SEQ ID NO: 49534 - protein, 197 aa, Zea Mays
MFSATFPVTVKEFKDKYLPKPYVINLMDELTLKGITQFYAFVEERQKVHCLNTLFSKLQINQSIIFCNSVNRVELLAKKITELGYSCFYIHAKMLQDHRNRVFHDFRNGACRNLVCTDLFTRGIDIQAVNVVINFDFPKNSETYLHRVGRSGRFGHLGLAVNLITYEDRFNLYRIEQELGTEIKSIPPQIDQAIYCQ

SEQ ID NO: 49535 - protein, 160 aa, Zea Mays
MAQQLPPRIPTEVHHWPEGGQHGAAAAWADDFAEFAAARRGAHRRSLSDSVAFVEVAPADGGAGEFDRLDDDQLLSMFPPDEAGGGGSSAAGSENGGSSDSDGDKRGARGGPAGGAPSTGSGGGEQNGVVDAQAPAATGGQAAVVASTELIRDPKRVKRR

SEQ ID NO: 49536 - protein, 547 aa, Zea Mays
MATTAHPALPLLIVLACAGAASGFYLPGVAPADFRKNDLLAVKVNQLSSIKTQLPYSYYSLPFCRPDTIVNSAENLGQVLRGDRIENSPYVFEMMEPKLCQIACKVVLTEQGAKDIMEKIHDEYRVNMILDNLPMVVPIERLDRDAPPFYQQGVHVGVKGHYAGESSIQWSSRWDTYLRTPDDHWFSIVNSLTTVLFLSVMVAMIMLRTLYRDISKYNQLEDQEEAQEESGWKLLHGDVFRPPANADLLCVYVGTGVQFFGMLLVTLLIAILGLLSPSNRGGFMTAMILLWVFMGLLAGYSIARLHKMFGGLEWEKVAIKTVLVFPGVVFVIFFALNRLLWGVKSSGAVPFTTMLALVFLWLGISMPLIFVGSYLGFRKPAIQGPVRTNKIPRLIPQQPWYMNPAVSVLVGGILPFGAVFMELFFILTTIWMHQFYYIFGFLFLVFVILIVTCAEITIVLCYFQLCSEDYQWWWRSYLTPGSSALYLFLYAAFYFFTKLQITKAVSGVLYFGYMLIAAYAFFVLTGTIGFYACFWFTRLIYSSVKID

SEQ ID NO: 49537 - protein, 334 aa, Zea Mays
MHNMGVPIQPVNLAINASSRHHPTEDPEVQEVYRSQVSNNKGKKKVAQRGKSFTKEEDRAICSAFLHVSTDPIVGTNQSASGYYTRMHRHFMENIGVGSNRTKVSIENRWTTIQKAVNKFCGFFAAIERRNESGKNEQDRINDDIRMYEGTEPWQFHHCWVILRGEPKWHEKMAESNTSQKVNQKHSLNDSEIEINSMHTNSAIPERPEGRDNAKKRCRVMADTSSSSTAVEMLQKMHERGEKNDEKEDQLRQEMFQMERERLELQKLNWEKKWAIMESNAKLRQNEYELNQWNADLLVMSQDLDKLAPPLRAMYEQKQMEIMKRRGINTPSAS

SEQ ID NO: 49538 - protein, 751 aa, Zea Mays
MIFKRSQRSEILAPRRCNAADSGGEDEGGGGPRPRKRRRGDEFFPVDLLGDVPASSIPYAAFGLRWSEAPEAPPEAAQPPPAARPPVVRSSRGRTLVLPSRFNDSVLTDPWKKEKPARPPPPVKTEHLARRNELLHKKGANFDSSVALSEVDDDDEEEAMVERYRARRSFGASRKHLASWSTLTSVHDEPYSNHHRKEVKLRHYYEEDEEEEEEKEDIFHCTEELVYGDIVWAKLGKRQPMWPGVVVDPTQQAAADAMPPQPRGVAVLCVMLFGWRTEFSGEKKYVWVRQGLIFPFSDYMNRFQGQTELSSCKPADFRRAVEEAFLADQGFSEVVVHCSTKGQSVVCHSFPDDLHEVTGSNELEYQPQIKQCRRVLQCESCGNCFPNKDTNKMVYVMEQLACRLCARILALKKYCGICLKNLQHKYGGRRVCCHGCESWVHAECDENCSNLKDLQDKKYHCPYCRVKMNSTLPGKNTKISDVRKDSSAQKGSKPDKVALVCFDMEGTYEPDLELISCHCGPCKGQKFLFNEWERHAGCRSKNWRSSIKLKGSLMPFGKWIDRHQPGVCPTNPPKRSSQKMKKQKLIDLLNDPYDPVNVKWTTERCAVCRWVEDWDYNKIVICNRCQIAVHQECYGVRGKQDFTSWVCRACEKPEQKRECCLCPVKGGALKPTNVDNLWVHVTCAWFQSQVAFASDELMEPAIGILNIQPLLFMKMCVICKQIHGSCTQCYRCSTYYHAICASRAGYRMEIC

SEQ ID NO: 49539 - protein, 256 aa, Zea Mays
MLMHATEVHYQCPKRVRVQSDVSERIANGTSVHVNTHVQNLNLDIEEQSHKHSISHIEEPNTNNSEGSLAGAAVWDVFRRQDLPKLNEYLAVHREECAARCQAVSSVKYPIYDQTVYLNDYHKKMLKDQYEGLKTIEQITMDSASVETNMFKLCKVRFVQFGQKGIPYLNTYDGRAIRYLDPLIKANDTIKIDLETNKIMDFIKFDVDNMVMVTGGRNTERVGVIKNREKHKGSFCCLELFAMSSFLLFVVQENLE

SEQ ID NO: 49540 - protein, 374 aa, Zea Mays
MVRGSLINEAVNGDISGEGISSIGSELENVPSTVSTNEIGGSTSESGLGPSSMTSERIMSDSEVEISPQGTSSTTVMTSERSDASQSSLTSVFSNSSTASSVIVEPMPDPIPTTADVPIFSGPHGEAGGSILHDDMMSIFSNDGVGRSIDSSSSETRRSHRRILWDAFSRRGSRGYPESDADEMGFFSTWLDLGDDIFEELGESRYFHRRRHGSIRIREHRRAVFDSGNEQNTAACPLGIHQIGRCTCNSFFIAEESSARASISRIVMLTEALFEVLDEIHRQPASLSLSMVSVQAPESVVDSLPCKSYKKLETPQCSDDMEQCHICLTEYEDGDQIRTLPCKHEFHLQCVDKWLKEIHRVCPLCRGDVCEVAS

SEQ ID NO: 49541 - protein, 69 aa, Zea Mays
MEEDEPAAHGGDFDYDEMEKEAPVAAGPSTVAAAGDGKEGFHWMMIYKSCNSARLEWDSQNTMKLSLHI

SEQ ID NO: 49542 - protein, 424 aa, Zea Mays
MAGEKRKEAEMIELEGSLGKSNAVNQELVALEKELSTHRRTGSIDSFGLYLYGIVLRDKGCEGLARTILVESVNTYPWNWSAWSELQSLCTSSDILNNLNLKNHWMKDFFLASAYLELKMHEEALKRYERLMGVFRCSGYIQAQIATVQYSMRDLDEAEMIFEELLRTDPFRVDSMDIYSNLLYAKESLTALSFLAHRVFLTDKYRPESCCIIANYYSLKGQHEKSVLYFQRALKLNRKYLSAWTLMGHEYVELKNSPAAIDAYRRAVDINPRDFRALYGLGQIYEMMGMPFYALYYFRKSSYLQPNDARLWIAMAQCYESDPLQMIEEAIKCYERAANSNDTEGIALHQLAKLHGMLGQSEEAAFYYKKDLERMEVEERQGQNFVEALLFLAKHYKSIGRFEDAEHYCTRLLDYTGPVREGDC

SEQ ID NO: 49543 - protein, 340 aa, Zea Mays
MDWSTRFRIRNPSPAASHFAGHRRSQADRVFLRTMASAAPVEEPTAAAEAKGRLTGDSFIRRHLRTLAPYQPILPFEVLSARLGRRPEDIIKLDANENPYGPPPEVAAALGSLKFPYVYPDPESRQLRAALAEDSGLESDYILAGCGADELIDLIMRCVLEPGDKIVDCPPTFTMYEFDASVNGALVIKVPRLPDFSLDVDLIVEVVEQEMPKCIFLTSPNNPDGSVINDEDLLKILDLPILVVLDEAYIEFSSLQSRMAWVKKHDNLIVLRTFSKRAGLAGLRVGYGAFPLSIIEYLWRAKQPYNVSVAAEVSACAALQNPTYLEKGRGCLIFSREYHS

SEQ ID NO: 49544 - protein, 406 aa, Zea Mays
MVLAVRDRGDSYAVYASNHPKQQYTNPSPDGAIWNKMVSVPSYYGDTTGAAAVGGSPQTYGPWGGSGGTIFDDGVYTGVWQINLTRAVGISSIKVLYDRNGQAVWGNKHGFSSGVIPDKIIFDFPSEVLTHITGFYDSAIIMGPTVVRSLTFHTNKRTYGPYGDEYGTYFSTSFTNGRIVGFHGREGWYIDGIGVHVQEGKVAQQRFVSRPKTPTSPLVHYNMLAQAPSATYTDGEVAYGMVKEPVPMGPGPWGGEGGRAWDDGVYTGVKQIYVMRGAFIGSIQIEYDRSGHSIWSSRHGNSGHITHRVKLDFPHEVLTCVYGYYNTSKEDGPRVLRSLTFLTNRGKYGPFGDEFGAYFSSATTEGKVVGFHGRSGQHLDAIGVHMQHWLGDRRPAPKYVLSKYLF

SEQ ID NO: 49545 - protein, 297 aa, Zea Mays
MVWFQCEDCGENLKKPKLAGHFRSCSAYKLSCIDCGELFSHDTVQGHTQCISEAEKYGPKGQTKPSNGAQGKADKPKPNADVDINVGLSTRPPWFCSLCKTTTTSKQTLLLHADGKKHRAKAKAFHVSQKQKDGAEQTPDVKEAGVVPTKESAQVNGGVSGDHERNEDKDAGKRKRMDDMTIEPGNTKRQLTQSGDEKSENKAKSKADELASGTDCKSVQKQKIKWKKIITKTLKNADGVMKLKKLQKLVSKELQECGVSKDKEELRATLMDKIASSSRFYVDGKNVRLVAKNEEES

SEQ ID NO: 49546 - protein, 311 aa, Zea Mays
MASMQSWRKAYGAIKDTTTVSIANLNSDFKDLDVAIVKATNHVECPPKERHLRRVVAATSITRPRADVAYCIHALARRLAKTRNWIVALKALVVIHRLLREGDPTFREELLNFTQRGRILQLSNFKDDSSPIAWDCSAWVRTYGLYLEERLECFRVLKYDVEAERLSKQGQGPEKGHSRTRELDSQDLLEQLPALQQLLYRLVGCRPEGAANNNYLVQYALALVLKESFKIYCAINDGIINLVDKFFEMPRHDALKALEIYRRAGQQAGNLSDFYENCRGLELARNFQFPTLREVRACTLSSLRYVHWIML

SEQ ID NO: 49547 - protein, 174 aa, Zea Mays
MAVGCFNPVLSPLVPSPPGRRVRAALRCRWHRHPLTAVSLRRLPCGAAAGRGTRRLAAAAESQAVQEQPARAEEAGGAGAAEASSKLVLVVGGTGGVGQLVVASLLSRNIKSRLLLRDPEKASSLFGKQDESVLQVYKADTRNPNDLDPQMFEGVSFIGSYACDMLYWNYSISV
